United States Patent Application Publication US 2004/0031072 A1 - sequence listing, part 34

SEQ ID NO: 176981 - protein, 80 aa, Glycine max
  Clone ID: PAT_MRT3847_130830C.1.pep
MGLFRKGKTLNNKVSSFSMMFSSLKTLHPSLLKSHSLLSQPPFPATQALHLMCLYFIVLNILSSRQTQYRYRQIRATIQD

SEQ ID NO: 176982 - protein, 211 aa, Glycine max
  Clone ID: PAT_MRT3847_130831C.1.pep
MKLFAHFFFMLLFLVAFSNIQVCLGDCDNLQDTCPAVPPNKQTIFINGLQCKNPVNVTAQDFRTTELSKTGPRDIFGASLKIVSAAEFIGLNTLGLSIGRIDLDGNGLVNFHYHPRATEIIFVTKGVLLAGFVDTKNQFFQKFLKVGDVFVFPKALFHFCLNTGFEESTVFSVYNSQNPGFVSLSPTTFDTTLESLDKIKKRLMSLSASEA

SEQ ID NO: 176983 - protein, 150 aa, Glycine max
  unsure (1)..(150): unsure at all Xaa locations
  Clone ID: PAT_MRT3847_130832C.1.pep
VHPYVATGNKNSXKFGIRNEKLQWFLDAVKEHPNELKLVGAHCHLGSTILQVDIFREPAIIMVNYIDQIQAQGFQVDCLNIGGGLGFEPHLPGAGLPSPRDLXSHIELVSPAPADAEIAKFDVLGPVCESADFFGKDRQLPTPAKVKIFP

SEQ ID NO: 176984 - protein, 71 aa, Glycine max
  Clone ID: PAT_MRT3847_130833C.1.pep
SNTTSRRRAPSDDRHIRQEVWFNSRCRMDFFHYLLDTPVSSQTNHPCPPFASGSLYIAWKRPSFFGCLALY

SEQ ID NO: 176985 - protein, 63 aa, Glycine max
  Clone ID: PAT_MRT3847_130834C.1.pep
RLPFLPSRMEYSSIPCLDLSQKYIALHHFHLAHFGIWHSNIYRPFHSLVLATQVHELFQIIRV

SEQ ID NO: 176986 - protein, 522 aa, Glycine max
  Clone ID: PAT_MRT3847_130835C.1.pep
PCVRFLLAQIDGKFLVSLGEIFENASKGVVTEETTFIIQRVNAGLGLCLTTRPYGCEKTTEGVVEKTLDFLFHVSVLKHLDLCIQSLLLNRRGKTFGWQHEEEDYMHLSRMLSSHFRSRWLSVKVKSKSVDGSSSSGIKTSPKVGACLETIYEDSARVRPRVRGRVGLMIEWAHQKLPLPVHFYLSPISTIFHSKRAGTKKVDDVLHDPSYLIEVAKCGLFFVLGVEAMSIFHGTDIPSPVEQVSLTWKLHSLSVNFLVGMEILEQDRSRVTFEALQDLYGELLDNARLNQSKEVISDDKKHLEFLRFQTEIHESYSTFLEELVEQFSAVSYGDVIFGRQVSLYLHRCVETSIRLAAWNTLSNSRVLELLPPLEKCFSGAEGYLEPAEDNEAILEAYTNLWVSDALDRAAIRGSVAYTLVVHHLSSFIFHACPTDKLLLRNRLARSLLRDYAGKQQHEGMLLNLIHHNKPPPSVMGEELNGGVLSERNWLESRLKVLVEACEGNSSLLIVVEKLKAVVKKSS

SEQ ID NO: 176987 - protein, 87 aa, Glycine max
  unsure (1)..(87): unsure at all Xaa locations
  Clone ID: PAT_MRT3847_130836C.1.pep
HCLKHKGRRKPRFVELRHGEQQWEREHGACATVRGGQMYCHGYGVPXMGRIWLTKVSRVRSSVWKVGGKRPGYNASDSESDELEEDS

SEQ ID NO: 176988 - protein, 74 aa, Glycine max
  Clone ID: PAT_MRT3847_130837C.1.pep
TYKTSQGLTKAIARLLLKNVQQGAATTRYVALHPQVKEISGKYFSASSVAKTTSQGTDADLAKKLRDFSMNLTK

SEQ ID NO: 176989 - protein, 151 aa, Glycine max
  Clone ID: PAT_MRT3847_130838C.1.pep
AKNHTKHNRGGTTITKGMRTNVGDIVQVEGGHIVRSTGRKDRHSKVYTSKGPRDRRVRLSAHTAIEFYDVQDRLGYDRPSKAVDWLIKKAKTSIDKLAELPPWHPPTNHEEEEQNDAAGSSGVIAIEQQQQQQQQQQQQQQQQQQQQQHQQ

SEQ ID NO: 176990 - protein, 159 aa, Glycine max
  Clone ID: PAT_MRT3847_130839C.1.pep
ARDRLQRVIPYVIVMLSDSAAIVRCAALETLCDILPLVRDFPPSDAKIFPEYILPMLSMLPDDPEESVRICYASNIAKLALTAYGFLIHSICLSEAGVLDELSSPQKPLTSSTHSSGRLKRINGDAQLLQLKKSIAEVVQELVMGPKQTPNIRRALLQD

SEQ ID NO: 176991 - protein, 115 aa, Glycine max
  unsure (1)..(115): unsure at all Xaa locations
  Clone ID: PAT_MRT3847_13083C.1.pep
XXXGCXXVFYEELXXKXQYGWHLPESEFEKFSVFXXKEEVVFRGMRILDVLQRIPRTRVRRMREKVLELIPSVLYRKHNSSPGLKTKKDAVDLAIDGTLDKIRSRLRDLHLDFVM

SEQ ID NO: 176992 - protein, 254 aa, Glycine max
  unsure (1)..(254): unsure at all Xaa locations
  Clone ID: PAT_MRT3847_130840C.1.pep
MAMLPLTNPTPIRHNALSSSSFVQRKCVSLIPRIRTCDSEPQRRRFASVTCCSFSTLDSAKIKVVGVGXGGNNAVNRMIGCGLHGVEFYAINTDAQALLHSSAENPIKIGELLTRGLGTGGNPLLGEQAAEESKDAIADALKGSDLVFITAGMGGGTGSGAAPVVAQISKEAGYLTVGVVTYPFSFEGRKRSLQAGVLFSRYLGMWLLKVLLLINITFFLYYVEKYHLSSSSFAVYFILVTSVFGNSFFDIVLK

SEQ ID NO: 176993 - protein, 425 aa, Glycine max
  unsure (1)..(425): unsure at all Xaa locations
  Clone ID: PAT_MRT3847_130841C.1.pep
MAMLHPLTNPNANELLSLSCSSIFHHNALTTSVSLNPRTTKIAPQRLSRRFGSVRCSYAYVDNAKIKVVGIGGGGNNAVNRMIGSGLQGVDFYAINTDAQALLNSAAENPIKIGEVLTRGLGTGGNPLLGEQAAEESRDAIADALKGSDLVFITAGMGGGTGSGAAPVVAQISKEAGYLTVGVVTYPFSFEGRKRSLQAFEAIERLQKNVDTLIVIPNDRLLDIADEQMPLQDAFRLADDVLRQGVQGISDIITVPGLVNVDFADVKADIIPSPGLVNVDFADVKAVRAEEAAAQATLAPLIGSSRPSAAGGAXLITGGKDIPLQEVNRVSQVVTSLADPSANIIFGAVVDDRYTGEIHVTIIATGFSQSFQKKLLTDPRAAKRLLTLLDRELGGQESKAVSPPLKSSNYPSTVASRASPRKFFF

SEQ ID NO: 176994 - protein, 75 aa, Glycine max
  unsure (1)..(75): unsure at all Xaa locations
  Clone ID: PAT_MRT3847_130842C.1.pep
AKRVISAGGLRKETKVKMSCIGAPYVRXPTLASIALKRPSLQKPDMHNTKLHHAALKTSQLPMYEPRLDGVVKQC

SEQ ID NO: 176995 - protein, 98 aa, Glycine max
  Clone ID: PAT_MRT3847_130843C.1.pep
FGTRAVLHYILSYTRHQHSINFILVFHTIGPKLILCRIIGLLMCFTLIENDLELAVFHYFFFLFLQIDAAAASIKLILSWCLEFERISRKKDTIFYNH

SEQ ID NO: 176996 - protein, 72 aa, Glycine max
  Clone ID: PAT_MRT3847_130844C.1.pep
SYRRAQINKGEKKIAINLAIPVGKGCIGHAWQFMQSYEPVIPFVFEFSNKLKSKIRKLNMVIKLKYIYKKRE

SEQ ID NO: 176997 - protein, 110 aa, Glycine max
  unsure (1)..(110): unsure at all Xaa locations
  Clone ID: PAT_MRT3847_130845C.1.pep
MMNAATAANSSVYSQTQCRLLSSDLRSSIPFLNERKSRLVVRAGGRPPQNMGKDDDEKQQQRVTQQQQQQQQEQQAPXPVSLSLDDVNPVGLGRRSRQLFDEGWRKFSGL

SEQ ID NO: 176998 - protein, 88 aa, Glycine max
  Clone ID: PAT_MRT3847_130846C.1.pep
MKALVCDALKKHGVSYKSGYPLHKGHEKRIHILSQICDLQRIFLAPQDCSDQVSAKRSRGSLYQALLEGWDEFWNKSVAKKVVHMLNG

SEQ ID NO: 176999 - protein, 58 aa, Glycine max
  unsure (1)..(58): unsure at all Xaa locations
  Clone ID: PAT_MRT3847_130847C.1.pep
SNTSFRIHYSHRVSYAXILYNIPLHHYHLIPSPILSNYKPFFFPYFDRPPTALSIVSS

SEQ ID NO: 177000 - protein, 90 aa, Glycine max
  Clone ID: PAT_MRT3847_130848C.1.pep
MDYSSWMINTSLDLNINPHRLHEELPKKEVENNFLSLNLEVKKSSVKQESAGALAEELTRVSAENKKLTEMLTEMCENYNTLRGNLMEYM

SEQ ID NO: 177001 - protein, 152 aa, Glycine max
  Clone ID: PAT_MRT3847_130849C.1.pep
GIDAGWQYFFNSLASATSDTGKSILPKHLCLVANSLSCSGEFVGLNAKGMALQRKHASVSSPFVQACFANPGSCFIKAAKSGVTDNLQGSLDALAWGNCLSMGTSGMFDIIYSEKVAKSGNVYELLKASFDKPNNKAGTHLHKYSSDKCGSE

SEQ ID NO: 177002 - protein, 48 aa, Glycine max
  unsure (1)..(48): unsure at all Xaa locations
  Clone ID: PAT_MRT3847_13084C.1.pep
PSHKTFRIKNKLVTPMRLIRSMPYCIRMTTXSSIRFNAKRRHWRHTKL

SEQ ID NO: 177003 - protein, 95 aa, Glycine max
  Clone ID: PAT_MRT3847_130850C.1.pep
MDYSSWMINTSLDLNINPHRLHEELPKKEVENNFLSLNLEVKKSSVKQESAGALAEELKRVSAENKKLTEMLTEMCENYNTLRGNLMEYMRKDPG

SEQ ID NO: 177004 - protein, 136 aa, Glycine max
  unsure (1)..(136): unsure at all Xaa locations
  Clone ID: PAT_MRT3847_130851C.1.pep
MSSPKSSSSQHEAESMSVFEAIRKAKRLRLFEPSLGVLGFVVVTVFVICCFFYSDNGYLASRVGFFEQPQRFAWLRIEGSTAPPRVEFLGEKGGGCDLFDGEWIWEXEYPLYQSKDCRFLDESFRCSENGRRDLFY

SEQ ID NO: 177005 - protein, 28 aa, Glycine max
  Clone ID: PAT_MRT3847_130852C.1.pep
SLDRILFIACGCFSYIHTHSVPIVMRCI

SEQ ID NO: 177006 - protein, 663 aa, Glycine max
  Clone ID: PAT_MRT3847_130853C.1.pep
MDMSDAVIVKSSRLKSVVWNDFDRIKKGDTCVAVCRHCKKKLSGSSTSGTSHLRNHLIRCQRRSSHGIAQFISARDKRKEGTLAIANFNIDQDSNKDDNTVSLVNIKFEQAQLKEDSVNTGTSNCDQRRSRFDLARMIILHGYPLAMVEHVGFRAFIKNLQPLFELVSLNKVEADCIEIYERERKKVNEMLDKLPGKISLSADVWNAVDDAEYLCLTSNYIDESWQLRRRILNFIRIDPSHTEDMVSEAIMTCLMDWDIDRKLFSMILDSCSTSDKIAVRIGERLLQNRFLYCNGQLFDIRCAANVINTMVQHALGTVREIVNKIRQTIGYIKSSQIILAKFNVMAKEVGILSQKGLFLDNPSQWNSTYSMLEVALEFKDVLILLQENDTAYKVCLSEVEWERVTAVTSYLKLFVEVINVFTKSKYPTANIYFPELCDVKLHLIEWSKNSDEFISSLASRLRSKFDEYWEKCSLGLAVAAMLDPRFKMKLVDYYYPQIFGSMSANRIEEVFDGVKALYNEHSICSPLASHDQGLAWQVGNGSLLLQGSAKDSRDRLMGFDKFLHETTQGEGTKSDLDKYLEEPLFPRNVDFNILNWWRVHTPRYPVLSMMARNVLGIPMSKVAPELAFNHSARVLDRDWSSLNPATVQALVCSQDWIRSELEN

SEQ ID NO: 177007 - protein, 48 aa, Glycine max
  Clone ID: PAT_MRT3847_130854C.1.pep
VNFAHCARCWCVRAAFSDSSHMNLRRYSSLAHAVHPVLSIVNCIRQMS

SEQ ID NO: 177008 - protein, 70 aa, Glycine max
  Clone ID: PAT_MRT3847_130855C.1.pep
GPCPGQGQVRIPLGKGGTGTGPGPGLQVRGQAPGSVQVRVQVRKRRKRGSASPGSGRDRVHGVGVPKQKV

SEQ ID NO: 177009 - protein, 54 aa, Glycine max
  Clone ID: PAT_MRT3847_130856C.1.pep
GSFCCDFPRMNTVANSRFFHLSSPDCSGARCFRLLCVPSGVKLWPNGHSPNSAS

SEQ ID NO: 177010 - protein, 75 aa, Glycine max
  unsure (1)..(75): unsure at all Xaa locations
  Clone ID: PAT_MRT3847_130857C.1.pep
QGYAALIPYAEPVGHAQSAQVYIDFFPAEVDSADGDAHNAELYEGVYEELATKTDVVDTAEDXDVGLPCNKDGHD

SEQ ID NO: 177011 - protein, 162 aa, Glycine max
  unsure (1)..(162): unsure at all Xaa locations
  Clone ID: PAT_MRT3847_130858C.1.pep
GRVIHTXHKGAGSMFNSHTHHHKGPTKFHSLNFNKHNNYLKGIITNIIHNPNHNTPLTKVAFHHPFHYKXQTKLFITTKDLYTKQFIYYNKKATLHNHNILPIQSIPKSTIIYNVEHHMHDHSIFTKTCDNYTIIISHNPNNDTSXSNLPSIRRKIYPSAKR

SEQ ID NO: 177012 - protein, 72 aa, Glycine max
  Clone ID: PAT_MRT3847_130859C.1.pep
KNITFYGFFFSKEARFLKVVYVIWLGGFSFCLSGHGPFMLSRAFILSGKKRGINMVFVISVGVERAHPQKKN

SEQ ID NO: 177013 - protein, 52 aa, Glycine max
  Clone ID: PAT_MRT3847_13085C.1.pep
RILLIIGGIATIAFVAYSQDWDLEALSDSPKDGNVTHLAIHTTRETNRANHR

SEQ ID NO: 177014 - protein, 67 aa, Glycine max
  Clone ID: PAT_MRT3847_130860C.1.pep
PPLLLPPPHLVVSNSQGLPILWPFLSISPVTFVVLPAPRPLRSIGPPPPPPPSRCYCYTCSTANSLG

SEQ ID NO: 177015 - protein, 138 aa, Glycine max
  unsure (1)..(138): unsure at all Xaa locations
  Clone ID: PAT_MRT3847_130861C.1.pep
LLNKCLTYMKHMLDEGASVXHLVLALHSDNIFAQXITKILLLRVKTFKDAVQPVHXDNXLTNHNPXDIYVSLYKYHDDLTALARRVKLHIVICRDEXIPRCIQILYTRATNTASITDGPDVMKTALAERLSQRIVPAD

SEQ ID NO: 177016 - protein, 100 aa, Glycine max
  Clone ID: PAT_MRT3847_130862C.1.pep
GPPESFNSLFCWRGAFCPHRSGGVIECFHAPFLIIKLLGESFMKRGIFFPFGAYFYVAPLSIKNDQFFAFNWGLKTQAFFLNRPFVKYVVSLVLETWPFW

SEQ ID NO: 177017 - protein, 66 aa, Glycine max
  Clone ID: PAT_MRT3847_130863C.1.pep
CYPESLDRDRISLNLTSSPSSNRRVFSKLSKSGKVIYSLCLCPAQRVFFFPFRNRSQISRKNFRHS

SEQ ID NO: 177018 - protein, 210 aa, Glycine max
  Clone ID: PAT_MRT3847_130864C.1.pep
KKIKLNMGEGIKNQVFKEKKPSRETFVCGACGKAGHMRTNKNCPKYGEDLETQLESADMEKSSGKSSFVDPSSLSQHKAPSKKSMSKSATKVAPVDNSTKIPCVRKCSSTEKSSDKPAVETLQSSDKPVTSDSETAKSAKVNKIIIPKKVKPDDTLAESRKHAIVIRPPTDSGRGQVDSHKFPIKIRPPTEIDREQSHKKIVIKAYKGSY

SEQ ID NO: 177019 - protein, 56 aa, Glycine max
  unsure (1)..(56): unsure at all Xaa locations
  Clone ID: PAT_MRT3847_130865C.1.pep
ASRPHMKTTAHHTQTWARNTQASDXNPMPTVYDALTPVTPDYTLFIPADASSATVS

SEQ ID NO: 177020 - protein, 40 aa, Glycine max
  Clone ID: PAT_MRT3847_130866C.1.pep
CILTTSKYHLHTGRGIQKIIQGTYDQIKNIRSKMFIGYYQ

SEQ ID NO: 177021 - protein, 130 aa, Glycine max
  Clone ID: PAT_MRT3847_130867C.1.pep
VGESNREMPLSELKSKYRKISSLEKAQSGWEEEYEVSSKQCMHGPNCKIGNFCTVGRRLQEVNVLGGLILPVWGAVEKALSKQARLSHRRLRVVRIETTVDTQRIVGLLVPNAAVETVLQGLAWVQEIDD

SEQ ID NO: 177022 - protein, 86 aa, Glycine max
  Clone ID: PAT_MRT3847_130868C.1.pep
ALLNFLLTKFKFRYHLWQLIALPPIWVSMNVNLQFFGRRLNIGGNFLTRMTHSFSTPGNTIVQSHFSYYFSPILGYNLILYICKDD

SEQ ID NO: 177023 - protein, 88 aa, Glycine max
  Clone ID: PAT_MRT3847_130869C.1.pep
SARSRSVSARRHVLSHCSLYARIDSPNLVALSLFSIPAPSTSASSIYPSVDSSVHLIWEEPDTTTDEAMEDVLVTVPGAILHLIEKDS

SEQ ID NO: 177024 - protein, 26 aa, Glycine max
  Clone ID: PAT_MRT3847_13086C.1.pep
NIIIEYSQRMAQITAKVTPFILISHN

SEQ ID NO: 177025 - protein, 49 aa, Glycine max
  Clone ID: PAT_MRT3847_130870C.1.pep
HRLTGPLSTALYLSHSLLMAGAIMMSTGTIGSLMSFYSEHYSISYVTIH

SEQ ID NO: 177026 - protein, 48 aa, Glycine max
  Clone ID: PAT_MRT3847_130871C.1.pep
HTQNNLFLYLKLSLLIWVKLFFNNSHFFPFTFPYNQTNDNKSLHFILS

SEQ ID NO: 177027 - protein, 128 aa, Glycine max
  unsure (1)..(128): unsure at all Xaa locations
  Clone ID: PAT_MRT3847_130872C.1.pep
TSQELSLSFPLLLQIMERELSDITIIILSCLLALQDRSEETNGRRHLNRGIINRLFRIEGNRHHESVVQNYIQSREYEIGIYFPFLHKRQQFLRENYTPCLNMCLKSKNLKFMNKSXLHTSVNGLNLE

SEQ ID NO: 177028 - protein, 63 aa, Glycine max
  Clone ID: PAT_MRT3847_130873C.1.pep
VFPSPLRPYSVSSLPRTLRPLIGSNRKRKPSSVASIKKRKRRDRAIGLRRRERKWIKVNRRVL

SEQ ID NO: 177029 - protein, 304 aa, Glycine max
  Clone ID: PAT_MRT3847_130874C.1.pep
MEDLWKRAKTFAEEAAKKSQSLTPSSSRIADLVSETAKKSKELAAEASKKADILKSAALRQADQIKSFSDTIAIPPQSPFLPNSATTAATGATATAPPSATPQELEKFGVTDDLRSFVKGLTSTTFQNFPLSSDESEVSDVTTVGSNVRKDLNEFQEKHATLVLTTVKEISRLRYELCPRAMKERHFWKIYFTLVNTHVAPYEKEYMEEVQLRAAAEQNVDTKVEQPAVTGGTGKAEATGNNLKGRPSNSSSTEQDLDTFLLGDLEDSDEAPDDGEGSFDDDFDKIGNSDVEDEKHVKKTAATV

SEQ ID NO: 177030 - protein, 75 aa, Glycine max
  Clone ID: PAT_MRT3847_130875C.1.pep
IMPKWCVEAELEQEKEVEEAKAGMEEAEEYLDSMGGRAMDDQRHYAEELERMSNIEKQRLVHTAACAKKMAGKTV

SEQ ID NO: 177031 - protein, 65 aa, Glycine max
  unsure (1)..(65): unsure at all Xaa locations
  Clone ID: PAT_MRT3847_130876C.1.pep
KWCRRFWRSNSILGRQRLGLPHVTQEYKDPPYIHWVYQFVGCMGVSMHLLVSWGGGPRDFYLXPP

SEQ ID NO: 177032 - protein, 183 aa, Glycine max
  unsure (1)..(183): unsure at all Xaa locations
  Clone ID: PAT_MRT3847_130877C.1.pep
MEDLWKRAKTFAEEAAKKSQSLTPSSSRIADLVSETAKKSKELAAEASKKADILKSAALRQADQIKSFSDTIAIPPQFAAIASAATSAATSPPSATPQELEKFGVTDDLRSFVKGLTSTTFQNFPLSSDESEGSDVTTVGSNVRKDLNGXVQEKHATLRLTTGKEIXRLRYELCPRAMKERHF

SEQ ID NO: 177033 - protein, 415 aa, Glycine max
  Clone ID: PAT_MRT3847_130878C.1.pep
MVSTFEKKKNLSKLIIPSSSSSPNPSPSSPHVIFSRSHSFVGPSPRFVPSSTPLFFLEEEEEEEEEEELPFGPDPPKIGPSDFHILRVVGQGAFGKVFLVRKKGDCFDDADGVFAMKVMRKDTIIKKNHVDYMKAERDILTKGLHPFIVQLRYSFQTKSKLYLVLDFINGGHLFFQLYRQGIFSEDQARLYTAEIVSAVSHLHKNGIVHRDLKPENILMDADGHVMLTDFGLSKEINELGRSNSFCGTVEYMAPEILLAKGHNKDADWWSVGILLYEMLTGKAPFTHNNRKKLQEKIIKEKVKLPPFLTSEAHSLLKGLLQKDPSTRLGNGPNGDGHIKSHKWFRSINWKKLEARELEPKFKPDVSAKDCTSNFDQCWTAMPADDSPAPTPTAGDHFQGYTYVAPNPWLSSRSLD

SEQ ID NO: 177034 - protein, 67 aa, Glycine max
  Clone ID: PAT_MRT3847_130879C.1.pep
KQSMNLNQYYYYCVIVLSFILSNIPISSLVLKFLLHELIMNKLFLMILFRALINVTPNGYIGCKEER

SEQ ID NO: 177035 - protein, 53 aa, Glycine max
  Clone ID: PAT_MRT3847_13087C.1.pep
TLCVNKVNSHLMCVRKVLHQYHILIKFFINIIVFGVLIYDELLSGCCIGFATQ

SEQ ID NO: 177036 - protein, 133 aa, Glycine max
  Clone ID: PAT_MRT3847_130880C.1.pep
ALGAGIASSLVTKLNRRRHRKTLRRQVIVETEPSKAAALKAKLAEYRARSSSSSSSSSDDEGRKRKTAFLAAATAVASKLGQQRVHQRFPNLTEQELAIKNAKVHKRLARSLSGSSSDEEVKVAGKNKALLTT

SEQ ID NO: 177037 - protein, 67 aa, Glycine max
  unsure (1)..(67): unsure at all Xaa locations
  Clone ID: PAT_MRT3847_130882C.1.pep
CQGKDRRGRSQAKPAXNDKDKDEKKPISRGAVPDLRXPVGRLHLLLKLTTTANGISGATATVYFAAI

SEQ ID NO: 177038 - protein, 170 aa, Glycine max
  unsure (1)..(170): unsure at all Xaa locations
  Clone ID: PAT_MRT3847_130883C.1.pep
YMLLCKIMLNTQKDXQALVSXKLALGYAGRQTEALKCVAQASKNRSLADFEKALTDYRAELRDDPIISTHLAKLYDNLLEQNLIRVIEPFSRVQIEHISSLIKLSKADVERKLSQMILDKKFHGILDQGEGVLIIFDEPPVDKTYEAALETIQNMSKVVDSLYSKAKKLT

SEQ ID NO: 177039 - protein, 69 aa, Glycine max
  unsure (1)..(69): unsure at all Xaa locations
  Clone ID: PAT_MRT3847_130884C.1.pep
GRCIKHGAATIEVAFIPVEDPDSPRGNKMVGDVCXYEEAIRMASAVTPVPEVVGPLPIAMILXXALMYA

SEQ ID NO: 177040 - protein, 71 aa, Glycine max
  Clone ID: PAT_MRT3847_130885C.1.pep
NFFCIGYKRSLERSLTTQFKKAVEDHEKDHSQSNTLPRNSFLRIPTNRGEKNKGWRICVMNIGISSTLLES

SEQ ID NO: 177041 - protein, 121 aa, Glycine max
  unsure (1)..(121): unsure at all Xaa locations
  Clone ID: PAT_MRT3847_130886C.1.pep
XXSXRXXXRXXAQGXXXXXXCXWXXXXXXXVXXXXSXXXXGXXXXXXXXXWGHXXXXXVGWVXCIXWLXXTXXGXXXEXXXLCAXXXXXXVGCCXXQXXXXXXVDVXXXXVXXDWXVXXXX

SEQ ID NO: 177042 - protein, 107 aa, Glycine max
  Clone ID: PAT_MRT3847_130887C.1.pep
GRYSASIGLYNHQPRSRYCMFAECSRCLFLNSSRLVSKELLVYFCRLLQELVIYSWKRIGYKYNRNDLTKLVIKMYNYLSSECGVYLYLGIRIKISSFLRHSSKFPS

SEQ ID NO: 177043 - protein, 66 aa, Glycine max
  Clone ID: PAT_MRT3847_130888C.1.pep
KAWRLSNVILAPAGKKFCLVKLLLKAPLEAVSQNVQTGGNIKVKGVIYEQCLALPEKKEKKKKKSQ

SEQ ID NO: 177044 - protein, 75 aa, Glycine max
  unsure (1)..(75): unsure at all Xaa locations
  Clone ID: PAT_MRT3847_130889C.1.pep
IVGSMVAGPARPHPFHYFRTDPPSLXPPFPGKAGLVGSLVALSGYKTPGTPQNPPFSPFPPVFSTPPPPPAPLKP

SEQ ID NO: 177045 - protein, 44 aa, Glycine max
  Clone ID: PAT_MRT3847_13088C.1.pep
RLRCYLNMHACTLPLKLTTEKPFYLRAMPLMQSMKKKHKNQTTN

SEQ ID NO: 177046 - protein, 42 aa, Glycine max
  unsure (1)..(42): unsure at all Xaa locations
  Clone ID: PAT_MRT3847_130890C.1.pep
EKKXAXGHARLXINKYYLNDITKTIQKETLNRFFRQHRKGDL

SEQ ID NO: 177047 - protein, 76 aa, Glycine max
  Clone ID: PAT_MRT3847_130891C.1.pep
MEERGECSASASASANPSDEIWAKLVLSDERYSDVQISSDEKVISSEISATSNDKHSWCKIVRNPDLCSATMENKR

SEQ ID NO: 177048 - protein, 69 aa, Glycine max
  Clone ID: PAT_MRT3847_130892C.1.pep
PGIPPLKKKHPLQISTAVTREYSLFLCRLRGAPLWGNANPKAPKDAANTVATHSLDQLNTHSHIIGSQR

SEQ ID NO: 177049 - protein, 61 aa, Glycine max
  Clone ID: PAT_MRT3847_130893C.1.pep
DAACGLSMEISSVSYKCCHWQPSHHKAQFPKSANALIKKNLYPPKLLNPSPIWLLIFLKNP

SEQ ID NO: 177050 - protein, 69 aa, Glycine max
  Clone ID: PAT_MRT3847_130894C.1.pep
FGSRENENDGHSYSSAGSRTVKEPRVVVQTTSEIDILDDGYRWRKYGQKVVKGNPNPRYFHLLDFNRRV

SEQ ID NO: 177051 - protein, 276 aa, Glycine max
  Clone ID: PAT_MRT3847_130895C.1.pep
FMTAVKQNYGEKVLVQFEDFANHNAFELLAKYGTTHLVFNDDIQGTASVVLAGVVAALKLIGGTLPEHTFLFLGAGEAGTGIAELIALEMSKQVIKPTVLIGSSGVGRTFTKEVVEAMTSNNDKPLILALSNPTSQSECTAEEAYQWSEGRAIFASGSPFDPVEYKGKVYASGQANNAYIFPGFGLGLVISGAIRVHDDMLLAASESLAKQVSEENYKNGLIYPPFSNIRRISANIAANVAAKAYELGLATRLPRPQNLVKCAESCMYTPVYRNYR

SEQ ID NO: 177052 - protein, 290 aa, Glycine max
  Clone ID: PAT_MRT3847_130896C.1.pep
VFNDDIQGTASFVLAGVVAALKLIGGTLPEHTFLFLGAGEAGTGIAELIALEMSKQTKAPIEESRKKIWLVDSKGLIVSSRKNSLQHFKKPWAHEHEPVNSLLEAVKVIKPTVLIGSSGVGRTFTKEVVEAMTSNNDKPLILALSNPTSQSECTAEEAYQWSEGRAIFASGSPFDPVEYKGKVYASGQANNAYIFPGFGLGLVISGAIRVHDDMLLAASESLAKQVSEENYKNGLIYPPFSNIRRISANIAANVAAKAYELGLATRLPRPQNLVKCAESCMYTPVYRNYR

SEQ ID NO: 177053 - protein, 119 aa, Glycine max
  Clone ID: PAT_MRT3847_130897C.1.pep
RQTKTHSNPSLMSLGLFRWRSHAFREVRYPLGDNLRPSRGAQYGGLDGDLLRCGLSGLEIGLGGQSCGLACGNRLLLRCRIYGLVSGLGGGLSRILGGLLGSRFRFNKSKLNRSELERV

SEQ ID NO: 177054 - protein, 314 aa, Glycine max
  Clone ID: PAT_MRT3847_130898C.1.pep
MRRVPSILFRTLAAPRAATSFAVPNRLLQAALYGSAAAASRSHRRRFSSLLGPFAAASLGVAGALISQEVLAKEPPPPEALPNDVVLYQFEACPFCNKVKAFLDYYDIPYKVVEVNPLSKKEIKWSEYQKVPILMVDGEQLNDSSVIIDKLGHKILSKIIVDSTSEDEETKWRRWVDNHLVHVLSPNIYRNTSEALESFEYITSNGNFSYLEKFSVKYVGAAAMYFVSKKLKKKYNITDERAALYEAAETWVDALDGREFLGGSKPNLADLAVFGVLKPIRYLRSGKDMVEHTRIGEWYARMESAVGEPSRIKA

SEQ ID NO: 177055 - protein, 89 aa, Glycine max
  Clone ID: PAT_MRT3847_130899C.1.pep
FAPGPAACSDKICSIHPALPLLRLEDAPNENKRGAVILLRQLRKYAAPPMRGFSHRECFGTELVLGPSPPRRKERSEQRRKTNKSRICW

SEQ ID NO: 177056 - protein, 95 aa, Glycine max
  Clone ID: PAT_MRT3847_13089C.1.pep
MCSAPCLVSVGSPWPYAALVLWLPFYYRTRPRCVTQTCFYLRRMPRTAASSSYVRGKFCKRGVVFCGGGRLPAVCCLILGRYGTVNTRPCGYIYN

SEQ ID NO: 177057 - protein, 59 aa, Glycine max
  unsure (1)..(59): unsure at all Xaa locations
  Clone ID: PAT_MRT3847_1308C.1.pep
LQLDERMAGPEHDGYDPFFGGNQKYATPMMPLDEKIXSKVAQDMVEEXWLVCVDKGGIL

SEQ ID NO: 177058 - protein, 165 aa, Glycine max
  Clone ID: PAT_MRT3847_130900C.1.pep
MEDDQLELCNDDGFVFKRKRRRVDAPPPPPSEPDQEAAEKFRRERKKQTLLKLKSKYEKEILQWESFSNTLRSMQQLHTTPQQQPQPNLSLSLPSTDSAGTSLLRDLLLQVEAQDAIIRDVSNLCDIAEAVCVKREEQLKQTLFDLPIWASPLELMQGLYDGVDD

SEQ ID NO: 177059 - protein, 57 aa, Glycine max
  Clone ID: PAT_MRT3847_130901C.1.pep
MKMKVLVFIVATILVTWQCQAYDKFPLRINTGYGDRTPEVKCPSLKLAVETHNNLGF

SEQ ID NO: 177060 - protein, 63 aa, Glycine max
  Clone ID: PAT_MRT3847_130902C.1.pep
LLTMKINSVYFCRNVIKVSNLQKHLTDIKTDCAVKRLYTIFSQTFLPASSIIAITPSADTIWG

SEQ ID NO: 177061 - protein, 215 aa, Glycine max
  Clone ID: PAT_MRT3847_130903C.1.pep
MMETLATSSSATLPSSSSPFSIFPSRRTSLSPPKTLQFRLPSSKRDDARDSDSNQNNLPILSDRCLSLSPLSKDAAMGLVLSAATGRGWTTGSGMEGPSVPAVGRDSESGTGNISTFPWSLFTKSPRRRMLVAFTCTICGQRTTRAINPHAYTDGTVFVQCCGCNAYHKLVDHLNLFQETNCYLNSSFNYKGEGWDDLKFRYMDDNDDDDIFPIA

SEQ ID NO: 177062 - protein, 291 aa, Glycine max
  Clone ID: PAT_MRT3847_130904C.1.pep
MESSAAIRSFHYPIGTMSHVRASLEKQAVVPIHNAGWNSKSRLFIQHLAYGQKHINSHTKGKNTLISCGKTAEAINASKSDASSDNTPQGSLEKKPLQTATFPNGFEALVLEVCDETEIAELKVKVGDFEMHIKRNIGATKVPLSNISPTTPPPIPSKPMDESAPGSLPPSPPKSSPEKNNPFANVSKEKSPRLAALEASGTNTYVLVSSPTVGLFRRGRTVKGKKQPPICKEGDVIKEGQVIGYLDQFGTGLPIKSDVAGEVLKLLVEDGEPVGYGDPLIAVLPSFHDIK

SEQ ID NO: 177063 - protein, 75 aa, Glycine max
  Clone ID: PAT_MRT3847_130905C.1.pep
AYLYCKKTHDMSCVILQEKKAYGGTVKKALKLLALFTEKQRACIASTLYTLWIDEDAWGHPVFTNRDLVAFHVTL

SEQ ID NO: 177064 - protein, 161 aa, Glycine max
  unsure (1)..(161): unsure at all Xaa locations
  Clone ID: PAT_MRT3847_130906C.1.pep
SAVLQSPFLSSPFISSLTHAQFSPPDGLPYDEFFSQRSESLLKVLRSGARIKKEAFQAASIPVVLVENSGRCNKNDSDEKVLPNGTAWIPNLVQTITDIALNQSESIHVDKNLIEGPNPNQRGKLWTPLVFAIQYFLIMKPIKGLIEKDIANERKPTWXET

SEQ ID NO: 177065 - protein, 313 aa, Glycine max
  unsure (1)..(313): unsure at all Xaa locations
  Clone ID: PAT_MRT3847_130907C.1.pep
MASQIREWSGINTFAPATQTKLLELLGNLKQENVNSLTILVMGKGGVGKSSTVNSIIGERVVSINPFQSEGPRPVMVSRSRAGFTLNIIDTPGLIXEGGYINDMARHLIXKXVLNKTIDVLLYVDRLDVYRVDNLDKLVAKAITDSFGKGIWNKTILTLTHAQFSPPDGLPYDEFFSQRSESLLKVLRSGARIKKEAFQAASIPVVLVENSGRCNKNDSDEKVLPNGTAWIPNLVQTITDIALNQSESIHVDKNLIEGPNPNQRGKLWTPLVFAIQYFLIMKPIKGLIEKDIANERKPTWERRDAAFRKRDLY

SEQ ID NO: 177066 - protein, 52 aa, Glycine max
  Clone ID: PAT_MRT3847_130908C.1.pep
SWLVFKDIRKHKAPQMHFISCPVECYKLQQINILSLLNFKSLFCGANKYIHD

SEQ ID NO: 177067 - protein, 303 aa, Glycine max
  Clone ID: PAT_MRT3847_130909C.1.pep
MEHQKEEQLEPVSPVGQYFNSSVLCIYIIGVLEFEVPIDDLQTYALLKDVFLPINPRFSSIMVQDKDGEKRWKQVDVNLTDHVNIPTFPEGKTAESYDKYFHDYLSSIAMEQLPQSRPLWDIHIINYLTSDASSTIIFKLHHALGDGYSLMGALLSCLQRADDPSLPLSFPSLKQSKQEPSSTKSFCRKFSWMCSSAFNTVSDFGWSVLKSSIISDDKTPIRFGDEGADYQPISISSMTFSIDHIRDIKSRLGVTINDVVTGIVFYGTRLYMQDMDSKSKTAHSTALVLLNTRNVEGYQSIND

SEQ ID NO: 177068 - protein, 96 aa, Glycine max
  unsure (1)..(96): unsure at all Xaa locations
  Clone ID: PAT_MRT3847_13090C.1.pep
TALVKGTFEKGLWDLKEKPWXAKFPPLENSFNPSAXIILNTFAAPYAADNFGQYPYGGLILNRTSLPRRFIPSEATPYYDXMVNNPQDSYLRTITP

SEQ ID NO: 177069 - protein, 69 aa, Glycine max
  Clone ID: PAT_MRT3847_130910C.1.pep
FPMYRPCHFIDRFTSIRLVMENSMLCRRQDLTGTNISWPRHIPEPNDARFVLCRMPTRLSYMRGKDHHR

SEQ ID NO: 177070 - protein, 174 aa, Glycine max
  Clone ID: PAT_MRT3847_130911C.1.pep
VDISEWLEVADGGSVENVQAGKKDSEIEGDAKIVDNVQVRKKDLEIEEDETGVAASESKTDVDDKSENVASNVPENVSISGDKLDVKYEEKEASEGKTDNDNNGSCKDSDISVVSSQPSMPGEEDIGWDEIEDIESNDESKGATSRIDLRKRLSVADEDEDLSWDIEDDDEAAK

SEQ ID NO: 177071 - protein, 60 aa, Glycine max
  Clone ID: PAT_MRT3847_130912C.1.pep
KKGPEEMNKFVQKKCYPLDSILPIFPTRARTPSEKMDPNNQGNTALKAPYVRNPRVGNKD

SEQ ID NO: 177072 - protein, 62 aa, Glycine max
  Clone ID: PAT_MRT3847_130913C.1.pep
LFFSFLTFQQDSLKGAKWSNRAEMTEEEALAEQQRMFAEARARMNGGAIQSKEPEADQSLES

SEQ ID NO: 177073 - protein, 72 aa, Glycine max
  Clone ID: PAT_MRT3847_130914C.1.pep
EFFSLGCFPSSERIPSNPKKGSTITTHQSKPHLFSFLKTNKMKKKKLNRGKKKVLLDTVLIVFLPESFYVPN

SEQ ID NO: 177074 - protein, 68 aa, Glycine max
  unsure (1)..(68): unsure at all Xaa locations
  Clone ID: PAT_MRT3847_130915C.1.pep
MERKEQDVSLGANKFPEIQPIGTAAQSPDDGKDYQEPATAALVDPTEFTSWSFYSAGIAXFVATFLFL

SEQ ID NO: 177075 - protein, 124 aa, Glycine max
  Clone ID: PAT_MRT3847_130916C.1.pep
WEEHQIGKATLKFGSKNKKQVSDDYQYVFEDQIDFIKASVMEGDKFDYEEMEDSHEKSKAKSAFEALQEERKKLPMFPYRDELLEAVHNHQVLVIVGETGSGKTTQIPQYLHEAGYTKRGMIAC

SEQ ID NO: 177076 - protein, 61 aa, Glycine max
  Clone ID: PAT_MRT3847_130917C.1.pep
SAENFSPRGPARGAINVPMDSPSIKNVGRFRLKGLLLQQMYGDVCLIKRPVYVSQCTCFTI

SEQ ID NO: 177077 - protein, 106 aa, Glycine max
  Clone ID: PAT_MRT3847_130918C.1.pep
MNCSMMFSPAVPTGYHASAGLATSFTCLKSMAVLPTTKTNNYTTCMVGIGGQIQCMHVSTPIERKKSATVYYFPDLYDAHLATDDQHPLLYGWIPCLQSKVTHGFS

SEQ ID NO: 177078 - protein, 64 aa, Glycine max
  Clone ID: PAT_MRT3847_130919C.1.pep
VLLNERLVLEGWRERSECRYLIKALLLLLVVGILCIEYLEIHMLVESCGAGAITNYVLCIYVVS

SEQ ID NO: 177079 - protein, 58 aa, Glycine max
  unsure (1)..(58): unsure at all Xaa locations
  Clone ID: PAT_MRT3847_13091C.1.pep
DPLAHVKAQIPDKGGFPPAPPRVIFFGXKPLEDGCPLADSHIPKGSPLPLVLPLRGGC

SEQ ID NO: 177080 - protein, 81 aa, Glycine max
  Clone ID: PAT_MRT3847_130920C.1.pep
GGSSLRMLIMGMEILFKRPPRLCLIKSLKRKPRWIKRNPGVKKMGWKSTLLPEILGNLCCVSPEKKSKMCFIKKKTKVFKV

SEQ ID NO: 177081 - protein, 92 aa, Glycine max
  Clone ID: PAT_MRT3847_130921C.1.pep
QCLNFAPSSRLVRHSQIVSRLELPSVVVLWSLCSPGTALFLLASSSSVSCVLRGSCSTSVSAVCIDVILEQPYPQIVSLLLLQLTSSSLLVS

SEQ ID NO: 177082 - protein, 70 aa, Glycine max
  Clone ID: PAT_MRT3847_130922C.1.pep
PYWLRSSGCRSGRQITGPAGGGEGSEYLSLSALSAWAPLPPPQPPDPKIRTRPARRSRRSTDAWVDPGIP

SEQ ID NO: 177083 - protein, 103 aa, Glycine max
  Clone ID: PAT_MRT3847_130923C.1.pep
MAAFDHFGNMYDVAFKPRLLQTLIRDHLPDEKRPFSNPSELSKVVSLIKTHSLLCESFADSTRPKLIEAWKSALACWLNLIYSLLSTTMPDKCWAGISLSGLL

SEQ ID NO: 177084 - protein, 140 aa, Glycine max
  Clone ID: PAT_MRT3847_130924C.1.pep
LCGARGEGLKKLSPGQWIPPGPLGEQKGGFFLGLVNPFLTTWPSGWGIMFFFSIGGELLGVLLRLLGPNFRFPPVFLIRLPLMMPIWGLFGCGLKKLFCPLRLFCVPHGNKCALVVSLPFDFLKKFLFFSPPFFGSPVNF

SEQ ID NO: 177085 - protein, 60 aa, Glycine max
  Clone ID: PAT_MRT3847_130925C.1.pep
ILFELPVITVFCFCVRFHCVDCGVICMSFVMLFFPRSVINSYSHNCSLLGTNIDILIFAC

SEQ ID NO: 177086 - protein, 39 aa, Glycine max
  unsure (1)..(39): unsure at all Xaa locations
  Clone ID: PAT_MRT3847_130926C.1.pep
XPXPIKGIGNXXXLVXFKLXFXXRLQNHQVNGYLKDFXI

SEQ ID NO: 177087 - protein, 65 aa, Glycine max
  Clone ID: PAT_MRT3847_130927C.1.pep
MFCWGLRFCAGPMVSLTISAFFDGAQTGHFVGGPFPAFFKSGKPQVEFYCPPLRGGIGPWKLVPF

SEQ ID NO: 177088 - protein, 80 aa, Glycine max
  unsure (1)..(80): unsure at all Xaa locations
  Clone ID: PAT_MRT3847_130928C.1.pep
XTQNRVCNXGMSFXXGIIXSFNSIXTXXNNNNYXNTXXXXXXXXTXRMXSFSSSFGFERARCIQXQRLXRXSXXXDREGR

SEQ ID NO: 177089 - protein, 120 aa, Glycine max
  unsure (1)..(120): unsure at all Xaa locations
  Clone ID: PAT_MRT3847_130929C.1.pep
AGEVFNRVSTGVANENHHVSDDQDGLLNLIHVLLEGKDEKANRHIRGVLSKMLXENSSRYXDLLQQSLYLACDYCLQLLRPPFLPAGTSDMPDLTHIASRPDTLRWILDILVDTQICRGF

SEQ ID NO: 177090 - protein, 89 aa, Glycine max
  unsure (1)..(89): unsure at all Xaa locations
  Clone ID: PAT_MRT3847_13092C.1.pep
MAVPLLSKKIVKKRXGSSKRPQSDRKIAVKTNWXRPRSREKEXKRKFKGCTLMPNIGYALDKKTRHYLPSGVKKFVVHNVNDLELLMKH

SEQ ID NO: 177091 - protein, 1051 aa, Glycine max
  unsure (1)..(1051): unsure at all Xaa locations
  Clone ID: PAT_MRT3847_130930C.1.pep
MASNSMAGLITGSNSHFSRDSDEHQTPPTRQASSKTTCRVCGDEIGYKENGELFVACHVCGFPVCRPCYEYERSEGNQSCPQCNTRYKRHKGCPRVAGDEEDNFDADDFDDEFPVKNHREDLDRNHDVNHVENGDYNPEKLHPNGQAFSSAGSVAGKDFEGDKEFYSNAEWQERVEKWKVRQEKRGLLNKEDGKEDQGEEDDYLXAEARPPLMRKFREIXLSXINPYRIVILLRLVRLCVFFRFRILTPANDAYPLWLIYVICEXWIALSWILDQFPKWFPITRETYLDRLSLRFEREGETNELAPVDFFVSTVDPLKEPPIITANTVLSILSVDYPVDKVSCYVSDDGASMLLFDSLAETAEFARRWVPFCKKYNIEPRAPEFYFSQKIDYLKDKVQPTFVKERRAMKREYEEFKVKINSLVAKAQKKPEEGWVMQDGTPWPGNNTRDHPGMIQVYLGSAGALDVEGKELPKLVYISREKRPGYPHHKKAGAMNALVRVSAVLTNAPFMLNLDCDHYVNNSKAVREAMCFLMDPNLGKKLCYVQFPQRFDGIDRHDRYANRNTVFFDINMKGLDGIQGPVYVGTGTVFNRQALYGYDPPVSEKRPKMTCDCWPSWCCCCCGGSRKSKSKKKSGKGLFSVFSKNKNKKKMMGKDYVRKGSGSMFDLEEIEEGLEGYEDLEKSSLMSQKSFEKRFGQSPVFIASTLMENGGLPEGTNSQSLVKEAIHVISCGYEEKTEWGKEIGWIYGSVTEDILTGFKMHCRGWKSVYCMPKRPAFKGSAPINLSDRLHQVLRWALGSVEIFLSRHCPLWYGYGGKLKYLQRMAYTNTIVYPWTSIPLLAYCTIPAVCLLTGKFIIPTLNNLASIWFMALFISIILTSVLELRWSGVTIEALWRNEQFWVIGGVSAHLFAVFQGLLKVLGGVDTNFTVTAKAAEDTEFGELYLFKWTTLLIPPTTLIILNIVGVVAGVSDAINNGYGSWGPLFGKLFFAFWVIVHLYPFLKGLMGKQNRTPTIVVLWSILLASIFSLIWVRIDPFLPKQTGPVLKQCGVEC

SEQ ID NO: 177092 - protein, 55 aa, Glycine max
  Clone ID: PAT_MRT3847_130931C.1.pep
IFPESLDFLPTQLRYLLWHDNPFTSLPSCFAAFDLEELNMPSSSINCLWEGRKVL

SEQ ID NO: 177093 - protein, 145 aa, Glycine max
  Clone ID: PAT_MRT3847_130932C.1.pep
SFSHGFTYSGHPAACAVAIEALKIYKERNIVDQVNKIAPRFQDGIKAFSDSPIIGEIRGTGLILGTEFTDNKSPNDPFPPEWGIGAYFGAQTTKHGMLVRVAGDNIMMSPPYIISPGEVEELISIYGKALKETEKKVQELKSQRK

SEQ ID NO: 177094 - protein, 54 aa, Glycine max
  unsure (1)..(54): unsure at all Xaa locations
  Clone ID: PAT_MRT3847_130933C.1.pep
PTTITTIKNPTSKIIYDEHNHERFPPDNPNNKSFAYWXLTSNRLTDASFIALLV

SEQ ID NO: 177095 - protein, 46 aa, Glycine max
  Clone ID: PAT_MRT3847_130934C.1.pep
HYNIFALVSDMTMFFPALIPLPIGTSCARAVTGQTNQTVPTRQYRS

SEQ ID NO: 177096 - protein, 75 aa, Glycine max
  Clone ID: PAT_MRT3847_130935C.1.pep
WWFRLFFLFPLLFFLIELNCKGETLFNKTGFLLKNGNNIKFQACFFRKETKTGGVEGAISKNIWLTWHPWSLLNG

SEQ ID NO: 177097 - protein, 208 aa, Glycine max
  unsure (1)..(208): unsure at all Xaa locations
  Clone ID: PAT_MRT3847_130936C.1.pep
MYQGQEQISEEIVPLLRQFGFYWIIKMGYLKINAPLITVFIERWRPETHTFHMRCGEATITLQDVSILLGLRTDGAPSIGSTNLDWADLCEGPPGVRPLEGEIEGSVVKLSWLAFSFSHINIDEGFVVQLQRFTRAWIIRFIRGVLFVNKSSSRVSLRYLXFLRDFGPCRTYAWGHFVLVLXYKEMCIATDYKTKSIEGMCILIQMWI

SEQ ID NO: 177098 - protein, 126 aa, Glycine max
  Clone ID: PAT_MRT3847_130937C.1.pep
EGQKKYGPKAEKGNPGGKKEGANKQKKKCAHGPLYKRKGGPTRGLKQMAKGGGEAVFQWGTTGAPLLKKRRPTAGGGAPPGPPKGGFFFPRGGGPTGENPARGGAKEGKNRGPLGFPPKPKPRYGG

SEQ ID NO: 177099 - protein, 130 aa, Glycine max
  Clone ID: PAT_MRT3847_130938C.1.pep
CRSYYRCTSQKCGVKKRVERSFQDPTIVITTYEGQHNHHCPATLRGSAASMLSSPSFFGSSYMASSLPQDFLAQLVPSYSQINDHQSPMFHQNLSHNLHPQPQQQHQFQLSHDHGLLQDLLPSFPGKHEP

SEQ ID NO: 177100 - protein, 49 aa, Glycine max
  Clone ID: PAT_MRT3847_130939C.1.pep
FVKIVLHGVGKINDLWRCNLSVMLHTFYAPRRFSACQVKHACKAASIFP

SEQ ID NO: 177101 - protein, 291 aa, Glycine max
  unsure (1)..(291): unsure at all Xaa locations
  Clone ID: PAT_MRT3847_13093C.1.pep
MLPLSQYSSLQHALLHARPPTLLSQTFPLLFSSFIFFATLSKTELIMRIQWWLNTCSSANCATATHHSTISLPKQKEHACDDSISYSSISEAPASSTTSNNSTSSLESNLSIQTLPSVPSLQSLSPQNFTFSVSHHCVTTLEPHLSRPVTSLAVNNNLLYAATDHEINVYDRHTCTTIHAFNTQPTSTCNSTKTIAFSNNNTVITTHQDCKIRVWQNHKNIHHRMLATLPTVNDRXHRFLLPKNYVXQFRRHEKRLWIEHADAVTGLAVSYGAFLLRSGDRTLKIGGFSDF

SEQ ID NO: 177102 - protein, 217 aa, Glycine max
  Clone ID: PAT_MRT3847_130940C.1.pep
METSQLFNVLAIFLLSDPFAVVNANSEGDALFAFRRAVKDPNNVLESWDPTLVDPCTWFHITCDDDKRVTRLDLGHAKLSGHLVPELGRLQRLQFLELYKNDLMGPIPKELGELKNLLSLGLYQNNLTGSIPATLSNLSNIKFLRLNSNKLTGRIPRELTKLGNLKILDLSNNDLCGTFPTYGSFSKFSQESFKNNPRLKGPELMGFVRYDTGESCK

SEQ ID NO: 177103 - protein, 380 aa, Glycine max
  Clone ID: PAT_MRT3847_130941C.1.pep
MAKSSTEKNGLKKGPWTPEEDQKLIDYIQKHGHGKWRTLPKNAGLKRCGKSCRLRWANYLRPDIKRGRFSFEEEEAIIQLHSVLGNKWSTIAANLPGRTDNEIKNYWNTHIKKKLLKMGIDPVTHTPRLDVIQLASILNTSLYNSAPQFNYPSLSGIGRSVINPSHMLGLLTTLLSCQNRNYNPDVLNNNQLSGGSTLLQNQHQCSRMQLDSTQAFQPNQPQVSLQENHIAKSNSNPLNMEPQVMKTTLENQITPIATPFSQQNTLPNLWHYNTEGHISDLPTMAQSSSAMQCFSSPKFNSIYNNLLENQNLCNNNEGMPNFNLSSLLSSTPSSSSPISTLNSSSSTTFVNGTTEDERDTYGSSMLMYNISNGLNDSGLL

SEQ ID NO: 177104 - protein, 70 aa, Glycine max
  Clone ID: PAT_MRT3847_130942C.1.pep
STSVRCREIASYPCLCTKCMWIYHDGQCLLSCAKSAGAGFFRIYYVASSDALKRASLDLLLSCMLMIVSN

SEQ ID NO: 177105 - protein, 96 aa, Glycine max
  Clone ID: PAT_MRT3847_130943C.1.pep
FGPLPYHMLKRAARHSEKYVRKARLNWPKGCASRDSMKAVMKLPRLQNLVMQNVDHSGGEFIDLLQGLLRYDPATRLTAQKALRHPFLREQFERRR

SEQ ID NO: 177106 - protein, 170 aa, Glycine max
  Clone ID: PAT_MRT3847_130944C.1.pep
GLCKSGGILDAWKLVDEMHYCCQPPPDVTTYNILLESLCRIECVEKAIAFFKHLIFERSFAPNVWSYNILISGCCKNRRLDEAINLFNHMCFKNLVPDIVTYNILLDALFNGQQLDKAIALLVQIVDQGISPNLRTYNILINGLHKGGGQRLHRRFPCIFPLEVTIQMSK

SEQ ID NO: 177107 - protein, 132 aa, Glycine max
  unsure (1)..(132): unsure at all Xaa locations
  Clone ID: PAT_MRT3847_130945C.1.pep
RKXRXFGFEKKQTIRKNLVYMYKLRTPIWEATQPRVCCCLVEKCNTRMAGTLFRLFVILLGLSHLVCLKAVPVTRTENLMQGQVHLTLENNHKVITERNLHWEEPTITERMELELHDYSPSGPNGRHTPRAP

SEQ ID NO: 177108 - protein, 48 aa, Glycine max
  Clone ID: PAT_MRT3847_130946C.1.pep
PRSSRGVSLPVKSRAVNLSSIVELSSETPSNRSTDQRSSSTTRGRSTT

SEQ ID NO: 177109 - protein, 72 aa, Glycine max
  Clone ID: PAT_MRT3847_130947C.1.pep
RPRVLPRVRSTPSKVLAGPYHYSLPPLFNYWLNWFSSVFVIEVITHHEPIMDRVDLFYGCWIFAVSAYSQMI

SEQ ID NO: 177110 - protein, 210 aa, Glycine max
  Clone ID: PAT_MRT3847_130948C.1.pep
MPLLLSRTPPSSFPLTPLRNARAPLITPSQKRFTLAATRIVLFTSRRRILASPPPPPKCASINGISGPNNPEASGEQQGYSAGGLLDRIRKWVGFLPSILPGGRWWEFSGDVDVQVVAQPVTVWRALGKMWDLVARDRWVIFAAFSALIGAAGSEISIPHFLTASIFSAQSADLAVFHRNVRLLVLLCVASGICRAKPLGYEGAFLASQT

SEQ ID NO: 177111 - protein, 68 aa, Glycine max
  Clone ID: PAT_MRT3847_130949C.1.pep
TLPKASMSYQNIHFPKHNDHGSGGVIPRGFGRPSTLLRGINCSSKKKVWKHKGMRFGLLTILWCPNSF

SEQ ID NO: 177112 - protein, 102 aa, Glycine max
  unsure (1)..(102): unsure at all Xaa locations
  Clone ID: PAT_MRT3847_13094C.1.pep
EAPNMDQTRGGNILHFTFLSSVLFCYAPLFLPKTTNFXXXXXPLFXIVXFLLSFPLPTXQFVIYLLPXXXLSFPLLSSPLFFLXSSLPLVRRGFFPFFIFFF

SEQ ID NO: 177113 - protein, 71 aa, Glycine max
  Clone ID: PAT_MRT3847_130950C.1.pep
TGRFFFFFFFFFLARYHQIHEFYFITPVAFLYITCAPKMCADNHHLFMTKAAFFTSSCKKTSLKNKINGCV

SEQ ID NO: 177114 - protein, 125 aa, Glycine max
  Clone ID: PAT_MRT3847_130951C.1.pep
PSQPTVKPIQMWKAIGPPLLPSTGRDSLDIPIGPLNDTGLSRDNTASKKEGVYKEIKVLVMRKISHHKQAQYSGTLTTKKKSPASSTDPPFADSEHPIQKCFIDKVPIQHQSSIDMADTTAPLDS

SEQ ID NO: 177115 - protein, 103 aa, Glycine max
  Clone ID: PAT_MRT3847_130952C.1.pep
GRNGPTCKCSYRGSPGGGFLARIRNENCFSTIKARAPGPLGVVQQLPYKSSSLDQRVFSSSSGGGNGTLPQNGLSLSGSKKMPFCVLKGKNKRIQCSELGLRH

SEQ ID NO: 177116 - protein, 70 aa, Glycine max
  Clone ID: PAT_MRT3847_130953C.1.pep
WHYHRLHMRLSSCVNISPISKGLIQICTSQGEHIITDWLLSLPELAVVGMIIKLLEPLWIYTNSDYQIEG

SEQ ID NO: 177117 - protein, 105 aa, Glycine max
  unsure (1)..(105): unsure at all Xaa locations
  Clone ID: PAT_MRT3847_130954C.1.pep
FKNQHHHHHNHHHHQMSSINADSAAAMQLFLMNPQTTRSSSPPPXPPPSSSTLHMLLPNTFPPGSRGSFGQFTWLPDTTQEGRVQSWKGLGKVTVKGFLCPCPPP

SEQ ID NO: 177118 - protein, 126 aa, Glycine max
  Clone ID: PAT_MRT3847_130955C.1.pep
LHLLRQLQRAQFGRRSEKLDPEQLQLAIEGIEQAIAGDEAVQDRKDTAGARQRAERRRASHGALPAHLPHIDVTIAPEDTNCPCCRTPLHVIGEETSRRLDVVPAQFRVIVTHRPKYACRACTDGG

SEQ ID NO: 177119 - protein, 85 aa, Glycine max
  Clone ID: PAT_MRT3847_130956C.1.pep
NICIQLQIRGYALDIKKKKKKKKKKKKKKKKKKKKKKKKKKKKKKKKKKKKKKKKNKKKGGARLKEPNFNSPVWEDNIFFLGPLN

SEQ ID NO: 177120 - protein, 263 aa, Glycine max
  Clone ID: PAT_MRT3847_130957C.1.pep
LRETTEGGDSEEMEGIVHRTVEVNGIKMHVAEKGEGPVVLFLHGFPELWYSWRHQILALSNLGYRAVAPDLRGYGDTEAPASISSYTILHLVSDLVALIDSLGAEQVFLVAHDWGAIIGWYLCMFRPDKVKAYVCLSVPFIRRNPNVRTVDGMRAMYGEDYYICRFQKPGEMEAQMAQVGTENWELTAPWTGVQIQVAVKYITGELDMVYTSLGMKEYIHGGGFKQDVPNLEQVIVQKGVAPFNNQEAAEEIDNYIYDFINKF

SEQ ID NO: 177121 - protein, 171 aa, Glycine max
  unsure (1)..(171): unsure at all Xaa locations
  Clone ID: PAT_MRT3847_130958C.1.pep
MVGESRKWVILLASIWVQAFTGTNFDFSSYSSELKSVLNITQLQLNYLSVASDMGKAFGWCSGVSLMYLPLWVVMFMAAFMGLFGFGFQWLVIHRLITLPYVVXFLLCLIAGCSICWFNTICYVLCIKHFPANRSLALSLSISFNGGSAALYTLIANAINSKDATLYLLLN

SEQ ID NO: 177122 - protein, 331 aa, Glycine max
  Clone ID: PAT_MRT3847_130959C.1.pep
SFSRFAREGGVSEMEGVIHRTVEVNGIKMHIAEKGEGPVVLFLHGFPELWYSWRHQILSLSSLGYRAVAPDLRGYGDTEAPPSIDSYTCFHIVGDLVALIDSLGVQQVFLVAHDWGALMGWYLCMFRPEKVKAYVCLSVPFIARNPNVRTVDGMRAMYGEDYYICRFQKPGEMEAQMAQVGTEYVLKNILTIRKPGPSIFPKGEFGTGLNPNMSDDTLPSWLTDDDLAYYVSKYEKSGFTGPLNYYRNMNLNWELTAPWTGVQIQVAVKYITGELDMVYTSLGMKEYVHSGGFKQDVPNLQVVVQKGVAHFNNLEAAEEINNHIYDFINKF

SEQ ID NO: 177123 - protein, 67 aa, Glycine max
  Clone ID: PAT_MRT3847_13095C.1.pep
LASRPYYLILRAIAVAMGSIRVARVMTQTLNSMFKFLQSKERMQIRISKHTDLRSDGVRIDADEYMN

SEQ ID NO: 177124 - protein, 112 aa, Glycine max
  unsure (1)..(112): unsure at all Xaa locations
  Clone ID: PAT_MRT3847_130960C.1.pep
MVGESRKWVILLASIWVQAFTGTNFDFSSYSSELKSVLDITQLQLNYLSVASDMGKAFGWCSGVSLMYFPLWVVXFMAAFMGLFGYGFQWLVIHRLITLPYVVVFFLCLIAG

SEQ ID NO: 177125 - protein, 38 aa, Glycine max
  Clone ID: PAT_MRT3847_130961C.1.pep
SDQHQPYLLSFFYKITIIITHATFTYKGGYPLQGSQPI

SEQ ID NO: 177126 - protein, 242 aa, Glycine max
  Clone ID: PAT_MRT3847_130962C.1.pep
MGSSGFSSSSTAEEVTQGIDGSGLTAIVTGTTHGIGTETARVLVLRGVHVIMAARDVIAAKTIKEVILEEIPTAKVDAMELDLSSMASVRKFASEFISFGLPLNILINNAGISAFPFTLSKDNIELLFATNHLGHFFLTNLLLDTMKKTASESKKEGRIINVSSDGHQYTYPEGILFDKINDESSYQKWRAYGQSKLANILHANELARLLKEDGIDITANSLHPGAIITNIYKPELSGPVPT

SEQ ID NO: 177127 - protein, 174 aa, Glycine max
  Clone ID: PAT_MRT3847_130963C.1.pep
ANTNRIVGTMGYMAPEYAMHGQFSMKSDVFSFGVLVLEIISGHKNSGIRHGENVEDRLREDGRQWREGTAVKIVDPSLNNNSRNEMLRCIHIGLLCVQENLADRPTMTTIMLMLNSYSLSLPIPSKPAFYVSSRTGSISATQSWGYSSGESRSRELTIKSAQEAENEFTDPYPR

SEQ ID NO: 177128 - protein, 69 aa, Glycine max
  Clone ID: PAT_MRT3847_130964C.1.pep
PGVALEFLHFQRGGREQYNIERNMGLFEPQLMRGGAYPEMRLCQYARVRGYDEDKGIGFYRAGTGGLGT

SEQ ID NO: 177129 - protein, 73 aa, Glycine max
  Clone ID: PAT_MRT3847_130965C.1.pep
SNTRPVRLNSRLAARPSRRALPPPNITMSEGNSYGPSLSPSPTRKLSPRVPVGYSATTTTPTTYCIPRRCQTD

SEQ ID NO: 177130 - protein, 43 aa, Glycine max
  Clone ID: PAT_MRT3847_130966C.1.pep
TSSSSSGFGRMLNTNAAFTSYQLLDYHRYADWFTTLTFTTCYT

SEQ ID NO: 177131 - protein, 84 aa, Glycine max
  Clone ID: PAT_MRT3847_130967C.1.pep
TSRGSQQYRALTVPELTQQIFDAKNMMCASDPRHGRYLTAAAMFRGRMSTKEVDEQMLNVQNKNSSYFVEWIPNNIRLSVRDIP

SEQ ID NO: 177132 - protein, 91 aa, Glycine max
  unsure (1)..(91): unsure at all Xaa locations
  Clone ID: PAT_MRT3847_130968C.1.pep
AVTDPGTGLXYTNLFDXMVHAGDFSMNALCFSGXRILLSETGXPNGGDVYQIGANIFNAATYYRPFRTKVSRKTIAWWRRLDRARRLRLSY

SEQ ID NO: 177133 - protein, 48 aa, Glycine max
  unsure (1)..(48): unsure at all Xaa locations
  Clone ID: PAT_MRT3847_130969C.1.pep
YTGVLMVTPHRTSCLLEIIYPRVPFPFLGQKPLRAMYPNXPLNAFVKM

SEQ ID NO: 177134 - protein, 71 aa, Glycine max
  Clone ID: PAT_MRT3847_13096C.1.pep
KTKVHVCSQSKLSTWVLNVSITRQSSTIKEGREPIVRFVRKLNPQCRNAEEKDNLNYENYSQSSVHQTYVF

SEQ ID NO: 177135 - protein, 90 aa, Glycine max
  Clone ID: PAT_MRT3847_130970C.1.pep
EKKTWMGWNSGLVPGGFLNGSGLGYFFYIPTVFKIRSDPGFGWGHFCTPLPSVLVVSNGNAFFRDLLPKVCIFWDPPPHPTPQVFCILLI

SEQ ID NO: 177136 - protein, 55 aa, Glycine max
  unsure (1)..(55): unsure at all Xaa locations
  Clone ID: PAT_MRT3847_130971C.1.pep
VISGKEDAAIKYGGGDXTIGKEMGELFLYRIRKVDDNCTGFPGGRVCNARGGGIG

SEQ ID NO: 177137 - protein, 59 aa, Glycine max
  Clone ID: PAT_MRT3847_130972C.1.pep
GTQGVSRRLIYRGLVLSLTSARRRVSITIVRVSSFRLCRHQLRSFSYCSTGHAIGYRLE

SEQ ID NO: 177138 - protein, 62 aa, Glycine max
  Clone ID: PAT_MRT3847_130973C.1.pep
RAHDDTAVQTFAYGHLKYHVALCSYSARKKMPIIDLSTEPKASYDLPTNYAAHDAINLGSSP

SEQ ID NO: 177139 - protein, 53 aa, Glycine max
  unsure (1)..(53): unsure at all Xaa locations
  Clone ID: PAT_MRT3847_130974C.1.pep
TQPLAFQMLDREIGXDFLTDLSIQSRAELALXEAPYAYLDDLCDDTNLGAIHA

SEQ ID NO: 177140 - protein, 46 aa, Glycine max
  Clone ID: PAT_MRT3847_130975C.1.pep
VYGTFVIVVDNDIEFEFYECCCCCCEILILLKYLQTGFFKFMVKKL

SEQ ID NO: 177141 - protein, 78 aa, Glycine max
  Clone ID: PAT_MRT3847_130976C.1.pep
RSKLNFPCIPTHKFFFGVPKFKLTARTLKTRYLENPGGTQTNWLGRHSPFGQLRNYQKGPNNSPFQPFANLNCQREPP

SEQ ID NO: 177142 - protein, 70 aa, Glycine max
  Clone ID: PAT_MRT3847_130977C.1.pep
GRFTVSVKLKQCLVRGKLIQMIESSCHFKDVRELGLQHMSNMVFLCIKVVVVGVTYNVVYDHKDHQSLLV

SEQ ID NO: 177143 - protein, 139 aa, Glycine max
  Clone ID: PAT_MRT3847_130978C.1.pep
ASQKATTVHREAPQKHKNTQSNNKKKIKTLSFDKHNATTPFFPFPRPHLKLTPALAGSRPSKHCRMGAENTERDELEGDPETVETLKQKSMSHFEEKIEVETLKYRQRMRNKRERRRRRRRGYWIFFSFFFFCRGGGRK

SEQ ID NO: 177144 - protein, 52 aa, Glycine max
  Clone ID: PAT_MRT3847_130979C.1.pep
YLPSISTSYVHQLSSSSYPAPVCHVLLKHPSRSSSMQRSKGVCTNGPFNDTF

SEQ ID NO: 177145 - protein, 55 aa, Glycine max
  Clone ID: PAT_MRT3847_13097C.1.pep
ATQPHLANTTNLAEHLAASLHGNATKLAPPSQVSFQQHSCTSTPTLSTPFIFPQK

SEQ ID NO: 177146 - protein, 211 aa, Glycine max
  Clone ID: PAT_MRT3847_130980C.1.pep
MKVTVVCCVLVVLGALPFSSDAQLDPSFYRDTCPKVHSIVREVVRNVSKSDPRMLASLIRLHFHDCFVQGCDASILLNNTATIESEQQAFPNNNSIRGLDVVNQIKTAVENACPGVVSCADILALAAEISSVLGHGPDWKVPLGRRDSLTANRTLANQNLPAPFFNLTQLKAAFAVQGLDTTDLVALSGKKIFPIKFILYMLQNLKNNNDK

SEQ ID NO: 177147 - protein, 90 aa, Glycine max
  Clone ID: PAT_MRT3847_130981C.1.pep
IFSAYAYMTASIMLLPYMANDLVPQPIRGYLYRTFRYLIKPHSPTLTLMIEESTGISRNQVYYAGHSYLLTHVCPENEWLTISKSAKEKK

SEQ ID NO: 177148 - protein, 56 aa, Glycine max
  Clone ID: PAT_MRT3847_130982C.1.pep
SDSQEDDRWQEVLRRAGADGDAVFLSWSSAAIVTSLLAGASIVHNIYNPDMTIPPV

SEQ ID NO: 177149 - protein, 86 aa, Glycine max
  Clone ID: PAT_MRT3847_130983C.1.pep
TTYKGEIVLGGKFAQKIPKLSRGTTPGFKKNWSVLKRGRKNMGGETKTRVGEWEVFPPPLKRDPPRICEIFQKKKFLQEEKNFWGK

SEQ ID NO: 177150 - protein, 117 aa, Glycine max
  Clone ID: PAT_MRT3847_130984C.1.pep
LEGDRAVGVKVVPTKHLANGETPSRIIRARKQIIVSGGTLSSPLILQRSGIGDPEKLRKAGVKPLVDLPGVGLNFQDHYLTFATYRAKPHVESFDDFARGDPATQERVFQQWNINGT

SEQ ID NO: 177151 - protein, 253 aa, Glycine max
  unsure (1)..(253): unsure at all Xaa locations
  Clone ID: PAT_MRT3847_130985C.1.pep
GEHGQHQQHRDNPFGQASSLAEFGSIVLSTTDPLXFKSQLSHMAYSIWRCHNLPLGXSPKEIPAPKDSGLPLNAYMLHNPAHVELNAIDLAWDTVVRFSPFIEILGEGFFADFAHVSDDESRHFSWCAQRLAELGFKYGDMPAHNLLWRECEKXSDNVAARLAVIPLVQDARGLDAGPRLVKKLVGFGDNRTSKIVARIADEEVAHVAVGVYWFASVCEKLXCAPDPLFXDLLKEYNLELKVPPTPTATPTTP

SEQ ID NO: 177152 - protein, 105 aa, Glycine max
  unsure (1)..(105): unsure at all Xaa locations
  Clone ID: PAT_MRT3847_130986C.1.pep
RLSRHLLGGKRFLSNDEEVKXKITAQTANLVGKSSVKVETIGDLTPVQDFEALISRRDSPDXVVKAINEMKTKIFDLVEDSHKGDNYPKALECLVVLCKGCILEQ

SEQ ID NO: 177153 - protein, 450 aa, Glycine max
  Clone ID: PAT_MRT3847_130987C.1.pep
MMGASGKWVKALIGLKKPDKEEHVKEGGGKSKKWRLWRSSSGDTGVSWKGFKGGNHSAVASSEVGSDSSPHVVAAAAATGAAFTAAVATVVRAPPKDFRLVKQEWAAIRIQTAFRALLARRALRALKGVVRIQALVRGRQVRKQAAVTLRCMQALVRVQARVRARRVRMSIEGQTVQNLLNERRSKLDLLKQAEEGWCDSRGTLEDVKTKIQMRQEGAFKRERAMAYSLAHKQCRSIPSPNPRTRASFTSLKSHEMNKANCGWSWLERWMAAKPWESRLMEQSQSQAEALDKTPPPKKFVESFVSSNSKQSMVKVKKNNVTTRISARPPLVGQATRLSSSPSSEFRYDESSASSSICTSTTPMSGNTCDRTEDSNGNAVVARPNYMNLTQSTKAKQKTSGNHVYNRAQRQQSMDGFQFLKRAAVFSTADSDPSINFFRPLHLDKSSVMAR

SEQ ID NO: 177154 - protein, 106 aa, Glycine max
  Clone ID: PAT_MRT3847_130988C.1.pep
VKEGGGKSKRWRLWRSSSGDTGGSWKGFKGGNYRAASEVGSDSSPPVVAADADAAFTAAVATVVRAPPKDFRLVKQEWAAIRIQTAFRAFLVYHLIYTIFFFYRQY

SEQ ID NO: 177155 - protein, 81 aa, Glycine max
  Clone ID: PAT_MRT3847_130989C.1.pep
PKPGFLLSPVNPLKTLGPQIPQWVINTSNDFSKQTFFPKVPNPKNFFSPEKIKQALFKKTGYGGKCFSEKNGNPKYPFADV

SEQ ID NO: 177156 - protein, 55 aa, Glycine max
  Clone ID: PAT_MRT3847_13098C.1.pep
SNRKRSVRVCKLENEAPFCSCVLHVPICGLHSTVYHSDSLIAAVPVSRILAAVHL

SEQ ID NO: 177157 - protein, 54 aa, Glycine max
  Clone ID: PAT_MRT3847_130990C.1.pep
DRVKNLDRYPHDIYKVRIVNRGTHFMILFHSAFKPYLDTFYIELTSLSSDPCSS

SEQ ID NO: 177158 - protein, 37 aa, Glycine max
  Clone ID: PAT_MRT3847_130991C.1.pep
WNLETTHTTGLRRVPSPRKFYPTFSNLIYQFMLSNGP

SEQ ID NO: 177159 - protein, 47 aa, Glycine max
  Clone ID: PAT_MRT3847_130992C.1.pep
LKLSGSDGNDIMTIITVKCALLFVHVAVFILFFVVIFLLHVQCPEDW

SEQ ID NO: 177160 - protein, 57 aa, Glycine max
  Clone ID: PAT_MRT3847_130993C.1.pep
TILCLQSTSHNPYLEFPHRLLFTSDSLLFMLNSHWDLHLIVVNPFYRIYGPTYPQLN

SEQ ID NO: 177161 - protein, 48 aa, Glycine max
  Clone ID: PAT_MRT3847_130994C.1.pep
KSTGKAFITHPVLSREDLLRFSVGAPFSKKRHVNMAWQIFQKKTPAFL

SEQ ID NO: 177162 - protein, 102 aa, Glycine max
  Clone ID: PAT_MRT3847_130995C.1.pep
DDIGIKDRSMIWNSDLVETLELRNIMQNAMQTVVSAAARQESRGAHAREDFPERDDDKWMKHTLSFQRDPNSPEVELQYRGVIANTLDEAECKPVPPFKRTY

SEQ ID NO: 177163 - protein, 133 aa, Glycine max
  unsure (1)..(133): unsure at all Xaa locations
  Clone ID: PAT_MRT3847_130996C.1.pep
RVRSRVRPNAGLLMWRYFGGHLVFEVSKMTSPYIKCTVSFFIALGNXADDTINYEAFPHKLLQLGEIQENVVFVLSQEEFVTAWPTHARTATTLSDDGWPYLYAMVHDSSPSTIPDDIDIGGKLTTINNTCAY

SEQ ID NO: 177164 - protein, 236 aa, Glycine max
  Clone ID: PAT_MRT3847_130997C.1.pep
MFQESSATRWPTQPTQWTRYHDKLFERALLVVPEDLPDRWEKIADQVPGKSAVEVREHYEALVHDVFEIDSGRVEVPSYVDDSVATPPSGGAEISTWDNANQISFGSKPKQQGDNERKKGTPWTEEEHRLFLIGLSKFGKGDWRSISRNVVVTRTPTQVASHAQKYFLRQNSVKKERKRSSIHDITTVDSNSVPVPIDQNWVPPPGGSVQQSLQYPSSNMLDQMGTFGYSNYGFGM

SEQ ID NO: 177165 - protein, 233 aa, Glycine max
  Clone ID: PAT_MRT3847_130998C.1.pep
MFQESSVTRWPTQWTRYHDKLFERALLVVPEDLPDRWEKIADQVPGKSAVEVREHYEALVHDVFEIDSGRVEVPSYVDDSVAMPPSGGAGISTWDNANQISFGSKLKQQGENERKKGTPWTEEEHRLFLIGLSKFGKGDWRSISRNVVVTRTPTQVASHAQKYFLRQNSVKKERKRSSIHDITTVDSNSAPMPIDQTWVPPPGGSLQQSQQYPSSNMHDQMGTFGYSNYGFDM

SEQ ID NO: 177166 - protein, 97 aa, Glycine max
  Clone ID: PAT_MRT3847_130999C.1.pep
ELLFVKKVLTKERQGTKFVSDEKYKNIDLLTIIMSRYGCPSSLPQMKVVAAFCTPLAKKESIQSVHTDTGERGTRSLSYCFLCCNCCHVPPAFTTKS

SEQ ID NO: 177167 - protein, 77 aa, Glycine max
  Clone ID: PAT_MRT3847_13099C.1.pep
DKILLAHNITYTDLTVYKPHLSSLQCQSSIYPTLFVILCNIHSNLSQHQRSFQCQGLSIKFPIFVITSSFGVIPSKV

SEQ ID NO: 177168 - protein, 76 aa, Glycine max
  Clone ID: PAT_MRT3847_1309C.1.pep
LCFKHCGFNFIYIALVGSKSESLIGKYGVEAFGSTPSLLIFFFFASHTPLISQQNKVPLSQDVLHFWCLVFLYYCI

SEQ ID NO: 177169 - protein, 66 aa, Glycine max
  Clone ID: PAT_MRT3847_130C.1.pep
YYYYCTHSLSLSHCMAANSSSRGITALGNRFANRLEFSNPLKALKSRRGTIAGAYSSTAGQCMTRT

SEQ ID NO: 177170 - protein, 84 aa, Glycine max
  unsure (1)..(84): unsure at all Xaa locations
  Clone ID: PAT_MRT3847_131000C.1.pep
MAASVSTVGAVNXALLNLNGSGAVSSALSSXFSGTSLNNDIASRVPNSKVICGSFKIVAVXEMIEIEETHYTDKDSWKGLVYDI

SEQ ID NO: 177171 - protein, 127 aa, Glycine max
  Clone ID: PAT_MRT3847_131001C.1.pep
MATVLAPPSLSVRASSSRRHRKKQQQKRAWGDFSHLAQVVRKDMEFLKRGIDNGVAWANETFRIPEAAKKIDDVVWLRNLEDPHSPPLPSPSWPQPWYPGLSGVDLLMYDLEALEAYASYFYYLSKL

SEQ ID NO: 177172 - protein, 120 aa, Glycine max
  Clone ID: PAT_MRT3847_131002C.1.pep
MPVLTLSTNVSLNDLDASSILSQVISTVASIMRTPEPFVMVSLEGSTTTCFGGTEEPAAYGELVSMGALNPELNKKLSAGIACVLETKLLVPKSRFFLKFYNTEGYNCALNGSIMVVESK

SEQ ID NO: 177173 - protein, 56 aa, Glycine max
  Clone ID: PAT_MRT3847_131003C.1.pep
ASLTNKGQHACMCWWQLEHRGKEMEERPKPEGIIERGGMQNLIRVPQWRSRKLQVN

SEQ ID NO: 177174 - protein, 37 aa, Glycine max
  Clone ID: PAT_MRT3847_131004C.1.pep
CFCFKRFIVYDLWIYNLFDDVSCKVYLMEDVMPLSPI

SEQ ID NO: 177175 - protein, 82 aa, Glycine max
  unsure (1)..(82): unsure at all Xaa locations
  Clone ID: PAT_MRT3847_131005C.1.pep
TIPAVXNNXXGFRRRQSPPNXXRRRNARCRRXXLHRRGTXTXPCTXIXQFTQXNPAKQIPFXXKXLSLCESXLLLXSLTRAR

SEQ ID NO: 177176 - protein, 102 aa, Glycine max
  Clone ID: PAT_MRT3847_131006C.1.pep
PPPQGGGAPSSPGRGKTRVVPPGPPYYGAPPSLPGRLILTFFVVLGGTRGENGAPPKDFLPPCLNQMFLVECKMLAQKKNKWVPTRFCPPFVVMGSVFYSGP

SEQ ID NO: 177177 - protein, 118 aa, Glycine max
  Clone ID: PAT_MRT3847_131007C.1.pep
MALRIHVISPFFSISTTSPVALSTHKLTIRRINCTGGGEGGINDASLASELAARAARMNAHSVMAEEAMRKSRKLLFGELCEYMGLDEDQAQHKWTYMDDDEKLVLVKAFLAEWGSHF

SEQ ID NO: 177178 - protein, 46 aa, Glycine max
  Clone ID: PAT_MRT3847_131008C.1.pep
SAPPTGVDTRGDPLPAARLGDQNEIKSENATNNTTTPLLTKRQKNK

SEQ ID NO: 177179 - protein, 108 aa, Glycine max
  unsure (1)..(108): unsure at all Xaa locations
  Clone ID: PAT_MRT3847_131009C.1.pep
LLKDIDQPTATSKKFKRSRKVQVEDDDDDDWLPLDLFEIFEEMRKRKIFSVSDMHTXADAWGWTXERELKKKPPRRWSQEWEVELAIKVMQKVIELGGRXTIGDCAMI

SEQ ID NO: 177180 - protein, 61 aa, Glycine max
  Clone ID: PAT_MRT3847_13100C.1.pep
LVPIFVPPFWKHQGTRCGCCFFPWLVCIIYLQKTCYIDNIYTTRRMLKSMLSSLFNRVEAS

SEQ ID NO: 177181 - protein, 76 aa, Glycine max
  Clone ID: PAT_MRT3847_131010C.1.pep
GRLPVGAPLHMAGHNACYCIAGSSTVSSLSLSSRSHTRCHPRLHASRSLEHAFVIHERLRKSRIGSQQPLAPLGVL

SEQ ID NO: 177182 - protein, 71 aa, Glycine max
  unsure (1)..(71): unsure at all Xaa locations
  Clone ID: PAT_MRT3847_131011C.1.pep
WFWCRFVKIILGFSNFNNVGDRIKEVLMIVLSLIMTRFWMSSYFEIRVIIVXVXXVGGRASLFIIRRDXKE

SEQ ID NO: 177183 - protein, 86 aa, Glycine max
  Clone ID: PAT_MRT3847_131012C.1.pep
APLFGLNPQDQEGDLFVADVNTQLKNKNITTDIKLDTNSNLLTTITVNEPAPGLKTIFSFRGPDQRAGKGEGQDLRDCAGVSAGGG

SEQ ID NO: 177184 - protein, 72 aa, Glycine max
  Clone ID: PAT_MRT3847_131013C.1.pep
YSHEDSETKYFFKTIMSILINTLFVMHARQFFYCLMGDNSVTSYFDLIICSLTLLFCFDFHPSITIPFRYNS

SEQ ID NO: 177185 - protein, 108 aa, Glycine max
  Clone ID: PAT_MRT3847_131014C.1.pep
GGGGFDLVQGVFFYAPPPPRIVLPETLFLAQKRFVAPPPGGGIPVCVFPGGPPPPGEMFPPFFSCIPNPIFYWVPPPCFFKGLVWGPINKRFFFRTPGGGVGKCCFFF

SEQ ID NO: 177186 - protein, 52 aa, Glycine max
  Clone ID: PAT_MRT3847_131015C.1.pep
HHYILILNDLLIYNYPIYFLIKIFSTLLFTINKYKKYKNIIELYFIKNYQNS

SEQ ID NO: 177187 - protein, 171 aa, Glycine max
  unsure (1)..(171): unsure at all Xaa locations
  Clone ID: PAT_MRT3847_131016C.1.pep
DPNPNPNDAIKILPFEFVSLEACLEAACSVLENEAKTLEQEAHPALDKLTSKISTLNLERVRQIKSRLVAITGRVQKVRDELEHLLDDDEDMAEMYLSEKLAEQQVLDGDVVVVDDDDDDDDTSSADNGDLLQPHRTAPELSFDNVLGRDSASFSAVXKQLDVEELEMLLE

SEQ ID NO: 177188 - protein, 393 aa, Glycine max
  Clone ID: PAT_MRT3847_131017C.1.pep
MRGGEERSTGIRKKGSGVRQWLVLDGRGETEVVEAGKHAIMRRTGLPARDLRILDPLLSYPSTLLGRERAIVINLEHIKAIITAHEVLLLNSRDPSVTPFLQELQARILRHHHQTLADANPNPDDAIKILPFEFVALEACLEAACSVLENEAKTLEQEAHPALDKLTSKISTLNLERVRQIKSRLVAITGRVQKVRDELEHLLDDDDDMAEMYLSEKLAEQDDLEKAEDTSSADDVDDHIDRTAPEISLDNVVGRDSHGTRDSATYSAVTKQLDVEELEMLLEAYFVQIDGTLNKLSTLREYVDDTEDYINIMLDDKQNHLLQMGVMLTTATLVVSAFVVVAGIFGMNIHIELFDDQKAGMTQFLWTVGGSTAGTIFLYVVAIAWCKHKRLLE

SEQ ID NO: 177189 - protein, 172 aa, Glycine max
  unsure (1)..(172): unsure at all Xaa locations
  Clone ID: PAT_MRT3847_131018C.1.pep
APRGAHGKPFHPVAGGGFILKKRRGSRGFTQWGLGLVNPCPPSWLGPPLKEAKGLVSFLGXKGPLGPPGVKGLKRLGIFKTXPGKKALEKKTPEGPFFRPPKGIGPGHIVPGQGGSKNYGPPKKGPPFGGIIKSGPKGAPLGVKALGGAQPLYGTGGVGKEKPPLFLGFWGP

SEQ ID NO: 177190 - protein, 84 aa, Glycine max
  unsure (1)..(84): unsure at all Xaa locations
  Clone ID: PAT_MRT3847_131019C.1.pep
FTVLAMADNHVVRTKFLNFVRFIINKRAKLSGQVGINPYSMEWTDXANRVLNEGNDILCCDSARFDGSITNPVMNKIAEMINRL

SEQ ID NO: 177191 - protein, 127 aa, Glycine max
  Clone ID: PAT_MRT3847_13101C.1.pep
ICLQWIFVKKTFPLLVSLLLSPFLLLTVVAAAFILHRCHHTHSSPSAADDDDNDDMASRLDSLFTTNNNFRDGGDHTTTTDSDATAHVSPTMASVVADVLCLRLYHRKTNALLVVVRVRTTNLSVTV

SEQ ID NO: 177192 - protein, 40 aa, Glycine max
  unsure (1)..(40): unsure at all Xaa locations
  Clone ID: PAT_MRT3847_131020C.1.pep
XLAPLXKGIXRSRPRCIKKSKSVXMCXICXXRXGGSYYEQ

SEQ ID NO: 177193 - protein, 60 aa, Glycine max
  unsure (1)..(60): unsure at all Xaa locations
  Clone ID: PAT_MRT3847_131021C.1.pep
SASKFDDIVSGTNMNYYMLSGKRGLRKTXCXXXLAVKFXNNGHPTLXXXTDPXHXLXXXF

SEQ ID NO: 177194 - protein, 211 aa, Glycine max
  unsure (1)..(211): unsure at all Xaa locations
  Clone ID: PAT_MRT3847_131022C.1.pep
MGVDIQGKLRLALGSVKDHVSIGKAMMYHYQHDGFSNIEIAVLRATGHDNGTIDDRYMHEILFLVSNTPGSIPFLAERISRRLSKTKDHAVALKTLVLIHRLLRGGNRSFEQELCKAHVSGHLQISTRCFTKSSDHPSVGFLHKYAAYLEERMSWLINQAGKLEPVMSXGLEFRRYDEKSIDMAFRTLPKCQVLMTRVVXCSPHDILCFRS

SEQ ID NO: 177195 - protein, 72 aa, Glycine max
  Clone ID: PAT_MRT3847_131023C.1.pep
EEFGLWLSRVRILPVTVLAVDRISHANRRACGLCLGRLRRVGSSTPLGLQKQYLLGPFNPLHELWVPLRPLG

SEQ ID NO: 177196 - protein, 46 aa, Glycine max
  Clone ID: PAT_MRT3847_131024C.1.pep
ASMFSVNVNASEAVLVGMLPKDHVQLSGLYSGLKSANNMLSCMIYT

SEQ ID NO: 177197 - protein, 248 aa, Glycine max
  Clone ID: PAT_MRT3847_131025C.1.pep
MVGAIKAAIGDAVLTFMWVFCSSVLGIASGYITNALNLQHITYNGFPYPSFLVTTTLVFVLVFLFTIIGNVLGGASFNPTGTASFYAVGLGSDTLFSMALRFPAQAAGAAGGALAIMEVIPAKYRHMIGGPSLKVDLHTGAVAEGVLTFVITFVVLLIFLKGPRSDLLKTWLLATATVVLVMVGSAYTGPAMNPANAFGWAYINNWHNTWDQFYVYWICPFAGAILAAWLFRAVFPPPSPPEVKQKKA

SEQ ID NO: 177198 - protein, 49 aa, Glycine max
  Clone ID: PAT_MRT3847_131026C.1.pep
LNIGGNKILPEFFSLLFNQKKSSIASSNYIYFLITNFHIFNFSFLCNFI

SEQ ID NO: 177199 - protein, 248 aa, Glycine max
  Clone ID: PAT_MRT3847_131027C.1.pep
MVGAIKAAIGDAVLTFMWVFCSSVLGIASGYITNALNLQHITYNGFPYASFLVTTTLVFVLVFLFTIIGNVLGGASFNPTGTASFYAVGLGSDTLFSMALRFPAQAAGAAGGAMAIMEVIPAKYRHMIGGPSLKVDLHTGAVAEGVLTFVITFAVLLIFLRGPRSDLLKTWLLATATVVLVMVGSAYTGPAMNPANAFGWAYLNNWHNTWDQFYVYWICPFTGAILAAWLFRAVFPPPPPPEVKQKKA

SEQ ID NO: 177200 - protein, 60 aa, Glycine max
  unsure (1)..(60): unsure at all Xaa locations
  Clone ID: PAT_MRT3847_131028C.1.pep
VHSRKNGEKGREEFLKLGIVYSTXLIPGTTVEEAXYIKLIVALEKSVPTLVGLLCPKDEK

SEQ ID NO: 177201 - protein, 69 aa, Glycine max
  Clone ID: PAT_MRT3847_131029C.1.pep
HVLIFQLLRCIHSLWSPSVSQALPGEVRAAMVMGDVERFSLLGEGNSKLPKGVTDGSKIDMNKEGFLDP

SEQ ID NO: 177202 - protein, 68 aa, Glycine max
  Clone ID: PAT_MRT3847_13102C.1.pep
KKKKIAAFFWEFNSLNKFFKKPGSFVFRTLKKKSPQKIWLDLGPFCPPPKFLNPPLQCPRILAAFNWH

SEQ ID NO: 177203 - protein, 91 aa, Glycine max
  Clone ID: PAT_MRT3847_131030C.1.pep
TYFFYVTSFQLCKHKPFVIFLSLLHNMSSSSINWLVHYNGQIIKTDEGDLFQFPHLMFFQRKQGHALESLKRMIHQRLQFQQLDQVCYLSF

SEQ ID NO: 177204 - protein, 86 aa, Glycine max
  Clone ID: PAT_MRT3847_131031C.1.pep
NMFPLVCSHLQFSPSNILCSHMIHSLFALSMHSMFQIGCCSHGCHLIPFSRLFNGIMYASPNYITFEGFSATILSFSVDGFFLSSP

SEQ ID NO: 177205 - protein, 69 aa, Glycine max
  unsure (1)..(69): unsure at all Xaa locations
  Clone ID: PAT_MRT3847_131032C.1.pep
PSHNLVYTAFVKPYLYLMLRMLGLVRLXLXCXXXXLKSCICWYSYTGVTDGELFGANFXXFGRLFFFLY

SEQ ID NO: 177206 - protein, 82 aa, Glycine max
  Clone ID: PAT_MRT3847_131033C.1.pep
TRIESSLSFFFSTCTRIFTVADGGGFLKICARPFGMMVRIALAEKGIKYDSKEEDLHNKTPVLLKMNPVHKKIPALIHNGQP

SEQ ID NO: 177207 - protein, 58 aa, Glycine max
  Clone ID: PAT_MRT3847_131034C.1.pep
GALWVRFSSGEVSKAIESCICSSLHRLVRHLLAFDIVTSRLPVWYDGAVSPSNVGARP

SEQ ID NO: 177208 - protein, 193 aa, Glycine max
  unsure (1)..(193): unsure at all Xaa locations
  Clone ID: PAT_MRT3847_131035C.1.pep
FGSRLKTKRHHALGSLRSVTQDLGDAKESLPRVTGQEDTLRSMVEALGMELENVKREHSELKEKESKTESIVENLQVELWKSEFELEAYLAGESKARGASEEMILTLKQLFSETENARREIEDMKNETAELKMEAAVTKLQIXDDKTWRTRMVEKVEAANAAEASALDQIKGLSMRTRPSDSSPSEPGARITI

SEQ ID NO: 177209 - protein, 75 aa, Glycine max
  Clone ID: PAT_MRT3847_131036C.1.pep
IPKLQARFCSQADRSRSLTPSVPSPPIQTSRQRSSPPSPPSSVVLIQTITAPTTVVAIPMSSIVLQLINSFSSGN

SEQ ID NO: 177210 - protein, 62 aa, Glycine max
  Clone ID: PAT_MRT3847_131037C.1.pep
SHMIATQQEQLALIKTGANYNVRIFLLTLTKLNTEGNVYIATFAQRIARAFHQGSRPFTSDR

SEQ ID NO: 177211 - protein, 104 aa, Glycine max
  unsure (1)..(104): unsure at all Xaa locations
  Clone ID: PAT_MRT3847_131038C.1.pep
FFFNLAKQREAATTKAEGAAETEQPGQQLQGFKWPLWLMGPSVHLATGMVPTXRKPITSNFLGPNKTSLLSLMELXCIYNLGAALLLHKAEACIRPKSPTQNCK

SEQ ID NO: 177212 - protein, 60 aa, Glycine max
  Clone ID: PAT_MRT3847_131039C.1.pep
SLSLLHILHNLTLLENFSLFENFSLQKDLTLMITADFHNLRNKTHSARLSLLTNPLHAIS

SEQ ID NO: 177213 - protein, 67 aa, Glycine max
  unsure (1)..(67): unsure at all Xaa locations
  Clone ID: PAT_MRT3847_13103C.1.pep
KRSPFFLAKRFEKKGVRWEDRKXNFVKIIVKNFCFKRIPLEIQRPGPPFFFFFPLRWGINSFYPRGL

SEQ ID NO: 177214 - protein, 94 aa, Glycine max
  Clone ID: PAT_MRT3847_131040C.1.pep
DINMKVRGNEWEYAKKQRVLVGKKRRENSLNYLCLYIHNKLIYKLMTEITYAHLVSRSQFSKSSTLKRYPPTGPIMDTIYLSALPKERERKKRG

SEQ ID NO: 177215 - protein, 85 aa, Glycine max
  unsure (1)..(85): unsure at all Xaa locations
  Clone ID: PAT_MRT3847_131041C.1.pep
LDTDDLLSLLDILPNKVKAIIRLKELLTTKLPLGTPPVKVVIPILPTIRVLVTITKFEELXPEEECSTPLSSPSHVYDSKSNESD

SEQ ID NO: 177216 - protein, 72 aa, Glycine max
  Clone ID: PAT_MRT3847_131042C.1.pep
SKDNPWISLGFTASILQLNLEISFIENEIINYHLWQLPLKSQNELLNSSVRYSHFYTKNVLDHFVCHESHFF

SEQ ID NO: 177217 - protein, 51 aa, Glycine max
  Clone ID: PAT_MRT3847_131043C.1.pep
NPKKIHIKYNRTLHAIQKPQLQSHPYLSFSQISTLWGCYLRVVSPMSDHLV

SEQ ID NO: 177218 - protein, 80 aa, Glycine max
  Clone ID: PAT_MRT3847_131044C.1.pep
PLACIMDDAKNDLPWKDLDNKHGADFTTCSHIDALFTIFTMKRCDADDRPGCTNCSFPSTCSDDCGRTPHCILCSQACNC

SEQ ID NO: 177219 - protein, 144 aa, Glycine max
  unsure (1)..(144): unsure at all Xaa locations
  Clone ID: PAT_MRT3847_131045C.1.pep
MAEWLIAPPPRPLYKQQSWSPDTLRDEAWQRRKDNSHHISGDNHRCSHRLSKSLSEDDLDELKACFELGFGFDSPEIDPKLSNTIPALELYHAVNKQYNHHSLSRSSSSSCLVSDSDIASPTTIFNPGDDLAAKKTRLXQWAQV

SEQ ID NO: 177220 - protein, 69 aa, Glycine max
  unsure (1)..(69): unsure at all Xaa locations
  Clone ID: PAT_MRT3847_131046C.1.pep
RLKFKMEFSVGRVYFLDHLTAEHKYAGQFCLFRFKIQVLLNRHKKTTFNFHPLIFXXXXXXXXXXXXXX

SEQ ID NO: 177221 - protein, 108 aa, Glycine max
  unsure (1)..(108): unsure at all Xaa locations
  Clone ID: PAT_MRT3847_131047C.1.pep
EILEEVKKPQSSPGPKVXEWGNEAFQGLGKGGPFSLFLTNKXFSLGASAGGNKDGELSPLSGIKKTEDCIALRFSLRHXFLKGVPTVLVAKDQNPKWEPSSLEEVDPS

SEQ ID NO: 177222 - protein, 62 aa, Glycine max
  Clone ID: PAT_MRT3847_131048C.1.pep
ETISKRFEELNVCGKVTLKSKLREIAYPTLNSMCHPPKKVKTKGVQKKPMTKHQRSTKGDSS

SEQ ID NO: 177223 - protein, 103 aa, Glycine max
  Clone ID: PAT_MRT3847_131049C.1.pep
RIPSGRHFETYDASSFEGNIDLCGEQLNKTCPGDGDQTTEEHQEPPVKGDDSVFYEGLYISLGIGYFTGFWGLLGPLLLWRPWRIAYIRFLNRLTDYVYVCLL

SEQ ID NO: 177224 - protein, 78 aa, Glycine max
  Clone ID: PAT_MRT3847_13104C.1.pep
FMCLLMCLHGREKIIEGHGREKMLEGAYIIVGKVVIIRNLKRNHPRPLRTIFKRRRPRVKELSAKDRYFSPGQLRSTT

SEQ ID NO: 177225 - protein, 168 aa, Glycine max
  Clone ID: PAT_MRT3847_131050C.1.pep
MGGSSEDFSVVVLASDLGVDARPFLEHDQQQEEENWHDCSQYLSPDEDFSDLDQLQFLRLQGSDKNSNRILRIVGKYFPATVVSAERLKRYVFNKICSELPEGPFCIAYMHSTVQKEDNSPGITILRWIYEELPADFKDRLQTVYFVHPGFRSRLVIATLGRFFLSGG

SEQ ID NO: 177226 - protein, 47 aa, Glycine max
  Clone ID: PAT_MRT3847_131051C.1.pep
LNSDFFFFFFIFLFLFFFFFFFFFLGSVYFSNPDPLGEWIRFSQGTN

SEQ ID NO: 177227 - protein, 168 aa, Glycine max
  unsure (1)..(168): unsure at all Xaa locations
  Clone ID: PAT_MRT3847_131052C.1.pep
KLLCNKKKKKKKKKKKKKKKKKKKKKKKKKKKKKKKKKKNLGGGPXPNSPLRGVYYPPFLAGFXKRWDGKNPGVXNLNPFEKNPXFPRWGKKKKAPPDPPSQKLANLNGKWDPPLKGHLNPGGWGVTPKGTLYFARRLSPASFVFFLSFFRRVGGFSPEILNRGGLPF

SEQ ID NO: 177228 - protein, 133 aa, Glycine max
  Clone ID: PAT_MRT3847_131053C.1.pep
VQANPHSFCHFSIHTQKFLSSMLGAKKAELHPQNTLLQIKHDDKFFIILFSKEGSMSKPSFIMAVSVPFVCQSHPVTLKYTFSDDTLPPLTPSPSYFVNSNIIYMPLKKLSTSNIFLSLFPKLNLKKKNILLP

SEQ ID NO: 177229 - protein, 67 aa, Glycine max
  Clone ID: PAT_MRT3847_131054C.1.pep
GEAEFCRVSSPLGMYNHLPPLIWQVVRDGADKFLLHREASHYDSTIDSKQRLLERKLCSDCKNVDML

SEQ ID NO: 177230 - protein, 64 aa, Glycine max
  Clone ID: PAT_MRT3847_131055C.1.pep
LKKKKKGSAKCGLPPTDYIGPLLGCVRRFHIMSFHKGWGRHGNRCFLGANIILLKFYKVYNADA

SEQ ID NO: 177231 - protein, 130 aa, Glycine max
  unsure (1)..(130): unsure at all Xaa locations
  Clone ID: PAT_MRT3847_131056C.1.pep
EARTRHIYHMNDHSYLKTWTYIFGARCSSTVGEDSFHNYXRVWPFLVLAMTTYSSMHITISPISHGQVENVTXTGPKKLLSHYIIATHILYTFDCHAVTVEIMPAMCKPXKFTYIYLYATLYVYTLTIPS

SEQ ID NO: 177232 - protein, 93 aa, Glycine max
  unsure (1)..(93): unsure at all Xaa locations
  Clone ID: PAT_MRT3847_131057C.1.pep
MLSDRDGKEDMDRLSDLPDLVLLHIMKFMSMKHAVQTCVLSTRWKELWKRLXELALHSSDFTNLAHFSKFLSWVLLNRDSSISLHSLNLRRKG

SEQ ID NO: 177233 - protein, 61 aa, Glycine max
  unsure (1)..(61): unsure at all Xaa locations
  Clone ID: PAT_MRT3847_131058C.1.pep
PLHCKHYGKHCFHTSVATLMALSHHSPQQDAEAVTKAXEGWGSEEKPVIVILLHRTAYHRQ

SEQ ID NO: 177234 - protein, 38 aa, Glycine max
  Clone ID: PAT_MRT3847_131059C.1.pep
SFFFFFKLLQFYFHSPKAPKSPRGDIPKFNVTPFAFYQ

SEQ ID NO: 177235 - protein, 123 aa, Glycine max
  unsure (1)..(123): unsure at all Xaa locations
  Clone ID: PAT_MRT3847_13105C.1.pep
MYGNGRRNQELNEGVTAFFITWLTNFKLLLFTFDLGPLTPNSNSLLHFLSFACLPIRLTPLNSKSKSKSKLKLHFIIFPIKVFLFSLSLMSLKDQYKQKLHPTIILGIYCTLLYLLMDXCLGL

SEQ ID NO: 177236 - protein, 36 aa, Glycine max
  Clone ID: PAT_MRT3847_131060C.1.pep
FQITYYSILEYGVVGDLELLQNESDIPSARADTKCI

SEQ ID NO: 177237 - protein, 130 aa, Glycine max
  Clone ID: PAT_MRT3847_131061C.1.pep
CKANRLLYAPEDTAPEQKKCCDDIGQIRGPKLEEPVRPRRRPNTDPAGETQGSRDWRERSIGTREAQHLRRRNRIRAAPISATEGLMRGMEVSDTRSALKAPACGATLRRMMHALGQPMDKLRPEDTRTT

SEQ ID NO: 177238 - protein, 29 aa, Glycine max
  Clone ID: PAT_MRT3847_131062C.1.pep
MSKKMLNCETMMKSVLNYIFNRAHCCICT

SEQ ID NO: 177239 - protein, 57 aa, Glycine max
  Clone ID: PAT_MRT3847_131063C.1.pep
LGLLTLGAVLVGVLLLKLQWSHLFIASGLEIHASCDVPCLTSLSTFTWFSFSSVVVS

SEQ ID NO: 177240 - protein, 59 aa, Glycine max
  Clone ID: PAT_MRT3847_131064C.1.pep
SAVRSQVCCITQTSINSLILKIEVAKFFNEILPTHIRFGKHCHSVNLQVQVGKDHRSQG

SEQ ID NO: 177241 - protein, 138 aa, Glycine max
  Clone ID: PAT_MRT3847_131065C.1.pep
FLWLLGSDVVVIDPPRKGLDASLIDALKNISSVERKAFSSSGSSNSSQEEKRPWVLRAKEDSVQIGSKPPTNIAQSVPQTLIYISCGWESFKEDCKSLLSSKAWYLEKAHGFNFFPGTQSIEVLAVFKRGPQKKKQGK

SEQ ID NO: 177242 - protein, 54 aa, Glycine max
  Clone ID: PAT_MRT3847_131066C.1.pep
ISKKHILTYLLFKTLIHILIISIYNNFIKSNLITCYFFKNNYFINNLYTIFYFI

SEQ ID NO: 177243 - protein, 191 aa, Glycine max
  Clone ID: PAT_MRT3847_131067C.1.pep
DSHMVTFLFGLSTGCFVSLFCVYAILAHLCGIFSSSNEPAYMETVYPVFSVFTLLSLHLFMYGCNLFMWKNTRINYNFIFEFSPSTALKHRDAFLISTTLMTTVIGAMVIHLLLRAANFSPTEIDAIPGILLLFFIALLICPFDIFYRPTRYCFIRVICNIVCSPFYKGLLVKLFMADQLTSQIPLLKHLE

SEQ ID NO: 177244 - protein, 115 aa, Glycine max
  Clone ID: PAT_MRT3847_131068C.1.pep
GIRTRYMASLIEYGLCLGDVEMVFGPGDISWTLGAALIEGKFLWLNSTRHKSHVIISTLKNVKVMSSPTFLFAVLLLLLLIVYFSQVKLPMPSRRASAPGSSLPSYTHVRRRSNQ

SEQ ID NO: 177245 - protein, 70 aa, Glycine max
  Clone ID: PAT_MRT3847_131069C.1.pep
RVSLGHSQEEEGISGRSGYEKQCPELEESVAMLWCNHLWTKQREQNPEREAEEEEEEEEEEILAVIYKNK

SEQ ID NO: 177246 - protein, 126 aa, Glycine max
  unsure (1)..(126): unsure at all Xaa locations
  Clone ID: PAT_MRT3847_13106C.1.pep
MKMASQKCMEMEGEIKSLMKVWISILASLCYCYFISSRVPKGLLRFLTLSPVLYLFTILPLQLTTVLPTGVTAFFITWLTNFKLLLFTXXLGPLTPNSNSLLHFLSFACLPIRLTPLNSNQNQNQN

SEQ ID NO: 177247 - protein, 66 aa, Glycine max
  Clone ID: PAT_MRT3847_131070C.1.pep
PPKGKQGNYKLPPLAKQGKTFCRDSVKNKKQVLENKSEILQTKIKQPPRKWAPNSPNGTWALKGLI

SEQ ID NO: 177248 - protein, 45 aa, Glycine max
  Clone ID: PAT_MRT3847_131071C.1.pep
YIVVRSNIKHFLQKYINKSLFNFKQILPCLHISMGYSPSVVFSQP

SEQ ID NO: 177249 - protein, 154 aa, Glycine max
  unsure (1)..(154): unsure at all Xaa locations
  Clone ID: PAT_MRT3847_131072C.1.pep
PPPPLSPHPPPSPPTPPTPPHPPPPHSSPSPPPPPPPPSPPPPPPPXPPPPPTPPPPPPPPPHPPPXPPPKPHIPTNPPLTPPKKNPNLNPKTPFFFFSSHFQFLFSSQHFSSTFFLYFSYTKTSLNQTKLEFQTQNIKCCVFSKIVFHKINQK

SEQ ID NO: 177250 - protein, 68 aa, Glycine max
  Clone ID: PAT_MRT3847_131073C.1.pep
LLNPSSHTYHALHSLDLNIHQHLYYPEKETLIIHASPYQGTIQYYKAYSHTDQIFQRLMTSRRLPLPY

SEQ ID NO: 177251 - protein, 32 aa, Glycine max
  Clone ID: PAT_MRT3847_131074C.1.pep
KPEGCQPILNTQYIEWFYVNTYTKQSQWDKLT

SEQ ID NO: 177252 - protein, 109 aa, Glycine max
  Clone ID: PAT_MRT3847_131075C.1.pep
RKITKINVVFSFSTLSQSWSTCIHSITTAITISHQCALLVLVVSTTLPSSHAITSNIASSNTKNKLTYCTLFHTPPCTHEGTWKLKLRIKKRVNVYLTVVIIIVHIQIY

SEQ ID NO: 177253 - protein, 37 aa, Glycine max
  Clone ID: PAT_MRT3847_131076C.1.pep
KIMTSSGYDHKFLTRKAQANLEIENRFPTCIIPPGLP

SEQ ID NO: 177254 - protein, 158 aa, Glycine max
  unsure (1)..(158): unsure at all Xaa locations
  Clone ID: PAT_MRT3847_131077C.1.pep
MAEEGGLVEFWPRPFGKKGKNALAEKGIKYESQEEDLENKNPLLLKKNPGHKKIPGLIHHGKPIWESLGGGQYLEEGRNDRNPLVASDPYQRAQAXIWADFVDXKIFELGRKNWTXSKGEEKEAVTKEIIXALKLLEEHAVRHDTYXGGDDLXFVDIA

SEQ ID NO: 177255 - protein, 188 aa, Glycine max
  unsure (1)..(188): unsure at all Xaa locations
  Clone ID: PAT_MRT3847_131078C.1.pep
MNRNAYNKEEKGCCYFHPKQVVVGVCPLCLNERLLILAXKSRPSSPSQASKFHSGKASASIHKIFALGSLFTRHQLKSHNYYXDQDDASQESFISIKFEENGVASWEKSTSTNAISNISNMKVCVESQVLNKDAKESKSVVEHGKSNNAFRWRKRIGRLVHFIPWKSSNKGGGVGSKGRGEGQLLRIG

SEQ ID NO: 177256 - protein, 272 aa, Glycine max
  Clone ID: PAT_MRT3847_131079C.1.pep
MKQLPTLLMKSLSLSVCSLPAAASTTTLQQIALHQPKGVAKVVLKKGKTQLFKDGNPMVYSGAVDRIIGRPPPKTGDVVLVADGTEKPIGWGMYNSVSMFCVRLMQLEDEATSDSSCALNMEKLIETRIDAAVEMRRRLGLPSVHTNAYRLINSEGDRLSGLIIDVFGGVAVVASSAAWVEKYKSEIEACIKKINYINHVNWRPSVDILKEDGVNEYDLNKMHSSTCPERTKIVENEIVYTISLKGQKTGFYADQRENQPVYIKNFRWSKGS

SEQ ID NO: 177257 - protein, 88 aa, Glycine max
  Clone ID: PAT_MRT3847_13107C.1.pep
ISCPPRTSYPSLSVITLDMGYLKINGPLLLIFHLELQTSSVAFVFDFWISQNLEWDAAGRVLQPTGLSDYCSTFVYVWLICIRRTIRL

SEQ ID NO: 177258 - protein, 225 aa, Glycine max
  Clone ID: PAT_MRT3847_131080C.1.pep
GLPSVHTNAYRLINSEGDRLSGLIIDVFGGVAVVASSAAWVEKYKSEIEACIMKINYINHVHWRPFVDILKEDGVNESDLNKMHSSTCPERTKCGWVGAYYLLQLGWNYTRRNVKFTDLLILGHVVPICQIVENEIVYTISLKGQKTGFYADQRENRQFISRISDGQKVLDICCYSGGFALAVRGGALNVTGIDTSPLALELAKENVVLNNIEPGRISFFEGRCY

SEQ ID NO: 177259 - protein, 42 aa, Glycine max
  Clone ID: PAT_MRT3847_131081C.1.pep
NNYRDGRDAPMNAINNPRTEYFVCLISTSAGGLGINLSYIRC

SEQ ID NO: 177260 - protein, 89 aa, Glycine max
  unsure (1)..(89): unsure at all Xaa locations
  Clone ID: PAT_MRT3847_131082C.1.pep
FNVTSCRIRHQKRRAGVLSVTKFQDVFNAASKSIHDFAKPLISLMKAXGWDLDRAASSIENGAAYSKRCDXTYXFEAYIARRMVHGIVL

SEQ ID NO: 177261 - protein, 28 aa, Glycine max
  Clone ID: PAT_MRT3847_131083C.1.pep
IYMNIDDSSENYWLRLLLREWAQFCIFL

SEQ ID NO: 177262 - protein, 53 aa, Glycine max
  Clone ID: PAT_MRT3847_131084C.1.pep
TVSADISYRGLGLITFDALGGTGISRNASVSKQVKSAPHGEIPCYRLYAYSEG

SEQ ID NO: 177263 - protein, 191 aa, Glycine max
  Clone ID: PAT_MRT3847_131085C.1.pep
MSLPRPSEGKAPSQLKEGVAPAAAAASSSSSWNNRLHTFPPLSLHNKSSKIEDSDEDMFTVPDVETTPVSVHSAATLQNSNLTQRNVTDPQFQTGFPGKRRRGRNPADKEHRRLKRLLRNRVSAQQAREREKVYVNDLESRAKELQDKNAILEERISTLINENTMLRKVLMNARPKTDDSIEQKQDQLSKS

SEQ ID NO: 177264 - protein, 41 aa, Glycine max
  Clone ID: PAT_MRT3847_131086C.1.pep
PPKKPYKYPSPSPPVDTYPPHGATPVYHFPAPPPYEKPYEG

SEQ ID NO: 177265 - protein, 408 aa, Glycine max
  unsure (1)..(408): unsure at all Xaa locations
  Clone ID: PAT_MRT3847_131087C.1.pep
MRRKSESSTQQGHSWLPLPLYGNSLTMTKNSTISQKSVTASCISLASSNLGRFFSFQEILDASNKFDEKLLLGVGGFGRVYKGTLEDGTNVAVKRGNPRSEQGLAEFRTEIEMLSKLRHCHLVSLIGYCDERSEMILVYEYMANGPLRSHLYGTDLPPLSWKQRLEICIGAARGLHYLHTGAAQSIIHRDVKTTNILLDENFVAKVADFGLSKTGPSLDQTHVSTAVKGSFGYLDPEYFRRQQLTEKSDVYSFGVVLMEVLCTRPALNPVLPREQVNIAEWAMTWQKKGMLDQIMDQNLVGKVNPASLKKFGETAEKCLAEHGVDRPSMGDVLWNLEYALQLQEXTSSALMEPEDNSTNHITGIQLTPLDHFDNSVSMIDGGNSCTDDDTEDVATSAVFSQLVNPRGR

SEQ ID NO: 177266 - protein, 165 aa, Glycine max
  unsure (1)..(165): unsure at all Xaa locations
  Clone ID: PAT_MRT3847_131088C.1.pep
LATLSFGKRFGFCAGGGXXGGGRRVXXXGGAFGXRXWXWXXXEXXLWCSRAXEEXXXXXXXXXGVGMMXXXAVEXXXXFVXFXXXSXGCLXXWESVXLVDMMVXVCWLVGLGQELVXVDLXCGLIIFGQWVVVGCFGXWFILWGGVXPFXGALALAFGXXXXXXX

SEQ ID NO: 177267 - protein, 115 aa, Glycine max
  Clone ID: PAT_MRT3847_131089C.1.pep
QNSRRGDIKPFHCSYFSHGFYNYVSYLYPSKLSYSMRFLHHLNLLYYIQQPSILLFTSSTRPYNSLFFHFKANQYYPIYSFLFNNLSPKISSPPIYFFYLTTHNPHSFPSSLYYP

SEQ ID NO: 177268 - protein, 115 aa, Glycine max
  Clone ID: PAT_MRT3847_13108C.1.pep
TNIATITQRLEVLKEDLSARVTSPETGQPISHNISYTKDVEKINLFLHFSDCINLHAISNFGAQIVTWMKGVEQIGAFVASRGDFSFDNQQRYSRTKAYNSHHQSWYAVPTNEVS

SEQ ID NO: 177269 - protein, 201 aa, Glycine max
  unsure (1)..(201): unsure at all Xaa locations
  Clone ID: PAT_MRT3847_131090C.1.pep
LFLWNTFTKHGSLDWTITLFSLSSSRNTLVMGIPLLKAMYGDFSGSLMVQIVVLQSVIWYTFMLFMFEYRGAKLLITEQFPETAGSITSFRVDSDVVSLNGREPLQTDAEIGEDGKLHVVVKRSAASSMISSFNKSHLTSMTPRASNLTGVEIYSVQSSREPTPRASRFIQTDFYAXFASRHXSPKHGYTNSFQSNGGIGD

SEQ ID NO: 177270 - protein, 186 aa, Glycine max
  unsure (1)..(186): unsure at all Xaa locations
  Clone ID: PAT_MRT3847_131091C.1.pep
ELATDGLVVGEGEKVLGDEAAGQEADTSSEKGVDGHEASNQVPGGSDSAAENGSQKEEVPPAEETKVHRVQLWTDIRSSLRTIEDMMSVRVKKKTGSVKDEQIIEAAKSPSHSDDVKSPKGAAFEEDSEEEFYDVERSDPSPDMPVVDGTNASANGITADAAPXRASFPWKEELEVLVRGGVPMAL

SEQ ID NO: 177271 - protein, 47 aa, Glycine max
  Clone ID: PAT_MRT3847_131092C.1.pep
FQNFRFCSSFPCLGGEVKCFYLQFSIFKFQLIFFFILVLIKPYTEEF

SEQ ID NO: 177272 - protein, 37 aa, Glycine max
  Clone ID: PAT_MRT3847_131093C.1.pep
EAGQSSAGEGLEGGVIFVSGPGVTVETVVLTSVPMEG

SEQ ID NO: 177273 - protein, 74 aa, Glycine max
  Clone ID: PAT_MRT3847_131094C.1.pep
SFFFSWVINRDHRLPYLKTGNKINRSWISRISQFLPTSQGTTSQGKENHSLCWPQTWRIILLCTLRSFAEHSPI

SEQ ID NO: 177274 - protein, 53 aa, Glycine max
  unsure (1)..(53): unsure at all Xaa locations
  Clone ID: PAT_MRT3847_131095C.1.pep
QTRGQTRGVEFMEKVFSSSRSFXLTVEDLNLLSVNYKNVIGTRRASCNIIFSI

SEQ ID NO: 177275 - protein, 102 aa, Glycine max
  Clone ID: PAT_MRT3847_131096C.1.pep
MAIDLRYKHRKASGRRDVKSDDVYLRLLVKLYRFLHRRTGSDFNRVVLKRLIMSRRNKPPVSLRKLIKSLEGRNDKIAVVVGTVTDDARVFEVPKITLATLR

SEQ ID NO: 177276 - protein, 70 aa, Glycine max
  Clone ID: PAT_MRT3847_131097C.1.pep
GDSGKKKRKKKKKGEKKRGPPPKKALNARVPKRKRNQKKKKKKKKKNQPHQPPPQNGPEGRPERAPCPGP

SEQ ID NO: 177277 - protein, 73 aa, Glycine max
  unsure (1)..(73): unsure at all Xaa locations
  Clone ID: PAT_MRT3847_131098C.1.pep
YLIKHLMEXDCLSIHVKMSRMSCRARHESVESFGSDSEVLMGDLPRWYVMSLACLREWEGGDREEDYRCKTRA

SEQ ID NO: 177278 - protein, 99 aa, Glycine max
  Clone ID: PAT_MRT3847_131099C.1.pep
LVGGRRSQSSPGEHGGASALYSPRQRMAFVRFTIWYPLASIWPWGSYSRSMGLAPFKTVLSGYSTQAESVVKVGLVRHTGTGFQHFACQVPGESHQFSL

SEQ ID NO: 177279 - protein, 168 aa, Glycine max
  Clone ID: PAT_MRT3847_13109C.1.pep
LFQQQDGTFRSTPWYVRFGKFQGVLKGAEKFVRINVNGVEANFHMYLDNSGEAYFLKEVDDDKVVDSIEAVQDSIDKKNGYLSNVHRLDHSISDSGVLQLKDESDSLVLPQLQRAESDVDRRFYEFPDDRSSLEDSVELSEYESNSYESLEGDNSWESQGSHPEMVLV

SEQ ID NO: 177280 - protein, 54 aa, Glycine max
  unsure (1)..(54): unsure at all Xaa locations
  Clone ID: PAT_MRT3847_1310C.1.pep
LLRLSQGHAVKGNQLLPVSVVKRNATVAVNTQATSPAXVAYSLIQVAYHVSIHG

SEQ ID NO: 177281 - protein, 44 aa, Glycine max
  Clone ID: PAT_MRT3847_131100C.1.pep
LKTILNSLMFSTSPSINLLKNSQFSNIYKQYKNFIPFILNILNL

SEQ ID NO: 177282 - protein, 86 aa, Glycine max
  Clone ID: PAT_MRT3847_131101C.1.pep
NLPHTHIFLYIIGKGCGPPNGGKVFCFLDPTLCVGFDVNLRGNVMGPGQGRAFGGSLPFQLVNPVFFFGPNCPIQILLCLWVIFFP

SEQ ID NO: 177283 - protein, 60 aa, Glycine max
  Clone ID: PAT_MRT3847_131102C.1.pep
MVFRQYSNATRVFFMCGGFGVGVGKRGVVLGIGRSRRVKLDCRVFWVVGQFGISRSSLGF

SEQ ID NO: 177284 - protein, 72 aa, Glycine max
  Clone ID: PAT_MRT3847_131103C.1.pep
SMFGILESFTLISEDLKQLSMKPEAVLVNLGYPSIGNQRQISQGIHLINIRKVFVHSLTLAYTKRLFPDLNQ

SEQ ID NO: 177285 - protein, 192 aa, Glycine max
  unsure (1)..(192): unsure at all Xaa locations
  Clone ID: PAT_MRT3847_131104C.1.pep
MKEGEKVLDPQLWHACAGGMVQMPQVHSKVFYFPQGHAEHAHTTIDLRVPPFILCNVEAVKFMADPETDQVFAKLSLVPLRNSELGPDSDSAAGDDAAEPSSCEKPASFAKTLTQSDANNGGGFSVPRYCAETIFPRLDCTAEPPVQTVVAEDVHGETWRFRHIYRGTPRRHLLTTGGSSFXVNQKKLVAGG

SEQ ID NO: 177286 - protein, 56 aa, Glycine max
  Clone ID: PAT_MRT3847_131105C.1.pep
ISPSRQIVSSPPCLRLRHKAIFFFFGSTSSSINYQSVYYFLVATSFSPISIIHFLF

SEQ ID NO: 177287 - protein, 143 aa, Glycine max
  unsure (1)..(143): unsure at all Xaa locations
  Clone ID: PAT_MRT3847_131106C.1.pep
RYLLVNQCEGLLLPVENEGKEQMSSMVVENTIGYLDLSHCHISDKFLQSGLPLFSNVKELYLNGNDFTILPACIQEFQFLTELYLEACENLHEIGWIPXNLEIFAVIDCTSLKELDLTLLPTWNKECCLLRKALLCGMPDLEK

SEQ ID NO: 177288 - protein, 53 aa, Glycine max
  Clone ID: PAT_MRT3847_131107C.1.pep
ALHTQLFHTPLFLTLSQYVSFTEKVFFLKRLWILKHFSISSNIHFNPIYPLLS

SEQ ID NO: 177289 - protein, 161 aa, Glycine max
  unsure (1)..(161): unsure at all Xaa locations
  Clone ID: PAT_MRT3847_131108C.1.pep
MNWNSRNSESSSAMRGGQSNGGVRGIASPDRGAHDKRGAHNNLLNDNNKSAASSDTAHDSKKGGSPSGSGDAAAPPVWPPKFVIALTNKEKEEDFLAIKGSKLPQRPKKRAKFIQRTLNLVSPGAWLCDLTLERYEVREKKISKKQXTKRFESNGKHGLRL

SEQ ID NO: 177290 - protein, 218 aa, Glycine max
  Clone ID: PAT_MRT3847_131109C.1.pep
MKLTGFLQAVTLALVLATVSASDPDPLQDLCVADLASAVKVNGFTCKDAAKVNASDFFSDILAKPGATNNTYGSLVTGANVQKIPGLNTLGVSLSRIDYAPGGINPPHTHPRATEVVFVLEGTLDVGFITTANVLISKSISKGEIFVFPKGLVHFQKNNGKEQASVIAAFNSQLPGTQSIALTLFAATPPVPDNVLTKAFQVGTKEVEKIKSRLAPKK

SEQ ID NO: 177291 - protein, 72 aa, Glycine max
  Clone ID: PAT_MRT3847_13110C.1.pep
WYNVRSMISYLQRGWGYITTLLSASIHYNSARISHCASNPEDSCCLNDVTEVSMSVISLSIYLIRENRISMK

SEQ ID NO: 177292 - protein, 86 aa, Glycine max
  Clone ID: PAT_MRT3847_131110C.1.pep
QARDAAAAQPLSPVLLLRLQPQRHLLTNGFLFSRKNVALYVYIPLLFVRRHPWGFALKAFTIGTYLNDKVICLGAPKSWHLLYWLL

SEQ ID NO: 177293 - protein, 76 aa, Glycine max
  Clone ID: PAT_MRT3847_131111C.1.pep
ASVCDDGQVAIVLVTYDLQKVQSFKTRLKRNISSKMENLLHLEKISMNKGNFHNRFQLKIYNEIHHLTLVLCELVL

SEQ ID NO: 177294 - protein, 122 aa, Glycine max
  Clone ID: PAT_MRT3847_131112C.1.pep
MRGQTNGGVRGIPSPDRGAHDKRGAHTTLLNHNTKSAASSDTAHDSKKGGSPSATGDAAAPPVWPPKFVIAFPTKEKEEDFLAIKGSNPPQRPKKRAKFIHRTLNQSPRGLKPMGTMASASE

SEQ ID NO: 177295 - protein, 59 aa, Glycine max
  Clone ID: PAT_MRT3847_131113C.1.pep
SQPFCAPQKKKKKPHMKVVRRTLNHNSHKKKPRPESTWANNKRRGPKKHFLVLCTRHKD

SEQ ID NO: 177296 - protein, 108 aa, Glycine max
  Clone ID: PAT_MRT3847_131114C.1.pep
KILCTSKNLNEQRKFPEQISLENLQWNSDKVWQILLGHASVNKNESKKKKKEEEKDSSQSRQKQVSLFSVAKRRTKRRRRKRYWGCLNSKPHSISKKCQILNIQLRVM

SEQ ID NO: 177297 - protein, 159 aa, Glycine max
  Clone ID: PAT_MRT3847_131115C.1.pep
QRELKKRLQREVDRLRDSFCRQHALELIFTEEGEARLNALIYLGMDGNVEQPEWFPSPIFQEIFAKLTDVASIAADLFVGRERFATVLLMRLAETVILWLSDDQTFWEEVETGSTPLGPIGLQQLYLDMQFVMIFSSQGPYLSRHLHQAIKNIIERAIN

SEQ ID NO: 177298 - protein, 64 aa, Glycine max
  Clone ID: PAT_MRT3847_131116C.1.pep
RLEFTEVHMSQIYREENDLQLKGERKKESFYNVIKGMGIFLFFLHDYIFPLRDICVNRKYIQCC

SEQ ID NO: 177299 - protein, 64 aa, Glycine max
  Clone ID: PAT_MRT3847_131117C.1.pep
MLCIEILDKCMICVPNMFALQLVSPGAWLCDLTLERYEVREKKISKKQRPRGLKAMGNMDSDSE

SEQ ID NO: 177300 - protein, 107 aa, Glycine max
  unsure (1)..(107): unsure at all Xaa locations
  Clone ID: PAT_MRT3847_131118C.1.pep
XXXXXHXTXXTXXNXXRNSXXSXXEXKXXYTXNPKXPXNXSTXXNQXPLXXXXTSXXXXTNXXXXNXXRXXXXXXRXXXXXPXXXTNTQXNTKEXXXDSXVXKXXTP

SEQ ID NO: 177301 - protein, 525 aa, Glycine max
  Clone ID: PAT_MRT3847_131119C.1.pep
MRVPVPSSPQANPKPTNNVVRTIALPNLNNSTTPPTGLCYEPTSVLDLCRSPSPGTEKPTTDHSVLVTNSQDYLDLEDHALHNLDWDSIMKDLGLHDDSATPVLKTFLHPDDDDDDDNNNNPSCDDFTLFDHALEFTTLSDIYSNQNFAFDFNHLPHDFNHLNGFDFIEELIRAADCFDTKQLHVAQLILERLNQRLRSPVGKPLHRAAFYLKEALQSLLSGSNRTPRISSLVEIVHSIRTFKAFSGISPIPMFSIFTTNQIVLDHAASSFMHVIDFDIGLGIQYASLMKEIAEKAADSPVLRITAVVPEEYAVESTLVRDNLAQFALDLRIRVQVEFVPLRTFENLSFKAVKFVDGENTAVLLSPAIFRHLGNAAAFLADVRRISPSVVVFVDGEGCAETATASAASFRRGVVSSLEYYSMMLESLDASTVVGGGEWVRRIEMMQLRPKILAAVESAWRRVPPWREAFYGAGMRPVQLSQFADFQAECLLAKSQIRGFHVAKRQNELVLFWHDRAIVATSAWRC

SEQ ID NO: 177302 - protein, 37 aa, Glycine max
  Clone ID: PAT_MRT3847_13111C.1.pep
TGGYSISYLELGIVPWFIMIVHCEWLHADYNNACSSS

SEQ ID NO: 177303 - protein, 70 aa, Glycine max
  Clone ID: PAT_MRT3847_131120C.1.pep
TGPDRRVARSPLRWHRCWEGSKDHPPLVVPSVGCRRLWRYRDMRGQSEFLRVRGWQELRPSSLDGVGPIP

SEQ ID NO: 177304 - protein, 258 aa, Glycine max
  Clone ID: PAT_MRT3847_131121C.1.pep
ISHPKLGNCHRSLKKIEERNVIENKLKEEAREPGRKQIIAEFKSLVSSFPDEMGSMQSQLRKYKESASDIHSLRADVKSVSSILDRKVKECDVFSVRSVGLVAEIKRLLGVVQDLRESEWDLQLILEMFRRESIDSRDVMDAREAEYRAWAHVQSLKSSLDEHNLEHRVKTANEAEARSQQKLAAAEAEIADMRQKLADSKRQMCDLSDVLKSKNKQNENYLSEIESIGQAYDDMQTQNQHLLQQITERDDYNIKLVL

SEQ ID NO: 177305 - protein, 115 aa, Glycine max
  unsure (1)..(115): unsure at all Xaa locations
  Clone ID: PAT_MRT3847_131122C.1.pep
MAFQAFLKYPNFIKLFEKMVQKKMYFKVKARGLSPKNILANPNVLGYNLKKRIVPKFSVIKILKSKGLVKNNLKRGSFLCVXEEISFKQFVVNFKKKLPFLPDVYKGFIYYKNVK

SEQ ID NO: 177306 - protein, 253 aa, Glycine max
  unsure (1)..(253): unsure at all Xaa locations
  Clone ID: PAT_MRT3847_131123C.1.pep
LEPEEARELDKEVRQIVKEKEESVRNQDFEKAGELRXKEMDLKAQISALIEKGKEMSKAEXEAGDEGPMVTEVDIQHIVSSWTGIPVEKVSTDESDRLLKMEETLHKRVIGQDEAVKAISRAIRRARATRPXFLNRLDEMIVFRQLTKLEVKEIADIMLKEVFDRLKVKDIELQVTERFRDRVVEEGYNPSYGARPLRRAIMRLLEDSMAEKMLAREIKEGDSVIVDVDSDGNVIVLNGSSGAPESLPETLPV

SEQ ID NO: 177307 - protein, 372 aa, Glycine max
  unsure (1)..(372): unsure at all Xaa locations
  Clone ID: PAT_MRT3847_131124C.1.pep
KGGERRKKSIEKCDEFAIAYGDELKIIVHDGSAGFVVEGSAKQFDFQVHIKYNENKRFMNQDEAIKATRRDFRRVRMGRKNPNRPIASFNLSGLKQXCKPELVNALAEYNVVSEEAMIRLDMSEFMERHTVSKLIGSPPGYVGYTEGGQLTEAVRRRPYTVVLFDEIEKAHPDVFNMMLQILEDGRLTDSKGRTVDFKNTLLIMTSNVGSSVIEKGGRKIGFDLDYDEKDSSYNRIKSLVTEELKQYFRPEFLNRLDEMIVFRQLTKLEVKEIADIMLKEVFDRLKVKDIELQVTERFRDRVVEEGYNPSYGARPLRRAIMRLLEDSMAEKMLAREIKEGDSVIVDVDSDGNVIVLNGSSGAPESLPETLPV

SEQ ID NO: 177308 - protein, 65 aa, Glycine max
  Clone ID: PAT_MRT3847_131125C.1.pep
KSFFFGKLKIPLVFKKIGHFLNNFVLTKTRALWFLFLRPPKFLKGTCFMGNPLYLFFNLGAFFPP

SEQ ID NO: 177309 - protein, 46 aa, Glycine max
  Clone ID: PAT_MRT3847_131126C.1.pep
QSFASRRSEKSFPLSPRDGILARMRAKFKGVSSVQYPVSPLVMIKA

SEQ ID NO: 177310 - protein, 134 aa, Glycine max
  unsure (1)..(134): unsure at all Xaa locations
  Clone ID: PAT_MRT3847_131127C.1.pep
APPGCRSLALPSSLPRRTPGRLGRAARTPGTPFSCWGLFPPDXPHPPXGXLGAGARSPPPRWRPGSRRSPPQKKKNVFSPPPFLEACSFPPSAEQECPRGPPERKNATPGQNSRMTRLPPGPPRHPRHKKKRKT

SEQ ID NO: 177311 - protein, 55 aa, Glycine max
  Clone ID: PAT_MRT3847_131128C.1.pep
KPYVHVNHLHIQYSSNPIRGSHDFQVLCTLWDYAQSIQGILQHSKPIRSRIYHDF

SEQ ID NO: 177312 - protein, 59 aa, Glycine max
  Clone ID: PAT_MRT3847_131129C.1.pep
YIFERTGVMDLIRFLFVINEIRRSKLMNRFGRVLHWAYFFILERKMSVIMGGWGWCILY

SEQ ID NO: 177313 - protein, 69 aa, Glycine max
  unsure (1)..(69): unsure at all Xaa locations
  Clone ID: PAT_MRT3847_13112C.1.pep
RLYKHILTSLARTTCKPITILQPCTHKYPNSAQHVYSAALSXFGLLPNSTLMAVPSFYQHPVGLLTYGL

SEQ ID NO: 177314 - protein, 230 aa, Glycine max
  Clone ID: PAT_MRT3847_131130C.1.pep
MGTTCPESPPLLQDLRVTIHETSMVFPSKETEKRSLFLSNIDKVLNFEVETVHFFGANKDFPPQKVAKMFKNALEDALVVYDFLGGRLNLNPETKRLEIDCNAKGAGFVVASSEYKLSEIGHLVYPNPSFAQFVHKSKDFLQQNDQPLCVAQLTSFKCGGFAIGFTTSHTTFDGLSFKTFLDNLAALAANKPLAVIPCHDRHLLAARSPPRVSFPHHELIKLDNLPTGST

SEQ ID NO: 177315 - protein, 107 aa, Glycine max
  Clone ID: PAT_MRT3847_131131C.1.pep
KKKKKLKKKKKKKKKKKKKKKKKKKKKKKKKKKKKKKKKKKKKKKKRGGPPIRGSATREKNSGRAPGGSQFFLKGGVIKVGEKKGKGGSRGKKDFREKFQKKKSREE

SEQ ID NO: 177316 - protein, 87 aa, Glycine max
  Clone ID: PAT_MRT3847_131132C.1.pep
KGGPGPNKLGTSKQVGVNKSNPLDPKTNKALNQGVLQVVDRVHQKLPGRDFKPTQVLDVSDQVQKLIFQSTPVKNLCQTFIEWWPFW

SEQ ID NO: 177317 - protein, 46 aa, Glycine max
  Clone ID: PAT_MRT3847_131133C.1.pep
FCREGVKIYRDIKRKCIVRLTNDHTLSTKKQQTRIKCNHIRYNLYI

SEQ ID NO: 177318 - protein, 74 aa, Glycine max
  Clone ID: PAT_MRT3847_131134C.1.pep
LGTIAVNSSSTVPFLYGTCELHTPNILANKFINDSHSHLPRASFHAIAVQSVCVVCVHLQNMHCLSLSTFVYSC

SEQ ID NO: 177319 - protein, 110 aa, Glycine max
  unsure (1)..(110): unsure at all Xaa locations
  Clone ID: PAT_MRT3847_131135C.1.pep
PTHSDTRTLSNATGSDAKTQVEYISKSVEQHTLCTVGRLYLNCNYGSISYNWSPPRMKTNRDIIYTRLATQACTLKTIIQSCTSXYYDHKARTNAIIAILDTEFNASKVP

SEQ ID NO: 177320 - protein, 57 aa, Glycine max
  Clone ID: PAT_MRT3847_131136C.1.pep
YTNCVWVQFGTGGILTFPKPHFQQRYLSNQLTKYYHKNYAAIDDTSNSPPYYLNTIN

SEQ ID NO: 177321 - protein, 64 aa, Glycine max
  Clone ID: PAT_MRT3847_131137C.1.pep
GLFFFFFFFLVVKHRALLIPINKFCGGDCCEHRMAWKEMDYHNENRVYVLASLIFLNRGLCCSH

SEQ ID NO: 177322 - protein, 63 aa, Glycine max
  Clone ID: PAT_MRT3847_131138C.1.pep
IYNNNIANHEKNLWQKVIVMEGSYYKKGGGAPPFLPDPPENIFGRGFHGSYFFSLKWGDANLV

SEQ ID NO: 177323 - protein, 78 aa, Glycine max
  Clone ID: PAT_MRT3847_131139C.1.pep
KFKKKKKKKKKKKKKKKKKKKKKKKKKKKKKKKKKKKKKKKKKKKGGGLFKDPIFTSAGWQNKIFFLGPPNLISWAGF

SEQ ID NO: 177324 - protein, 61 aa, Glycine max
  Clone ID: PAT_MRT3847_13113C.1.pep
ARALICLYVLTAVRLRSSVYWASHTLVTDHACIDVHVPIITSTYSEGLTDMFNVNALYQTA

SEQ ID NO: 177325 - protein, 101 aa, Glycine max
  Clone ID: PAT_MRT3847_131140C.1.pep
DGYIRFTRHTYFHDKFFDNDAFKSATSVLFTKRYDPFLIYIFNNLLSYRTTGVPYYFHRLATTNYLMEIIFCCRQNPYKSRGGFNQWSTLKNNGEGYPISM

SEQ ID NO: 177326 - protein, 74 aa, Glycine max
  Clone ID: PAT_MRT3847_131141C.1.pep
DAWARRQQMGFKHGKPVEVQNPSGNTFHYQQTPRVSYRQNINTAIHLSLRREERIWSEQRSNMGTSMTETHSLK

SEQ ID NO: 177327 - protein, 195 aa, Glycine max
  Clone ID: PAT_MRT3847_131142C.1.pep
LIKKYNSSDHPIDCVVYDPLVIWVLDVAKEFGLFGAAFFTQMCAVNYIYYHVYHGLLKVPISSPPISIQGLPLLDLRDTPAFVYDPGFYPAYFDLFMNQFSNIHKADIVPANSARELEEQVVDSMSKLCPILMIGPTVPSFHLDKAVPNDTDNVLNLFQVDSSAISWLRQKPAGSVIYISFGSMVCFSSQQMEEI

SEQ ID NO: 177328 - protein, 146 aa, Glycine max
  Clone ID: PAT_MRT3847_131143C.1.pep
MSRLRLGKKLQPAKKAWKSFFNKVQSKVQKLNIPKAIKATFKRLLASLHSLHHLIPSRARHRRSLASNNYHVHSKKNISVISIDDLFTEPASSSSSSVMNVHAHAHHGETSRSKEVKKDLAEGSSDMNTIEDAWKALVAKSPQLVD

SEQ ID NO: 177329 - protein, 91 aa, Glycine max
  Clone ID: PAT_MRT3847_131144C.1.pep
LLIAGGQRSGTACFKVPHRGNFGGMTKKGQASGLSLGFSGQRTVETLQNEDQFGAAGAYAHNFLEKLTSRFLKMVFLSVQNFSPKGAGASG

SEQ ID NO: 177330 - protein, 439 aa, Glycine max
  Clone ID: PAT_MRT3847_131145C.1.pep
MPETESAAAAAVEEENNTALFGKYEVGRLLGCGAFAKVYHARNTETGQSVAVKVISKKKLNSSGLASNVKREISIMSRLHHPNIVKLHEVLATKTKIYFILEFAKGGELFARIAKSRFSEDLARRYFQQLISAVGYCHARGVFHRDLKPENLLLDEQGNLKVSDFGLSAVKDQIGVDGLLHTLCGTPAYVAPEILAKKGYDGAKVDVWSCGIILFVLVAGYLPFNDPNLMVMYKKIYKGEFRCPRWFSMELRRILTRLLDTNPDTRITVDEIMKDTWFKKGYKEVKFGDLGLEWKSEGEGVKDLNAFDIISFSTGLNLSGLFDSSCGVEEGERFLLRESPEKVVEMLVAAAEKEGVVVRMRKECGVELEGCGGNFAALVEVYRLPGELVVVEVRRRDGDGGVFRDVWRNKLRPCLCAASSSTTSDRDGTTLAQPVAGDS

SEQ ID NO: 177331 - protein, 120 aa, Glycine max
  Clone ID: PAT_MRT3847_131146C.1.pep
KQRGPFKVLDLKMVLSDFCGQSLICELILALVSLWLLVNSFKETLKEKRLIDFFDYFIQRYFDYFIIIFSRYFDYFIIIIFQDILIFYYYFAFFLFNRGYSVNDRLDFILTVIKRDYNTK

SEQ ID NO: 177332 - protein, 56 aa, Glycine max
  unsure (1)..(56): unsure at all Xaa locations
  Clone ID: PAT_MRT3847_131147C.1.pep
IVLLIEFXSSWESDLXLYRLDSITTLFLASKIRANNMACHLLASHCEQHLGQALVL

SEQ ID NO: 177333 - protein, 230 aa, Glycine max
  Clone ID: PAT_MRT3847_131148C.1.pep
MQIFVKTLTGKTITLEVESSDTIDNVKAKIQDKEGIPPDQQRLIFAGKQLEDGRTLADYNIQKESTLHLVLRLRGGMQIFVKTLTGKTITLEVESSDTIDNVKAKIQDKEGIPPDQQRLIFAGKQLEDGRTLADYNIQKESTLHLVLRLRGGMQIFVKTLTGKTITLEVESSDTIDNVKAKIQDKEGIPPDQQRLIFAGKQLEDGRTLADYNIQKESTLHLVLRLRGGDF

SEQ ID NO: 177334 - protein, 77 aa, Glycine max
  Clone ID: PAT_MRT3847_131149C.1.pep
PKQSGWRKGLAQKKLLGLASQFDSPYSIPTIAPRPLIILGGAEDRRCPVAGLEIPRSMASQAYGEFQCLDNLKQEFS

SEQ ID NO: 177335 - protein, 64 aa, Glycine max
  Clone ID: PAT_MRT3847_13114C.1.pep
STSPNYNHIVLKIIFIKQVSKEKPLSLCLPSGKRGRKFTTHIWKNKPTILPKAQELTSCSKVNY

SEQ ID NO: 177336 - protein, 211 aa, Glycine max
  unsure (1)..(211): unsure at all Xaa locations
  Clone ID: PAT_MRT3847_131150C.1.pep
MQDSGSMKISPLDLMSAIIKGKLDPSNVSSSSSNAAAAVLLENRQFLMLLTKKVTIFFGTQTGTAEGFAKAIAEEAKARYDKATFRVVDMDDYAADDDEYEERFKKETHALFFXATYGDGEPTDNAARFYKWFTEGGEKGEGWLENLTMVVFGPWNRAYEHFNKVAKVVDDMPAEQGGXRLVPVGLGDDEQCIEDDFTAWKEELXPALDDL

SEQ ID NO: 177337 - protein, 80 aa, Glycine max
  unsure (1)..(80): unsure at all Xaa locations
  Clone ID: PAT_MRT3847_131151C.1.pep
MGSNQXAISFITKXXIXDXGLXAXXXGLSSXXXTVDGGQRXXLXDRFXGILDXTVGEGXHXLVXWVQKPYIXDIXMILLG

SEQ ID NO: 177338 - protein, 708 aa, Glycine max
  unsure (1)..(708): unsure at all Xaa locations
  Clone ID: PAT_MRT3847_131152C.1.pep
MQDSSSMKISPLDLMSAIFKGKLDPSNVSSSTNAAAAAFLLENRDFLMLLTTSVAVLIGCVVVFIWRRSSSPKAKPLEPPKRVVEKLPEIEVDDGTKKVTILFGTQTGTAEGFAKATAEEAKARYEKATFRVVDMDDYAADDDEYEERFKKETHVLFFLATYGDGEPTDNAARFYKWFTEGGEKGEGWLQNLHYGVFGLGNRQYEHFNKVAKVVDDMLVEQGGKRLVPVGLGDDDQCIEDDFTAWKEELWPALDELLRDEDDATVSTPYTAAVLEYRVVIHDPLEASVDEKKWHNVNGHAIVDAQHPVRANVAVRKELHTPASDRSCTHLEFDISGTGVTYETGDHVGVYCENLSETVEEAIRLIGLSPDTYFSIHTDDEDGKPRSGSSLPPTFPPCTLRTALARYADVLSSPKKSALLALAAHASDPSEADRLRHLXASPAGKDEYSEWVIASQRSLLEVMAEFPSAKPPIGVFFAAVAPRLQPRFYSISSSPRMVPNRIHVTCALVHEKMPTGRIHKGVCSTWMKNSVPLEKSQDCSWAPIFVRTSNFRLPSDNKVPIIMIGPGTGLAPFRGFLQERLALKEGGAELGPSVLFFGCRNRQMDYIYEDELSHFVNTGALDELILAFSREGPTKEYVQHKMMEKASEIWSMISQGAYIYVCGDAKGMARDVHRALHTILQEQGSLDSSKAESMVKNLQTTGRYLRDVW

SEQ ID NO: 177339 - protein, 68 aa, Glycine max
  unsure (1)..(68): unsure at all Xaa locations
  Clone ID: PAT_MRT3847_131153C.1.pep
CPAVLQXIWSMISQGAFIYVCGDAKGMARDVHRALHTILQEQGSLDSSKAENMVKNLQTTGRYLRDVW

SEQ ID NO: 177340 - protein, 106 aa, Glycine max
  unsure (1)..(106): unsure at all Xaa locations
  Clone ID: PAT_MRT3847_131154C.1.pep
MQDSSSMKISPLDLMSAIFKGKLDPSNVSSSTNAAAAAAFLLENRDFLMLLTTSVAVLIGCVVVFIWRRSXXPKAKPLEPXKRVVEKLPEIEVDDGHQKVTILFAL

SEQ ID NO: 177341 - protein, 102 aa, Glycine max
  unsure (1)..(102): unsure at all Xaa locations
  Clone ID: PAT_MRT3847_131155C.1.pep
XXXXXXSSXAXXFSSPLXVNLXXWPFHLXXXLXVDXFLXLIXLXXCXXXXFYXLSSLLXIXFXXXFXXLXXLLXXXXXLXFXXXFFXFCXXXFLXXFXXXXX

SEQ ID NO: 177342 - protein, 325 aa, Glycine max
  unsure (1)..(325): unsure at all Xaa locations
  Clone ID: PAT_MRT3847_131156C.1.pep
MQDSGSMKISPLDLMSAIIKGKLDPSNVSSSSSNAAAAVLLENRQFLMLLTTSVAVLVGCFVVFIWRRSSSPKAKPLEPPKRVIEKLPEIEVDDGTKKVTIFFGTQTGTAEGFAKAIAEEAKARYDKATFRVVDMDDYAADDDEYEERFKKETHALFFXARGDGEPTDNAARFYKWFTEGGEKGEGWLQNLHYGVFGLGNRQYEHFNKVAKVVDDMLVEQGGKRLVPVGLGDDDQCIEDDFTAWKEELWPALDELLRDEDDATVSTPYTAAVLEYRVVIHDPLEASVDEKKWHNVNGHAIVDAQHPVRANVAVRKELHTSASDRS

SEQ ID NO: 177343 - protein, 255 aa, Glycine max
  Clone ID: PAT_MRT3847_131157C.1.pep
MVFWEGYVSDELMGTFAPIVLYWVYAGFYHLLPPLDRYRLHTRRDEETKNLVPFSTVVKGVLLQQLVQAIVALFLLTATASASGVIVQPSIPKQILQIAIAMFVMDTWQYFVHRYMHQNKFLYRHIHSQHHRLVVPYAIGALYNHPIEGLLLDTVGGAISYLVSGMTARTAVVFFCFAIVKTVDDHCGLWLPGNIFHIFFQNNTAYHDIHHQLQGLKYNYSQPFFSIWDKLLGTYMPFNLVKRPEGGFEARLAKE

SEQ ID NO: 177344 - protein, 106 aa, Glycine max
  Clone ID: PAT_MRT3847_131158C.1.pep
HRYETGDHVGVYCENLSEAVEEAIRLIGLSPDTYFSIHTDDEDGKPLGGSSLPPTFPPCTLRKALAQYADVLSSPKKSALLALAADASDPSEADRLRHLASPAGKV

SEQ ID NO: 177345 - protein, 82 aa, Glycine max
  Clone ID: PAT_MRT3847_131159C.1.pep
EFPSAKPPIGVFFAAVAPRLQPRFYSISSSPRMVPNRIHVTCALVHDKMPTGRIHKGVCSTWMKVLIFVSYIMVKLFKIGKV

SEQ ID NO: 177346 - protein, 93 aa, Glycine max
  unsure (1)..(93): unsure at all Xaa locations
  Clone ID: PAT_MRT3847_13115C.1.pep
IPEVGNIKTRYIPLTNNQLTGEIPASFGXNKEWKEILFSGNQLTGNVPEELCALNLDILDVSDNAGMTGKLGPNCKALFDKQVLVIKGTSLTP

SEQ ID NO: 177347 - protein, 78 aa, Glycine max
  Clone ID: PAT_MRT3847_131160C.1.pep
ALQAAPIVPASFSVLKEGKRGVSLKDSTLVGLSFSEPIKANFISFALMCNKEFEPKLFPGRAEQGLQPISIIHSHQKE

SEQ ID NO: 177348 - protein, 93 aa, Glycine max
  Clone ID: PAT_MRT3847_131161C.1.pep
VFCKKEHPNNKAGAGVGKAGGDKWQSLADAEKAPFAATAEKKKQEYEKTILAYNKKWEGTNPEEDESDKAKSEVNDDEEDEDEEDDDDDERRR

SEQ ID NO: 177349 - protein, 154 aa, Glycine max
  Clone ID: PAT_MRT3847_131162C.1.pep
MTSSLIRTLQRASTSLIRTPRLSSAYSATSRVGARTYAAEPEPATKSPFDSNIIRILRNEIEYQEEYAPPHQPETKFNSFTVEERRGEQVVTIKGKFGEFEDVKIEATMFDWCEHVPACGDDSSGVNLRLHLSLIVDIAKGEEGDSELEFVCSA

SEQ ID NO: 177350 - protein, 67 aa, Glycine max
  Clone ID: PAT_MRT3847_131163C.1.pep
FTRGVFPLAYGLKKKTKAGGPTPYLEGISLLFPSFTKPESIPPLEEPMLPDDNVFRSMGSQIRKRKF

SEQ ID NO: 177351 - protein, 34 aa, Glycine max
  Clone ID: PAT_MRT3847_131164C.1.pep
LPHLILMPHRDYHPAKASCICMIPVISMSLVQEV

SEQ ID NO: 177352 - protein, 46 aa, Glycine max
  Clone ID: PAT_MRT3847_131165C.1.pep
EPRPILRGNRALYLRTPKQARHECRYRKPPHGSLLTRTFRTSAYRR

SEQ ID NO: 177353 - protein, 58 aa, Glycine max
  unsure (1)..(58): unsure at all Xaa locations
  Clone ID: PAT_MRT3847_131166C.1.pep
MSSKRXVVIWLLLLXXXDXATXLHKSLMKSNXRKXKHWWGSQXTTPVXXXARMQNPGV

SEQ ID NO: 177354 - protein, 61 aa, Glycine max
  Clone ID: PAT_MRT3847_131167C.1.pep
FVLKGTGSGTSTLESPVHGELLKLISDQTWGDGTDLTFSSQALRGVKHMRKLSAVRDLTLP

SEQ ID NO: 177355 - protein, 53 aa, Glycine max
  Clone ID: PAT_MRT3847_131168C.1.pep
RWAGPRSIHQIFQFGSKEGNLAGSILQKGGPKSFLVKLSFKSIFLEIWTHGGY

SEQ ID NO: 177356 - protein, 90 aa, Glycine max
  Clone ID: PAT_MRT3847_131169C.1.pep
NDGDSDPLSHLPQNPNPSPRPVPIPQQRPLSLFPALALLPTPYLRRSQPLPPSSPPAKLPLTHVPYPHAPPPATSTTTTLTGPTVRRKKP

SEQ ID NO: 177357 - protein, 190 aa, Glycine max
  unsure (1)..(190): unsure at all Xaa locations
  Clone ID: PAT_MRT3847_13116C.1.pep
GSRNALFMDVISSGLDSSTTVQIIKCLRQIVHILDGIADISLLQPEPETYELFDDISLLSDGQIVYQGPREFVLEFFESKGFRCPERKAIFLQENIRXYLYSMTCDFKEGSAVPFDKRKNHPAALTTMKYGVNKKELLKANFSREYLLMKRNALVYIFKLSQVFFSSRLNAIMFDYYMILMCDFSASFHH

SEQ ID NO: 177358 - protein, 74 aa, Glycine max
  Clone ID: PAT_MRT3847_131170C.1.pep
EGFWEFQSPSFFKGLEGPFFDTKVFSGTNLPRGNGVKFWESPWVRPPTNMARVWFLPGWGGGNPKHLGGALWVP

SEQ ID NO: 177359 - protein, 87 aa, Glycine max
  Clone ID: PAT_MRT3847_131171C.1.pep
FLAGLDLGLPCNSGSGLKELMMGTPSMFGPKQTTLDFLGLGMAAGGTPGGGLSALITSIGGGLDVTTAAASFASGEFPGKDIGRRST

SEQ ID NO: 177360 - protein, 94 aa, Glycine max
  Clone ID: PAT_MRT3847_131172C.1.pep
MTTINFPYLFSPGFIVILLFSCVLAFFLNYCIFLNTTLNSAVTQTICGNLKDLFTIGLGWIIFGGLPFDFWNIIGQFLGFAGSGLYAYYKLIGK

SEQ ID NO: 177361 - protein, 120 aa, Glycine max
  Clone ID: PAT_MRT3847_131173C.1.pep
PSVRQEYSLERETHNCSIPVIHQLQLRYASMADKESPRFLQAFIPQKARMELPENESGKGPTIFNGTETSGERKPRIKSNKGDAPKELNCEAGGIYTQGQALSVGSLVVLPVLLLLYLCW

SEQ ID NO: 177362 - protein, 104 aa, Glycine max
  Clone ID: PAT_MRT3847_131174C.1.pep
FLQSCKDPIISSWLMSTKSSSTVDVEVCVNKTNMCYTNESENSVSMCHEQTLADHAVACIFQLGVHCLAYGGLLASICYGPHSHLVCHVQNVLEHEKNFVLYSH

SEQ ID NO: 177363 - protein, 117 aa, Glycine max
  Clone ID: PAT_MRT3847_131175C.1.pep
MSMSDSDSSSYAGADYKSFKQISRERLLHEMLRSSKTGDSKSTWKVLIMDKLTVKIMSHSCKMTDITDEGVSLVEDIYKRRQPLPTMDAIYFIQPTRENVIMFLSDMSGRTPLYRKA

SEQ ID NO: 177364 - protein, 80 aa, Glycine max
  unsure (1)..(80): unsure at all Xaa locations
  Clone ID: PAT_MRT3847_131176C.1.pep
KTQLPSFTHTHKQQMIXSVLEPLFRCLYLVSDRLSIHNFLHLTIIDVRNKNKQIQACKTSKIYGNPLITEPILSKRSISY

SEQ ID NO: 177365 - protein, 109 aa, Glycine max
  Clone ID: PAT_MRT3847_131177C.1.pep
VNETKLLPTRAAKIPLMISSSIVISSHFRIFNCSQLSNAVKANYSTDRWSTQLGRDLKYSRLEIDCYISRGRCPKHCRQPLQIIFLHSRVKTLTLFPISQIQPICPSRQ

SEQ ID NO: 177366 - protein, 118 aa, Glycine max
  Clone ID: PAT_MRT3847_131178C.1.pep
FAVSWADAWEKLTVRSKGNGFLKSRELVKRTQSVEGEEPLQQQQPQNGWSTARSTTTFTDHGSKEEAFFDSKAWLDSDCEDDFYSVNGGKHFLQLSLLLYFFSSSGRAFKFVYLTILL

SEQ ID NO: 177367 - protein, 49 aa, Glycine max
  Clone ID: PAT_MRT3847_131179C.1.pep
GETVRQTYRSFSNTITRPHQTSHSLRTCFQHRIGLRLVSSLPHNGLSSI

SEQ ID NO: 177368 - protein, 73 aa, Glycine max
  Clone ID: PAT_MRT3847_13117C.1.pep
SCLNSSASSLGCFWTTQFLVCAFVDYCRYRSWNFDVTIRRDVGRRAADAEALEEETRRRIFEEDQTPRRKVVW

SEQ ID NO: 177369 - protein, 69 aa, Glycine max
  Clone ID: PAT_MRT3847_131180C.1.pep
TLLRSPESKFLEPTSLRKCSTLSQTSHDSSSDRLSFSSSRHKSGIMITSGRSKRRLTQACSLEHQRMTR

SEQ ID NO: 177370 - protein, 246 aa, Glycine max
  Clone ID: PAT_MRT3847_131181C.1.pep
MLPLFRGNELVMQFSNRPQRQQHKISEDLILDDYASLNVNDSNQKFITSSSSQPTKKLFYGANKKNHDSPEQAKKMIHKEIERQRRQEMATFYASLRSLLPLEFIKGKRSISDHMNEAVNYIKHMQKHIKELGAKRDELKKLSNHSNNMENNHEGLHTSCNFTVHEKNGIIGIEITSVFREEKPKISKLLQFLTEEGLEVVSFFSTEVNGRLLHSVQCEVNHSNSVDPSELRKKVSKAFSTFRCSD

SEQ ID NO: 177371 - protein, 157 aa, Glycine max
  unsure (1)..(157): unsure at all Xaa locations
  Clone ID: PAT_MRT3847_131182C.1.pep
MLTASNLIPGAVYWTIRSIVSCASHILGITGLGQGYMTSTTETWELSSLAHKLDNINSHLRKQLTVCRQHLDDNRQREAFATLRLLFETPHQDNSKVLKAMFCSKDDPLPLFDGSSKQRVSIEVLRRKIVLLYITDVHNVPDQELVIXEQMYQESRQ

SEQ ID NO: 177372 - protein, 106 aa, Glycine max
  unsure (1)..(106): unsure at all Xaa locations
  Clone ID: PAT_MRT3847_131183C.1.pep
LLLFCPSLDGSRYCVDTVYGNGDITETRKCRLYVRVGLTQMLXGGVIIDILHAEQVRIMDEAYACWVIVLERVPSDIRDESRMHRLSDSMVINDIDASRYYHSNGE

SEQ ID NO: 177373 - protein, 64 aa, Glycine max
  Clone ID: PAT_MRT3847_131184C.1.pep
SQAATLFFFVFFVALSFALVQRFADSFVFIEKELVSVERLWDLGERWMRHHTVSRSLDLKHNRF

SEQ ID NO: 177374 - protein, 93 aa, Glycine max
  Clone ID: PAT_MRT3847_131185C.1.pep
SEAANVEEMLAKDAITASEKNESSKGNKNDRDSCSMVTLTLEEYHELRTRTYKAYTQAYATIKTATYEIQMPGEPELRSTIQVEHLSEQLSAR

SEQ ID NO: 177375 - protein, 260 aa, Glycine max
  Clone ID: PAT_MRT3847_131186C.1.pep
MTQSMSHKPLDSRHTTDSCLLQLRTWKPFKLQQDGPHPKPYYHKRPCLSDRTTTSFSLDMSKLTLADDDNHNPNNRATNYRLVARKRRRRGSRSVSGRSSDRSGTRRCCSVGASAAYGTCSDFPVAMGTDSSGELFGNGDPNWSSDVSEAKNSRRERERDGGSGEKENLGVGFGVSGCSEANGNESGYGSEPGYRGDAEFGYGDEFDEEEDDPRLLFWGDQLGAVDSKMEMVGENTLLDQKSHHRCRRRKHDCRMVDALR

SEQ ID NO: 177376 - protein, 432 aa, Glycine max
  unsure (1)..(432): unsure at all Xaa locations
  Clone ID: PAT_MRT3847_131187C.1.pep
GREKRAAELVKKDNEVIVKLENTAIERSKSVESAILGKYNIWRKEIENENVDSTVRLMRDQIIMARVYLSIAKMKNKVELYEELIYRLKESQHALGDAVSDADLHRSTHGKIKAMGQVLSKAREQLYDCKLVTGKLRAMLQTADDQVRSLKKQSTFLSQLAAKTIPNGIHFLSTELPIDYYLLTPEKRKFPGSENLENRSLYHNAMFLDKVLSAAVVLYSTIMNAKDPLKHVFHLVTDKLNFGAMRIWFLLNPPGKATIHGDNVDAYKWLNSSYCPASRQRNSPKWCXLQSFHRFDKYLNFXHIARNFDPNACGWAYXNMFDLKVWKKKDITGIYHKWQNMNEDRVLWKLGTLPPGLITFYGLTHPLDKSWHVLGLGYNPSLDRSEIENAAVVHYNGNMKPWLEIAMTKYRSYWTKYVKYNHPYLRNCKLNE

SEQ ID NO: 177377 - protein, 83 aa, Glycine max
  Clone ID: PAT_MRT3847_131188C.1.pep
LRTLSPGLMTFYGLTHPLNKSWHVLGLGYNPSVDRSEIDNAAVVHYNGNMKPWLEIAMTKYRSYWTKYVKFNHPYLQNCKLRE

SEQ ID NO: 177378 - protein, 61 aa, Glycine max
  unsure (1)..(61): unsure at all Xaa locations
  Clone ID: PAT_MRT3847_131189C.1.pep
XXNFFRXPPFNLSKVLSXPXSNLXAPSFXXKXPIISXKLIQISXFRVLFCXVYXXTNXMHI

SEQ ID NO: 177379 - protein, 120 aa, Glycine max
  Clone ID: PAT_MRT3847_13118C.1.pep
FYGQSLISNFLTTQELFAEVGDLKRHAVHYDRSGRSKGTAEVVFSRRADAVAAVKRYNNVQLDGKPMKIEIVGTNISTPGVAPARNGAIGNFDGVPRRYALAYWLCSLIICSYLIWFLEL

SEQ ID NO: 177380 - protein, 172 aa, Glycine max
  unsure (1)..(172): unsure at all Xaa locations
  Clone ID: PAT_MRT3847_131190C.1.pep
GGTQRPTQASGRTKATERRRTAKPTTTQEGRKAGGREPSETPEEGLKASRKGALEIGERRKPRVQALHKTDKTGSLSEAREELRTARQQVKKTDPHRPQQPARVDVTEHGTAQGGYSGELKEAQAAKQXGGADTAEGRIKVGSTQRAMPKAPAETDMRPKPRNAKKAADIRG

SEQ ID NO: 177381 - protein, 107 aa, Glycine max
  unsure (1)..(107): unsure at all Xaa locations
  Clone ID: PAT_MRT3847_131191C.1.pep
TTLLFGDKGVTVFGHINPEEIPWGSSGADIIVXSTGVFTDKDKAAGHXKGGAKIVIIMDPPLSIAPMFVVGVNEHXYKPELDIISNSICTTNXLAPLDYVINDRHGI

SEQ ID NO: 177382 - protein, 44 aa, Glycine max
  Clone ID: PAT_MRT3847_131192C.1.pep
THIRGDQIIFINYCTNSISSTNHKLIDMLTSFIVSPLLNLTKIL

SEQ ID NO: 177383 - protein, 76 aa, Glycine max
  Clone ID: PAT_MRT3847_131193C.1.pep
SPKFRRSQIVLAVSKHVKPSLIEIPHLVTFVLCHRELAIAFPPQKCSSLGDVVASEEEISSPFNFIAMIMGQWDYA

SEQ ID NO: 177384 - protein, 180 aa, Glycine max
  Clone ID: PAT_MRT3847_131194C.1.pep
MKGGRSHRPQSSDPPDEWVDGSWTVDCICGVTFDDGEEMVKCDECGVWVHTRCSRYVKGDDTFACDKCKARHNSNSNNTTTTTTNTTNPMETEVAQFLVELPTKTISMDNKKALPSRPRLWTDKPIEERVHVQGPPGGDPSIFAGQSASSIFTPQLWKACGYVPKKVSFKYNEFPFLNMI

SEQ ID NO: 177385 - protein, 229 aa, Glycine max
  unsure (1)..(229): unsure at all Xaa locations
  Clone ID: PAT_MRT3847_131195C.1.pep
CLDLKILLVFDFRKTFHLSRFLSERCPLIRAYGAIRFNAKAKVSSEWLAFGSFYFMIPQVEFNELEGGSMLTITIAWDNNLSWSWEXAINALQETLRNVSSSIVKFPKQTPPTLISSSHNIPSKVDWDLAVNGALQMIKRNDSLLTKVVLARSTRVVPTADIDPLAWLSCLKVEGENAYQFLLQPPNAPAFIGNTPQQLFHRKCLHITSEALAGTRARGASQALDLQIN

SEQ ID NO: 177386 - protein, 106 aa, Glycine max
  Clone ID: PAT_MRT3847_131196C.1.pep
QLIIYGCIRVCFVCFHWSIPQDIYLGKKKRTTFYLLILLAEKEHTLPSGEGELKSQILVICQPKHSMKHRLHPLFLLEDPQKRGERISGTEEGVYIEQKKRTADHG

SEQ ID NO: 177387 - protein, 48 aa, Glycine max
  Clone ID: PAT_MRT3847_131197C.1.pep
ATQLNWWMLILHRKIIIRLLVILLFEKLQASLWCTCLTHNADHWVAIV

SEQ ID NO: 177388 - protein, 58 aa, Glycine max
  Clone ID: PAT_MRT3847_131198C.1.pep
KISFFHVQTGSAPIFYRDCYMNASVRNDSPMRKSLIPASKKPGFFGAGGGLKIGGTLA

SEQ ID NO: 177389 - protein, 327 aa, Glycine max
  Clone ID: PAT_MRT3847_131199C.1.pep
MDPLGKRPAAEDDSVISDCESGVSGGDTAPPADENADLVRTRFVRGLVAHWFKPEVLAVRRNVCSSVMALARQHSFHVFARAVAELRGGNANVKFAWYGASSKEEINDIIQHGFGHAHSNGLRLSPQDSPLESVKSSVVDEDGLRHLLLCRVILGKTEVVPRGSYRCRSSSQEFDSGVDDLVNPNKYVIWCNQINTHVLPEYVLSFRLPSPLKGIVKIGEPLRPSSPWMAFPALISMLSKILPPSEVASIAKFHKDYREKRISRHELIQKVRVIAGDKLLLSVIKSFRAKKIPANFKDDKAKEWQADSQQLERNDCSYGSSISYYRK

SEQ ID NO: 177390 - protein, 105 aa, Glycine max
  unsure (1)..(105): unsure at all Xaa locations
  Clone ID: PAT_MRT3847_13119C.1.pep
YYSPDAGVYYSKNQTQSGSQMTFKGYKHKFXILVDTILWKRVTFXVKTDRFSDNKETXLRKTSRRXYQQTYEQAWYXSSLSLQEKTWPCVEQMVMLSGIQAENLV

SEQ ID NO: 177391 - protein, 254 aa, Glycine max
  Clone ID: PAT_MRT3847_1311C.1.pep
MAESISSFWGPVTSTKECCEINYAYSSYIAEFFNTISNIPTILLALIGLINALRQRFEKRFSVLHVSNMTLAIGSMLYHATLQHVQQQSDETPMVWEVLLYMYILYSPDWHYRSTMPIFLFVYGALFAVAHSVFHFGIGFKVHYIILILLCVPRMYKYYIYTQDVSAKRLAKLFLVTFVLGSLFGFCDRVFCKEISRWPINPQGHALWHVFMGFNSYFANTFLMFCRAQQRGWSPKVLHLMGVPYVKIEKPKSQ

SEQ ID NO: 177392 - protein, 124 aa, Glycine max
  unsure (1)..(124): unsure at all Xaa locations
  Clone ID: PAT_MRT3847_131200C.1.pep
MNPNGILGGGLTLVAWSCHGTRYQRLSVRMKTGSGERYWPVKXAGCKVAAEEHNMPAFRXRMTDECAEPTIDYIDGDQXTPDYRPADQQDLFCAGEHDDHDNDIYICPIDNTVLCNIRYYEQHG

SEQ ID NO: 177393 - protein, 38 aa, Glycine max
  Clone ID: PAT_MRT3847_131201C.1.pep
CMYSCYFKHKIKLFNLYINRFSCYHLCLPTILKVLFSF

SEQ ID NO: 177394 - protein, 72 aa, Glycine max
  Clone ID: PAT_MRT3847_131202C.1.pep
MLSSSIPNISNTCGNFNCADKTSCTNGNSYGIIVQTENTYIYTDIMDVPASEHDQKCNCCTNCTCTDCTCGH

SEQ ID NO: 177395 - protein, 42 aa, Glycine max
  unsure (1)..(42): unsure at all Xaa locations
  Clone ID: PAT_MRT3847_131203C.1.pep
KELLFDPVFRPLVXKYAWEKNAFFADYGEAHQKLFRVGFAKT

SEQ ID NO: 177396 - protein, 61 aa, Glycine max
  unsure (1)..(61): unsure at all Xaa locations
  Clone ID: PAT_MRT3847_131204C.1.pep
HWSSHGRGAGYTQGYRETLSFLPVKGSGKAVPQYKPLXALHFYNRFLGGLPMLYKGKEKME

SEQ ID NO: 177397 - protein, 61 aa, Glycine max
  unsure (1)..(61): unsure at all Xaa locations
  Clone ID: PAT_MRT3847_131205C.1.pep
MPNPKVFFDMTIGGQPAGRIVMELYADVTPSTVENFRALCTGEKGAGRSGKPLTTKVXLHR

SEQ ID NO: 177398 - protein, 93 aa, Glycine max
  Clone ID: PAT_MRT3847_131206C.1.pep
MLNMSSHLCLALCHTIIIHSHLSLCSLHPIPNSRPCSRLVSVMKGGTFKTSSKIADPNLTVTNMADVTNARNPFGNGKAPQDPNKPKWPPSAF

SEQ ID NO: 177399 - protein, 128 aa, Glycine max
  Clone ID: PAT_MRT3847_131207C.1.pep
HEHFFLFLFFIFFFSPPRKKQCCYHPLGAKPRGEKFLRSPPPQTLRSPPRGDKKKPPQPQIWGGKRKKPHPQKGPPPGGLKNPPGGGGNPPRGNPPPPQRGPPQGGGARNCKLCTNHFCRPPPGETPP

SEQ ID NO: 177400 - protein, 30 aa, Glycine max
  Clone ID: PAT_MRT3847_131208C.1.pep
PLSFLIFSPYSITAHSYGSVFDPSIMIINA

SEQ ID NO: 177401 - protein, 62 aa, Glycine max
  Clone ID: PAT_MRT3847_131209C.1.pep
FLSITSITIDHLEAESAAFTTCIGEEYIAIEPSVPSSTIEWVPSHRNVRVSRVCAELFSDAW

SEQ ID NO: 177402 - protein, 237 aa, Glycine max
  unsure (1)..(237): unsure at all Xaa locations
  Clone ID: PAT_MRT3847_13120C.1.pep
HLPGSGDSCCKMNLQFVDPNSSVVGKSFKLTLPEVTSFPDFLVERTRFDAAMQRNWTRRDKCRVWWKNEDSSSGNWWDGRIRTRKDKSTVWWKSEGETYXIGGMVEFCESHPRRLNXLFDADSVWLFGTSDDSMKHKCKVLVSLLMQSLNGDKLTYVMHEEIKISNKSPFYSSQPVPSSIELECLSXKNNYTRSLEELKHDVSILLSNATPFLEKDAALSAKIKRLSEWFTRALSSL

SEQ ID NO: 177403 - protein, 55 aa, Glycine max
  Clone ID: PAT_MRT3847_131210C.1.pep
CFRSASALKNRSRPNTSDSKELTFSPVMSQRVSLFCIPSVPDNRPSLNSFFPCVF

SEQ ID NO: 177404 - protein, 278 aa, Glycine max
  Clone ID: PAT_MRT3847_131211C.1.pep
MRSLVAFDFDESQIVGLIGSHLCIWRRNGKRSIFPSLEGKFVKGSCMRYFDPEAVVGCDDGAVRVFDMYSRKCSQIIRMHYAPITCLCLSEDQLIMSGSTSGSITMSDPSSVQQVATLRSSDARGIRTLCFNPSSQLLFAGSAVGYAYCWDLRTRKLLWSNRVSPNVIYSLQHMHSDTSTLAVGGIDGILRLLNQNDGSVVSSCVMGDKLLSTFQSPSGSIQRRKGSRLPENIYINIDLIPKTARPSITCLAVGMKKIVTTHNTNDIRLWKFKSKISL

SEQ ID NO: 177405 - protein, 63 aa, Glycine max
  Clone ID: PAT_MRT3847_131212C.1.pep
CGSLSLTLSLFQFPVLFFTSYILRHLNITHPSHNTHPRKAPSLVRFNVLSIDTLILLIPFTFL

SEQ ID NO: 177406 - protein, 37 aa, Glycine max
  unsure (1)..(37): unsure at all Xaa locations
  Clone ID: PAT_MRT3847_131213C.1.pep
STFLPLSLVHQMAAAGSAAXSFFIHQIYLSFKQDLPH

SEQ ID NO: 177407 - protein, 103 aa, Glycine max
  Clone ID: PAT_MRT3847_131214C.1.pep
ELYICSHICHKPCQPPKQICIQQIQLKKKMYILFKANTGLYMAIHMNICTHTKKKSCPGPGSRYHSPHWLPKHFLLPSIYTWLFLCLHFLHFNLAGKFHVRKG

SEQ ID NO: 177408 - protein, 92 aa, Glycine max
  Clone ID: PAT_MRT3847_131215C.1.pep
SPKKRERKNTLWLLKEIHQIEKCARVINDLADSVQFPLSEEKGEEVRQRVQDVSKVCEALKDGLDPLERQVREVFHRIVRGRTEGLDSHGRG

SEQ ID NO: 177409 - protein, 378 aa, Glycine max
  Clone ID: PAT_MRT3847_131216C.1.pep
MRTTAEFQGSVLNLRGVQVHSMEGSSMEQELDLFQKHVTERFLELSLAESGELLSLSWVRKLLDSFLCCQEEFRVILHNHRAQVMKHPPLDRMAGEFLERNVKALDVCNAIRDGVEQIRQWQKLLEIVLCALDQKRSIGEGQFRRAKKALVDLAIGMLDDKDTSSSGSIAHRNRSFGRNNASKDHHHNNSFGHFRSLSWSVSRNWSAARQLQALGNNLSPPKANDIVATNGLALPIYTMSCVLVFVMWALVAAIPCQDRGLGLHFSLPRQLPWAAPVVALHDRILEESKKRERKNTCGLLKEIHQIEKCARVINDLADSVQFPLSEEKGEEVRQRVQDVSKVCEALKDGLDPLERQVREVFHRIVRSRTEGLDSHGRG

SEQ ID NO: 177410 - protein, 62 aa, Glycine max
  Clone ID: PAT_MRT3847_131217C.1.pep
QSLIYSFLSQNTNILTKYTNFTPYLTSLCAQYLHKLPSSNNKYTYNYDDHTVNSAGYNKFGY

SEQ ID NO: 177411 - protein, 136 aa, Glycine max
  Clone ID: PAT_MRT3847_131218C.1.pep
PPSPAQLCAVLLLAAGIAVLGQLPARLGMLSLPAPTPGLNLLTIICGAQRTVMVRRPLGTHTSTIVILAHLPLPGPNKPNYTTVWSVTFITPNNVRKKMTRAAPPRAVVVEPTGSTAVDTHAGAFAVLLILYIYHT

SEQ ID NO: 177412 - protein, 302 aa, Glycine max
  unsure (1)..(302): unsure at all Xaa locations
  Clone ID: PAT_MRT3847_131219C.1.pep
GAVFKGMLSRXILVAVKILNDTVGDGKDFINEVGTMGKIHHVNVVRLLGFCADGFHRALVYDFFPNGSLQRFLAPPDNKDVFLGWEKLQQIALGVAKGVEYLHLGCDQRRLHFDINPHNILIDDHFVPKITDFGLAKLCPKNQSTVSITAARGTLGYIAPEVFSRNFGNVSYKSDIYSYGMLLLEMVGGRKNTNMSAEESFQVLYPEWIHNLLKSRDVQVTIEDEGDVRIAKKLAIVGLWCIEWNPIDRPSMKTVIQMLEGDGDKLIAPPTPFDKTSSSRTSVVAPTRRQNFELEIINEIEE

SEQ ID NO: 177413 - protein, 90 aa, Glycine max
  Clone ID: PAT_MRT3847_13121C.1.pep
LAVSNVHNDQNIHSAVACSPHNQIRRVSRAAHYRKSPFEHFHHRDPRKLVAKVPCRMLFIQTISIVILIIIVTAHIIIIMVIMVVRTRKR

SEQ ID NO: 177414 - protein, 58 aa, Glycine max
  Clone ID: PAT_MRT3847_131220C.1.pep
VVDWERMKCVRKCGSVCIVDNLFGGCFIWTALFWRKVIRGVGRLRSKNKVGNQCGVSK

SEQ ID NO: 177415 - protein, 452 aa, Glycine max
  Clone ID: PAT_MRT3847_131221C.1.pep
MQRIKTSERTLIFPSHPPFLQDHPFPLSHLDTDPNLHLTFRYLRAYTSTTTTTSLDPFHVISSSLSHALPHFYPLTATLRRQQTSPHRLQLWCVAGQGIPLIRATADFTLESVNFLDNPASSFLEQLVPDPGPEEGMEHPCMLQVTVFACGGFTLGAAMHHALCDGMGGTLFFNAVAELARGATRITLDPVWDRARLLGPRDPPLVDSPLIGEFLRLEKGVLPYQQSVGGVARECFHVKDECLDNFKRTLLEQSGLNFTVFEALGAYIWRAKVRASGIQADEKVKFAYSINIRRLVKPPLPGGYWGNGCVPMYVQLSAKDLIEKPVCETAELIKKSKSNVTDEYVKSYIDYQELHFADGITAGKEVSGFTDWRHLGHSTVDFGWGGPVTVLPLGRNLLGSVEPCFFLPYSTATSEKKEGFKVLVTLREAALPAFREDMKVFCNSQEQWLSHI

SEQ ID NO: 177416 - protein, 51 aa, Glycine max
  Clone ID: PAT_MRT3847_131222C.1.pep
LSMFFCDSTLSRELERKNLVWVWVWVEKKKGEEGLYCSDFSCGVKKALSVV

SEQ ID NO: 177417 - protein, 44 aa, Glycine max
  Clone ID: PAT_MRT3847_131223C.1.pep
GTSFNYAAMIQFDLRCVTETYGLCINIYLVFRHVLEFHQSPPDG

SEQ ID NO: 177418 - protein, 58 aa, Glycine max
  unsure (1)..(58): unsure at all Xaa locations
  Clone ID: PAT_MRT3847_131224C.1.pep
WFTDFSTXLGXVSNFHMYNLKGRTLTVGLYELSYQHRGGKTNRSTKAKSLLNIQFSHG

SEQ ID NO: 177419 - protein, 45 aa, Glycine max
  Clone ID: PAT_MRT3847_131225C.1.pep
EIAGMLLRVRLLPIDIDNWKYKGQNTFILSQFYSNCTRYVFLFLI

SEQ ID NO: 177420 - protein, 216 aa, Glycine max
  unsure (1)..(216): unsure at all Xaa locations
  Clone ID: PAT_MRT3847_131226C.1.pep
CKFTIVGQELQKSGWGFAFNARHQNLNIRKLINNCCNPSSFTATPKGINIILHVEVVMSSIDCKFTIVRQEFTKSGWGFAFQRDSPLDIDLNTDILQLYESGDLQKIHDKWLNKKECSTVDTDSNKLALTSFWSLFLICGIACIITLTIYFARIFCQYNKFSPXPDKIDDKEMQPDMTILPSRTRNINKLMVFVDRREADXTEILRENKKRRLIIR

SEQ ID NO: 177421 - protein, 46 aa, Glycine max
  unsure (1)..(46): unsure at all Xaa locations
  Clone ID: PAT_MRT3847_131227C.1.pep
PLPPLFLXFFFXXXPXXFXXHPCYEQXKDSFFIDETRSWVNKKRAP

SEQ ID NO: 177422 - protein, 61 aa, Glycine max
  Clone ID: PAT_MRT3847_131228C.1.pep
TCQCCMKRLTIFTIDKNMTGKRQCFIIRNVRHPEKGSGSRLKSKSSGQVRAHLCPHHRYQH

SEQ ID NO: 177423 - protein, 65 aa, Glycine max
  Clone ID: PAT_MRT3847_131229C.1.pep
NSPIDPPIQPFPSHTYKKLYTHNTKKLKNGKFKILKTHIYTQKITKLLKIRDHIIHRHKFISYTT

SEQ ID NO: 177424 - protein, 42 aa, Glycine max
  Clone ID: PAT_MRT3847_13122C.1.pep
TSSLKGLGMIIGGKDSDFQARLGEFKEKCHLSLYIESGDSKI

SEQ ID NO: 177425 - protein, 127 aa, Glycine max
  Clone ID: PAT_MRT3847_131230C.1.pep
MKEGKSVKLNHQQPHQNGHLSPSKFAKLFDPEASWDKDQLGDVLHWIRQVLGLACGFLWGSIPLVGGIWFILFLALSTGIIYSYYAVILKVDEEEFGGHGALLQEGLFASITLFLLSWILVYSLAHF

SEQ ID NO: 177426 - protein, 83 aa, Glycine max
  Clone ID: PAT_MRT3847_131231C.1.pep
AGVISSLVNCDLRIRTQHKISFRIFTLSHFPRPSRTLSCSISHSLSLRKSCVFHQSDGNARKQSPPTTSQCSSCRARPLWEQY

SEQ ID NO: 177427 - protein, 46 aa, Glycine max
  Clone ID: PAT_MRT3847_131232C.1.pep
NVCGNKNKALCHENQTLNLVGHAWTLWKEQNALQPIDSSIKDSCVN

SEQ ID NO: 177428 - protein, 43 aa, Glycine max
  Clone ID: PAT_MRT3847_131233C.1.pep
LGIRLESSFTLHTLCLPNSKLICKMAHEKAQINIRGGLVTVDP

SEQ ID NO: 177429 - protein, 60 aa, Glycine max
  Clone ID: PAT_MRT3847_131234C.1.pep
IFLDIFLLQKKKKKKKKKKKKKKKKKKLKKKKKKKKKRGPLKRLGNAGSKPFQRAENVFP

SEQ ID NO: 177430 - protein, 111 aa, Glycine max
  unsure (1)..(111): unsure at all Xaa locations
  Clone ID: PAT_MRT3847_131235C.1.pep
PTRSPFVKKGRSPGASPQSPGFFXAPTVAEPPRVIPRGERTKTKGGNPLEGINGFFPKKGAPGXRIPQRGGKSIFWGPKGKPPRGRAPPIFPARGHQVLKRAPGSVKKFFF

SEQ ID NO: 177431 - protein, 56 aa, Glycine max
  unsure (1)..(56): unsure at all Xaa locations
  Clone ID: PAT_MRT3847_131236C.1.pep
ALXLFWLLXXVFFWXFXGLXFWXPFXPLGXLXXXXCXXXASFLXXXFCXFLXXXLP

SEQ ID NO: 177432 - protein, 78 aa, Glycine max
  Clone ID: PAT_MRT3847_131237C.1.pep
NCLYGAALHSRWHDGANDELRLLLCAIDPLASEAREGEMRAAGEHADSGQTLLKYLSSWQPDASFHGHESGAEQSMNI

SEQ ID NO: 177433 - protein, 451 aa, Glycine max
  unsure (1)..(451): unsure at all Xaa locations
  Clone ID: PAT_MRT3847_131238C.1.pep
LSPDMYNLPFVMIVVGGAASGKTSVCDMIFKQLHDQRVVLVNQDSFYNNLTEEELTRVQDYNFDHPEAFDTEXLLRVMDKLKHSQAVDIPKYDFKGYKSPTLYFLMMFLHLKVCRCYNFGRIKIVTSEIEIGCCDGFRDPRGMRELMNMDILTQMLMFVSSHSXTTARRIRRDTTEXGRDIGAVLDYSKFVLLMTCSXIIPRGGENHVAIDLIVQHIRTKLGQHDLCKIYPNLYVIQSTFQIRGMHTLIRDAKTTKHDFIFYSDRLIRLVVEHGLGHLPFTEKQVITPTGSVYTGVDFCKRLCGVSIIRSGESMENALRACCKGIKIGKILIHREGDNGQQLIYEKLPNDISDRHVLLLDPILGTGNSAVQAISLLIKKGVPESNIIFLNLVSAPQGVHVVCKSFPRIKILTSEIEIGLNEDFRVIPGMGEFGDRYFGTDDDDEQVVVSSQ

SEQ ID NO: 177434 - protein, 130 aa, Glycine max
  Clone ID: PAT_MRT3847_131239C.1.pep
CKGIKIGKILIHREGDNGQQLIYEKLPNDISDRHVLLLDPILGTGNSAVQAISLLLKKGVPESNIIFLNLVSAPQGVHVVCKRFPRIKILTSEIEIGLNEDFRVIPGMGEFGDRYFGTDNDDQQVVPPSQ

SEQ ID NO: 177435 - protein, 81 aa, Glycine max
  unsure (1)..(81): unsure at all Xaa locations
  Clone ID: PAT_MRT3847_13123C.1.pep
LXSTCXLVPCHFTXNVHMLLPQCVLVPFYFSPXIWRWWRLLVPSCVCITHGLSEQSRPFNIKLXLWHXYLXXXXLIPQPII

SEQ ID NO: 177436 - protein, 62 aa, Glycine max
  Clone ID: PAT_MRT3847_131240C.1.pep
TFPDFPLRPTLITFRKRRHSNSRGVLCSVKRLTVHCELFQIGSVTIIITSTHPQYKELRDEN

SEQ ID NO: 177437 - protein, 189 aa, Glycine max
  Clone ID: PAT_MRT3847_131241C.1.pep
MELSWLSAILVGAGYLALGYFIGSQYPPRFLFSHKLSTKQKDASLLNDSDNKKRNTKSKLEDPLEIEQLAEILDDFKMILVVRNDLKMGKGKIAAQCSHATLGLYKKILRRAPKALNRWEMSAQPKVVLKIECEEDMLALQERAKSLKLPTHITIDAGRTQIAPNSRTVMAILGPVEVVDEVTGGLKLL

SEQ ID NO: 177438 - protein, 34 aa, Glycine max
  Clone ID: PAT_MRT3847_131242C.1.pep
LLFITHRYMHSNYVVLMLDVILVLAFSLLLNTTN

SEQ ID NO: 177439 - protein, 44 aa, Glycine max
  Clone ID: PAT_MRT3847_131243C.1.pep
RLCSLPLSLLKFHRKLWEHVSFITNAPYSLMQLLLAPPSYTIEI

SEQ ID NO: 177440 - protein, 37 aa, Glycine max
  Clone ID: PAT_MRT3847_131244C.1.pep
STVRVASSYDRLLIGRPEELKSAANFVTDAIEFRSNS

SEQ ID NO: 177441 - protein, 61 aa, Glycine max
  Clone ID: PAT_MRT3847_131245C.1.pep
LPTLSTFPCLPLIMLLGLAGNDHNKEIRLLYNVGVTLSFVIIVCVQHSTYIHTLIFATSTT

SEQ ID NO: 177442 - protein, 80 aa, Glycine max
  Clone ID: PAT_MRT3847_131246C.1.pep
MTTNGKLMMADICTNAEDLVGRIVTAAHSGKRFYVDSICYDMSAENSFPRKEGYLGPLEYSSYADYYKQKYGVNLIYKQQ

SEQ ID NO: 177443 - protein, 175 aa, Glycine max
  unsure (1)..(175): unsure at all Xaa locations
  Clone ID: PAT_MRT3847_131247C.1.pep
MMITAAPTVNDECLTVRGRAVLTHVPGNIVVSPVGTESAFLGATSSISSSRHXVFVLGILQGYKLLSLFRVKIWXWMIPRIGRSASDVPMETQFLLLEAREESALXDELSSDSEEPTTENSCYILFLPVLDGXFRATLQGTQSNELQFCIESGRCSCSNFPITRSSICKFRGQSI

SEQ ID NO: 177444 - protein, 298 aa, Glycine max
  Clone ID: PAT_MRT3847_131248C.1.pep
MVFSANDLQEWKDFPKGLKVLLLERDNISAAEIRAKLEAMDYNVSTFCEENEALSAISSGLESFHIAIVEVSSSSGQGGFKFLENAKDLPTIMTSNNHCLNTMMKCIALGAVEFLRKPLSEDKLRNIWQHVVHKAFNAGASILSESLKPVKESVVSMLQLQTDNEQHESRVSIDIEKVSSFVDNDHELSPGNDKYPAPSTPQLMQGTRLLDDGDCQEQANCSTEKESGEHDGESKSVETTCGNLNAEITPQQRKSEITLVREEVDIVAASMGESVASPHEEVDIVDASKGESVASPHT

SEQ ID NO: 177445 - protein, 158 aa, Glycine max
  unsure (1)..(158): unsure at all Xaa locations
  Clone ID: PAT_MRT3847_131249C.1.pep
ARVLLMALIIWCIYSKMDDDTKVRRKEVLGSLCDQRARMLQDQFSVSVNHVHALAILGSTFHYYRYPSAIDQETFAEYTARTAFERPLLSGVAYAQRVVNSERERFEKEHGWVIKTMERKSSLVRDEYAPVIFAQDTVSYLESLDMILXEEDRENNLR

SEQ ID NO: 177446 - protein, 38 aa, Glycine max
  unsure (1)..(38): unsure at all Xaa locations
  Clone ID: PAT_MRT3847_13124C.1.pep
HLSPKTSPVGSXSCINXQRSXQRPMXQWANGPTXXCFL

SEQ ID NO: 177447 - protein, 121 aa, Glycine max
  Clone ID: PAT_MRT3847_131250C.1.pep
TIADNYFNSSFTIINPLFPLHNNCLSLSINKQAIEQQQLSLPNLTVNKQINNNKPIIQNHSIYKAKPTNTNTKNVYLSPAQKTNRPKVKPSTTLFLRASTTTATNTFSKPTILQPFTKQFL

SEQ ID NO: 177448 - protein, 63 aa, Glycine max
  Clone ID: PAT_MRT3847_131251C.1.pep
SGVRRRVREVPLSSRRQVGSGIKLSYNPLTVSPELLILHNSSFLDYSIISDKLDLIPSRNNRI

SEQ ID NO: 177449 - protein, 37 aa, Glycine max
  Clone ID: PAT_MRT3847_131252C.1.pep
KMGEVDLKAKSKASLGSLSLAVSFITGMAMDSIHIEG

SEQ ID NO: 177450 - protein, 91 aa, Glycine max
  unsure (1)..(91): unsure at all Xaa locations
  Clone ID: PAT_MRT3847_131253C.1.pep
WTPIYSFSRYKYDFPFLETNGEVTVDDNRVGPLYKHVFPPALAPWLSFVGLPWKVAPFSLFELQSXWIAGILXNRIXLXXKEEMAXDXDAF

SEQ ID NO: 177451 - protein, 54 aa, Glycine max
  Clone ID: PAT_MRT3847_131254C.1.pep
FSFNLNELKVLIVQTERVHKPKRKEKAREGEKNTSTQIQLFKANKKKTHSLNLQ

SEQ ID NO: 177452 - protein, 67 aa, Glycine max
  Clone ID: PAT_MRT3847_131255C.1.pep
PYKKPTMNAMLAIFLRHLQEIPHTPPASPENEVYKGYVANVIDPFPMLEGERTHEKPNHIHLLMCER

SEQ ID NO: 177453 - protein, 54 aa, Glycine max
  Clone ID: PAT_MRT3847_131256C.1.pep
DQHKTLSNIGHSFHIFAQHLTIQSSHLLFKFNFFYFPRNDIPTFSNLFAQIIIP

SEQ ID NO: 177454 - protein, 58 aa, Glycine max
  Clone ID: PAT_MRT3847_131257C.1.pep
IVMRLMILRSCKILNDLNYGLYCLLPIPSPNYVFLFGISDDYWTEILIFDYYMSTTLK

SEQ ID NO: 177455 - protein, 149 aa, Glycine max
  Clone ID: PAT_MRT3847_131258C.1.pep
NLPAALPVRGTLSPTLPATTRALPHHLKLNPALCTHQVLTTVHAPKTTYLSYPPHCSPPSAHTTLTSPHTQHIIFQPTYSLSCFALSTHVPNFAPCPTFHIPIPIPFLGLLFPLVYFIPLASPFVICPPPPPPKTGGRHTRDDRETSPW

SEQ ID NO: 177456 - protein, 90 aa, Glycine max
  Clone ID: PAT_MRT3847_131259C.1.pep
HVMGFPIVGGGHRLRNYRSVPSVPGFECDGKIWPVVLESYVVDVPQGTPQEDPGLFAETVVKLNLQKLGSVNKGMCGAGDGDGAGKGNKS

SEQ ID NO: 177457 - protein, 62 aa, Glycine max
  Clone ID: PAT_MRT3847_13125C.1.pep
KFRFLLLCLFLLMNRKNGTKTENYSHSSQQVVAMHSESYISLELWELTNGKKERIRKVLRIY

SEQ ID NO: 177458 - protein, 229 aa, Glycine max
  unsure (1)..(229): unsure at all Xaa locations
  Clone ID: PAT_MRT3847_131260C.1.pep
AALIAGVGLPCLGMCLSVLFTLGVARESHARDQDFWGAVWANTPIPSALRELLKPGPGSVEIDDHPMRMEETQDPXTFFYKEDLHPGETMRVQFSEXPFQQPWGVGAWGKEIKDTTKEGDRFEELCVKKEAIEGEEKVCAKSLGTVMWFAISKVGKNIQVLSRSFVNKQDQYTVEGVXNLGDKAVMCDRXNFRTAVFYCHEVRETTGVMGPLXGGEGAKTQALAICHSN

SEQ ID NO: 177459 - protein, 144 aa, Glycine max
  unsure (1)..(144): unsure at all Xaa locations
  Clone ID: PAT_MRT3847_131261C.1.pep
PCHFTRPLREKADAAASKTFPQEAATIRKTXYIVIKNSSCKAVEASTSKTWQACDTLKCRLMYAIVHLSLAKKLEDIAPSSHNCDVPHANHIDYHLIDISEDVLVMLLTDTGDTNDDLRLPTDENLLSHINDXFAEGKDLVVYV

SEQ ID NO: 177460 - protein, 51 aa, Glycine max
  unsure (1)..(51): unsure at all Xaa locations
  Clone ID: PAT_MRT3847_131262C.1.pep
MCSFGHKGEXITGTMEVTQKNVQVINSLSSVVSIEGTFSNIKRRARGTFTS

SEQ ID NO: 177461 - protein, 78 aa, Glycine max
  Clone ID: PAT_MRT3847_131263C.1.pep
NISGGWNFVFGSPVFDVLPVAISATDYAFGLAAEVSSLQPQAWHLYSFPGPVWCTPDRPSMLPFSLLLHSRKRSNPHE

SEQ ID NO: 177462 - protein, 157 aa, Glycine max
  Clone ID: PAT_MRT3847_131264C.1.pep
LICSFLSKISAATLSVSQYVTDGETLVSNSGVFELGFFSPGKSTKRYLGIWYKNITSDRAVWVANRENPINDSSGILTFSTTGNLELRQNDSVVWSTNYKKQAQNPVAELLDTGNFVVRNEGDTDPETYSWQSFDYPSDTLLPGMKLGWDLRTGLER

SEQ ID NO: 177463 - protein, 84 aa, Glycine max
  Clone ID: PAT_MRT3847_131265C.1.pep
WRKNRHSGLHTVRHGRSTTTSCLTRAKWSLIARLSSIAWCVGLLYKISRRRTRRTLTSLKGCCLSSKDIHYNLARYLSLSACIQ

SEQ ID NO: 177464 - protein, 159 aa, Glycine max
  unsure (1)..(159): unsure at all Xaa locations
  Clone ID: PAT_MRT3847_131266C.1.pep
GFKDGKIFIWDAAGTLQKTLERHPGAIMSIAFFPRRQPACNXSTDSTIKRWDITIGGVQEAVGHSKHVTTMVLSPDGKVIASGSADKTIKLWDAATGDLQKTLTGHLDSVEKVVFSLDNRQIVSCSSEAVKIWDAATGKDKNSFESDDVFTIVAVSPDG

SEQ ID NO: 177465 - protein, 57 aa, Glycine max
  Clone ID: PAT_MRT3847_131267C.1.pep
QRIWLNKTSSQEHTSYPNGIRVCSNVYSNSKSTKWSMLTLLTESQCQINHSWYVPKY

SEQ ID NO: 177466 - protein, 58 aa, Glycine max
  Clone ID: PAT_MRT3847_131268C.1.pep
KKGAEERAKPLPGGKCLPAPIPNKKPAGGKKGKPRGAKGGGPPPFFGGGPRAGLQGGK

SEQ ID NO: 177467 - protein, 40 aa, Glycine max
  Clone ID: PAT_MRT3847_131269C.1.pep
TILNTLSKGFLINSTNLFQKTNLNMPIINSIKLLPKLPFL

SEQ ID NO: 177468 - protein, 74 aa, Glycine max
  Clone ID: PAT_MRT3847_13126C.1.pep
CKTLFFFYIFSVVTFSCTFIYIMYQQFFTFVFYSYYFIVLFVGSSLYNFIYDCSNYNRGSVFERSSSMFDYYAL

SEQ ID NO: 177469 - protein, 75 aa, Glycine max
  Clone ID: PAT_MRT3847_131270C.1.pep
CSRGRTRGLNWVWLRPKMSLRTLTVQGVDRNIYYPWIGDIRDIATMSDHQQCIPMDAHFNDIEINLISNNSLHHQ

SEQ ID NO: 177470 - protein, 126 aa, Glycine max
  Clone ID: PAT_MRT3847_131271C.1.pep
KKFNSNSKENRYLPQLSHHIPVLLFFPLSTKARVFLFQFSCHSDSRDYVSSATQTLFRLRCKLLFLVAIEKGPFACSCLLLLMSIIVAEGNWLVIVNTPNSSPLQHTHLSFSKRRWDKASSELQSG

SEQ ID NO: 177471 - protein, 240 aa, Glycine max
  unsure (1)..(240): unsure at all Xaa locations
  Clone ID: PAT_MRT3847_131272C.1.pep
MAHTSLFTPSSSLRFNPLLLTSTPSSSSSSRSNNLSFPALSSLALICRNLRKSVEDRKINKKSAVKAVYGDEFWTPERSSRPGIWSIRSDLQVPSSPYFPTYAQGQGPPPMVAERFQSVISQLFQYRIIRCGGAVDDDMANIIVAQLLYLDAVDPNKDIVMYVNSPGGSVTAGMAIFDTMRHIRPDVSTXVCVGLAASMGSXLLSAGTKGNRYSLPNSRIMIHQPLGGAQGGQTDIDIQV

SEQ ID NO: 177472 - protein, 303 aa, Glycine max
  Clone ID: PAT_MRT3847_131273C.1.pep
MGHTSLFTPSSSLRFNSLLVSSTPSSSSRSNSVSFPALSRNIRKSVEDRKINKNSAVKAVYGDEFWTPARSSPQDIWSIRSDLQVPSSPYFPTYAQGQGPPPMVAERFQSVISQLFQYRIIRCGGAVDDDMANIIVAQLLYLDAVDPNKDIVMYVNSPGGSVTAGMAIFDTMRHIRPDVSTVCVGLAASMGAFLLSAGTKGKRYSLPNSRIMIHQPLGGAQGGQTDIDIQANEMLHHKANLNGYLAYHTGQSLDKINQDTDRDFFMSAKEAKEYGLIDGVIMNPLKALQPLEAAAEGKDRASV

SEQ ID NO: 177473 - protein, 92 aa, Glycine max
  Clone ID: PAT_MRT3847_131274C.1.pep
DAGRLRHRVRNCPTHPRVRGHVGGRVGQNYHITAIAGAHNGSSLKALTKGAQSADDDPNEVAQPHASVSTKKAEMGTVLLERLPPEDDGVLL

SEQ ID NO: 177474 - protein, 79 aa, Glycine max
  Clone ID: PAT_MRT3847_131275C.1.pep
DLWAVKIACIEFCDVDRRLFSYIAHWTLLLLNDLYVDYFTGFENRTELRDPKESRDFWPENCDMKIEKKEPYGEVRRDL

SEQ ID NO: 177475 - protein, 76 aa, Glycine max
  Clone ID: PAT_MRT3847_131276C.1.pep
KTNATLEVPVMREAGAKRPLFRSIASLRHRSKLRPPMGRRANDGDLMNGACKASEKRRDDEACVERARARNQRESN

SEQ ID NO: 177476 - protein, 70 aa, Glycine max
  Clone ID: PAT_MRT3847_131277C.1.pep
KATVHSLGSSPTFKEIYASISKKWALVDVGVIVWRPSPLQTSVVEEIRSPSMPRQRLLSIFHFPSHSFDL

SEQ ID NO: 177477 - protein, 593 aa, Glycine max
  Clone ID: PAT_MRT3847_131278C.1.pep
MEKGSMENNEKHVTENDPKIDYRGWKAMPFIIGNETFEKLGAIGTLANLLVYLTTVFNLKNITATNIINIFNGSTNFATFIGAFLSDTYFGRYKTIGFCTFTSFLGLLVIQLTAVFKNLHPPHCGKEMKTCKGPTAGQMAFLVSGFGLLLIGAAGVRPCNLAFGADQFNPNTDSGKKGINSFFNWYFFTFTFAQMVSLTLIVYVQSNVSWAIGLGIPAALMLISCVVYFMGSKIYVKVEPSGSPIAGIVQVFVVAVKKRSIKLPAEHPMLSLFNYVPPMSVNSKLPYTFQFRLLDKAAIVTPKDKIKPDGSAADPWNLCSIQQVEEAKCVVRVLPIWFAAIVYHLVIVQMHTLLVFQALQSDRRLGSSNFKIPGASFNVFLMLSMTLWLPIYDRIVVPFSLSNTPEKSGGITLLQSDGIGIFISALCMIVAGVVEEHRRSLALTNPIGVQPRKGAISSMSGLWLIPQLSLAGLSESFTAVGQVEFYYKQFPENMRSIAGSLFYCGMAGSSYLSTLLISIVHNTSEKSATGNWLPEDLNKGRLDFFYYMIAALEIMNLGYFLLCSKWYKYKEIGSSDLELNQVPKQSETSTIGV

SEQ ID NO: 177478 - protein, 220 aa, Glycine max
  Clone ID: PAT_MRT3847_131279C.1.pep
DDDEDVGYTRQPIEDRAWFLAHEIDYPSDNEKGTGHGSVPDPQERGPAKDEEDDQSFAEEDSYFSGEQYILPKNVEPVTASDDPIGLTVTEMYGRTNGDDVMAQFDRQLMDVEELNLMHMEPVRQGFVTHKNDLIMLGDGKVLNHSARSRIEDMEDDQHGSVRSIGVGINSDAADIGSEVHGSLVGGSSEGDLEYFRDHDTTTHSGSKHSHHDLDKNSIN

SEQ ID NO: 177479 - protein, 100 aa, Glycine max
  Clone ID: PAT_MRT3847_13127C.1.pep
VKLPLVGHSDTLSFKNVLSNFPSGCCAAATVSDIFPGLCFICFLPLADGRGLTVPNSCCWDDVALRLLQVAVSLRGAVVIPLRSVVVQLGHLCCWGLFHC

SEQ ID NO: 177480 - protein, 58 aa, Glycine max
  Clone ID: PAT_MRT3847_131280C.1.pep
MFVEVILKATLFDYSLASSKSCIHTFTIDYTYTHTSTNQCMFNFILILNPNNNVMISK

SEQ ID NO: 177481 - protein, 69 aa, Glycine max
  Clone ID: PAT_MRT3847_131281C.1.pep
SQTPTFQYGTRDWRNRVHWQKLTIKLRKERLNTTTCAFAGLMFVLNQFFSIAFNLVKLFVGHELYTISH

SEQ ID NO: 177482 - protein, 71 aa, Glycine max
  Clone ID: PAT_MRT3847_131282C.1.pep
YKTQTNKYDYILNLKIFKYFSNGCIKIPNYQFMLKETNDWLLLFFFLSKIKLAYNGTAASPKKKKKKTLQK

SEQ ID NO: 177483 - protein, 100 aa, Glycine max
  Clone ID: PAT_MRT3847_131283C.1.pep
GSSINFPLSTYEKELEEMKHMTRQEFVANLRRKSSGFSRGASVYRGVTRHHQHGRWQARIGRVAGNKTHPLGETHNISIPHDYMTMIHLQRGEKRNGKYK

SEQ ID NO: 177484 - protein, 35 aa, Glycine max
  Clone ID: PAT_MRT3847_131284C.1.pep
KESKLKQVICNPTLSYFAFAFYNLFKLILFSRTAP

SEQ ID NO: 177485 - protein, 172 aa, Glycine max
  Clone ID: PAT_MRT3847_131285C.1.pep
FIISFQRLANDQFCNANHCIVITGRGYPDIPTRRFLRLLVENLCLPAYCLVDCDPYGFDILTTYRFGSMQMAYDTKHLRVPEIQWLGAFPSDSERYFVPNQCLLPLTAEDKRKVEAMLLRCYLEREVPQWRLELQLILQRGVKFEIEALSVHALSFLSESYIPSKIEGKLIM

SEQ ID NO: 177486 - protein, 71 aa, Glycine max
  Clone ID: PAT_MRT3847_131286C.1.pep
NQLEQSTVDSVSHRWTRRMLTFNYDSFESKEYSRIDLLLSQMKSTWLFASVSLTHNRNDNNTPIPSSSQSH

SEQ ID NO: 177487 - protein, 96 aa, Glycine max
  Clone ID: PAT_MRT3847_131287C.1.pep
IEQRKFSQVLISSYTIEKLGERYEKLKKLLGIDGFFTASPKIRPLEDGLPMDHSRAQIDNQIFLNRLFSGKKGTPNLDILEDSSLKGGGPGQTKGL

SEQ ID NO: 177488 - protein, 68 aa, Glycine max
  unsure (1)..(68): unsure at all Xaa locations
  Clone ID: PAT_MRT3847_131288C.1.pep
QMCTSFVHCVCAALSSSTLLFRFSSPIRAKLRCLCLKGNVXXFFCCKYLSLTQDEASHHTPRRGPYIS

SEQ ID NO: 177489 - protein, 51 aa, Glycine max
  Clone ID: PAT_MRT3847_131289C.1.pep
KKFSHHFYMNSNWVSQGPFFLGPFFCLGAFFRAPPIGVLVGPLKRIFKFSL

SEQ ID NO: 177490 - protein, 260 aa, Glycine max
  Clone ID: PAT_MRT3847_13128C.1.pep
RRKSRKNRRKRSNRSRKKRRYSDSDESEESESDDSESSGRKKKKRSSSSRSRSKRIRRSSKRTKGSSETESAGSGSEEEENGSGDAKSKAMVDEVKMTEINAEAIKLKELFESQKKPALDNEPAVGPMPLPRAEGHISYGGALRPGEGDAIAQYVQQGKRIPRRGEVGLSAEEIQKFESLGYVMSGSRHQRMNAIRIRKENQVYSAEDKRALAMFNYEEKAKREHKVMADLQRLVQRHIGQDVGPTHDPFAAKASDGADA

SEQ ID NO: 177491 - protein, 87 aa, Glycine max
  Clone ID: PAT_MRT3847_131290C.1.pep
ARDYADVSFLRIAILNALGAYYSYLGKIETKQREKEEHFILATQYYNKASRIDMHEPSTWVGKGDFCLCFSEVCLIETRLWSVISQQ

SEQ ID NO: 177492 - protein, 62 aa, Glycine max
  Clone ID: PAT_MRT3847_131291C.1.pep
CFFFFFEENSLHIYNLNSLTVLPNMGKFINPHKAHLGKQLNGFFIVNIYWKRRNFKSNWNVC

SEQ ID NO: 177493 - protein, 243 aa, Glycine max
  Clone ID: PAT_MRT3847_131292C.1.pep
MAFPNQSMSSESPQRKMGRGKIEIKRIENTTSRQVTFCKRRNGLLKKAYELSVLCDAEVALIVFSNRGRLYEYANNSVKASIERYKKASSDSSSGGRSASEANAQFYQQEAAKLRVQISNLQNHNRQMMREGLSTMNGKDLKNLETKLEKGISRIRSKKNERLFAEIEHMKKREIHLNNDNQLLRAKIAAGERSHHNVNGLSGSISYESMQSQFDSRGFFQVTGLQPNNNQYAGQDNMSLQFV

SEQ ID NO: 177494 - protein, 60 aa, Glycine max
  Clone ID: PAT_MRT3847_131293C.1.pep
VHVELFVQSMDHECEQAMPLKQEVTVNPGLISVSVSSSLAILSSLFSTSSIVRPIHMYPS

SEQ ID NO: 177495 - protein, 106 aa, Glycine max
  unsure (1)..(106): unsure at all Xaa locations
  Clone ID: PAT_MRT3847_131294C.1.pep
XSSAXHHHXXXXXXIXXLXMXXGXQXQTPXGVPFDLTGCXSFXXXXXPXXXLXXXRXXNAXYXERXXTFXXXXXSTXAIXAXXXQXDXXXXLIXXXSRIPSLRXRX

SEQ ID NO: 177496 - protein, 63 aa, Glycine max
  Clone ID: PAT_MRT3847_131295C.1.pep
RMGFLYHLDQFSPFVAPFLIWLCCSFYAASISKFSGAKYSIGFLPCIQEASYNRTINQDKGLN

SEQ ID NO: 177497 - protein, 38 aa, Glycine max
  Clone ID: PAT_MRT3847_131296C.1.pep
LGSLVIVMACLNCLVNATSMKCELKISYQNKVIITNSS

SEQ ID NO: 177498 - protein, 393 aa, Glycine max
  unsure (1)..(393): unsure at all Xaa locations
  Clone ID: PAT_MRT3847_131297C.1.pep
VNEGKYAHAISIFDQILKKDPAYPEALIGRGTAYAFQRELDAAIADFTKAIQFNPLAGEAWKRRGQARAALGEFVEAIEDLTKALEFEPDTADILHERGIVNFKFKEFDAAVEDLSACVKLDKDNTSAYTYLGLALSSIGEYKEAEEAHLKSLQLDKNFLEAWAHLTQFYQDLAKPTKAQECINRMLHIDGRFARAYHLRGLLFHAMGEHRKAIKDLTMGLSIDGSNIECLYLRASCYHAVGQYKEAVKDYDAALDLELDSMDKFVLQCLVFYQKEIALYTASKFNGDFCWFDIDGDIDALFKEYWCKKLHPKNVCEKVFRQPPLRESLRKGKLKKQEFTITKQKAALLQASDSIGMKIQYDCPGFLPNRRQHRMAGLAAIEXXQKVXEXXRS

SEQ ID NO: 177499 - protein, 105 aa, Glycine max
  unsure (1)..(105): unsure at all Xaa locations
  Clone ID: PAT_MRT3847_131298C.1.pep
MRPRVNYSFPEEVLEHVFSFIECDKDRGSISLVCKSWYEIERWCRRRVFVGNCYAVSPATVVNRFPKVRSIAIKGKPHFLELQXVPEVWGAYVPMLLSWRQCDPP

SEQ ID NO: 177500 - protein, 134 aa, Glycine max
  Clone ID: PAT_MRT3847_131299C.1.pep
HASGKKLEMLSVAFAGDSDLGLHHVLSGCDNLRKLEIRDCPFGDKALLANAAKLETMRSLWMSSCLVSYGACKLLGQKLPRLNVEVIDERGPPDSRPESSPVEKLYMYRTVSGPRLDMPGYVWRMQDDSALRIS

SEQ ID NO: 177501 - protein, 60 aa, Glycine max
  Clone ID: PAT_MRT3847_13129C.1.pep
LLQYYLLYCHIVGYSSWITNNGFEIFGFGFGIEMLMLDSSEFHRRCCTSSDSFIIFFLST

SEQ ID NO: 177502 - protein, 38 aa, Glycine max
  Clone ID: PAT_MRT3847_1312C.1.pep
AIYLGGFTKKIISLGKKIILYSPQTIEKRKGFPPSFFL

SEQ ID NO: 177503 - protein, 258 aa, Glycine max
  unsure (1)..(258): unsure at all Xaa locations
  Clone ID: PAT_MRT3847_131300C.1.pep
RTRGRTRGRTRGPNLRRLDVSYCKNLIEVPNFGEALNLEELNLKGCIRLRRFHPSIGFPRNLTYLNLSGCNSLVELPHFEQALNLEVLNLKGCGKLRQLHLSVGFPRNLTHMNLSGCNSLVELPHFEQALSLKVLNLKGCGKLRQLHLSVGFPRNLTYLKLSGCNSLIELPHFEQALNLERLNLRDCKSLVNLPHFVEDLNLKELNLEGCVQLRQIHPSIGHLRKLYXLNLKDCKSLVSLPXYIWXLSSLRYLNLFGM

SEQ ID NO: 177504 - protein, 329 aa, Glycine max
  Clone ID: PAT_MRT3847_131301C.1.pep
MTNPESGSTTSLPPQLPQIKEKPVVSGTPNDQPDDPKNPGSQTIGRRGELAGDKVHRAPELVEFYQTLMKLEAKKDTSLITSASNASDARSNMIGEIENRSSFLLAVKADVETQGDFVMSLAAEVRAASFSDINDLVAFVNWLDEELSFLVDERAVLKHFDWPEGKADALREAAFEYQDLMKLENRVSTFVDDPNLPCEAALKKMYSLLEKVEQSVYALLRTRDMAISRYKEFGIPVNWLMDSGVVGKIKLSSVQLAKKYMKRVASELDELSGPDKEPAREFLVLQGVRFAFRVHQFAGGFDAESMKAFEELRSRIQTSQAGEDSKSET

SEQ ID NO: 177505 - protein, 162 aa, Glycine max
  Clone ID: PAT_MRT3847_131302C.1.pep
MRPRVAYSFPEEVLEHVFSFIECDKDRGSISLVCKSWYEIERWCRRRVFVGNCYAVSPATVVNRFPKVRSIAIKGKPHFADFNLVPEGWGAYVGPWIKAMAAAYPWLQEIRLKRMVIADECLELIAKSFKNFQVLVLTSCEGFTTDGLAAIAAKCKILRELE

SEQ ID NO: 177506 - protein, 190 aa, Glycine max
  Clone ID: PAT_MRT3847_131303C.1.pep
DSAISDGVDVLSLSFGFDDVPLYEDPVAIATFSAMEKGIFVSTSAGNEGPFLGRLHNGIPWVITVAAGTLDREFHGTLTLGNGVQITGMSLYHGNFSSSNVPIVFMGLCDNVKELAKVKSKIVVCEDKNGTIIDVQAAKLIDANVVAAVLISNSSYSSFFLDNSFASIIVSPINGETVKAYIKSTNYGTK

SEQ ID NO: 177507 - protein, 76 aa, Glycine max
  Clone ID: PAT_MRT3847_131304C.1.pep
GIKFSIFSLPLKDYPSIINIGGKIIRACLDTLLESILAPKIGLLIKKFRLFRHFNRDYMQLGFILSIFIKLLGSKM

SEQ ID NO: 177508 - protein, 144 aa, Glycine max
  unsure (1)..(144): unsure at all Xaa locations
  Clone ID: PAT_MRT3847_131305C.1.pep
PPPPPGYFGNVIFXXTRIAVAGDLMSKPTWYAASRIHDALIRMDNEYLRSALDYLELQPDLKSLVRGAHTFRCPNLGITSWARLPIHDADFGWGRPIFMGPGGIAYEGLSFIIPSSTNDGSLSLAIALPPEQMKVFQELFYDDI

SEQ ID NO: 177509 - protein, 122 aa, Glycine max
  unsure (1)..(122): unsure at all Xaa locations
  Clone ID: PAT_MRT3847_131306C.1.pep
YDCRMHRVXVSSXNSASSGFACLGYFEYGATVVVVTVSHNEVTSDTYDGRLLDHVGSCTMLWLHLMHSQGVEESLQRGLRLAYSQRASFRIIXIRQRFAKCSASASSSTSPQASKCEKFAKH

SEQ ID NO: 177510 - protein, 69 aa, Glycine max
  Clone ID: PAT_MRT3847_131307C.1.pep
LLTAGTLRRLVSITLIIGFMGYNGSEILNSRGILTYAHESWTYPLDPGLVGKDGASIYGRLNVFSHHKA

SEQ ID NO: 177511 - protein, 90 aa, Glycine max
  Clone ID: PAT_MRT3847_131308C.1.pep
NPTLSFFFFLKPGIGNFFFLPSIKKTEKKKSETRDPNPMAQKVNRQPPRFEIPFRPGFSLLFWFFSHFRDLRGSNPRVLPPEGFSSGGFV

SEQ ID NO: 177512 - protein, 76 aa, Glycine max
  Clone ID: PAT_MRT3847_131309C.1.pep
SITYDISLVPQKYDRLIMFHLRISNSWYGYLLLMNATGTSKLSPDILWRCTKRNVLRANSEIQLIPQLYNHGSSSS

SEQ ID NO: 177513 - protein, 51 aa, Glycine max
  Clone ID: PAT_MRT3847_13130C.1.pep
TGGFIEPKWLPYGEIINGRYAMLGAVGAIAPEILCKASLIPQETALPWFIT

SEQ ID NO: 177514 - protein, 50 aa, Glycine max
  unsure (1)..(50): unsure at all Xaa locations
  Clone ID: PAT_MRT3847_131310C.1.pep
KGSKLKDFLATIQSSSYFQSEIAKLRHDVXEYAKQFPPIGFDKEPMKYNK

SEQ ID NO: 177515 - protein, 68 aa, Glycine max
  unsure (1)..(68): unsure at all Xaa locations
  Clone ID: PAT_MRT3847_131311C.1.pep
TGXCXRVVPDCSLNRLSCIIXWXCKXWCSSCSPXXCCXRXGKETXITSSYSQKEXXPXXXTKEXXVXG

SEQ ID NO: 177516 - protein, 33 aa, Glycine max
  Clone ID: PAT_MRT3847_131312C.1.pep
ILNKLSNICQKFLKTYNLIYNFFSYFFNKLIQY

SEQ ID NO: 177517 - protein, 136 aa, Glycine max
  Clone ID: PAT_MRT3847_131313C.1.pep
KVAAMNDDMPIGWPFGLGFLNMRLRVGESLPAASVAPYQLHVPSTSFSSFSSSNLDTESTASFFQDNSVSLAQLIGIRPGDRGRLYYPNSLRFEERKKKLAKSSGSDGSKVQGMDTSRVICIPLLKIRKSKKSSRN

SEQ ID NO: 177518 - protein, 264 aa, Glycine max
  Clone ID: PAT_MRT3847_131314C.1.pep
DFRKVNDGNIYNTSRAIEGAYIEWMERFTGGKKLWALGPFNPLAFEKKDSKERHFCLEWLDKQDPNSVLYVSFGTTTTFKEEQIKKIATGLEQSKQKFIWVLRDADKGDIFDGSEAKWYEFPNGFEERVKGIGLIVRDWAPQLEILSHTSTGGFMSHCGWNSCLESITMGVPIASWPMHSDQPRNPVLITQVLKVGLVVKDWAQRNALVTASVVEKVVRRLIETEEGDEIRQRAVRLKNAIHRSKDEGGVSHLEMESFIAHITN

SEQ ID NO: 177519 - protein, 114 aa, Glycine max
  unsure (1)..(114): unsure at all Xaa locations
  Clone ID: PAT_MRT3847_131315C.1.pep
QIFDAVLDASLEQDPDSKVACETCANSNMAMVFXEITTKANGYYEKIVHDTWREIGFICDDDGLEADNSNEXVNIMQQSPGIDQRAHGHFTKRSEEVDAGDHCNMSVYATNETS

SEQ ID NO: 177520 - protein, 93 aa, Glycine max
  Clone ID: PAT_MRT3847_131316C.1.pep
LNNSLTALGNSYTNYDWNSFTDVGPTQQDEVYGLYQCRGDLSFFDCAACVARADTRAGDICRGTCGGAEQLHGCFPKYDNATFLGAADNTVGV

SEQ ID NO: 177521 - protein, 53 aa, Glycine max
  unsure (1)..(53): unsure at all Xaa locations
  Clone ID: PAT_MRT3847_131317C.1.pep
IKLAGVKKLNIGLKTRIQHFSTTXFFFFFNFIVLSYTINLISHXTLFLLVSLS

SEQ ID NO: 177522 - protein, 111 aa, Glycine max
  unsure (1)..(111): unsure at all Xaa locations
  Clone ID: PAT_MRT3847_131318C.1.pep
MVLLGLGNINHITSHPXKSAPSGSKGAQLQKHIDATVSSENWREAVQLPPGEDINVWLAANTVDFYNXMNXLSGTLTKCCTPSICPXNDCXPYHQHRWAHRGTVQKPICGC

SEQ ID NO: 177523 - protein, 32 aa, Glycine max
  Clone ID: PAT_MRT3847_131319C.1.pep
MLIVTVAPIILDIRQSIRATQTLPSKCSKLYI

SEQ ID NO: 177524 - protein, 243 aa, Glycine max
  unsure (1)..(243): unsure at all Xaa locations
  Clone ID: PAT_MRT3847_13131C.1.pep
MEEHPKKKKKGCRNPETKFQFELNSCSKAKDLRGAISLYDDAVSNNTRLNQHHFNALLYLCSNSVADPSLKPTALDYGFRAFRHMSALAVLPNEATVTAVARLAAAKGDADYAFELVKSMGKNYNNALPRLRTYDPALFCFCEMLDADKVYEVEEHMNGVGVSLEEAELAALLKVSARCGRVDKVYEYLHRLRSSVRCVSESTAVVIEEWFRGSKASEVGEAEFDAGRVKEGVXRNGGGWHCQ

SEQ ID NO: 177525 - protein, 86 aa, Glycine max
  Clone ID: PAT_MRT3847_131320C.1.pep
PLVYIRSTIHAHFHESCPCVSLWRQHVAAFSPSMVCTPFTQVSFLKTLIGATPPLVPLQVAFLWLLTRSSTTIKVFSLARSKEALI

SEQ ID NO: 177526 - protein, 95 aa, Glycine max
  Clone ID: PAT_MRT3847_131321C.1.pep
FISTLIFVFAGSGSGISYNKLTDYGADTPAGLISASIAHAYALFVAVSVCANISGGHINPAVTFRAFVGGNITLLRGILYVIFQLLGSIVACLLL

SEQ ID NO: 177527 - protein, 79 aa, Glycine max
  Clone ID: PAT_MRT3847_131322C.1.pep
KSWAVGIPLGLAIRAVRFGHLPPTPFILVPMESTGVLLTAWRALVSHLFSNQQKQQDDVYGRGSPFELFELLTSLVRRW

SEQ ID NO: 177528 - protein, 132 aa, Glycine max
  Clone ID: PAT_MRT3847_131323C.1.pep
LFVYSGTFSEDDWKLVQLVLTLFRNILAVQEIPTHQKSGGLATQLLSMRDRFLELLFRENVMDIMLVISQCVGSSNVYLRQDNLLLLEIFHYILMGQDPELIVRAHLKESKVRPLIVTNVNFFHACKEHPTN

SEQ ID NO: 177529 - protein, 222 aa, Glycine max
  Clone ID: PAT_MRT3847_131324C.1.pep
MGYLQFGRHGVRQVLRFRDASCDNVVVNPLLYASQGLRYKRKLQVILTTDIDKLGKAGDTVKVAPGYFRNHLMPKLLAFPNIDKFAYLLNEQRKIYQPTEEEKQEDVTLVKESKEDMMKEYEKAALRLDKAQLVLRRLINVQKAKSRESKEDPLELRYPVTKDTLVAEVARQLCVNVAPDNLHLPSPLSTLGEYEVPLRIPRSIPLPEGKVNWSLKVKVRSK

SEQ ID NO: 177530 - protein, 261 aa, Glycine max
  Clone ID: PAT_MRT3847_131325C.1.pep
NPKKMTQIMFETFNTPAMYVAIQAVLSLYASGRTTGIVLDSGDGVTHTVPIYEGYALPHAILRLDLAGRDLTDYLMKILTERGYSFTTTAEREIVRDIKEKLAYVALDFEQEMQTAASSSALEKSYELPDGQVITIGNERFRGPEALFQPSFLGMEAAGVHETTYNSIMKCDVDIRKDLYGNVVLSGGTTMFPGIADRMQKELTALAPSTMKIKIIAPPERKYSVWIGGSILASLSTFQQMWISKEEYDESGPSIVHRKCF

SEQ ID NO: 177531 - protein, 39 aa, Glycine max
  Clone ID: PAT_MRT3847_131326C.1.pep
LGYHAEYYSQRSTPEGLFIIECTYNYQTAHELAQGTGIY

SEQ ID NO: 177532 - protein, 71 aa, Glycine max
  Clone ID: PAT_MRT3847_131327C.1.pep
NIEGNQNYLLGIGFSDNLKLLDPYVMLPKGQKNNPSFLFLPILRWLKSAPHLGVCCPGVNLLALMGKPHSD

SEQ ID NO: 177533 - protein, 106 aa, Glycine max
  Clone ID: PAT_MRT3847_131328C.1.pep
FRTDSALNFGWFFLFYLLHLGFCILAAVAPPIVFKGKSLTGILSAIDVVGNHAVIGIFYFVGFGLFCIETLISVWVIQQVYMYFRGSGKAAEMKQEAARGALRDAR

SEQ ID NO: 177534 - protein, 73 aa, Glycine max
  Clone ID: PAT_MRT3847_131329C.1.pep
ERQSVHARVSSPDAIEPLGLAELPETLFLHDSCLRCSCGCCRGWCVVRRRVRTRLSRSVGKSGKTTYIISSVI

SEQ ID NO: 177535 - protein, 98 aa, Glycine max
  Clone ID: PAT_MRT3847_13132C.1.pep
MPGEEVLAQQDERGRCFEPEISEDEWRKSRARSLRRKAMTASTRLTYSLRKRNTRVADSDFASIFIEDVRDANEEKAVNSFRQVLLTRDLLPDSMMIS

SEQ ID NO: 177536 - protein, 340 aa, Glycine max
  Clone ID: PAT_MRT3847_131330C.1.pep
MGLWFSLFMIMVQCSALRFLILLRMTSLGSLLLVSQWLLHFHWLFHIQHLLQPTRPPTRPPTRPPTRPPTCPEVFTVLSLCSSPANKDTQSVEPSNAKCKLTNPSALVRHSCLLVAVIAQCLKSSGRNSAIFMLTTSPKKQFARLSVLAHQISSDDKIKASIEPQSASAMLALASILSLESGALVESPISEIAMPLIPRTSTLSDHLKFSSSNVNELDPCNISGKFSYWQGVRDGFVGLLDSRLKWGGPLAVQQLCASGTPLLLMGLLGNDVLNASHGNDHVNDRVGLSPIGCVWTISSLCHCLSGGALTHRQILIRNEHIKLFSHLICDVHIKLVKCWI

SEQ ID NO: 177537 - protein, 60 aa, Glycine max
  Clone ID: PAT_MRT3847_131331C.1.pep
LLSFFFRKFKVYLGKKQTWGWDNLYYINPQIIIIHIKILWLKTRIMYILTPTDTGFLSTT

SEQ ID NO: 177538 - protein, 438 aa, Glycine max
  Clone ID: PAT_MRT3847_131332C.1.pep
RTSTYTKYNIDEFPTGTNAIVAVLAYTGYDMEDAMILNKSSVERGMFHGQIYQTETIDLTEQGGRLDRSSRMFRKSNLEKSACPSIDSDGLPHVGQMIRPDEPYCSIYNEVTSSIHTLKRKGSEAVYVDYVAVDVKNKKHLQKVNIRFRHPRNPVIGDKFSSRHGQKGVCSQLWPDVDMPFSGNTGMRPDLIINPHAFPSRMTIAMLLESVAAKGGSLRGEFVDATPFRSSVKKDSGESDSMSGSIVDDLGLLLREKGFNYHGLEVLYSGVYGTELTCEIFIGPVYYQRLRHMVSDKFQVRSTGTIDQVTRQPIKGRKRGGGIRFGEMERDSLLAHGAAYLLHDRLHTCSDYHIADVCSLCGSMLTTTFTQPQKRPVREIGGLPPGRAPKKVTCHACQTSKGMETVAMPYVFRYLAAELAAMNIKMTLKLSDGAGAGA

SEQ ID NO: 177539 - protein, 102 aa, Glycine max
  unsure (1)..(102): unsure at all Xaa locations
  Clone ID: PAT_MRT3847_131333C.1.pep
IECRIYLEFNSKITFISIYQTMATKCYEDWQARSXSCHFCRESIXXVDDDDLWICISNSEINDLASINKENFKRLFMYIESLPLTARPHIQHVISSPPVIAN

SEQ ID NO: 177540 - protein, 69 aa, Glycine max
  unsure (1)..(69): unsure at all Xaa locations
  Clone ID: PAT_MRT3847_131334C.1.pep
XXXXXLXXSKSVLSXXXFSXTEXXHMXRHXSEHALXXQPANXISXXXXXXIXNEFGTRNXAKVXWIRXQ

SEQ ID NO: 177541 - protein, 47 aa, Glycine max
  Clone ID: PAT_MRT3847_131335C.1.pep
RAPTSVLYTHWTVCLHLKYYTPKLVSIKGTCNQQMNLISPIACPILG

SEQ ID NO: 177542 - protein, 97 aa, Glycine max
  Clone ID: PAT_MRT3847_131336C.1.pep
PRITPMGEVLSQYTLSLPFFLKSLLYHSIDIFVVVIILITIIPGSDFQVIVLCFRRKRNQRNNPRQRRKNQRKRRRKKKQQQRKNQAKRKNRNKSRK

SEQ ID NO: 177543 - protein, 72 aa, Glycine max
  Clone ID: PAT_MRT3847_131337C.1.pep
FLFFDLCVLERRPLFSFYVLVCLYSCACEGSFHSIRDLVTSRSKSKERGKDRLKLGQIYSLLQLHIVEVNTK

SEQ ID NO: 177544 - protein, 160 aa, Glycine max
  Clone ID: PAT_MRT3847_131338C.1.pep
AVSLEDWIRDKSYSDTASSSDDETSNITLIFVVQLRDPIRRFEAVGGPMMVLIHATSEEHTKGSECDHYQDNEEEKEFKVTSMHVGSLKVRSVTKNAWDSEKQRLTAMQWLIEYGLGKAGKKGKHALVKGPDLLWSISSRIMADMWLKTMRNPDVKLVKE

SEQ ID NO: 177545 - protein, 117 aa, Glycine max
  Clone ID: PAT_MRT3847_131339C.1.pep
LQNFKFSTTDYESTSFRIQNLEQELVSLKRSLQLHNIVTKAEPNLIKSQKMKPCGLETRSQSKRRNPIGQATSCISSVNFASQRRNASRLLQVFRRITLFGSRKLKRKPGTPSQLSK

SEQ ID NO: 177546 - protein, 126 aa, Glycine max
  Clone ID: PAT_MRT3847_13133C.1.pep
GSISEFGSSTRLAPTAYAALRSAFRQGMEKYPIANEDGLFDTCYDFSGYKEISVPKIDFEFAGGVTVELPLVGIFYVVSAQQVCLAFAANGNENDITIFGNVQQKTLEVVYDVEGGRIGFGAAGCN

SEQ ID NO: 177547 - protein, 97 aa, Glycine max
  Clone ID: PAT_MRT3847_131340C.1.pep
LKQGFKDVYPKKMSHVLLKASLRNRPTYNNKPQETQHKDAQAKVEYVKRLYDQVKVQIAKKNESYAKQAYKKSKEVVLEPGDDPGHLRANVFQEGGN

SEQ ID NO: 177548 - protein, 52 aa, Glycine max
  Clone ID: PAT_MRT3847_131341C.1.pep
EKKEHDTKVDYLSINSLFTSSSHKIFVPNIRLYSVKESCSSINKITAFMPFH

SEQ ID NO: 177549 - protein, 54 aa, Glycine max
  Clone ID: PAT_MRT3847_131342C.1.pep
LRNFFLKNSPFAKRKPRAKRIFVHALSHESHALSVQPLHLRLIWSAKLAKVELS

SEQ ID NO: 177550 - protein, 78 aa, Glycine max
  unsure (1)..(78): unsure at all Xaa locations
  Clone ID: PAT_MRT3847_131343C.1.pep
MVPIDGRGRVRRGXSXLRRXRRLSVXQVXALEKNFEVEXKLEPERXVKLAQXLGLQPXQVAVWFXNRRAXWKTRXWRE

SEQ ID NO: 177551 - protein, 119 aa, Glycine max
  Clone ID: PAT_MRT3847_131344C.1.pep
ILFCGSTRRPNRGRVSRSRMGSARASTVDRRTGVVPRCHIPGRRRRSGGAVKRKFGRVRVDAEAGRGCYGPTIVRMFIIRQVNAAVVPWVTVAAGRLQRDKRSLRSVPRCVREQRSGRV

SEQ ID NO: 177552 - protein, 72 aa, Glycine max
  Clone ID: PAT_MRT3847_131345C.1.pep
RKPLTTTPGEKAMPVVNGICIPNNKHPMWLPKGELGIKEFRDFKCGGRLKFPMFQSGMGLIDENNGAWGFSD

SEQ ID NO: 177553 - protein, 66 aa, Glycine max
  unsure (1)..(66): unsure at all Xaa locations
  Clone ID: PAT_MRT3847_131346C.1.pep
GGRVXVXTLPFPFFLPPHTLWTVDFKKQEDPNTIASLLLPTAYALLTINFADYDPSHVGLLLTNIY

SEQ ID NO: 177554 - protein, 43 aa, Glycine max
  Clone ID: PAT_MRT3847_131347C.1.pep
QFKNHQTNNGKLWAGEKNLFDFLAEPIQVSSDSKVVKIGGGTL

SEQ ID NO: 177555 - protein, 117 aa, Glycine max
  Clone ID: PAT_MRT3847_131348C.1.pep
LSSSSSSVSEMSNPSEEPLSKVARAAEDLYHLRDAYFPPNPDDRISKLQQESDLALQLLDSIPSEQRKSPMQRATFEYLRGKILDVFPDYRREAEDHLSNEIIIQKSYHRPFIRGSK

SEQ ID NO: 177556 - protein, 42 aa, Glycine max
  unsure (1)..(42): unsure at all Xaa locations
  Clone ID: PAT_MRT3847_131349C.1.pep
LTFFNHILDQXIXSFYIFYQISILEFGYKKFLTKFSRKHFYL

SEQ ID NO: 177557 - protein, 79 aa, Glycine max
  unsure (1)..(79): unsure at all Xaa locations
  Clone ID: PAT_MRT3847_13134C.1.pep
HAPGSFCPIVALKGVRVLAEALPADGRTSILIRLXLEEIGTTIPSIXLSVPTVVLNSNSMTLWDGGGLCTITPLWTHSL

SEQ ID NO: 177558 - protein, 43 aa, Glycine max
  Clone ID: PAT_MRT3847_131350C.1.pep
TRTHTLTIPFTSTLYLIHTLLITGSVKFTTNTIHSLISFYFLH

SEQ ID NO: 177559 - protein, 24 aa, Glycine max
  Clone ID: PAT_MRT3847_131351C.1.pep
LHVCHSYHNRELQPLSTPQPSPII

SEQ ID NO: 177560 - protein, 48 aa, Glycine max
  Clone ID: PAT_MRT3847_131352C.1.pep
SGLSFFSLNSMFSQTEKDAKHSLLLQSRVEIIFNLIIHLFADCKVPVN

SEQ ID NO: 177561 - protein, 69 aa, Glycine max
  Clone ID: PAT_MRT3847_131353C.1.pep
MNILHFSFEIKMSNISMTVFKSGVYFIEVVGLRGVAQKVSEPNLIYFFVEPKNRYCIPLAQFIIACCIG

SEQ ID NO: 177562 - protein, 27 aa, Glycine max
  unsure (1)..(27): unsure at all Xaa locations
  Clone ID: PAT_MRT3847_131354C.1.pep
MRVRIVLILWRCRXXXIVKFYCRKLLV

SEQ ID NO: 177563 - protein, 72 aa, Glycine max
  unsure (1)..(72): unsure at all Xaa locations
  Clone ID: PAT_MRT3847_131355C.1.pep
AXXWXLXEXXGNDKFDESNNXFXLVXKSWNXXXXGXQPMGMAVXSXKXXSYSTHLPXAWYIXLNLCXDEPLX

SEQ ID NO: 177564 - protein, 180 aa, Glycine max
  Clone ID: PAT_MRT3847_131356C.1.pep
HHSVLDGKSSTLFIKAWSSLCQTNDDESSESSSPSLAPKLVPFFNRSVIRTPRELGLNFPTNWTEALTKLFPTGNSDGRCLKLLPFPPRLEDEVRARFVLTGADLEKLRKGVLSKWDIVERGTESEAPRLSSFVLTCAYAVVCIAKAIHGVEKEKEKFAFAFTVDCRARLEPPIPENYFG

SEQ ID NO: 177565 - protein, 71 aa, Glycine max
  Clone ID: PAT_MRT3847_131357C.1.pep
SKRIQKYLHFIITLMVSYVNQALILPITFILKPSYKHILIFITNLLLNTLIFKHSFLFLKSNPNHPSLHNH

SEQ ID NO: 177566 - protein, 136 aa, Glycine max
  Clone ID: PAT_MRT3847_131358C.1.pep
MGTTSSFSFPLLIGTPISRSSKPRLVVAAAASSEGGATSSSATKLLTFLGKGGSGKTTAAILAAQHYAMAGLNTCLVIHGQDTTADYLLNCKIGTSHVTCGKNLSAVRLETTKMLLEPLKLLKQADAQLNMTQGTL

SEQ ID NO: 177567 - protein, 253 aa, Glycine max
  unsure (1)..(253): unsure at all Xaa locations
  Clone ID: PAT_MRT3847_131359C.1.pep
IHVLVIHGQDTTADYLLNCKIGTSHVTCGKNPAPSLLRLADEAMLISCSXSYFNAKMSSEIWETNFCMLEQVQTAFEPLKLLKQAVAQLTNNQGTIRGVVRXWGFTIQLGARVSGAFGSTSQLENLESLERAKKEFSPLPSASISRLSMNNSIDWSRVLLDTGNEDARHLLNSLSSQGGDMPSPVRFDKKGKLVTLFMPGFDKSEIKLYQYRGGSELLVEAGDQRRVIPLPPEIQGKVGGAKFGDRSLVITLL

SEQ ID NO: 177568 - protein, 76 aa, Glycine max
  Clone ID: PAT_MRT3847_13135C.1.pep
SKRFYPLFKHQTNRTLMKSFQTFKYFSNLIHNLLPIFNSLSISLKPIIIIYLFIIFTIYFLYFYINNYFPLPTHIK

SEQ ID NO: 177569 - protein, 121 aa, Glycine max
  Clone ID: PAT_MRT3847_131360C.1.pep
SGNFSLTRQPSVYSLTFDEFMNSMGGSGKDFGSMNMDELLKNIWTAEEVQTMASAGVAADDGGAGASHLQRQGSLTLPRTLSQKTVDEVWKDISKEYGGLGGPNLAAQTQRQPTFREMTFV

SEQ ID NO: 177570 - protein, 82 aa, Glycine max
  Clone ID: PAT_MRT3847_131361C.1.pep
FLSTNFYTLPYYIFKRGFLFFLKYTIRNDTQYYAPYISHILTQHEIYQIYHDFCIKFLNFTLNILFQVWEYSNLNISLPNGA

SEQ ID NO: 177571 - protein, 54 aa, Glycine max
  Clone ID: PAT_MRT3847_131362C.1.pep
GGKKKRIHQMRKNSWGRIWFLTMYNVKLKGMFFSPPNGKCKPMVNGVPVFFPQT

SEQ ID NO: 177572 - protein, 49 aa, Glycine max
  Clone ID: PAT_MRT3847_131363C.1.pep
LALRSNIFELRRALLMAVEYHCCETHFFIRLLIILLLVLFSGFMSCLTL

SEQ ID NO: 177573 - protein, 87 aa, Glycine max
  Clone ID: PAT_MRT3847_131364C.1.pep
CQVSPTKTKPLINIKLFESNEHHFFQTYRDRSNYSPRNPLITPPFPGTSRQVKTKTPFFSSPSHNIPSDKSTWTFTHFGTPPNTRAF

SEQ ID NO: 177574 - protein, 54 aa, Glycine max
  Clone ID: PAT_MRT3847_131365C.1.pep
IHYKPPKGAFRTKVVHPNINSRGSYLLDILKEQWSPGMTISKVVLTSCSLLCDP

SEQ ID NO: 177575 - protein, 43 aa, Glycine max
  Clone ID: PAT_MRT3847_131366C.1.pep
SEYFLFLFKMNFHSHFQFLFTILIQLNLFFLNKILLYTFKTKG

SEQ ID NO: 177576 - protein, 231 aa, Glycine max
  Clone ID: PAT_MRT3847_131367C.1.pep
MEGTSEKGLWECGRKCTPPPFLLKTYMLVDDPATDDVVSWNSEGTAFVVWQPAEFARDLLPTLFKHSNFSSFVRQLNTYGFRKIATSRWEFFNERFKKGERELLHEIRRRKAWTSKQQPNAPNQATLQDSDEDQRSSSISSSSGYTTLVDENKRLKKENGVLNSELTSMKRKCKELLDLVAKYSSHAKEEKEDERPMLFGVRLDVQGEREMKRHRAEMSESASIMLSQSCK

SEQ ID NO: 177577 - protein, 80 aa, Glycine max
  Clone ID: PAT_MRT3847_131368C.1.pep
SYHSRSPSITIPFNLYLLALRPGKKPKPGLSTHRRTYITKFNTFNKFLYSIFSYHNQHLLFVHHFFLTLLQPICLQKQPF

SEQ ID NO: 177578 - protein, 78 aa, Glycine max
  Clone ID: PAT_MRT3847_131369C.1.pep
DPQRPLYLILHKHLSIPHLTLIYHRHFYTLGAPNLQLPSIHSPPTKPSFLPLHSLEPSYPFPYWLNNLHQNNTPLFQP

SEQ ID NO: 177579 - protein, 60 aa, Glycine max
  Clone ID: PAT_MRT3847_13136C.1.pep
EIVKTLQETWDRVDDTYAVSSLAWVGVIALCGSIGLISSMDRLTLIPEILEIVCIGYAWW

SEQ ID NO: 177580 - protein, 131 aa, Glycine max
  Clone ID: PAT_MRT3847_131370C.1.pep
HAYAGQPGRNSGQGPPGPPGPQGGAGQPGRPGGPGQPGQPGAPGVITTSVPGPKGPPGAPGQPGQPGAPGQPGKPGNAGQPGAQGPPGHPGQPGSPGQPGSPGPAGPPGGDAAYCACPPRNAVLMKKMKKA

SEQ ID NO: 177581 - protein, 35 aa, Glycine max
  Clone ID: PAT_MRT3847_131371C.1.pep
HADSHGVFHILSACSHSQCSLAGSIGLAACPCRAS

SEQ ID NO: 177582 - protein, 416 aa, Glycine max
  Clone ID: PAT_MRT3847_131372C.1.pep
GVVGAVVLAGLFFVLCRKRRRLVQRQSKTWVPLSINDGTTSHTMGSKYSNGTTLSAASNFEYRVPFVAVQEATNNFDESWVIGIGGFGKVYKGELSDGTKVAVKRGNPRSQQGLAEFRTEIEMLSQFRHRHLVSLIGYCDERNEMILIYEYMEKGTLKGHLYGSGLPSLSWKERLEICIGSARGLHYLHTGYAKAVIHRDVKSANILLDENLMAKVADFGLSKTGPEIDQTHVSTAVKGSFGYLDPEYFRRQQLTEKSDVYSFGVVLFEVLCARPVIDPTLPREMVNLAEWALKWQKKGQLEQIIDQTLAGKIRPDSLRKFGETAEKCLADYGVDRPSMGDVLWNLEYALQLQEAVVQGDPEENSTNMIGELSPQVNNFNQDASASVTQFAGSGLDDLSGVSMSRVFSQLVKSEGR

SEQ ID NO: 177583 - protein, 205 aa, Glycine max
  Clone ID: PAT_MRT3847_131373C.1.pep
MASPQTPLSLLTIALLSLIPLFIFFFFNRSKGKQPKEPPTIPGAWPILGHLPLLARSPTTHHLLGAIADDHGPLFTIKLGTVKALVVSNWETAKECFTTNDVAVSYRPYVVATEHMTYNVAMLGFAPYGPFWRDMRKNIASAFLSDHRIDTLSHVRVSEVRTSLKELYSKWTRGTDGGKSDFLAVEMKEWLKELSFNVVLRMVAG

SEQ ID NO: 177584 - protein, 53 aa, Glycine max
  Clone ID: PAT_MRT3847_131374C.1.pep
KIQDPLLSHNHRADKTEMEAVALDEPPADMPSRFIIFVSTNTGIVGRRCSTKL

SEQ ID NO: 177585 - protein, 215 aa, Glycine max
  Clone ID: PAT_MRT3847_131375C.1.pep
FNRIMRRFRPIAPKPPPRSSAAPRATGLGDGSQSSHVSVLGKRPKRKYVRIRRNGGYVRKNNGNSNRKSNCNCNDESSDVAVVTLQLMPEKDAPEGDVTLAGDSWRKNVDLDLTVEKIQIVENPSVPPPRLVVEEGEGAKGSDLVPAAKAAESWVTVESVTGTCMGEGEGGRGLLSCTDEERVKSLETDTCPGFVCDGSLRVRWVNDAYKRMVLE

SEQ ID NO: 177586 - protein, 119 aa, Glycine max
  Clone ID: PAT_MRT3847_131376C.1.pep
SSRIGSRPVVVTSVEKNEKKMKRKYQKKRVLAEDEPKPDPYWLDTFFGFAPEEAERVPNWGHCGVLSPLLANVCLDELDRWMEGKINEFYVPSKSDVIWNSPDEDQGNTSWAEFVPKSG

SEQ ID NO: 177587 - protein, 58 aa, Glycine max
  Clone ID: PAT_MRT3847_131377C.1.pep
IEYEITELKNDKDVLKVLVQSNHWKRYCTLKVLLAIFNKPAIKIKEDLDPAQHMSDHY

SEQ ID NO: 177588 - protein, 103 aa, Glycine max
  unsure (1)..(103): unsure at all Xaa locations
  Clone ID: PAT_MRT3847_131378C.1.pep
MDQARLTYEQDMRRDMPWKTYMDNKLMXMYQTLVLKALLSPGXSHISQVLDDDGPSYVRTFGPTLRDIEKXDSREYVXALIDETLDAYRKRARLFDDSPLVCE

SEQ ID NO: 177589 - protein, 107 aa, Glycine max
  unsure (1)..(107): unsure at all Xaa locations
  Clone ID: PAT_MRT3847_131379C.1.pep
RTAFAILVEHAMQDLKITNARRESENPIKVINIYKANGKSAXRNRFKRNGYSLKTRRAAQGTPFMVAHIRKGCLDYNLHKTKTATGAXVFDTETKELYTNRQREAIL

SEQ ID NO: 177590 - protein, 64 aa, Glycine max
  Clone ID: PAT_MRT3847_13137C.1.pep
KLETELHCPLHCDGTAQRTFKVNLGLLTSLRVQRETFGRRLAPNIQAGEGSGPVFSILRKAGAC

SEQ ID NO: 177591 - protein, 91 aa, Glycine max
  Clone ID: PAT_MRT3847_131380C.1.pep
GPGPDFPFRPTRPPSLPTAARRPQRGALQLQGALAHPLCATPYLSFQGSKTPHVTPSPPPSIVLHPPDVASIAYTIASSIINFHPRRLSSY

SEQ ID NO: 177592 - protein, 198 aa, Glycine max
  Clone ID: PAT_MRT3847_131381C.1.pep
SARLPPLSATWFFAPFLLPRGIRFSMLEAFYNNDVNGVYTRDFPNQPPIVFDYTDPNITSTTELAFKIAPKSTKVKTLKFNSTVQIVLQNTAIVSAENHPIHIHGFNFHVLAQGFGNYNATRDEPKFNLVNPQIRNTISVPVGGWSVVRFQANNPGVWLVHCHLETHLPWGLAMAFEVENGPTPSLSVPPPPADLPRC

SEQ ID NO: 177593 - protein, 165 aa, Glycine max
  unsure (1)..(165): unsure at all Xaa locations
  Clone ID: PAT_MRT3847_131382C.1.pep
TPKGMVVVDDNRVGPLYEHTFSPXALAPSLSLVGIPRRILGLPFFESQGKWVAQLLSGKKALPSYEEMMKSIKEFYHSKEEAGIPKHYTHEIEGFDYCDKYAENVGLPKLQEWRKDLCVSAVVNLFINLETYRDSWNDDIDEKLQEALRSPYFTQLGVEPEDPSL

SEQ ID NO: 177594 - protein, 84 aa, Glycine max
  Clone ID: PAT_MRT3847_131383C.1.pep
PRVRELPPPPRPFPSKNEGSFKKPIAYCQASKPWGLLYFHFHSQTESNFKIGFSAKHYSVFFLTKTSPVCFFHSFSLLGKKSFS

SEQ ID NO: 177595 - protein, 42 aa, Glycine max
  Clone ID: PAT_MRT3847_131384C.1.pep
ISLVINIVNIDSETLIIYTVNDARALYAWPKDGTINAATIVI

SEQ ID NO: 177596 - protein, 38 aa, Glycine max
  Clone ID: PAT_MRT3847_131385C.1.pep
LFSFFIFILFVVFCFYFNLFGFGSLETFLCQYLLMGVD

SEQ ID NO: 177597 - protein, 94 aa, Glycine max
  Clone ID: PAT_MRT3847_131386C.1.pep
MFRKQISWPAHIYNKSNPVAKEGQESKTYESASSLSLTTFTSLLIEFVARLQNLVDSFEELGEVANFVDPLEQQAPVASRGFWARLCNCFKFKD

SEQ ID NO: 177598 - protein, 137 aa, Glycine max
  Clone ID: PAT_MRT3847_131387C.1.pep
MLMSKQKKSQIQNAKRLLISINVLGSAGPIRFVVNEEELVAAVIDTVLKSYAREGRLPVLGNNTTGFALYCPHLGSDALSPWDRIGSHGVRNFMLCKKPEGVADVDGDASGISRSSRGIGSWKAWFNKSLNLKISTH

SEQ ID NO: 177599 - protein, 91 aa, Glycine max
  unsure (1)..(91): unsure at all Xaa locations
  Clone ID: PAT_MRT3847_131388C.1.pep
KSARASNSRTPLLESGLQDDTRVIVEXSGRMSYVAQNRNQPQEEDWLEGNXAVDIRSRSILEKVSXLAEARCVSGKSFKYEVIGAGSHAAG

SEQ ID NO: 177600 - protein, 78 aa, Glycine max
  Clone ID: PAT_MRT3847_131389C.1.pep
NREATGLRYTHSCLRNRPQTEGILGEQAEGGRTEPPVGSLNPPNTVQGKRDRKWGRRLRLTEEVRNMTTQGGRTGRPI

SEQ ID NO: 177601 - protein, 86 aa, Glycine max
  Clone ID: PAT_MRT3847_13138C.1.pep
KLRVRNLLLRSPSDGKDNNNNSQQRQQQRVLKEVVFQIPKIKVAAKPQNGSEHMEQCKSKSFLPYRPELVGLFANVNGLGRNLRPF

SEQ ID NO: 177602 - protein, 67 aa, Glycine max
  Clone ID: PAT_MRT3847_131390C.1.pep
GGKGFSRGGPPPKGARFKGKDLAPLIGGSPKIYPSGGVSLAHVPKGVFPTTFFLDPFSPAGALYPKR

SEQ ID NO: 177603 - protein, 184 aa, Glycine max
  Clone ID: PAT_MRT3847_131391C.1.pep
QSSGSQSLFQDSSLGREDFNVFDTESAVQGLSGISDSGCALSLLSSQSQNSSGQTSGIPIAHPMVIPSSHSHYNMSRVSEKMIGISSQASSGVSDRFPPEFNPVDGSHLSPILISDNNEIINFEMANGIFQGSDFVNVKDRLSCEDSLTIDLLQLSSQLQRVENQRLSLQVKQENDSSCSLRIT

SEQ ID NO: 177604 - protein, 113 aa, Glycine max
  unsure (1)..(113): unsure at all Xaa locations
  Clone ID: PAT_MRT3847_131392C.1.pep
RNSGSTPRPLVVYVDDIVITNDDXCSIRRLKSHLHNQFQTKNLGPLKYFLGIEVAQSSFGIVISLXKYALDILTETGMLDCCPSDVILIRSGSFGTGHRIGCRHFQRWKISQG

SEQ ID NO: 177605 - protein, 76 aa, Glycine max
  Clone ID: PAT_MRT3847_131393C.1.pep
VANKVNGSMIWNVFKSDKRDRIFFANKTYLPNETPTPLVKYRKEELENLRGDGKGERKEYDRIYDYDVYNDLGNPD

SEQ ID NO: 177606 - protein, 63 aa, Glycine max
  Clone ID: PAT_MRT3847_131394C.1.pep
NLGVASPPSCIETMLVFPIPLSSPRNYTMDRALPLWHQISCTAWLPIPICQSSVLDPTFSTYV

SEQ ID NO: 177607 - protein, 85 aa, Glycine max
  Clone ID: PAT_MRT3847_131395C.1.pep
PPGKNPLFSYLKKGPPPHWEKEKAPFFGKKCPTPSPQIIGPKKTKQSFAPKFQSGLKKVPINPILYIGNPLCKWELYAYMCLRGP

SEQ ID NO: 177608 - protein, 56 aa, Glycine max
  Clone ID: PAT_MRT3847_131396C.1.pep
YWCGIREAANAGAQITKLGFCKVGNDGSVTLSGQALLLVHIVWLIVLGFTVFFGLF

SEQ ID NO: 177609 - protein, 85 aa, Glycine max
  Clone ID: PAT_MRT3847_131397C.1.pep
RFFRPPCRWRLLTMRFIHCVSRRGPACFLVGLGFCWSPPFGWLVSGFRFPPVLVLSRAVVLVLFRRRFLRLPSGFGFVFAVAPVV

SEQ ID NO: 177610 - protein, 239 aa, Glycine max
  unsure (1)..(239): unsure at all Xaa locations
  Clone ID: PAT_MRT3847_131398C.1.pep
IKRVLVEFILPLLQTEEMEHLQQRENQLTALLHQVQLLNEHYAVLCSDIKQQYQIEPSTDVLALQNQLSTLRGFFGVLKAKEIPESRSGNGLFSILPQEMIQLIMLQLNNPRDLLCALGATNSHFKALVGEQSAIWSALLCAHHSTRNSTHHLLTARNTPRYTYLWLHYSPTARPLESQAARQFGTFSWFEQQHAVVYQGERKNGKPDGXGKFTFPNGSTYTGQWREGDANDSVSACGV

SEQ ID NO: 177611 - protein, 122 aa, Glycine max
  unsure (1)..(122): unsure at all Xaa locations
  Clone ID: PAT_MRT3847_131399C.1.pep
RVGKFWTKHEKNLALPAEAKMEVIPYRGISVAALLWWAPEFEIQVTPESLKGSHPADEKKCSTQLGTKLEXVVPTCPQGVGDLKLLTDGKLYAVPHIPVSNISAGXNHVFQIPLMAHEEICS

SEQ ID NO: 177612 - protein, 130 aa, Glycine max
  unsure (1)..(130): unsure at all Xaa locations
  Clone ID: PAT_MRT3847_13139C.1.pep
NLHSXXXXXYXLXXXXXSXXTXXHXTXXXXXXXPXVXXXXXXLXXYXXLXXXXXXXXSXXXXXTXTXXXXXXXXXQXXXLXXIXTXHXXTXXXXAXNXXHRXSXXXSIXRXXXXXGXXXXXXQRXCTXNX

SEQ ID NO: 177613 - protein, 84 aa, Glycine max
  Clone ID: PAT_MRT3847_1313C.1.pep
CKLPYSGFTSHELAVLLKKKFVNLTSLNFDYCQYLTHIPDVFCLPHLENLSFQWCQNLSAIHYSVGFLEKLKILDGEGCSRLKS

SEQ ID NO: 177614 - protein, 77 aa, Glycine max
  Clone ID: PAT_MRT3847_131400C.1.pep
QQGIPPAPPGGFFCWPTPSGGKGPPPLQHPKGVPSALGVGPPRGVFTRGLFLCNVPFWIFPHLFKKNFIFNGAVIPL

SEQ ID NO: 177615 - protein, 242 aa, Glycine max
  Clone ID: PAT_MRT3847_131401C.1.pep
PWSYVAGNGYGSHSFDGVAYVPTSAPYFNGNGVTGYHSGHGYEYVPNVSFQWGSAGVVNQNGSATLPADSVHQANGNVKRGRPKVKSGADKRHHMVETMVNTNSDVPFSCSEPQEDKLSRPDKKQKVVVGASFRNGYDEKGSKRASESIVANGNDSMGHGQKPSCTVEVQTKQCSMAPAFDARKLLIEKARKEIRKKLEEMRLSSEAAATAAAALNEKEKSQAEVGQVKRETCRKAAPIVSG

SEQ ID NO: 177616 - protein, 85 aa, Glycine max
  Clone ID: PAT_MRT3847_131402C.1.pep
SRWFFFFFFFFFFFFFFFFFFFFFFFLKRGGATTNKKGGKKKTPKKNPPEKGGGKTPPPETKKGEGPKKKLAKTKAQRGKTPFLF

SEQ ID NO: 177617 - protein, 112 aa, Glycine max
  Clone ID: PAT_MRT3847_131403C.1.pep
GKEMEKLQEVVTKQNWGTHSEGMSSTTPIYGLAQCFQDLSSIDCLQCFASSRTKLPRCLPSVSARIYLDGCFLRYDNYSFYTEDTDPLRDTVNCTSQYGAVVGMCEKLVFAE

SEQ ID NO: 177618 - protein, 55 aa, Glycine max
  Clone ID: PAT_MRT3847_131404C.1.pep
TLAIIKDIVIYVTRQAQNLHVFYDYLCIYIYTSNVRAPIYIYMQIKSNTLLRTCG

SEQ ID NO: 177619 - protein, 56 aa, Glycine max
  Clone ID: PAT_MRT3847_131405C.1.pep
VHELKLRYLIFLDDTCYRNWFYSCNFVACHVAISYFCFYGGLPIENFLVISCLMLC

SEQ ID NO: 177620 - protein, 175 aa, Glycine max
  Clone ID: PAT_MRT3847_131406C.1.pep
MGSERECQLPLPVVDFCDENLKPGTDTWVSACDVVRGALEDHGGFLALYNKVDPLLYDSVFSAMEQLFDLPLETKMQHTTDKPIYSYAGQRPDIPLYESMAIANPLNDKDCHEYTNIMWPQGNDQFSESVNSYAKKVVELDYLVKRMVFESYELDNKKFESLLESTDYILRCYKY

SEQ ID NO: 177621 - protein, 70 aa, Glycine max
  Clone ID: PAT_MRT3847_131407C.1.pep
LTPAEHTIGNLGIHGVVQIDMIQDAAVCILTMDLGLQHVNRGIPVELARRGFHRIIRLQNEELKIGGPLG

SEQ ID NO: 177622 - protein, 165 aa, Glycine max
  Clone ID: PAT_MRT3847_131408C.1.pep
GELQDQNDDNLSSGSELQDQGEDNVNSGDELQDQVKDGGLSDQSDLKDDDDSISRSPENQSQHNSDVSGDNEFNQMSVDSEKNILLSKSTNNTSSGSGDHEFNQMSVDSEKNLLSKSNNTSSNKDEYSVHMNTQDVSIDEGAPFTSSGDVWQGVEMPHSYYDSAV

SEQ ID NO: 177623 - protein, 290 aa, Glycine max
  Clone ID: PAT_MRT3847_131409C.1.pep
MFSSSGDSYIITGSIFTIFLLGIRACSFLSNSYILEEGKVANFLLSTSGIVTLRQSVIQGKLLKESIGFLILSTLCRFAIEVGLSKQAATSAFMKDYTSWIINIASGLPVWDYAAEVIPMVVLILLAAWLYKATSGSLFDWPWKYVILGTILSYMLIIVHWITDSDRFGGTLMSQNIGRTYIPRIIYAIALGQLLLLTFGQLFKNSSLDCKTILVAKTMAILSAWSSTVILLSGKQVPMVPFALIVGGYVIMELHFIFTQLSQRYTHYGHHNEPLRLLSQYYVSQCKGGP

SEQ ID NO: 177624 - protein, 53 aa, Glycine max
  Clone ID: PAT_MRT3847_13140C.1.pep
GETKFLPFFLNTTYLLRILVVFKLHGFNICSSLERHLVYEGGPQKKKTGGRIP

SEQ ID NO: 177625 - protein, 289 aa, Glycine max
  unsure (1)..(289): unsure at all Xaa locations
  Clone ID: PAT_MRT3847_131410C.1.pep
MLYETDYTMTEIEIPQFFLCPISLQIMKDPVTTVTGITYDRESIEKWLLKAKDCTCPITKQPLPRSTEFLTPNHTLRRLIKXWCSANEANGVDQIPTPKSPLSNSNAEKLVKDLEVSSRFQKALEKLHALAIENERNRRCMASAGVAEAMVHVITKSFKQGNKTTPCVEEALRILRLLWSSANMVDSNNNNNNKIKRMVGENFDFLNSLTWALQLQTKNNVKLTNEAMPILKLVIEAKDSTPLGNLKLEFFKVVVSVMKNRELSQQAVKSALHVLIETCPLGRNRMKIV

SEQ ID NO: 177626 - protein, 62 aa, Glycine max
  Clone ID: PAT_MRT3847_131411C.1.pep
LQILFICWIWLLVSCHFSLCLNLILGCPSSRAALSSLPLVVAPPPPPPPPPPPPQAGGTPHM

SEQ ID NO: 177627 - protein, 49 aa, Glycine max
  Clone ID: PAT_MRT3847_131412C.1.pep
GRNNKHSFCTHKELVELSITSSTQESATLPSSIIHYGIVTVVETTPAMF

SEQ ID NO: 177628 - protein, 159 aa, Glycine max
  unsure (1)..(159): unsure at all Xaa locations
  Clone ID: PAT_MRT3847_131413C.1.pep
HIKVMQAAAKLGISITISQVGSDMLSTGTPSALPTINKNQEWQPAMSLNEDGLLHQLHSTLVQAIDSSKSVSTADSLVPVMQDCVDAITEHQRLQPLVKGEWXKGLLPQSSVRADYNVQRIXELAERTCLKNYEYLGSEHPKWMLHEDAMSYAGAQSGK

SEQ ID NO: 177629 - protein, 61 aa, Glycine max
  unsure (1)..(61): unsure at all Xaa locations
  Clone ID: PAT_MRT3847_131414C.1.pep
MTXXLXIKKXCLVNXFXXXLXXVXPYXSLXXFHEXXESFXXXNXCAPTQPXLXLDESXTPH

SEQ ID NO: 177630 - protein, 109 aa, Glycine max
  unsure (1)..(109): unsure at all Xaa locations
  Clone ID: PAT_MRT3847_131415C.1.pep
TNIGHGVCILEAKRVSRRSVAEVYNTPGPEITFEERAEVIKEHTYGEXHRLDLKIANXKSIXHVRDSEAYFKDIPAPSTDGIASLNTLHHKKYGHGAEKPNLIPHDERA

SEQ ID NO: 177631 - protein, 32 aa, Glycine max
  Clone ID: PAT_MRT3847_131416C.1.pep
SGCGGNCGWGSTCKCGNGWGGCKMDTDWNYTE

SEQ ID NO: 177632 - protein, 63 aa, Glycine max
  Clone ID: PAT_MRT3847_131417C.1.pep
MGFFKRVAGFLGFGNHKHDSKDETDDGQPRVRETVVDRPHLAPVLTPSTFGDGGIHGLDWYVN

SEQ ID NO: 177633 - protein, 73 aa, Glycine max
  Clone ID: PAT_MRT3847_131418C.1.pep
NTRPDRTRPPTRSHIIIIILLEQSFSVWFGPYRNRTYPVLSFSVCIFVHFFLSFFLSYYLVNHDNIYGHVQHY

SEQ ID NO: 177634 - protein, 60 aa, Glycine max
  Clone ID: PAT_MRT3847_131419C.1.pep
EPHLFQTYKEQWDEKQNKTKLYFSLLCFYGITNVLIHMPLFLFMLLLSFSSYIIFFGVAF

SEQ ID NO: 177635 - protein, 66 aa, Glycine max
  unsure (1)..(66): unsure at all Xaa locations
  Clone ID: PAT_MRT3847_13141C.1.pep
GKDSLWFQRLTVSPIYFAFVSPNNKEFVFCSEGRCTXIIICSVHAQRSYCNXFFNSTSNCILIVLN

SEQ ID NO: 177636 - protein, 71 aa, Glycine max
  Clone ID: PAT_MRT3847_131420C.1.pep
FSIRLWFLSVADFYNSALSSPTFSIFNALADSFLGSQYSTLPPPQNSKKKKKKKKKIIKNNTKKKKEKVKP

SEQ ID NO: 177637 - protein, 33 aa, Glycine max
  Clone ID: PAT_MRT3847_131421C.1.pep
LTLHTSIRMLIEVWRFLNRQSIINERVMHHFHY

SEQ ID NO: 177638 - protein, 63 aa, Glycine max
  Clone ID: PAT_MRT3847_131422C.1.pep
SCTAAYMLWTRISLQRCSSPHVTCTRCKILPPVNISILLSKRRRRGGSRQFRRGGSSRRSSPH

SEQ ID NO: 177639 - protein, 50 aa, Glycine max
  Clone ID: PAT_MRT3847_131423C.1.pep
LLGLGRPPFFFFIFLATKAQNLTKGRGQDQLRTYPECCFNFKIKKMFSQE

SEQ ID NO: 177640 - protein, 55 aa, Glycine max
  Clone ID: PAT_MRT3847_131424C.1.pep
LLAPWNERRQLLFLCTVYNLGKQVYLFNKSFSVKFQSNIVSSASMEANKIDAYFN

SEQ ID NO: 177641 - protein, 106 aa, Glycine max
  Clone ID: PAT_MRT3847_131425C.1.pep
YFFYYFYSFYFFFFFFFFFFFFFFFLNPTRKHTRGERKAQKTQKKNPPNRAKIILLSKKPENPKQKTGFCKWPKKPKKKDKTPKTTWPTPGNPICHPWGTNQEILI

SEQ ID NO: 177642 - protein, 78 aa, Glycine max
  Clone ID: PAT_MRT3847_131426C.1.pep
NNFDPSHPLRNNSLTKSILCSAQFFSTITSYILHLITLQTHIYNIISFTYTTSNLHSYTFTHSHFLCSYILLPFTIFI

SEQ ID NO: 177643 - protein, 85 aa, Glycine max
  Clone ID: PAT_MRT3847_131427C.1.pep
GAGCTPSTYLNELIVNSFFLENPTLYKIHFITPFVIDKGKHSRKMKSLGDEESNWAMTLLYRVLIFMRISFASISVFNSHKHDET

SEQ ID NO: 177644 - protein, 59 aa, Glycine max
  Clone ID: PAT_MRT3847_131428C.1.pep
CITNNSIFFFSIVIITIFHSPYNLRTTNFSTQIHVSLLKHKIDLLNTRLTPAFHKQTLY

SEQ ID NO: 177645 - protein, 388 aa, Glycine max
  unsure (1)..(388): unsure at all Xaa locations
  Clone ID: PAT_MRT3847_131429C.1.pep
RGRRIPGGRFQLLCNASGAVLIEATCSSQFSFKYFRDFAPVHAVPKINYDDVPIEDVPLLVAQVTRFPNGFITLGLSLCRALLDGNSASSFVNSWAKLAKGENLDSSLIPLLDRTKLDSFKLNKPPRFEHPECLPPPLLTQQHTQMEGQLGSTILELTEGQVEKLKKIASDFXSGYGINNGHGSVRPYTSCEVITGHLWRCVCNVRYAGGDLGQPTRLTTLVNCRNRLRPSLPTAYFGNATFPTVTPTCSFDEIMHKPLSYAVGKVREAIGKMSDEYVRSALDYIASVEDFDLFRDTFYGSGDGKGKFKGDPNLYMVGWTNFKYFETDFGWGKPVSLIPGNINSNGKAFLLXNASGDGFIVPVCLLESHVDALRKLFYEDMEDASSKL

SEQ ID NO: 177646 - protein, 443 aa, Glycine max
  unsure (1)..(443): unsure at all Xaa locations
  Clone ID: PAT_MRT3847_13142C.1.pep
MALSIFQFLLFSISLCFLASSFQDLLLLSVNAQSHNLTQPSVTPINYDLYHSSDNLMEEIRALVHRHPDKLTTETIKAGNKGYGAEVTVVTYCKEKKGNDERSKLRILLMIPCLXSFGQHGRELITTELALRILSILSEEKILPIMDQASLNSALDKLVIYVVPFENLNVAKVFEVXHFSNMSNGRGVDLNRNWSVDFGKKEKDYDPYEENPGIAPFSEPESQIMRKLAISFEPHLWVNVHSGMEALFMPYDHKNSTPDGLPMQRMRSLLEEVNQLHCQERCMIGSGGGSVGYFAHGTATDFMYDIVGVPMAFTFEIYGDGTASSRDCFKMFNPIDLATYNRVLSDWSATFFTIFKLVPQKLGDSKASILKLDKLVSIDEYLDGYLMERRNRYGKKMEVLELGMQEIRTYFRLFLLSSVLLLFMFCSRISKSKCRPIVSAIPL

SEQ ID NO: 177647 - protein, 47 aa, Glycine max
  Clone ID: PAT_MRT3847_131430C.1.pep
HDSVFINHTSLLFHHRLKRWRPWTFMKGTATTRSATKSGKSSASSTV

SEQ ID NO: 177648 - protein, 58 aa, Glycine max
  Clone ID: PAT_MRT3847_131431C.1.pep
LIQFNCGPAGALSDSTMSSTCAGESRRYITIPRGRHNLTTQNKPEIYEAIALCYTDCS

SEQ ID NO: 177649 - protein, 73 aa, Glycine max
  Clone ID: PAT_MRT3847_131432C.1.pep
MAGKGQGPAIGNDLGTTYSCVGVWQHDRVEIIGIDQVNKTTLFYEGNRDTELLVMDDGNIPLYLKPTNTGSDA

SEQ ID NO: 177650 - protein, 248 aa, Glycine max
  Clone ID: PAT_MRT3847_131433C.1.pep
MALFSATATVLPRNLAFASSTKLSLSHSHTLLPRFLSFPTPKSSNPRNRVAVSLQTPRAQSAASASPSASFHGLCYVVGDNIDTDQIIPAEYLTLVPSKPDEYEKLGSYALIGLPATYATRFIEPGEIKTKYAIVIGGANFGCGSSREHAPVALGASGAAAVVAESYARIFFRNSVATGEVYPLESEGRLCEECTTGDVVTIELGESRLINHTTGKEYRLKPIGDAGPVIEAGGIFAYARKTGMIPSR

SEQ ID NO: 177651 - protein, 91 aa, Glycine max
  Clone ID: PAT_MRT3847_131434C.1.pep
TIDCFYRRGGCVHYYYLLMALRWTTLLSTRADLLNQQNDLVWDTTGQFLRAWEPHDAAGHKLHVVGSTHVLQSRYPTGFKLALLDCLNRQA

SEQ ID NO: 177652 - protein, 350 aa, Glycine max
  unsure (1)..(350): unsure at all Xaa locations
  Clone ID: PAT_MRT3847_131435C.1.pep
MAGSSSSAAVSLLPVIRHDVFLNFRGEDTRDNFISHIYAELQRNKIETYIDYRLARGEEISPALHKAIEESMIYVVVFSQNYASSTWCLDELTKILNCKKRYGRVVIPVFYKVDPSIVRHQRETYAEEFVKYKHRFADNIDKVHAWKAALTEAAEIAGWDSQKTRSLIITCSFEMXRLLLIYLDAKIVLINPEATLVAEIVKDILTKLNSSSSCDHQEFVGIETHITQIKLLMKLETLDIRIIGIWGLGGIGKTTIAGQIYHQLASQFCSSSLVLNVPEEIERHGIQRTRSNYEKELVEGGISISSERLKRTKVLLFLDDVNDSGQLRDLIGGRGRFGQGSRIILTSRDM

SEQ ID NO: 177653 - protein, 48 aa, Glycine max
  Clone ID: PAT_MRT3847_131436C.1.pep
YYCFLSNFIAFYDLIIHLHVCYKVLIIEKYFYPKNLNELLSNPCLRIE

SEQ ID NO: 177654 - protein, 67 aa, Glycine max
  Clone ID: PAT_MRT3847_131437C.1.pep
STFHTKLIHTPCVFINLINTQNLAYINGNIARSLSRFLKNVRSITTTNAFNADQPFISTSIDSPSLF

SEQ ID NO: 177655 - protein, 43 aa, Glycine max
  Clone ID: PAT_MRT3847_131438C.1.pep
KKVSKFVAWAKRCQQKDSVAKSLLVLLKVDEFIMSLIKKFDIE

SEQ ID NO: 177656 - protein, 71 aa, Glycine max
  Clone ID: PAT_MRT3847_131439C.1.pep
HMEDRTIVKNGSSSRKGSFRMGLGMDGKKDHTVVELGSIDTQRLLLSNGEREKILQPLTNTLSPRQMNLSM

SEQ ID NO: 177657 - protein, 130 aa, Glycine max
  Clone ID: PAT_MRT3847_13143C.1.pep
FPFLGFIFSFVIGEYLHTDTKGRLEVSITISDDESEGNQDSVRMYIDFEGRKIESDHVCVVYDQRCSSFLSSKVKNQTRLKIKVTMGVPDYALPQGYNRGVRFGVSPISTSAYESFIQQMKLRNSISQFH

SEQ ID NO: 177658 - protein, 514 aa, Glycine max
  unsure (1)..(514): unsure at all Xaa locations
  Clone ID: PAT_MRT3847_131440C.1.pep
ARGAFPYSGLLISRALSFSNFSNASYYRELEQSLMDTFRNQSIPVDSVSLSNPFRNTIDNFELTLDVFPSQTDRFNTTGVLTIAFLLSNQIYKPPEFFSPYFFKGASYEYYGGEPKGSKSSSHVGVIVGAVVAVVVFVVLAFFAGRYALRQKTRARRSSELNPFANWEQNTNSGTAPQLKGARWFSFDDLRKYSTNFSETNTIGSGGYGKVYQGTLPSGELVAIKRAAKESMQGAVEFKXEFELLSRVHHKNLVGLVGVLKSANMATLIYCNRWIEANGHIKRCRQGSGRSKPHQGQSNITTMFRKVSDFGNDMRERILKRKGYNGLXVKEIESMIELVGLNPNSESATTSELMRKQVLDPEYYMTQQLTEKSDVYSFGVLMLELATARRPIEQGKYIVREVLRVMDTSKDLYNLHSILDXNFIMKATRPKGLEKFVMLAMRCVKEYAAERPTMAEVVKEIESIIELVGLNPNSESATTSETYEEANAGNAQHPYREEDFSYSGIFPSTRVEPQ

SEQ ID NO: 177659 - protein, 124 aa, Glycine max
  Clone ID: PAT_MRT3847_131441C.1.pep
GAAALLSATHIAVFYFFIFGVVYLLVPFFFFFCGFTLQNRSFTKNLSDELLGSGSCWHLRVGYDNLRNVHCIKSQKPLILRKAKKLAVSWLLLSRFVLCPRYLFFFHHKKIDFFWFVGLGRRIV

SEQ ID NO: 177660 - protein, 64 aa, Glycine max
  Clone ID: PAT_MRT3847_131442C.1.pep
KYYPFRKVVFYDYQFIMIPVELKGGDIRLRNNENSIKDEGLTAKNKNAKNINIRRNQMQNSFCN

SEQ ID NO: 177661 - protein, 62 aa, Glycine max
  Clone ID: PAT_MRT3847_131443C.1.pep
IVPKIHSLRIHLLYPINALQPTACVFNYSIWMKKRVERVGSRIQTHTYFAIKYLFFLFLLHS

SEQ ID NO: 177662 - protein, 99 aa, Glycine max
  Clone ID: PAT_MRT3847_131444C.1.pep
VRLRSGGDHETSRILKLTDSLWTNISLTTVEDLSFANLKDVKDVYQLNDGFPLLKHLHIQESDELLHIINSTEMSTPYSAFPNLETLVLFNLSNMKEIC

SEQ ID NO: 177663 - protein, 49 aa, Glycine max
  Clone ID: PAT_MRT3847_131445C.1.pep
LHIFLLGKRVQNLFAYSTTEMTSKKFCSRLPRRKHGPPPTIELFDTPNY

SEQ ID NO: 177664 - protein, 97 aa, Glycine max
  Clone ID: PAT_MRT3847_131446C.1.pep
DETPWLANEYVPYIHERNFNLQKEEEEEVVVAGIGGFHIAANIGFYYYESHTWLRIREVATKEMGLMEEDPKITGFTVINGDLLILATETRVYRRFD

SEQ ID NO: 177665 - protein, 220 aa, Glycine max
  unsure (1)..(220): unsure at all Xaa locations
  Clone ID: PAT_MRT3847_131447C.1.pep
FGSRQTEDLLDKLSVSLTGEELDVIEKLYYQAMKLEIDFFSAQPLFQPTIVPLTKGHKPAEDHLIVFSDFDLTCTVVDSSAILAEIAIVTAPKSDQNQPEDQIVRMLSSDLRNTWGFLSKQYTEEYEQCIESIMPSDRLNNFDYKELSMALEQLSKFENTANNRVIESGVLKGISLEDIKRAGERLILQDXCPNFFQSIVKNENLNANVHVLSYCWCGDP

SEQ ID NO: 177666 - protein, 30 aa, Glycine max
  Clone ID: PAT_MRT3847_131448C.1.pep
TTPLVPWRVPWVNETYPHKGCLIPIRKKAS

SEQ ID NO: 177667 - protein, 108 aa, Glycine max
  unsure (1)..(108): unsure at all Xaa locations
  Clone ID: PAT_MRT3847_131449C.1.pep
DLIRDTGWTATPMQDVQVTIERLITSQEXAPRTYCALKPQKPSVINRWTGKQTIPQGTYRSVKRMPISIGGGAGAKNAILMNMPNAALPKRRYIAGELHFEEAKKTPP

SEQ ID NO: 177668 - protein, 69 aa, Glycine max
  Clone ID: PAT_MRT3847_13144C.1.pep
FFFFFFFFFFFFFFFIEGRVVTNFFFKNNRFYKVNDGKFWIKTNIEPKTGRKQKNALNFQRATHVKCSL

SEQ ID NO: 177669 - protein, 55 aa, Glycine max
  Clone ID: PAT_MRT3847_131450C.1.pep
RKYNKKKKKKKKKKKKKKKKKKKKKKKKKKKKKKKKKKKKKKKKKKGGGGQLGGW

SEQ ID NO: 177670 - protein, 76 aa, Glycine max
  Clone ID: PAT_MRT3847_131451C.1.pep
SLLRDYAGKQQHEGMLLNLIHHNKPPPSVMGEELNGILSEKSWLESRLKVLVEACEGNSSILPVVDKLKAVVKNSS

SEQ ID NO: 177671 - protein, 56 aa, Glycine max
  Clone ID: PAT_MRT3847_131452C.1.pep
YSNPCLFISQLTYLFYSFIIYFTLFFFFTSNPDTNITVFISRHAPVPVVIATPCLA

SEQ ID NO: 177672 - protein, 76 aa, Glycine max
  Clone ID: PAT_MRT3847_131453C.1.pep
FSFFLENKILKLWFLQVVYFTKTCSLLHFPFLGAVLIETAFHKQKDRGCFFIFYIQTPYLKFCFTGVFTQKMPCPF

SEQ ID NO: 177673 - protein, 54 aa, Glycine max
  Clone ID: PAT_MRT3847_131454C.1.pep
LDDLMRLPEILSISYRQNGAILSHKSRCTNEVRVKLGWYTYTEKVTKDIRYVKK

SEQ ID NO: 177674 - protein, 97 aa, Glycine max
  Clone ID: PAT_MRT3847_131455C.1.pep
AGLRTLGIPLKGLETYEAYPFSVFYGDRKSHSAKVALTVIDSVTHTSSATDRSDHVCRLLHHLQVRPCCWWSGVLFYTMRNSSSVISLSQFEHAIYA

SEQ ID NO: 177675 - protein, 414 aa, Glycine max
  unsure (1)..(414): unsure at all Xaa locations
  Clone ID: PAT_MRT3847_131456C.1.pep
MAMLPLTNPTPIRYNALPSSSFVQRNCVSLNPRSRRCAFEPQRRRFASVTCCSFSTVDSAKIKVVGVGGGGNNAVNRMIGCGLHGVEFYAINTDAQALLHSAAENPIKIGELLTRGLGTGGNPLLGEQAAEESKEAIANALQGSDLVFVTAGMGGGTGSGAAPVVARIAKEAGXLTVGVVTYPFSXEGRXRSLQALEAIEKLQKNVDTLIVIPNDRLLDMADEQMPLQDAFRLADDVLRQGVQGISDIITVPGLVNVDFADVKAVMKDSGTAMLGVGVSSGKNRAEEAAEQATLAPLIGSSIQSATGVVYNITGGKDITLQEVNRVSQVVTSLADPSANIIFGAVVDDRYTGEIHVTIIATGFSQSFQKKLLTDPRAAKLLDKVAEGQESKVVPPPLKSSNKVESRPSPRKLFF

SEQ ID NO: 177676 - protein, 189 aa, Glycine max
  Clone ID: PAT_MRT3847_131457C.1.pep
SDTYLLDLTTDNPIWREIPTSWAPPSRLGHSLSVYGRTKILMFGGLAKSGHLRLRSGEAYTIDLEDEQPQWRQLEYSAFTGLASQSAVVPPPRLDHVAVSMPCGRIIIFGGSIAGLHSPSQLFLLDPSEEKPSWRILNVPGQPPKFAWGHSTCVVGGTRVLVLGGHTGEEWILNELHELCLASRHDSYL

SEQ ID NO: 177677 - protein, 219 aa, Glycine max
  Clone ID: PAT_MRT3847_131459C.1.pep
MAMPKEKEDVQNSGKKLKCTRNEEEEKEQYEQVEADEEEEEEEDSELPLKLGLFFYPTIPTSFVVSDALEPDFPIIYVNKVFEIATGYRADEALGRNCRFLQYRDRRAQRRHPLVDPVVVSEIRRCLEEGVEFQGELLNFRKDGTPLVNRVRLTLIHDDDGTVTHVIGIQLFSEANIDLNRVSYPVFKETWIQDFDKNGKYTPKEGHSLYRSAPRDVQH

SEQ ID NO: 177678 - protein, 95 aa, Glycine max
  Clone ID: PAT_MRT3847_13145C.1.pep
LFDGSHTITLHVVTLHSTSLLVKILQRSKSSIDSHFQDLENQLCLLPRSMTNPTNQHKTFQHVLSSLTRFLRNFLECHSSHNHSKSNMLNRGFLK

SEQ ID NO: 177679 - protein, 49 aa, Glycine max
  unsure (1)..(49): unsure at all Xaa locations
  Clone ID: PAT_MRT3847_131460C.1.pep
KKKKKKKKKFKLKKKKKKKREGXKKKKKKKKKKKKKKKKKKKKKMGRPF

SEQ ID NO: 177680 - protein, 48 aa, Glycine max
  Clone ID: PAT_MRT3847_131461C.1.pep
GLAAPLASGVGFFPCARRRLLRLACASRLDLSSCFLFWSPLYLFVREP

SEQ ID NO: 177681 - protein, 73 aa, Glycine max
  unsure (1)..(73): unsure at all Xaa locations
  Clone ID: PAT_MRT3847_131462C.1.pep
LFGYNPAGKGGFFSRPLVGESKVFPGRSFXPRPVVLFWVPKKKIILQARGGTLFLNGPPFFFFFFFFFFFSFF

SEQ ID NO: 177682 - protein, 66 aa, Glycine max
  Clone ID: PAT_MRT3847_131463C.1.pep
SRSQRKISFFAHHPRPSRFVSASSSSPGTRVVILSVPVAYHKAISLYKASPERVVVLYNNRNFDNE

SEQ ID NO: 177683 - protein, 75 aa, Glycine max
  Clone ID: PAT_MRT3847_131464C.1.pep
HGDTPMMDYHDPTPHPEIDPNELTQHLLYIAGISEVIAALHGFHNTWYTIIDYMRHSDNDIYSDTDCDCRGFVLI

SEQ ID NO: 177684 - protein, 257 aa, Glycine max
  unsure (1)..(257): unsure at all Xaa locations
  Clone ID: PAT_MRT3847_131465C.1.pep
MDSNCKPSSPPPTPNPNPNPNPNPNPNPNSSPSEKHQRDLLNHVEAYLAKRDGVDKLLKISRYTAKLILATSLLQSNNPTLSHRLKSFESSVGVSRKAFRLGKFVQDLNALKTTHPHSNLDLFLSVLAYGGEGLYYFVEQFVWLAKSRLVGPKHSRKFQKLSAWAEFVGYFWSVVLSLWELGAIAQEEACLKSSVEITRLREGGCVDEEAQXGXXXGXXXXXRVXXXXXXXDXXMGXDDVLDGNGPFXKPVXMASPG

SEQ ID NO: 177685 - protein, 86 aa, Glycine max
  Clone ID: PAT_MRT3847_131466C.1.pep
AAMGQSLDPHPQCLQHFTESPEDSKSINQNACIQTETISKIKRNSPMILTNEENDKKKICDILSFFNSKHHHQALSSLPSNVKHLL

SEQ ID NO: 177686 - protein, 74 aa, Glycine max
  unsure (1)..(74): unsure at all Xaa locations
  Clone ID: PAT_MRT3847_131467C.1.pep
SVVFDRSINQDWRXLLNVKEYTXGXKSIDVVYRRXIYILKKVIFSRDLMNSTSSHXSGIYDNNLCIKHELYNKL

SEQ ID NO: 177687 - protein, 92 aa, Glycine max
  Clone ID: PAT_MRT3847_131468C.1.pep
SQTANLGPTSHINWMHSNPKRGLWHSILHGQKGKNLNFIYCNQILEEPCGTSSTIWGMNWAVIFGALGLASPIYKFSSTDPRWRGAHLLREG

SEQ ID NO: 177688 - protein, 114 aa, Glycine max
  unsure (1)..(114): unsure at all Xaa locations
  Clone ID: PAT_MRT3847_131469C.1.pep
LQRGDYCYGDVVCRLSPALACPDTHHGGECTGTSMHDTDQSGIHIAVHIHTDDALVPFSELSWVXNITALTNGDIEPSCADGMVLMVXLHALYEVGLHHHDESTAVRSAISDPG

SEQ ID NO: 177689 - protein, 82 aa, Glycine max
  unsure (1)..(82): unsure at all Xaa locations
  Clone ID: PAT_MRT3847_13146C.1.pep
FQAXGPGDISQLXSXXNILXAAYXHKTLNXRIDDGXRKPXXQXXLXXXQXQLSNGXVVXIFAPNGXRCQXQXITXSVXRCXX

SEQ ID NO: 177690 - protein, 89 aa, Glycine max
  unsure (1)..(89): unsure at all Xaa locations
  Clone ID: PAT_MRT3847_131470C.1.pep
LKPTQNLLVIFEELGGNLXXISLVKRSVSSVCXDVSEXHPNIKNWHIESYGXSEEXHPPXFSWHCXPGQTISSIKXAXFGIFGYCGNYE

SEQ ID NO: 177691 - protein, 129 aa, Glycine max
  unsure (1)..(129): unsure at all Xaa locations
  Clone ID: PAT_MRT3847_131471C.1.pep
MSKRGRGGWAAYKFQMSLGLPVAATENCADNSGAKNLYIXISATGIIGPLNXRIHSACVXGDMVSWTLIRHRDTPXLMTKVMSAVIVAQHKPWRRKGXVYMYFKDNAGVIVNPKGEMKGSAVTGPIGKE

SEQ ID NO: 177692 - protein, 57 aa, Glycine max
  Clone ID: PAT_MRT3847_131472C.1.pep
CLKITDACYGLKRLFFAFYLNTRLLHERRTAFLVKFVFQKLVWVNLFCVGCFFSLIA

SEQ ID NO: 177693 - protein, 78 aa, Glycine max
  Clone ID: PAT_MRT3847_131473C.1.pep
APSRFGTEDLGGSGLLSPHQPKPLHHCHHHHHHSHCQHQTPTPTPTPTPPPTLKAAFVVLEWRMRRRKARMQLFSIFS

SEQ ID NO: 177694 - protein, 44 aa, Glycine max
  unsure (1)..(44): unsure at all Xaa locations
  Clone ID: PAT_MRT3847_131474C.1.pep
FIIWFMAEILGVHEGKGTSCFKHFIEXVMWTTXLLPGKDSHCLL

SEQ ID NO: 177695 - protein, 126 aa, Glycine max
  Clone ID: PAT_MRT3847_131475C.1.pep
MLVLGVWDLKWLLQFVFSAFVLAIGLHALLKNTASKYFEIEATFHAMPGPLTDHSLCAVCRNPANKKCSRCISVRYCSQACQQAHWKSEHKMRCKEFQGSASVMNLDQTEVTNRVFKASAAVNTSS

SEQ ID NO: 177696 - protein, 112 aa, Glycine max
  Clone ID: PAT_MRT3847_131476C.1.pep
SSLHVVYYKLQGVRGQGLGIKRMRTERDREEGFRVMRAWSSHHPLDCASSPTTAAGADSTRDEVPDGDENAGDTAEDGHDERGNGRDDRVDRSRDGGDDVSHGCWWLTVCGG

SEQ ID NO: 177697 - protein, 80 aa, Glycine max
  Clone ID: PAT_MRT3847_131477C.1.pep
LIKGFTHIKKIHYWVVEQPNFSIKTKLFFHLKHGLMPGKKKGTQAPPHIIFPNPIKKDSLYFKNYLGGDVHWFLWHFAGP

SEQ ID NO: 177698 - protein, 110 aa, Glycine max
  unsure (1)..(110): unsure at all Xaa locations
  Clone ID: PAT_MRT3847_131478C.1.pep
SNTATPLSECGLQKDRGVIVEYSGRMVYVAHNANXPDKKDLLEGNFSCDIESRSRXEKGPSTKAPITQDGKTLQIWIYIACWIHILSERISLKREDQEKPKKIDARLRQI

SEQ ID NO: 177699 - protein, 67 aa, Glycine max
  Clone ID: PAT_MRT3847_131479C.1.pep
IGPPCFLFSCQSVSAEQCELVNSLVTPICTLYATVPCVVWACDRITFSFLHFSCLDNVEGFLVPHFL

SEQ ID NO: 177700 - protein, 181 aa, Glycine max
  unsure (1)..(181): unsure at all Xaa locations
  Clone ID: PAT_MRT3847_13147C.1.pep
MSAADDDEPERRRRLKASNSGGLKSFQRDLIAGAVMGGGVHTIVAPIERAKLLLQTQESNLAIVASGRRKFKGMLDCIARTVREEGILSLWRGNGSSVIRYYPSVALNFSLKDLYKSMLRGGNSSDNLLPGATANFAAGAAAGCTTLVMVYPLDISHTRLVSYIXRREVRQFRGIYHFLAT

SEQ ID NO: 177701 - protein, 78 aa, Glycine max
  Clone ID: PAT_MRT3847_131480C.1.pep
QQCWDHLIFSAASIKSPFFAAKKRCVVCDSLEESSAEALRDTSHLFLSVSDGDTRNALLPLRGASQWDLVLYKTQSEI

SEQ ID NO: 177702 - protein, 37 aa, Glycine max
  Clone ID: PAT_MRT3847_131481C.1.pep
NLLHRVTHTEITSIELHQTYLELLLLMTMQSARLLSI

SEQ ID NO: 177703 - protein, 49 aa, Glycine max
  Clone ID: PAT_MRT3847_131482C.1.pep
VSIIVPQNKYQCCIILYLYVCGVTSPRYAPLSASIRIRHMCRHSLSMST

SEQ ID NO: 177704 - protein, 264 aa, Glycine max
  unsure (1)..(264): unsure at all Xaa locations
  Clone ID: PAT_MRT3847_131483C.1.pep
MDDYTREMMDLKTLVTRTLEKKGVLARIRAELRASVFEAIEEEDRVIEKEQGLPPALLGSCNDRAKQLHASPPGRLLTAMICEYLDWAQLSHTLKVYLPGXNLEKDFWETELKEVSTQNGYDLNRNRDSPLLLDVLEGFLKLENLSQARASGRRFATSETEPLPNSESRNPRRHSSSSVAGGLPPLGRAVPSSQASDRRGGSSMSAYRKDDYNWRYDRDELPEDIIQASSALENLQLDRKARNLTSSWRHAGDGINEDDGRDHV

SEQ ID NO: 177705 - protein, 64 aa, Glycine max
  unsure (1)..(64): unsure at all Xaa locations
  Clone ID: PAT_MRT3847_131484C.1.pep
CTPPAYPRISPLGSRPTLRCMSHPIPDEVEPTSPHIRLAIHQPXSTIHASIGRRLASLSLDLGA

SEQ ID NO: 177706 - protein, 72 aa, Glycine max
  Clone ID: PAT_MRT3847_131485C.1.pep
RFFFFIFCHSCVQGRAGYNLIELKVALLYPNGTNLPAGLLLDPIRFLLNQVASELRCLLIYIFCLVDVFSKT

SEQ ID NO: 177707 - protein, 81 aa, Glycine max
  unsure (1)..(81): unsure at all Xaa locations
  Clone ID: PAT_MRT3847_131486C.1.pep
GGGVICDADTTAGEPIFTNKRHAVVMVFSHSDVVAEVPWYGIGQEYTLLEKDIQWSFGWPDGGFPGPXGPYYCGVGADKVF

SEQ ID NO: 177708 - protein, 116 aa, Glycine max
  Clone ID: PAT_MRT3847_131487C.1.pep
CVKQGALSISHIKFRTIKMCDTVETHKRCVSSTNNYKNPVVLQARSFYLISSALSDPVCSGVLEGISKLSSSKFHALKMLLFPGRSPCIKSRRINSIFLNISIFHLITITSLETFS

SEQ ID NO: 177709 - protein, 166 aa, Glycine max
  unsure (1)..(166): unsure at all Xaa locations
  Clone ID: PAT_MRT3847_131488C.1.pep
SRIILFCITQFVXIGVAFQGTCKTVLEAIIFVFVMHPFDIGDRCVIDGVHXMWDSIDFTIDVSTSMETILALXSIQMYIESKPKYWNPKHSMIAKGIENMDKLKLCLSVQHTINHQNYGERNIRITELLLELKRIFEIHGVKYHLLPQEIQITHMNIEHSKVLFQS

SEQ ID NO: 177710 - protein, 100 aa, Glycine max
  unsure (1)..(100): unsure at all Xaa locations
  Clone ID: PAT_MRT3847_131489C.1.pep
AFLSSLVLLLAALILYPQVVANYDNPPVYKTATEKPPGYKXPLEKPPVYTPTVDNLTIYMPXVEKPPVYKPTVVKPAVYKLTLVKPPAYKLPADKPPVYN

SEQ ID NO: 177711 - protein, 81 aa, Glycine max
  Clone ID: PAT_MRT3847_13148C.1.pep
RASEYTDRSPFGFRNTIFSSEKRNRLPCFHVKTQTQMILMVDDSHRSARLLCRPKQFNTKGSDPGMHFWLIGSPFFPPLTV

SEQ ID NO: 177712 - protein, 413 aa, Glycine max
  unsure (1)..(413): unsure at all Xaa locations
  Clone ID: PAT_MRT3847_131490C.1.pep
FLNEKNKRLEHIDADSAEARAASILAGLSFTPEMQKKATKTFSGGWRMRIALARALFIEPDILLRAEPMNPRELHALREFLNTVVTDIIHLQNQKLTSCXGMIMLLEILDIDKLKNHLDLHAVLWLESYLVKWPKTFIVVSHARTCXSHMQTFIDKFRYNAKRASLVQSKINAKTREEQVKNQQKALEANERARSHMQTFIDKFRYNAKRASLVQSRIKALDRMGHVDEIVNDPDYKFDFPTPDDRPGAPIISFSDASFGYPGGPILFKNLNFGIDLDSRIAMNGPNGICKSTLLFQNRSFELHLGSFGVTGNLALQPMYTLSGGQKSRVAFAKITFKKPHIILLDEPPNHRSLDAVEXLIQGLVLFQGVLLMVSHDEHLISGSVEELWVVSEGRVAPFHGTFQDYKKILQSS

SEQ ID NO: 177713 - protein, 44 aa, Glycine max
  Clone ID: PAT_MRT3847_131491C.1.pep
ALTSSIHVCSLVEAPWAMTSGAQVRTTWICPTMMIQTVRSKGLG

SEQ ID NO: 177714 - protein, 95 aa, Glycine max
  Clone ID: PAT_MRT3847_131492C.1.pep
SDCELVLLPFKADQFFNAKLIAKALEAGIEVNRSEDGDFKKEDILKAVKTIMVEDDKEPGKQIKENHMKWKEFLLNKGIQNKFITDLVAQLKSMA

SEQ ID NO: 177715 - protein, 597 aa, Glycine max
  unsure (1)..(597): unsure at all Xaa locations
  Clone ID: PAT_MRT3847_131493C.1.pep
MTEVARSVVHDVLGQRVVDVDQPIVDYIVNVLADDDFDFGLDGEGAFDALGELLVAADCVDDFSHCRSVCSTLCDKFGKHGLVKEKPAVRSLAAPFRMNEGMDDVQAPKKKPEPVDGPLLSERDRLKLERRKRKDERQREAQYQIHLAEMEAARAGMPVVCVRHDSSGGPNVKDIHMENFNISVGGRDLIVDGCVTLSFGRHYGLVGRNGTGKTTFLRHMAMHAIDGVPRNCQILHVEQEVTGDATTALQCVLNSDIERTQLLDEEAQLVAQQREFEDKIEKGDSNGVVGRDDISKRLEEIYKRLEHIDADSAEARAASILAGLSFTPEMQKKATKTFSGGWRMRIALARALFIEPDILLLDEPTNHLDLHAVLWLESYLVKWPKTFIVVSHAREFLNTVVTDIIHLQNQKLTTYKGNYDAFEKTREEQVKNQQKALEANERARSHMQTFIDKFRYNAKRASLVQSRIKALDRMGHVDEIVNDPDYKXDFPTPDDRPGAXLYLSYSDAMLGDLQPSSGTVFRSAKVRIAVFSQHHVDGLDLSSNPLLYMMRCYPGVPEQKLRAXLRFFWCNRKSCAAANVYFVRWSEKQGCLCKDNF

SEQ ID NO: 177716 - protein, 73 aa, Glycine max
  Clone ID: PAT_MRT3847_131494C.1.pep
MSSCGCGSSCNCGSNCSCNKYSFDYVEKITNETLVLGVGPVKAQFEGAEMGVAAENGGCNCGSNCTCDPCSCK

SEQ ID NO: 177717 - protein, 90 aa, Glycine max
  Clone ID: PAT_MRT3847_131495C.1.pep
NTDCPFRKLFERASHDPSAFFTRYGRKHNHDVPTARNNCHYIATPACASQHTRNRPEKRDTISLNLGIGFSPPTNNTPNIQCRTTPSQPE

SEQ ID NO: 177718 - protein, 78 aa, Glycine max
  Clone ID: PAT_MRT3847_131496C.1.pep
KTTKPKKKKNHQPMFSFLNTIILILAFPIIIFGSGASSLALITIPPPFYKFLTNPGLPMAFFPKAFRNSPLAKNVTFW

SEQ ID NO: 177719 - protein, 42 aa, Glycine max
  unsure (1)..(42): unsure at all Xaa locations
  Clone ID: PAT_MRT3847_131497C.1.pep
RXXXXNWPXPEXXFXEXRPHKXRGGKLXFAVAHDSFVLTCAL

SEQ ID NO: 177720 - protein, 179 aa, Glycine max
  unsure (1)..(179): unsure at all Xaa locations
  Clone ID: PAT_MRT3847_131498C.1.pep
MRARIPLLMLGFVLLAXVSVSLGIASWEKQSPNHNXCLRSCNTDKDFYRNQACHSRCDLLNVEEEEECAECQIPRPRPLHPERERQLHGEKEEDEREQARPLPFPLPRQPHREEEHELKEEHXWHRMEEKHGGXGSEEEQDEREHARAHQPHQNEDDKHEWRHLPDEHQGNESEAEDDD

SEQ ID NO: 177721 - protein, 108 aa, Glycine max
  Clone ID: PAT_MRT3847_131499C.1.pep
TSSRSRAAAPVETAGDSELFLMKLINRPIIVFRGEHGFIGCRKVTGTLDANRSSYDVFQLEFNDGAYNIKDSTGKYWTVGSDSSVTSSSDTPVDFFLEFCDYNKVALK

SEQ ID NO: 177722 - protein, 50 aa, Glycine max
  Clone ID: PAT_MRT3847_13149C.1.pep
RRYLTGLDYSGKTHSCSFPFSSSKTPNLSCLLSIKHSACLFVRVLVLTFS

SEQ ID NO: 177723 - protein, 88 aa, Glycine max
  unsure (1)..(88): unsure at all Xaa locations
  Clone ID: PAT_MRT3847_1314C.1.pep
DKYVKFDVHIDDDEDNXSEPDQTEFVGTFVNLFHGQGHNINASFKVGISKVLECLEAEEDDVVLVTLVPKVGKGDVIIGGIKIEFIPK

SEQ ID NO: 177724 - protein, 108 aa, Glycine max
  unsure (1)..(108): unsure at all Xaa locations
  Clone ID: PAT_MRT3847_131500C.1.pep
GXPPLVALPPGWGVWCCSSVAWXPFAXRXSFLVAPLGLRPXXLLSPPLGAXXFGLCXFFPLRAXXXXXXPXLGAWAPRAXXPVLPWWVAPVCSXWPPFRRSVFLLFCG

SEQ ID NO: 177725 - protein, 79 aa, Glycine max
  Clone ID: PAT_MRT3847_131501C.1.pep
KKAGKTKPFRVPQGPGKGTKNKGPRVSPPKTLGKSNPSLHKTRGVEPGTTPVGPSLGSKPLLWAPHLFMGPPYQTNVVF

SEQ ID NO: 177726 - protein, 79 aa, Glycine max
  unsure (1)..(79): unsure at all Xaa locations
  Clone ID: PAT_MRT3847_131502C.1.pep
GAGKGRERKPRDSFNRESTQEEKGSETEAQPCCVXQEDHGEGNDIGTLFWGGDXXTXXIKQRLMQKNLCPIRNTTCLAT

SEQ ID NO: 177727 - protein, 45 aa, Glycine max
  Clone ID: PAT_MRT3847_131503C.1.pep
SFSTCVYELLISYSTLVIFCAVYLTHAPKLRKHQTSLHIILSNSI

SEQ ID NO: 177728 - protein, 82 aa, Glycine max
  unsure (1)..(82): unsure at all Xaa locations
  Clone ID: PAT_MRT3847_131504C.1.pep
EAVALKRQEXLIREXEAAWQAXSDQXAKRXGEREKKSXKKQAKQKRNNQXXXDKXXEXRTAVSVTDKXNVDEKYSSMEEAQS

SEQ ID NO: 177729 - protein, 53 aa, Glycine max
  Clone ID: PAT_MRT3847_131505C.1.pep
RQIGFRIPRVCLISFFFFFRDCFQFSKCKQTRLLGQLVEGGARHKIECEIEVE

SEQ ID NO: 177730 - protein, 111 aa, Glycine max
  Clone ID: PAT_MRT3847_131506C.1.pep
MGSACCVAAKDPNLPNRTGDESLHRDVVCSPSWSFQWDSRGRVADEIENPSYHTSHVDSRNVSMELKGSLSSERGNLSDGGSILENSVTPISLKSPVDEALVANLMTPSSD

SEQ ID NO: 177731 - protein, 92 aa, Glycine max
  unsure (1)..(92): unsure at all Xaa locations
  Clone ID: PAT_MRT3847_131507C.1.pep
LTRLFFFAWGGHCRPVLLGTVSITPCSSHCIPSCALAGVLLSQAPLVDCSFTGRLASLPWLASRWCPVFVELCWDCRMVRPACCVHASEXEW

SEQ ID NO: 177732 - protein, 109 aa, Glycine max
  unsure (1)..(109): unsure at all Xaa locations
  Clone ID: PAT_MRT3847_131508C.1.pep
MVKTVVWSTFVRPQYKPAHFNHSPLPFLKLSTPNLSFRGTNTVHNKRSNWPKPLSLRSKSVLAVAGADPLEMAEDWNRTALLVIDMQKDFIEDXGPMLVKGGKDIVPNV

SEQ ID NO: 177733 - protein, 113 aa, Glycine max
  unsure (1)..(113): unsure at all Xaa locations
  Clone ID: PAT_MRT3847_131509C.1.pep
MGSACCVAAKDPNLPNRTGDESLHRDVVCSPSWSFQWDXRGRVADEIENPSYHTSHVDSRNVSMELKGSLSSERSNLSDGGSILENSVTPISLKSPVDEALVANLMTPSSGKC

SEQ ID NO: 177734 - protein, 68 aa, Glycine max
  unsure (1)..(68): unsure at all Xaa locations
  Clone ID: PAT_MRT3847_13150C.1.pep
QLGGLQLDLYARALVSRFIVMTQRTVXDNFARLTQMAAILNLEKGFEILDFWAENSXPMTWQLTAPEV

SEQ ID NO: 177735 - protein, 40 aa, Glycine max
  unsure (1)..(40): unsure at all Xaa locations
  Clone ID: PAT_MRT3847_131510C.1.pep
TQASSAVAPTAQILDMLPVLARTPVIEKINLNHHKTTXVV

SEQ ID NO: 177736 - protein, 234 aa, Glycine max
  Clone ID: PAT_MRT3847_131511C.1.pep
DAWADAWEDDRRGGLLRADMLQGNNIPRMPKLVIDGPYGAPAQDYKNYEVILLVGLGIGATPLISILKDVLNNMKQQKDIEEGMVESGVKNKRKPFATNRAYFYWVTREQGSFEWFKGVMDDVAEYDKDGIIELHNYCTSVYEEGDARSALITMLQSLHHAKSGVDIVSGTRVKTHFARPNWRSVFKHTALKHPGKRVGVFYCGAHTLVGELKRLSLDFSRKTNTKFDFHKENF

SEQ ID NO: 177737 - protein, 272 aa, Glycine max
  Clone ID: PAT_MRT3847_131512C.1.pep
SHASGRHPFSITSAPGDDYVSVHIRTLGDWTSQLKAVFAKACQPASGDQSGLLRADMLQGNNIPRMPKLVIDGPYGAPAQDYKNYEVILLVGLGIGATPLISILKDVLNNMKQQKDIEEAMVESGVKNNKRKPFATNRAYFYWVTREQGSFEWFKGVMDDVAEYDKDGIIELHNYCTSVYEEGDARSALITMLQSLHHAKSGVDIVSGTRVKTHFARPNWRSVFKHTALKHPGKRVGVFYCGAHTLVGELKRLSLDFSRKTNTKFDFHKENF

SEQ ID NO: 177738 - protein, 97 aa, Glycine max
  Clone ID: PAT_MRT3847_131513C.1.pep
CPSVYEKENARSALITMLQSLHHAKSGVDIVSGTRVKTHFARPNWRSVFKHTALKHPGKRVGVFYCGAHTLVGELKRLSLDFSRKTNTKFDFHKENF

SEQ ID NO: 177739 - protein, 58 aa, Glycine max
  Clone ID: PAT_MRT3847_131514C.1.pep
SITVTVICNVAIRGSFRSSSTIFIICRSWSFYSSNCETPLNPRSCKARGDSTEIAVYP

SEQ ID NO: 177740 - protein, 82 aa, Glycine max
  unsure (1)..(82): unsure at all Xaa locations
  Clone ID: PAT_MRT3847_131515C.1.pep
IIIXSXPXDKXXEXSLHXLTQXNGSVSFVIMVTLPXXXRXSPXDPXSSSLCISXSXLSVSPXTSHXLXSQKVXLXXKHSTEX

SEQ ID NO: 177741 - protein, 86 aa, Glycine max
  unsure (1)..(86): unsure at all Xaa locations
  Clone ID: PAT_MRT3847_131516C.1.pep
FDLGDXLLSLNPRSAWITSPSVSXXFIXPTWCPXLXCLPXCSLPLSLSLFLSLEPXKNMXNGCRXIXIEIXHRYVGEXIEXIDMAG

SEQ ID NO: 177742 - protein, 130 aa, Glycine max
  unsure (1)..(130): unsure at all Xaa locations
  Clone ID: PAT_MRT3847_131517C.1.pep
AHYIEEKDNFALYYGAVPCAGLAXLIHPSTSHNKLNRMAWACXVYIEAVSALPELRAMHNTRIAEPITAHYGFAWGETRDLSCSHCVREVXHSPWHVLLAVWYGVWPSMDLIXGTDQTFILAQFLYYYVR

SEQ ID NO: 177743 - protein, 300 aa, Glycine max
  Clone ID: PAT_MRT3847_131518C.1.pep
GGVGKTTLLIFRNRIGGNAKDRFAIFHLARTLSQFITINHGHIYNQVNTMSNSIRSARSSASRPLPANSTSQPRCDSCSFQIMRLMGFVFQPSVCVASIGAACGSTSVVSMTSCRRWHAIDCFLRSPATAVDMYPTAINSSDHHPTKIRAALATMRGRLHAIPALFPGWTPKYPTRMALPSSLMHRLVHILIGSASPTLPNQPHNFWQKKLPENPNCTYNFNFLKKPAHLGENCPLFESVTNKVKKKKKLAHPGLNGPILKCHPGLGQSASKSISPGLCHFSARHPARPDRTVQIYAPVF

SEQ ID NO: 177744 - protein, 127 aa, Glycine max
  unsure (1)..(127): unsure at all Xaa locations
  Clone ID: PAT_MRT3847_131519C.1.pep
FVVCLCARFQSYPKISHVIAVKRILRYLVGTTNHGLWFKKRSKFDLVGYCDVYFVGDKVERKSTRGAXDFIXKSLVSWISKKXTTISPLTSEVEYVSTVDCYSQIILIKQQMLVTHWNIQKFASSVT

SEQ ID NO: 177745 - protein, 109 aa, Glycine max
  unsure (1)..(109): unsure at all Xaa locations
  Clone ID: PAT_MRT3847_13151C.1.pep
SPFSLSLLPXSXSFFFSRFTSTTKPLQYRFESEEFNKRKEQSNKKTDIITKPRLLKATCSCQFRIYNAPYHPLTDLMPSHDFEISLFVVVTCRSKSESKLLYFETRNAQ

SEQ ID NO: 177746 - protein, 122 aa, Glycine max
  unsure (1)..(122): unsure at all Xaa locations
  Clone ID: PAT_MRT3847_131520C.1.pep
KRKKGDTTEFRRLVLCSFGKGRRETXKEFKRLVLGEFFLAKEEERHKRIQAVSPSFFWKREKRDTKEFRRLVLCSFGKGRRETQKEFRGLVLVEFFLTKGEKNEKAEYPKFLIKELFLKEKV

SEQ ID NO: 177747 - protein, 74 aa, Glycine max
  Clone ID: PAT_MRT3847_131521C.1.pep
SIVLLENREERHIRIQAVSPMSFGKGRRETLKEFRALVLVEFFLTKGVKNEIDEYHKFLIKELFLKEKVLNKNF

SEQ ID NO: 177748 - protein, 137 aa, Glycine max
  Clone ID: PAT_MRT3847_131522C.1.pep
MSASTGSSKIRRIVRVRQMLLRWRRKAAADVPAGHVAVCVGPSRRRFIVRATHLNHPIFKMLLVKAEEEYGFCNHGPLAIPCDESLFEELLRVVSRPVPVPGFSTLEDFQRRCHMDVSTGFDVVGESWPLLRDEPIC

SEQ ID NO: 177749 - protein, 149 aa, Glycine max
  Clone ID: PAT_MRT3847_131523C.1.pep
TPYTPNSQLHLQPLLRFLHEESYGLNRKSWDAGVLRPFEAEMEEGRSRLLHLLQKCMISARKIDLQSIPPCMKKVVYLDSNEEHARSYNELVITVRRNILMADWNDPSHIESLLNPKQWKFRSATLKNVRLSCCVAGHIKVTHAGEDIQ

SEQ ID NO: 177750 - protein, 113 aa, Glycine max
  Clone ID: PAT_MRT3847_131524C.1.pep
MARSLSQAKRIGVLVAQSISLIPVHRRGYAVASDVSVRVGLGNIGRRNGIVGGVEEKPDTRDGSKAYSTDWAPDPVTGYYRPINHTPEIDPVELRHRLLRSPPLEPRGVAGHP

SEQ ID NO: 177751 - protein, 136 aa, Glycine max
  Clone ID: PAT_MRT3847_131525C.1.pep
MSSASTGSSSSSKIRRIVRVRQMLLRWRRKVAVDVPAGHVAVCVGPSRRRFIVRATHLNHPIFKMLLVKAEEEYGFCNHGPLAIPCDESLFEHLLRVVARPVPLPGFSSLEDFQTRCHVDFVGGESWPLLRDEPIC

SEQ ID NO: 177752 - protein, 308 aa, Glycine max
  Clone ID: PAT_MRT3847_131526C.1.pep
MAEKTKNKVEVQLGCGLMGRIFHLKTNNRTRKSSVHSLPVKVCNNTAQQQRDQAKNEAKPSPNHESNVPRDSSIGTIPTLKVEQNPARKSSSSHRAPSAYQNTQNGRASDAARTSIQRSHDSNEESKQQQKEHAVVNSLELARISTSANHHHHQNNETKSLAKEFVLPITGNLLLNSSPRTSITKSKELNTLSGSCSYNSNNSTNKGMMGNIMRKNSDELAQFRSPRNGRVDPEVLKSMGNEAYKQGRFEEALTLYDRAIAVDSKKATYHCNKSAALIGLGRFLQAIVECEEAIKLEPSYGRAHTRLA

SEQ ID NO: 177753 - protein, 41 aa, Glycine max
  Clone ID: PAT_MRT3847_131527C.1.pep
PTQTLSPIQWSQLVYSHHHSPCDPISPYNKVYKLPTYHTQK

SEQ ID NO: 177754 - protein, 60 aa, Glycine max
  unsure (1)..(60): unsure at all Xaa locations
  Clone ID: PAT_MRT3847_131528C.1.pep
AFRKLPNMFHLWQHVAGMGXGPVCAHQLLKWEAQGEQDLAKMLPKAKAANERRDIHGDDE

SEQ ID NO: 177755 - protein, 53 aa, Glycine max
  Clone ID: PAT_MRT3847_131529C.1.pep
PKQRGYKPTKPQANNTQTSNQIHPLFLWLININDKQEKKRKTQPLLLMGPYTL

SEQ ID NO: 177756 - protein, 38 aa, Glycine max
  Clone ID: PAT_MRT3847_13152C.1.pep
MASTLSIPFCRSSLMTYITYSNICSNLLTNFLNEPYKS

SEQ ID NO: 177757 - protein, 47 aa, Glycine max
  Clone ID: PAT_MRT3847_131530C.1.pep
GNPISFECSVSLLNRPNSDDGALNIPPVSKCWLGSFNVEFYGGRQTC

SEQ ID NO: 177758 - protein, 86 aa, Glycine max
  unsure (1)..(86): unsure at all Xaa locations
  Clone ID: PAT_MRT3847_131531C.1.pep
VKLLMRISXNCTQYALSMVWSVCKLSPEECSSIAVDAGLAAKLLLVIQSGCNPILKQQSAELLKLCSLNYSDTIFLSKCKLTRTIQ

SEQ ID NO: 177759 - protein, 65 aa, Glycine max
  unsure (1)..(65): unsure at all Xaa locations
  Clone ID: PAT_MRT3847_131532C.1.pep
QRPITLPSFILDXPNHTPHFYHLHLAYPNTNTHLACSPQKSKSPSSILQTHRSALTLANRTKPQP

SEQ ID NO: 177760 - protein, 105 aa, Glycine max
  Clone ID: PAT_MRT3847_131533C.1.pep
VRILVVLPPTHRHRPVAVLVIGLLLAPVALLLPPLTYWLLHTSGYSVQYSWFFPNHTTIYNIKHYSKLYLRTPVPVYSYSTHHTTAPPIFPTPTQFIRFPPPPPP

SEQ ID NO: 177761 - protein, 109 aa, Glycine max
  Clone ID: PAT_MRT3847_131534C.1.pep
MALQLWETLKEAIEAYTGLSPNTFFTLLALILALYYVVSGLFPSSSDHRHNTASRDFEPQMEPLRPPVQIGEVTEEELKAYDGSDPEKPLLMAIKGQIYDVSQSRYSHS

SEQ ID NO: 177762 - protein, 42 aa, Glycine max
  Clone ID: PAT_MRT3847_131535C.1.pep
ALHASYNIPKPVFAAILNKYTKGIMLAIPDSSFETLEPYKPG

SEQ ID NO: 177763 - protein, 462 aa, Glycine max
  Clone ID: PAT_MRT3847_131536C.1.pep
MVGSNGNAHSNGTLENSSRIGLREKVDEIRGLLGKVEGDPLRIVGVGAGAWGSVFIAMLQEAYGSLREKVLIRIWRRPGRMVDRATAEHLFEVINSREDVLRRLIRRCAYLKYVEARLGDRTLYADEILKDGFCLNMIDTPLCPLKVVTNLQEAVWDADIVINGLPSTETREVFEEISKYWKERITVPVIVSLAKGVEAELGTEPRIITPTLMINQATGVPLDSILYLGGPNIASEIYNKEYANARICGAEKWRKTLAKFLRQPHFIVWDNGDLVTHEIMGGLKNVYAIGAGMVAALTNESATSKSVYFAHCTSEMIFITHLLAEEPEKLAGPLLADTYVTLLKGRNAWYGQKLAKGELSLEMGDSIKGKGMIQGVSAVRAFYELLSQSSLNVLNPEENKHVAPVELCPILKMLYRILIIREYPAQAILEALRDETMNDPRDRIEIAQSHVFYRPSLLGHKP

SEQ ID NO: 177764 - protein, 96 aa, Glycine max
  unsure (1)..(96): unsure at all Xaa locations
  Clone ID: PAT_MRT3847_131537C.1.pep
MLCSERLLHLSCLNYGQPMESQGWKPYVESNKPTALPEKSHGYIQVFLDGGLNQQKIGIXDAFSDAKILNATLVIPYLELNPVXENSTFFLDIFDF

SEQ ID NO: 177765 - protein, 87 aa, Glycine max
  Clone ID: PAT_MRT3847_131538C.1.pep
CKFFFSVGEDFHGGFSTCPPSVQKIKQNDKQFFFTRDFKITKHPPFSVHKLYHPKQNLQFSTNQSGQDFNQRGGLNNLKKLQVILKW

SEQ ID NO: 177766 - protein, 35 aa, Glycine max
  unsure (1)..(35): unsure at all Xaa locations
  Clone ID: PAT_MRT3847_131539C.1.pep
IIFIVKKKKKXXXXKKKKKKKKKKKKKKKKKKKKK

SEQ ID NO: 177767 - protein, 93 aa, Glycine max
  Clone ID: PAT_MRT3847_13153C.1.pep
GIESYVCFVYDASSMFDLQHVVIFLPLPSLRQAPSVMQIDVECRCDVLCSLLVWSVLLIGVFNVCESLEFGGPLAHSSVFFLVAGRCVGPDTF

SEQ ID NO: 177768 - protein, 60 aa, Glycine max
  unsure (1)..(60): unsure at all Xaa locations
  Clone ID: PAT_MRT3847_131540C.1.pep
DSIVEDVTHMPNIKDPERYNAVKDLMADSCSELPDSVISDRXNALSRNTDDIAGKEVVEN

SEQ ID NO: 177769 - protein, 40 aa, Glycine max
  Clone ID: PAT_MRT3847_131541C.1.pep
NGRPQFYLLFFLIIFNFLKFSLLYFFIFFKNILFFFFFFF

SEQ ID NO: 177770 - protein, 46 aa, Glycine max
  Clone ID: PAT_MRT3847_131542C.1.pep
YMYFSWLSSCFVFGIYCIFKMLVLLCIEERLTYLHAKELLDLVVNM

SEQ ID NO: 177771 - protein, 71 aa, Glycine max
  Clone ID: PAT_MRT3847_131543C.1.pep
QVNLISRSKGPSWLAYKQKRGGSPHPKKPLWFFCGGFIDGNFLGGFGFPFVGIFPMATFTGFWVKFFPLDF

SEQ ID NO: 177772 - protein, 66 aa, Glycine max
  Clone ID: PAT_MRT3847_131544C.1.pep
FDNTKFPVGPHSQKAGFVKKDGSSSVSAADVKHLSSVTRRESIAAWERSHFHKKADGPFSNAPKPL

SEQ ID NO: 177773 - protein, 95 aa, Glycine max
  unsure (1)..(95): unsure at all Xaa locations
  Clone ID: PAT_MRT3847_131545C.1.pep
LVQKFREELQQVGDEYLSKLGHMGAEGGGHIAGRAACLLDTRDERAATESQHKGTGXDRDPHEEADLASCFVPGDDXTEQAQLRTELAGPLHPAS

SEQ ID NO: 177774 - protein, 57 aa, Glycine max
  Clone ID: PAT_MRT3847_131546C.1.pep
KRVPYILFWLGACGKIQCFHHCDGTNISTVHSWSAWCTSHQCPSVELMQQQRWVVFG

SEQ ID NO: 177775 - protein, 98 aa, Glycine max
  Clone ID: PAT_MRT3847_131547C.1.pep
DNCIIFFIFLTPKKKTGVIPLFYYTLNGLHFSPTASFITKPCKSVNTLGCTLCYYKNMGSNKVLLIYSLHIWAGHFFLQNCGHQLLFILIGGALLYPP

SEQ ID NO: 177776 - protein, 40 aa, Glycine max
  Clone ID: PAT_MRT3847_131548C.1.pep
PKKSFPYFIGMTTDLFLERGPSLNKKKIYFYRPRTRVLIH

SEQ ID NO: 177777 - protein, 352 aa, Glycine max
  Clone ID: PAT_MRT3847_131549C.1.pep
MPSLSEAYRAHPVHVQHKHPDLNSLQELPESYTWTHHSHDDHTPAASNESVPVIDLNDPNASKLIHHACITWGAYQVVNHAIPMSLLQDIQWVGETLFSLPCHQKQKAARSPDGADGYGLARISSFFPKLMWSEGFTIVGSPLEHFRQLWPQDYHKYCDIVKRYDEAMKKLVGKLMWLMLDSLGITKEDLKWAGSKGQFKKTCAALQLNSYPTCPDPDRAMGLAAHTDSTLLTILYQNNISGLQVHRKGGGWVTVAPVPEGLVINVGDLLHILSNGLYPSVLHRVLVNRIQQRLSVAYLCGPPPNVEICPHAKLVGPNKPPLYKAVTWNEYLGTKAKHFNKALSTVRLCAPS

SEQ ID NO: 177778 - protein, 64 aa, Glycine max
  Clone ID: PAT_MRT3847_13154C.1.pep
FSGFLLVGSLAFLRSLCASDCACLLLLVIGPELFSMMPSVLLFLYAADRVRRCAWSSVLSGLVL

SEQ ID NO: 177779 - protein, 38 aa, Glycine max
  Clone ID: PAT_MRT3847_131550C.1.pep
RISLCWCTITPSWGGSMCWRLTLGWDSLSFPRNNSFPF

SEQ ID NO: 177780 - protein, 170 aa, Glycine max
  Clone ID: PAT_MRT3847_131551C.1.pep
MKALILILTLCIIAVTFSSQAATSIVTQPQPNEFFKLNQTKPQNDGSSCSYTVSIKTSCSSPSYTRDYIGLAFGDAYGYQVYVPRLDDPGSGTFERCSTDTFEIYGPCTYQTCYLYLYRSGYDGWMPEKVTVYSYYYQPVTFYYNTYIPNDIWYGFDYCRGYLPSGTAAQ

SEQ ID NO: 177781 - protein, 227 aa, Glycine max
  unsure (1)..(227): unsure at all Xaa locations
  Clone ID: PAT_MRT3847_131552C.1.pep
RLREDDRRGLGCSVKVQDGGGPPSLPSNTDTDTRTSLQVMKALILILTLCSFSQAATSIVSQPQPKESFKLNQTKPQNDEASSSCSYTVSIKTSCSSPPYTRDYISLAFGDAYGYQVQFLPTDTFEKKXMNPLQVYVPRLDGPRSGTFERCSTDTFEIYGPCTYQTCYLYLYRTGYDGWMPEKVTVYSYYYQPVTFYYNTYIPNAIWYGFDYCNGYLPSTSTTTAPQ

SEQ ID NO: 177782 - protein, 307 aa, Glycine max
  unsure (1)..(307): unsure at all Xaa locations
  Clone ID: PAT_MRT3847_131553C.1.pep
MAQRAQPVLATDVFQMGNIQWKQFNVDTSSASFSPPKPLLIFTPTVPGAYPVILFVHGFFIRNFYYSKLLAHIVSHGQLRSNDYXIHVRLCGLGALXVEYAGKVADWIAEELQHLLPENVEANLDKLVLSGHSRGGKTVFAVALGHAKTNLKFSALVGTSKYCRTRPHILTGKPRSFDLKMPVEVIGTGLGPEKLNCCTPPCAPDGVNYKEFFNECKPPCAKFVVAKYGHMDMLNDDTPGLIGTLVSKCMCKNGTTGPRDLMRRTTGGLVVSFLRAQLNDLWKDFDAILKDPNLAPTEVDGVDYIPA

SEQ ID NO: 177783 - protein, 173 aa, Glycine max
  Clone ID: PAT_MRT3847_131554C.1.pep
MAQRAQPVLATDVFQMGNIQWKQFNVDTSSASFSPPKPLLIFTPTVPGAYPVILFVHGFFIRNFYYSKLLAHIVSHGFIIVAPQLFSNGLPMYGPTEVEYAGKVADWIAEELQHLLPENVEANLDKLVLSGHSRGGKTVFAVALGHAKTNLKFSALVGTSKYCRTRPHILTGK

SEQ ID NO: 177784 - protein, 78 aa, Glycine max
  unsure (1)..(78): unsure at all Xaa locations
  Clone ID: PAT_MRT3847_131555C.1.pep
KAPSHNXTNETEQKPISAYLYLHPKRAHKNGKIEGGETFHHQCTMNYRNPESLRDIKNQRLARQTKFREQARAKLMQR

SEQ ID NO: 177785 - protein, 133 aa, Glycine max
  unsure (1)..(133): unsure at all Xaa locations
  Clone ID: PAT_MRT3847_131556C.1.pep
IAKPRIPLNFGFSTGSFXQFAIDLIAGGIIVAKTVDWIALIQNSPIRNLVRDADWKKGCLMMDLVMPLNAKVKRGDGASMGQVFLTYRCCTEYFDACKWSKSEPHAXELIFSSEVXVPSNGFEMWSCEWAYET

SEQ ID NO: 177786 - protein, 102 aa, Glycine max
  Clone ID: PAT_MRT3847_131557C.1.pep
SHHWPTNKAKAASEKRVYTKTAKTNARTEADVTLRANNIIIYKQRQDLHIHATGAQDKMSASYARVLQGLYEAPTLLLRSNADTRQDLENLDLTLLRLDESV

SEQ ID NO: 177787 - protein, 60 aa, Glycine max
  Clone ID: PAT_MRT3847_131558C.1.pep
VWGLLLGYYPYESTYAEREFLKSVKKLEYENIKNQWQVFICSNHSFPLMYFSFCFPTILF

SEQ ID NO: 177788 - protein, 124 aa, Glycine max
  Clone ID: PAT_MRT3847_131559C.1.pep
MATTFKYFTSILFLTLVIKGSCDDCSLNNINIGTSRTGREIQGQPEWNVTVINNCNCEQSQIKLSCKGFQSAESVDPSILSMEGDSCLLINGNPMKGSDTVNFSYAWDPPFLLLPTSSVLGPCS

SEQ ID NO: 177789 - protein, 37 aa, Glycine max
  Clone ID: PAT_MRT3847_13155C.1.pep
AGEVLIMGVYHEFNLFCSPNFAWEGGTVAINFTSSDG

SEQ ID NO: 177790 - protein, 58 aa, Glycine max
  unsure (1)..(58): unsure at all Xaa locations
  Clone ID: PAT_MRT3847_131560C.1.pep
LLTFLLFTNLLVSLSFFPHYSMSLSLAIKLHLXFFFSFFFLLTXHTTTCXQLTTPKLV

SEQ ID NO: 177791 - protein, 127 aa, Glycine max
  Clone ID: PAT_MRT3847_131561C.1.pep
EDTCLSIIISLANFSNFLSRSETTLMEQSKEKNAPWLSVPQFGDWDQKGQVPDYSLDFSKIREMRKQNKTNISRASLGNEEELMASSATNNTSTVHSDDHQHPHYHQTNSPTTRRSFLSYFNCCIKA

SEQ ID NO: 177792 - protein, 136 aa, Glycine max
  unsure (1)..(136): unsure at all Xaa locations
  Clone ID: PAT_MRT3847_131562C.1.pep
TKWPKPLASSAGSFSFERVSNSYCLYILILEHSSTSLTPHSSTLIHVPPHSTTIFIPHTNMHTHPTSTTHHHPPPLHHPAPCILHLHHHNHTYYXPTPANPTTHHHHHHPPAPANATPAPVHPPSKPTVSVHPPTK

SEQ ID NO: 177793 - protein, 182 aa, Glycine max
  Clone ID: PAT_MRT3847_131563C.1.pep
MSSLMRKRLACCTKEAKISIDFDEPERIMTYNGLDNCIPDNRSYGDESRTSRGDGCITDSFNDDDDSSSSSSKDAFGSFSSKCFAMKRDEMELEEWEIAESPQHFYVKDKSAFDVVNCSDVEAMKEKFAKLLLGGDVTGGAKGLNTALALSTAITNLAVTVFGELWKLEPLSEERKSKWRRE

SEQ ID NO: 177794 - protein, 205 aa, Glycine max
  unsure (1)..(205): unsure at all Xaa locations
  Clone ID: PAT_MRT3847_131564C.1.pep
MEFVASSSSFSQSKPSSSFSKSKPKRLYDVFINFRGEDTRGKFVSHLHYALSKAGVNTFIDDENLLKGMTLKDELMRAIEGSQISLVVFSKSYTESTWCLDELEKILECRKLHDQIVMPIFYDIEPSVVRHQKGAFGKALKSAVEKTYSGEHAEQVLWRWSSALNRAADLSGFHVVDRRNEAILVKEIVEDVLRXLVYEDLYVTE

SEQ ID NO: 177795 - protein, 66 aa, Glycine max
  Clone ID: PAT_MRT3847_131565C.1.pep
LEDEEMSACDYCGKKKKKKKKKKKKKKKKKKNAHMHTNYKYSNANNIDFVTTLTKLVHENLKTNYA

SEQ ID NO: 177796 - protein, 96 aa, Glycine max
  Clone ID: PAT_MRT3847_131566C.1.pep
SYGVKVISGSPPPLSLHIAVQYYPCIFTIPHCGHLFYHSFLKISALSLYTCYPHALCPLIHPLQCYAKWLLSLVSMFSSFYSGKNFPCPHGPVSGR

SEQ ID NO: 177797 - protein, 62 aa, Glycine max
  Clone ID: PAT_MRT3847_131567C.1.pep
DFLEGSVFWRGSWVFRSFPLCLCGAGYRQSRMTLNGNPKGRTTKKWVFLCRQSLSLPKIYLV

SEQ ID NO: 177798 - protein, 77 aa, Glycine max
  Clone ID: PAT_MRT3847_131568C.1.pep
GIARSFLEFNQHCAHQVPSAITNRRALGRTMQSARNSTGRKAPLTQLALKAARKSAPENGGVKKPHRITSGMVALKD

SEQ ID NO: 177799 - protein, 59 aa, Glycine max
  Clone ID: PAT_MRT3847_131569C.1.pep
SFFTKKLIFQKSFPLTSHTYQYASFSPPPQAPHSPLLYPNPHYSTSHHLYYSIISYIPS

SEQ ID NO: 177800 - protein, 60 aa, Glycine max
  unsure (1)..(60): unsure at all Xaa locations
  Clone ID: PAT_MRT3847_13156C.1.pep
IGGQSAGCIVMELYADVTPRTAXNIVLIPNXKKGLVRSGNPLHXNGSSFHCVIPSFMCQG

SEQ ID NO: 177801 - protein, 185 aa, Glycine max
  Clone ID: PAT_MRT3847_131570C.1.pep
EDGLVAFEDGFSVYADAIIHCTGYKYHFPFLETNGLVTVDDNRVGPLYKHVFPPALSPWLSFIGLTFKNSVYQIIELQCKWVAKVLSGKVLLPTEKEMMESVKEYYQLMEENGLPKRYTHSLYPLQADYKHWLVAEIGLPPLEEWKENMLKQCFKNFVEMNEKYRDEWDDTYWDAIIHGAPASEK

SEQ ID NO: 177802 - protein, 44 aa, Glycine max
  Clone ID: PAT_MRT3847_131571C.1.pep
SGINLQARQSSSSIMSHFKDEYHDERIGDAVNIGTHGNEFLTAY

SEQ ID NO: 177803 - protein, 126 aa, Glycine max
  unsure (1)..(126): unsure at all Xaa locations
  Clone ID: PAT_MRT3847_131572C.1.pep
DFAGHLGFEVAKMTSSYIKRTDCLFIPFGNXADDTIDIEAXPHKLEQFGEIXEKVVWKCXQEEFITAWSTQVRPTTTLLADGCSYLNAMVHESAVATIPGDSVIGVEWTTINNMGAYGLSAGHTGY

SEQ ID NO: 177804 - protein, 80 aa, Glycine max
  unsure (1)..(80): unsure at all Xaa locations
  Clone ID: PAT_MRT3847_131573C.1.pep
XGYLXSTXIXYTXXXXSSXGINXYTQXYEXKRIXTXXXLXXSXXXXVXPXIVRIAYVPRADSARARAXRAEXRAYVRVHA

SEQ ID NO: 177805 - protein, 171 aa, Glycine max
  Clone ID: PAT_MRT3847_131574C.1.pep
YLLPPPYLEFVSEKIIFYHNKKKKKRGITKIKAKKKHNKKNTKYNNKNAPKFFDRGPPLFFCPLPRNFLKGAPPDSPPFSPGFYFSPLPPGPPPFPFWGGFLTRALSFQNFFPGDFFFPPPNPQQIEPPAKFPNPFVPSLRNLIPLFACGYNTFFNGEKCVLPFFTRNRPP

SEQ ID NO: 177806 - protein, 158 aa, Glycine max
  Clone ID: PAT_MRT3847_131575C.1.pep
MWTRALATVLLFVAGAALLGVGGASAQQGVWSIITRPMFQSMLSHRGDSGCQGAFYTYDAFIEAASKFPGFGTTGDEQTRRRELAAFFGQTSHETTGGWATAPGGPFAWGYCRVKEQNPTDPPYYGRGPIQLTHEYNYRLAGQALNLNLVGNPDLVAS

SEQ ID NO: 177807 - protein, 111 aa, Glycine max
  Clone ID: PAT_MRT3847_131576C.1.pep
AADYVSQVDASTADVPANSYDTKVGDDSSGLLLEAQRKEVTICHTEEALVIKNHEDHHLQTDSEEVVSCMKRQSVFKSCLELNEFTHHQAGNADSQDVSFFIGGSKFSRGI

SEQ ID NO: 177808 - protein, 39 aa, Glycine max
  Clone ID: PAT_MRT3847_131577C.1.pep
IRRPSYNIPGESNGPMRWVTNMSESSLQAISYGTNHISC

SEQ ID NO: 177809 - protein, 59 aa, Glycine max
  Clone ID: PAT_MRT3847_131578C.1.pep
QCEAEIRETDDEKSSSSSGEWRFQHKGDILGACLVHHSSCMNITIIVRISILIIVYIEY

SEQ ID NO: 177810 - protein, 147 aa, Glycine max
  Clone ID: PAT_MRT3847_131579C.1.pep
MSQKHPTSRKTGPPFLPHGEFGTGFNPDMSDSLPSWLTEDDLAYYVSKFEKTGFTGGLNYYRNICIDWELTAPWTGVQIKVPVKFITGELDSVYTSLNLKEYIHGGGFKQDVPNLEQVIVQKGVAHFNNQEAAEEINTHIYDFIKKF

SEQ ID NO: 177811 - protein, 52 aa, Glycine max
  Clone ID: PAT_MRT3847_13157C.1.pep
RFRLCLSLRPSIRDLSDPDRNVASFLFVLLGSHAARRRPSLICPSPPISMYS

SEQ ID NO: 177812 - protein, 50 aa, Glycine max
  Clone ID: PAT_MRT3847_131580C.1.pep
MATLVEPPNRIKPKGKHYYTIWQTLFEIDTKYVPIKPIGRGAYGVVCSSI

SEQ ID NO: 177813 - protein, 186 aa, Glycine max
  unsure (1)..(186): unsure at all Xaa locations
  Clone ID: PAT_MRT3847_131581C.1.pep
MATLVEPPNRIKPKGKHYYTIWQTLFEIDTKYVPIKPIGRGAYGVVCSSINRETNEKVAIKKIGNIFENSIDALRTLRELKLLRHIRHENVIALKDVMMPIHKTSFKDVYLVYELMDTDLHQIIKSSQPLSNDHCKYFLFQLLRGLKYLHSANILHRDLKPXNLLVXANCDXKICDFGLARTNGVD

SEQ ID NO: 177814 - protein, 63 aa, Glycine max
  Clone ID: PAT_MRT3847_131582C.1.pep
KTRTFRLRFFQKRKFSPIFPLTPSRGGKFYPPPGQLFGLAFTEFSRHFKGLGMETMVWFTTPQ

SEQ ID NO: 177815 - protein, 369 aa, Glycine max
  unsure (1)..(369): unsure at all Xaa locations
  Clone ID: PAT_MRT3847_131583C.1.pep
MATLVEPPNRIKPKGKHYYTIWQTLFEIDTKYVPIKPIGRGAYGVVCSSINRETNEKVAIKKIGNIFENSIDALRTLRELKLLRHIRHENVIALKDVMMPIHKTSFKDVYLVYDLMDTDLHQIIKSSQPLSNDHCKXYFLFQLLRGLKFLHLANILHRDLKPGNLLVNANCDLKICDFGLARTNGVDGQFMTEYVVTRWYRAPELLLCCDNYGTSIDVWSVGCIFAEILGRKPIFPGTECLNQLKLIISVLGSQHESHLEFIDNAKARRFIKSLPCTRGRHFSQLYPQADPLAIDLLQKMLLFDPTKRITVLEALQHPYMAGLYDPRCNPPAQVPISLDIDEHWGEPMIREMMWNEMLHYHPEAASTNA

SEQ ID NO: 177816 - protein, 58 aa, Glycine max
  Clone ID: PAT_MRT3847_131584C.1.pep
CKYSHFSPMLSFICSLACGLLFYPLLFEIDTICLLFCFKTAYMFQTRSTVGLDEVIRV

SEQ ID NO: 177817 - protein, 90 aa, Glycine max
  Clone ID: PAT_MRT3847_131585C.1.pep
PIRKIKEKKFLQETTTTAARLPDTLCGFDQFMNLVVDNPVEVNGNEKNDIGMVGFKMEGLSIWRCRIIKVMALLNWYFDLILSSKKPLNV

SEQ ID NO: 177818 - protein, 191 aa, Glycine max
  Clone ID: PAT_MRT3847_131586C.1.pep
ALGIEIDNSESLQFSINDIRNATDDFSDYNKIGEGGFGAVYKGRLFNGQEIAIKRLSGKTSQGDREFENEVRLLSKLQHRNLVRLLGFCVEGKERLLVYEYVINKSLDYFIFDQTMKAQLDWKSRYKIIRGIARGLLYLHEDSRLRIIHRDLKASNILLDEEMSPKIADFGMARLVLVDQTQANTSRIVGT

SEQ ID NO: 177819 - protein, 121 aa, Glycine max
  unsure (1)..(121): unsure at all Xaa locations
  Clone ID: PAT_MRT3847_131587C.1.pep
CASLRFSRVKKKKKKKKKKKKKKKKKKKGRRSRSKTVFLATLVVVQPATINGLAGSSLSGTKLFFKPFRHRVKSKNFRSGAGVPKYGDKSVYFDLEDLGNTTGQGDLYGXNAPSPYNPFQS

SEQ ID NO: 177820 - protein, 67 aa, Glycine max
  Clone ID: PAT_MRT3847_131588C.1.pep
NNMPSYYYFSIRYSTKITTIHRELFSRNPLLPPAPHKNGDAIFSAVSTADNTADYYSTTDGCLVSDG

SEQ ID NO: 177821 - protein, 77 aa, Glycine max
  Clone ID: PAT_MRT3847_131589C.1.pep
MTFVAGPQPERSLGKLRKLTILKTIDEGDSRKLEQTFSMPSRPTTPLTPTTRTTPGSERKADNDWRSVFHPWSNSAT

SEQ ID NO: 177822 - protein, 54 aa, Glycine max
  Clone ID: PAT_MRT3847_13158C.1.pep
DPVCLYNHSIPSSIHCMSGSKKDNREAGMNKKERVCEWVERHDMKLTLSPSLAD

SEQ ID NO: 177823 - protein, 115 aa, Glycine max
  Clone ID: PAT_MRT3847_131590C.1.pep
RVHQEAQNGGSGKAVLVVPGSLVVVKPQFLVEVPKATAPFLFLRVALGAEEVGRPLNLKRKVEPGLLLFLSEELKMVGSTIFVAAPGGCHFFAGETGGNRGRFGLEAGGRGWGST

SEQ ID NO: 177824 - protein, 64 aa, Glycine max
  unsure (1)..(64): unsure at all Xaa locations
  Clone ID: PAT_MRT3847_131591C.1.pep
NKYNNQNRSLSLPQHGSSWIKRFEAVLGRDIHINGGNSTTSPKNXXVHVQVKLNESYNLLIHIP

SEQ ID NO: 177825 - protein, 87 aa, Glycine max
  Clone ID: PAT_MRT3847_131592C.1.pep
FEEKRSQVSDREQLVQILNKIPLPADLATKLLDAGSGNVNGKKDHVQLQTPSSSYQCHESHDLLNTPHPRTALYCLLLCSFLDPQYS

SEQ ID NO: 177826 - protein, 243 aa, Glycine max
  Clone ID: PAT_MRT3847_131593C.1.pep
RINPSDISGVPKKSSWDMIVDTTSLVNKESRKAMQLLQGLKGTRLIIPRLVIGELERMKQQFTIFRRISEVSLALEWIEECMVKSNWWIHIQSSVDEGRLIAPTPPASPLTQFSEESWTSLSTQKFSMEIASPTVEDHILDFALLYRRNQNDGQLILLSEDVTLKIKCMAEGLLCEPVQEFRESLVNPFSERFLWDKSIPRGQTWSCQDDVVLREKFCRLRKPSKGVASGLKLILLHNSQYGL

SEQ ID NO: 177827 - protein, 109 aa, Glycine max
  Clone ID: PAT_MRT3847_131594C.1.pep
MPLLALQCLLQISRLIGDLECVTFVFDSAEEAAGKVVKRLLQQDPSTSDKDLMEESEIKDFQFVAARLGITSPTAILIEKRSIKKLLEKLKRNDQTKEIVLKNPLFPLR

SEQ ID NO: 177828 - protein, 230 aa, Glycine max
  Clone ID: PAT_MRT3847_131595C.1.pep
MRIGLKKKKTTSGAASKLLAMAKKLSSKPTILFIFVSFMLFCAFLPVFAPLPSFSSHHSHRNTVNRKFEIANDRFWKDGEPFQIIGGDVHYFRVHPEYWEDRLLKAKALGLNTIQTYVPWNLHEPAPGKLVFEGFANIEAFLNLCHKHGLLVMIRPGPYICGEWDWGGFPGWFYSMIPTPKPRSSDPTYLQLVERWWGNLLPKFVPLLYENGGPIIMAQIETEYGFYGDD

SEQ ID NO: 177829 - protein, 216 aa, Glycine max
  Clone ID: PAT_MRT3847_131596C.1.pep
MATQLNNVFRTSILKHKIQSETPLKTTIRTTRFQVINATSSARQLIESGTVRPILPKDASTAINSEGFVLLDVRPTWEREKARVAGSLHVPMFVEDTDNSPITLLKKWVHFGYIGLWTGQYLTTLNSEFLSQVENAIPGKEAKLLVACGEGLRSMTAASKLYNGGYKNLGWLAGGFNRFKNNDFPAVEGKEKLQHATVGGVSYIFLQLLILLKAVD

SEQ ID NO: 177830 - protein, 51 aa, Glycine max
  Clone ID: PAT_MRT3847_131597C.1.pep
TQKVKTLHHPISYTPSTNIKPIIFPLIKYSTLQLIHTYSTYTNLYFKSKII

SEQ ID NO: 177831 - protein, 30 aa, Glycine max
  Clone ID: PAT_MRT3847_131598C.1.pep
NTNNSCSIRSDDLLQQVPLMLQTSETSGRH

SEQ ID NO: 177832 - protein, 110 aa, Glycine max
  Clone ID: PAT_MRT3847_131599C.1.pep
KRQNLLCFLLRVAHEISKIARKQKMLSQRDIYKNLSGKFTKFSGGGMKILEQNSFLFTPSIFYFWGAGPQGFKILWGTKISPAAHKKMGGEFLLALTQEGGKGQLQQNFT

SEQ ID NO: 177833 - protein, 125 aa, Glycine max
  unsure (1)..(125): unsure at all Xaa locations
  Clone ID: PAT_MRT3847_13159C.1.pep
IIIDRLTRSYCNMDGATVAVTTDHTNPENAVQGAYVTRVKGGTPILVVTFTSTXVCSNEPDMNXRDRMKTTTTTDVPVLGNDLGAPKDNRACAAXRLGXSDTTTPLQEYTLPKDRTLIEDYFGRM

SEQ ID NO: 177834 - protein, 104 aa, Glycine max
  Clone ID: PAT_MRT3847_1315C.1.pep
SALPVLPLPLLAQKQKPINTKEGTIQINICTLRLEQQMGFPSTTTTTITTHTTEKKGEKSFVTFLALPSQVPGGLSESHTHYLIFYATFLFTSLYPPSVVFSQP

SEQ ID NO: 177835 - protein, 90 aa, Glycine max
  unsure (1)..(90): unsure at all Xaa locations
  Clone ID: PAT_MRT3847_131600C.1.pep
SWNRNPVPQKSKIASFVTKVIILVLEYTRELTDKKKXGXRNRNGQGYILRLCGIATSRXVQQAXWKAPAARYSPTYAKDRASQESQPLDA

SEQ ID NO: 177836 - protein, 108 aa, Glycine max
  unsure (1)..(108): unsure at all Xaa locations
  Clone ID: PAT_MRT3847_131601C.1.pep
TRPVRKRNPIPSPYLSSSRIHGTLFRHIPFVTVHCNHPTPHLLLSLFLSSPSPRTCFSHKLALQWLLLPVQPATLPAPRPAAAPNPLPRRLQEARAQGPHSRXPTRSR

SEQ ID NO: 177837 - protein, 51 aa, Glycine max
  Clone ID: PAT_MRT3847_131602C.1.pep
GRVGGRVGKAFELELSWICDEWNRQHQKVPNELLEQAKAAAQAALEEMDAD

SEQ ID NO: 177838 - protein, 33 aa, Glycine max
  Clone ID: PAT_MRT3847_131603C.1.pep
GDDKEEESDDYSKYSIIHHQLPLLHLTSFLCLM

SEQ ID NO: 177839 - protein, 55 aa, Glycine max
  Clone ID: PAT_MRT3847_131604C.1.pep
YSMTIKTSGLSLGTYPDYKTDAHVRCKKYMMYSQDAANALYTIEDQVAGIWKTNS

SEQ ID NO: 177840 - protein, 52 aa, Glycine max
  Clone ID: PAT_MRT3847_131605C.1.pep
KGKILFFRWGMFRVKGQSYPLLLRWKRPPSFLRSGWDWVIFFAKLKIPPAVF

SEQ ID NO: 177841 - protein, 61 aa, Glycine max
  Clone ID: PAT_MRT3847_131606C.1.pep
KEILALAPRSIKIKVVAPPEKKNSVWIGGFILASFSPFQQMWIAKAEYCEFGPSIVPKKCF

SEQ ID NO: 177842 - protein, 167 aa, Glycine max
  Clone ID: PAT_MRT3847_131607C.1.pep
ARNSARVALLKTSAIEVMLLETSRRYNPGSESITFLKDFSYNREDFAKAGLQVEFINPIFEFSRSMNELQLNDAEFALLIAISIFSADRPNVQDQLQVERLQHTYVEALHAYVSINHPHDRLMFPRMLMKLVSLRTLSSVHSEQVFALRLQDKKLPPLLSEIWDVHE

SEQ ID NO: 177843 - protein, 314 aa, Glycine max
  Clone ID: PAT_MRT3847_131608C.1.pep
MDRPTLSSLFSFLLTLHLSLSGVISTTFTLVNKCDYTVWPGILSNAGVPPLSTTGLVLQTGASTTIAAPASWGGRFWGRTLCSEDSTGKFSCVTGDCGSGKLECSGNGAAPPATLAEFTLDGAGGLDFFDVSLVDGYNVPMLVVPQGGSGEKCTATGCVGDLNGACPSELKVMSADGREGVVACKSACEAFNSPQYCCSGAYGTPDTCKSSAYSAIFKSACPRAYSYAYDDKTSTFTCASADYTITFCPSPTTSQKASQGQDGSSTSPLLNNNGTMVYEGAFGQNEISWATCSHVFQSQALAGIVSMTMAMWLF

SEQ ID NO: 177844 - protein, 148 aa, Glycine max
  Clone ID: PAT_MRT3847_131609C.1.pep
MDRPTLSLFSFLLTLHLSLSGVISTTFTLVNKCEYTVWPGILSNAGVPPLSTTGFVLQTGASTTIAAPASWGGRFWGRTLCSQDSTSGKFSCVTGDCGSGKLECSGNGAAPPATLAEFTLDGAGRLDFFDVSLVDGYNVPMLVVPQGG

SEQ ID NO: 177845 - protein, 100 aa, Glycine max
  unsure (1)..(100): unsure at all Xaa locations
  Clone ID: PAT_MRT3847_13160C.1.pep
APKGLIWWVVWGFSVLSLNRXLAEDNGLVMNCYKESCPHAEYIIKDLVLLLYKRHKNTAFSWLRYICHDWAVQSWDASLLLXDSTRTILSEXETDRSFGL

SEQ ID NO: 177846 - protein, 101 aa, Glycine max
  unsure (1)..(101): unsure at all Xaa locations
  Clone ID: PAT_MRT3847_131610C.1.pep
MRGLGKVAAVLFLWGCTAAVGGARFDPRSCVSGGVHCADTGNYYVKSTASACCGSCAGTKSIRPQWRCXDIGRTWHSACQTGICTRSIAPQGHCADVARFC

SEQ ID NO: 177847 - protein, 59 aa, Glycine max
  Clone ID: PAT_MRT3847_131611C.1.pep
IDQFVLRSSCIKCYGYAYLRCTWDYYSDGSVCTTMTTLIDCLGSHLDDAFIIDVMIYAM

SEQ ID NO: 177848 - protein, 98 aa, Glycine max
  unsure (1)..(98): unsure at all Xaa locations
  Clone ID: PAT_MRT3847_131612C.1.pep
GIQMDTDALVHVYVDHYDITFDINRNGLPKLYHDGSMHIFEXHKIHGTSSIVSHRTSLTFEQCXYSIATVDCHTFGXTTGMPIVVMRKLQLAGHYDTL

SEQ ID NO: 177849 - protein, 113 aa, Glycine max
  Clone ID: PAT_MRT3847_131613C.1.pep
NYKQHTNLEVFVRNQLHKHAARISRSSIMPMPVSNLIFYPTKTHPAYSTLLWHVLQALPRLKIPRLQRRIKTWHVSFGPSPCSIFNFFYWIGKNPNSTSETLNQEHLSQLQKD

SEQ ID NO: 177850 - protein, 51 aa, Glycine max
  Clone ID: PAT_MRT3847_131614C.1.pep
SIVKVMTEKKLKKESANDIKIGMVARKETILIMKKHILNTCRKCKSRDNYR

SEQ ID NO: 177851 - protein, 66 aa, Glycine max
  Clone ID: PAT_MRT3847_131615C.1.pep
LALLLFFFRDYPSLVCHLKMSGCLLNCHLHKLLQLPQHLLKLQNAPTLQLHLINHHLNLCHCNCTF

SEQ ID NO: 177852 - protein, 143 aa, Glycine max
  Clone ID: PAT_MRT3847_131616C.1.pep
QLPLPSLYLFLLLQARTNNTCLVQLCCVCPWFCANIASHAPAHAAASRTTDPRGRCPGYTVYTLGVNRFVNVAYVGATPTLHAERMDHAGHLGGQLRSHLRYNYVGGWVGSRSPGDGNALLRRYNNNHNNSDRTLDSSIEIAR

SEQ ID NO: 177853 - protein, 99 aa, Glycine max
  Clone ID: PAT_MRT3847_131617C.1.pep
PWNSPFKGKAKGINLNVNPANNEVGGFFSGPFCHFDFEDDPLTALTLAPPGNAKGTVAEDPVPDHCALPEGFWDIIKDVIPKEIKENVSSNFFEKSGFH

SEQ ID NO: 177854 - protein, 91 aa, Glycine max
  Clone ID: PAT_MRT3847_131618C.1.pep
CTTKMENTCALAPSRPGHCSALLFTSLDGLNIGMPAKCERLVPTHHSQVTPFCPSFCIYFNPITVLITLFSGTIATSCGIYIIKMKLKWKL

SEQ ID NO: 177855 - protein, 124 aa, Glycine max
  unsure (1)..(124): unsure at all Xaa locations
  Clone ID: PAT_MRT3847_131619C.1.pep
QMMIAERHGEAKLLAPDYAWVNGHPVFYHESLTLLNRPNPPKKLNPLTYSHEXVYAFSWTDRHKPLHIITPHLDVVRPIQQDASNGNTQVFINGTNITQLELIMFQISGLHCCADPHFSINDDG

SEQ ID NO: 177856 - protein, 77 aa, Glycine max
  unsure (1)..(77): unsure at all Xaa locations
  Clone ID: PAT_MRT3847_13161C.1.pep
FYFFILAVYYTSSIXFRKSLPPYIRRHKYTLLIYILPSXFSLAVIYFRRILSYIHILGLFYXGRYKFWTKHEKISCF

SEQ ID NO: 177857 - protein, 69 aa, Glycine max
  unsure (1)..(69): unsure at all Xaa locations
  Clone ID: PAT_MRT3847_131620C.1.pep
LIILLDFQGWAFFVWXVTKSPTRFFLVNLLEEISLRGALSFNCAENRNRGFYKSLLFQGGAHISFTMGI

SEQ ID NO: 177858 - protein, 48 aa, Glycine max
  Clone ID: PAT_MRT3847_131621C.1.pep
SPSLQNFFIPIYMHHSPGAMPSYWAASFYYYIFMPFKRNDQLTLTKFT

SEQ ID NO: 177859 - protein, 202 aa, Glycine max
  Clone ID: PAT_MRT3847_131622C.1.pep
MPSSDPNMLSFSTKPLDGQYTNASSQEEVGYGKKIALNVADSNKAASVKSDYSLVNPQMAPSWFERYGTFKNGKMLPMYNAQKMTAAKIMDQPFIVANQSDSLRFHNSVEQIQSVSDAQLSNASESPMPALAANKHADSQLSTPAVEPDLLIMRPKKRKSATSELIPWHKELLQGSERLRDISVAELDWAQSASRLIEKVED

SEQ ID NO: 177860 - protein, 64 aa, Glycine max
  Clone ID: PAT_MRT3847_131623C.1.pep
EPPINPLTLFRYGPHLKAQGVFSRSPFRWCVMLQIEKRPLTHRILPSSLVYPAIHQAGVMSSVI

SEQ ID NO: 177861 - protein, 114 aa, Glycine max
  unsure (1)..(114): unsure at all Xaa locations
  Clone ID: PAT_MRT3847_131624C.1.pep
MKMNVLVFIVATILVXAWQCHAYDMFSLRMNRGYGARTXPDVKCAHYRLAVEAHKIFGFDTIPEECVXATREYIHGEQYISDSSTVNQHTYLYARYLDVYPNDTCVFSRYGTVL

SEQ ID NO: 177862 - protein, 75 aa, Glycine max
  unsure (1)..(75): unsure at all Xaa locations
  Clone ID: PAT_MRT3847_131625C.1.pep
GFVPREPNRSPGXYNGRSWPMWNPPMLGGPDPSQVLKELQKAKIASPRGFIGIMGFANVPQVQGKSFIPNKPPGF

SEQ ID NO: 177863 - protein, 62 aa, Glycine max
  unsure (1)..(62): unsure at all Xaa locations
  Clone ID: PAT_MRT3847_131626C.1.pep
PFPKDLVAVSTLKEGDVPINGLWGTFPTSGPFGHIPLNTFXFNPRLEGPRLLGLVGFGPNGS

SEQ ID NO: 177864 - protein, 50 aa, Glycine max
  Clone ID: PAT_MRT3847_131627C.1.pep
QPRKLGPFLFMPENEKYFLNPAFRTGNSPIYPGRLNRNHPLASLPWVEKK

SEQ ID NO: 177865 - protein, 146 aa, Glycine max
  unsure (1)..(146): unsure at all Xaa locations
  Clone ID: PAT_MRT3847_131628C.1.pep
VRVFWGKKKKKKKKRNDIKEKKIKKKKNEKKKKKKKKKKKKKKMKRXKKKKKLEKNMEGGGFFGGQQFSLWAVGGIAFFLGPLDFPFWGAFLKARGWETVGVPKIKAAGEVPLFGTGGIDKGGTARSFFLKWVPFLRGKGAPPFKV

SEQ ID NO: 177866 - protein, 67 aa, Glycine max
  Clone ID: PAT_MRT3847_131629C.1.pep
WETKAWMGNIGETFFILQTLRHLKDFFRKLLFKGVGRDLFYPFFNCLTRGFFLLNFITFLIFFNLII

SEQ ID NO: 177867 - protein, 72 aa, Glycine max
  Clone ID: PAT_MRT3847_13162C.1.pep
PLLPSFPSTIKSTLQLLTEKFLSISFLHPVLFVVYGREFQGGNLGFTLTTFCSASFVLRKSFLKKDDISKQD

SEQ ID NO: 177868 - protein, 72 aa, Glycine max
  Clone ID: PAT_MRT3847_131630C.1.pep
FSPEKKREKFLSPKNSFLREKLIILAQKFVVFFSPFTPSGIKLFSKGLKAPLYKMLKKPRAQNLFFLLGRLG

SEQ ID NO: 177869 - protein, 184 aa, Glycine max
  Clone ID: PAT_MRT3847_131631C.1.pep
NSARADVDIVYLQNPFDHLYRDSDVESMSDGHDNMTAYGYNDVFDEPTMGWARYAHTMRIWVYNSGFFYIRPTIPSIELLDRVATRLSKEQAWDQAVFNEELFYPSHPGYDGLHAARRTMDRYQFMNSKVLFKTVRNDASLSKLKPVIIHVNYHPDKLPRMKAIVEYYVNGKQEALKPFPDGSD

SEQ ID NO: 177870 - protein, 55 aa, Glycine max
  Clone ID: PAT_MRT3847_131632C.1.pep
LVMRLELCLSCASLEGSRAGVAALYCDGSMTETKRVVFSYMVGLAQMLRGGVIMD

SEQ ID NO: 177871 - protein, 51 aa, Glycine max
  Clone ID: PAT_MRT3847_131633C.1.pep
MVGAMTSSMAAKFAFFPPNPASYRVGLDDVTGKLKMTGVATKENVDVLKLF

SEQ ID NO: 177872 - protein, 260 aa, Glycine max
  Clone ID: PAT_MRT3847_131634C.1.pep
MGNAQSPPNNDPRYVSATRAFTQKELEDLRSLFNNLANQSQSNGKYISPSVFQSYFGLHGPLGERMFDLVTQERKDQRLTFEDLVDAKATYEKGTKDEIEEFIFRLLDVSGDNFVGRSDLETVMIAIFNDILRIKGSDDRSSSHEDIFNIFLNAANFSKHDEGGTEETMSFEDFRSWCTHLPSVRKLLGSLLLPPDSGRPGYQIPKLLTSKAIDSNIILLRKEYAWHIGGALSHQDLEDWNLLYHSSLNGLSCNTFLGNI

SEQ ID NO: 177873 - protein, 69 aa, Glycine max
  Clone ID: PAT_MRT3847_131635C.1.pep
LTDNFDHRLLPQHLSTNKLTDNLLNAYHYSLAQGREKSLNCNVMVRFRGYFTIPFYHLLTTMQAHKSAQ

SEQ ID NO: 177874 - protein, 138 aa, Glycine max
  unsure (1)..(138): unsure at all Xaa locations
  Clone ID: PAT_MRT3847_131636C.1.pep
NSXHETDYTDWAVPLKIISGTILAALVATTLWKLFSFLRDAGHGGVYAGSVRLALTPARVPDAHSREANKYEGCQNRYRNVPIQRIAWGEGQRYLDQSVPAIMPKCKARMRTRNTDAHILMGPGRRCITHGHVFKNQT

SEQ ID NO: 177875 - protein, 278 aa, Glycine max
  Clone ID: PAT_MRT3847_131637C.1.pep
TDPFLLHSICNFFVLMAPKRRPKKGESRMDAALDAMKPYGFPNRLVRTTVNSLLKVYGGNGGWFFIEESAYSLLIETLLEKQANSSPQDGLIEANPDGPNEVTDTGCSNSALLACSNTQTSDDTLLTIQAADTVSSSSGTGIQLPINGVDTVSAKTEIGSELPIKSVDISSVPSEPANQPLIKAASETPIEAFKESGYQCRKRNEAASETPMEAEKESEFQPVKKLALAENHVSKSPQLGTGLSDKRYKPCYGWISNDDEEEEELIELPLAPWLSGVN

SEQ ID NO: 177876 - protein, 184 aa, Glycine max
  Clone ID: PAT_MRT3847_131638C.1.pep
MMTLAEFQNQVKRKLQEGKLKEKEKEKEKEKEEEGIEKRRNPAERSRRRLGLRNNGGLEDGEVRGLKKSVKPAIEEKRKGLIIEKHRGGSSGGELETMAVVDSDFYDFDKDRVGRSFKKGQVWAVYDDDDGMPRNYALIDETVSVNPFGVRISWLDVQNSGDGRIVSREKMGFHIPCGRFKVAR

SEQ ID NO: 177877 - protein, 88 aa, Glycine max
  Clone ID: PAT_MRT3847_131639C.1.pep
KKKKKKKKWGKFKKKKKKKKKNNKNKKRRDLILVTNTSPRTKIFLFFCRINPFTYSWGVPPPFVTLFSPNFFRARSFPAPFFSFYGGA

SEQ ID NO: 177878 - protein, 95 aa, Glycine max
  Clone ID: PAT_MRT3847_13163C.1.pep
HLKVTFHSQPADFSPVTTVIQVTSYLIAQRLFAMRRYQGGMLYAVLPLHMQRGCFRIRTDDQQVTKAQLYHSNTSKNQKVKASILGYSSTIGPQE

SEQ ID NO: 177879 - protein, 52 aa, Glycine max
  Clone ID: PAT_MRT3847_131640C.1.pep
NSMSNLSLNYIYNIIVSLSHIQILNRNFCSISCYIIIGIKMIIYYLFYFYKF

SEQ ID NO: 177880 - protein, 183 aa, Glycine max
  Clone ID: PAT_MRT3847_131641C.1.pep
MATNGPLKRKSPPDDDSVNLKIKLQDGRNLFFKVNRDLKLINVFKEFCDRQNLDYETLKFIYDGFNIKGKHTARMKNMATSRGRPPKRKSPDDNEATDNIQINFSIIDQDGRHMYFKVNHNLELIKVFKDFCERKNLEYETMQFLCDGIHIKGKHTPKMLNMEDDAEIFAATHQVGGGGDMRC

SEQ ID NO: 177881 - protein, 78 aa, Glycine max
  Clone ID: PAT_MRT3847_131642C.1.pep
IAARLITFLHCLQCMDASSLDPFNNTLPGTLKSTEEEPLNLVFSPPSMSDSGEIGRIGGHCPPAPTAEMHDRIPNALT

SEQ ID NO: 177882 - protein, 102 aa, Glycine max
  Clone ID: PAT_MRT3847_131643C.1.pep
CGVQITGIIIAYVMKSLEHKSYRAVSQNQNWENPTSRITVTKVTRCQNFLCYGAPEMNKQMEETRSSPFSNPVCTHPNFLASPCGSFGIRFRKSLTMRGNPS

SEQ ID NO: 177883 - protein, 59 aa, Glycine max
  Clone ID: PAT_MRT3847_131644C.1.pep
FGFLVQVWDDLIIQSALKTFYDSDLSIMIQAIQRNITYNWPNDVSIWEYCAHNYTACPN

SEQ ID NO: 177884 - protein, 76 aa, Glycine max
  Clone ID: PAT_MRT3847_131645C.1.pep
LTPTKNCFTMKFEHESLIQAIPCKKYKILHLLYHKLCRLDQSTLMLLAEIIMTQTSTVFQKRTDQLAFPSLTIRQH

SEQ ID NO: 177885 - protein, 66 aa, Glycine max
  unsure (1)..(66): unsure at all Xaa locations
  Clone ID: PAT_MRT3847_131646C.1.pep
THNIKRNQNSIFYQTPEFLAEXTSIKDLFNPYRILIGCKETPYGQKAIQTLKDVYAQXVPEEKILT

SEQ ID NO: 177886 - protein, 156 aa, Glycine max
  Clone ID: PAT_MRT3847_131647C.1.pep
IRHENGYYGNAFAFPMALSKAGLLCQSPLEYALGLIKKAKAQMGLEYVKSVADLMVLKGRPKYKTKENYLIGDTTHVGFYDVDFGWGSPIYGGPAGAIPFVSFYGRFRNNEGEDGVVVPILLPHHVMKRFLFELVKITSEVPVGLSYNKITNRSML

SEQ ID NO: 177887 - protein, 75 aa, Glycine max
  Clone ID: PAT_MRT3847_131648C.1.pep
KANAQNLIFTLKRASLIQVKTKLHVFLANNTKKNVCDFKVKSSWVEPSCGGYSGESNNIVGQMHKKHTGQNILIG

SEQ ID NO: 177888 - protein, 39 aa, Glycine max
  Clone ID: PAT_MRT3847_131649C.1.pep
AQLTSFSMCSVYMERRLVNGRLVCYRNYLDCRVPAYDVN

SEQ ID NO: 177889 - protein, 101 aa, Glycine max
  unsure (1)..(101): unsure at all Xaa locations
  Clone ID: PAT_MRT3847_13164C.1.pep
LLFSLLASLCYFTLTSFAKTATPPSLIPTSAPTPTPDFANLTELLSHAHPYHTFLGYLYSTKLIHTYHNQHIITDXGLTIFVPKDRLFTALQKTTLYNITS

SEQ ID NO: 177890 - protein, 114 aa, Glycine max
  Clone ID: PAT_MRT3847_131650C.1.pep
DTIDHVTAKIQDKESVPPDQQRLIFDGNLLEDGRTLSDYNIQKESTLHLVLRLRGGAKKRKKEDLTPSPTKIKHKHKKVKLGILQFYKVDDSGKVHRLQQGCPNAECGAGTFMA

SEQ ID NO: 177891 - protein, 107 aa, Glycine max
  unsure (1)..(107): unsure at all Xaa locations
  Clone ID: PAT_MRT3847_131651C.1.pep
AQAFNLQGGRFVNQVNPSFPQHIQNCLDKLLFDSQEIEKTSPLKQAGCAGVVPVRGKTKFYGGLNGGWFHKFELKFXKVRRKNRKCPLPAQGVPPQQRIEVGMLYKA

SEQ ID NO: 177892 - protein, 46 aa, Glycine max
  Clone ID: PAT_MRT3847_131652C.1.pep
MKKVWNKKSLKKKPQKSKNIAKKIKKKTNFLKKEKNFLLKKKVKKN

SEQ ID NO: 177893 - protein, 62 aa, Glycine max
  Clone ID: PAT_MRT3847_131653C.1.pep
DSQNCLTGTFPRSITNVTTLSLCKINEQCCNICNRFTELLNWHISTIYFHFSNRKSVLVVFH

SEQ ID NO: 177894 - protein, 48 aa, Glycine max
  Clone ID: PAT_MRT3847_131654C.1.pep
TGENGIQLAPNVKIAKGKAKNFVAALEVTWPKFLGPAFKGLKWVKQNF

SEQ ID NO: 177895 - protein, 44 aa, Glycine max
  unsure (1)..(44): unsure at all Xaa locations
  Clone ID: PAT_MRT3847_131655C.1.pep
LCXFXXLFPLSRNXXIYXXLLVNPXXPDNXGQPRXXVWDLVXCH

SEQ ID NO: 177896 - protein, 40 aa, Glycine max
  Clone ID: PAT_MRT3847_131656C.1.pep
VSPVRLLSTVALCRVFTSLSFCGLMSPARVRRLGSSVPSA

SEQ ID NO: 177897 - protein, 90 aa, Glycine max
  Clone ID: PAT_MRT3847_131657C.1.pep
NIKYAFMIYEYPNIIILSLQKKKLFCPVKILKSNYSIQFFISNISLTQVFLFIFLPYHITYPMYTFISLLLIFKHSLNWTYSRTIVRVGV

SEQ ID NO: 177898 - protein, 107 aa, Glycine max
  unsure (1)..(107): unsure at all Xaa locations
  Clone ID: PAT_MRT3847_131658C.1.pep
ETLVAEQIQSLFYDGVLPEVDYDSAKVVKNENSDYSDGKYGKSYHDIRXEQLEDDDKEDDDNHEKDEVNQDNTDREADNTSHTNEPGHQHSPNIDKPYNPNDPNHRQ

SEQ ID NO: 177899 - protein, 175 aa, Glycine max
  Clone ID: PAT_MRT3847_131659C.1.pep
MASFSLTSSSPTLHKATIIDPSSSSSSSSSSSHAFPHRPPFVLRMPHQPRRLQTPLVLPKIQSLRHKTRATPVTKDLWDNSILKSETPVLVIFYANWCGPCRMVHRIIDEIATEYAGKLKCFIVNTDTDMQIAEDYEIKAVPVVLMFKNGEKCDSVIGTMPKEFYVAAIERVLKS

SEQ ID NO: 177900 - protein, 61 aa, Glycine max
  unsure (1)..(61): unsure at all Xaa locations
  Clone ID: PAT_MRT3847_13165C.1.pep
CQTPCHLLILYKDECEXREIPRPQPRPQHPXREPHQPAEKEEDYNEQPRTIPFARPHPHLQ

SEQ ID NO: 177901 - protein, 204 aa, Glycine max
  Clone ID: PAT_MRT3847_131660C.1.pep
METRKGVFITEEIKHASVQIMCAGVVIGLVTLVGLKFLPTRNGSPILRKMTGSAMVSDTINLGSLGDEEKVEQLPKMDARVAEALVRKWQSVKSEAFGPDHCLGRLHEVLDGEMLKIWTDRAAEIAERGWSYDYTLEDLNIDSVTISQNGRRAVVETTLKESTHLNAVGHPQHDASNSRTYTTRYEMSFTGAEWKIVEGAVLES

SEQ ID NO: 177902 - protein, 63 aa, Glycine max
  Clone ID: PAT_MRT3847_131661C.1.pep
QIFIKTLTDKTITLEVKISNTINNVKANIRNKEGIPPNQQKLIVTNKQLNDKKTLTNYNMQKN

SEQ ID NO: 177903 - protein, 125 aa, Glycine max
  Clone ID: PAT_MRT3847_131662C.1.pep
TLNTNTISLSLHLHLTNQTLSLFCSPLTLFSFFPATSSLYHFLCNFLSLSTIFSATFSFYHFLCTNGNYSSLQARVSRDSVVPSRLCNFGGGLSFFLLLLLSLAFFPLCLCKIYYGGRRTDGTGI

SEQ ID NO: 177904 - protein, 133 aa, Glycine max
  unsure (1)..(133): unsure at all Xaa locations
  Clone ID: PAT_MRT3847_131663C.1.pep
ARGNGVLYNGGSFLGGNTELYLSRSVRPRLANYQGRAMRTVRNGPYWADIIELTDXIEDKYAMMXLHYDNATXDTNMKDGSGSTVWQRKNGPGLDQCIRTHTKNHNVTDGIRKTQTGAHLHRHQWIEDDLTGT

SEQ ID NO: 177905 - protein, 328 aa, Glycine max
  unsure (1)..(328): unsure at all Xaa locations
  Clone ID: PAT_MRT3847_131664C.1.pep
MLYKSSVRPLKIVIMANLLTMFFVMEMIIVSGLSFGASGLNMNYYLLSCPFVEPVVKNTVNRALQDDPTLAAGLGRKHFQLFWYXGCDGSVLIDSTKDNTAEKDSPGNLSLRGFEVIDAIKEELERQCPGVVSCADILAMAARDAVFFAGGPVYDIPKGRKDGTRSKIEDTINLPAPFFNASELIKMFGQRGFSARDMVALSGAHTLGVARCSSFKHRLTQVDPTLDSEFAKTLSKTCSAGDTAEQPFDSTRNDFDNEYFNDLVSNNGVLTSDQTLYNSPQTRNIVNAYAMNQALFFLDFQQAMVKMSMLDVKEGFKGEVRKNCHKIN

SEQ ID NO: 177906 - protein, 164 aa, Glycine max
  unsure (1)..(164): unsure at all Xaa locations
  Clone ID: PAT_MRT3847_131665C.1.pep
MLYKSSVRPLKVVMANLLTVFLLIEVFAYGYSYGQYGLNTNYYLMSSCPFVEPVVKNIVNRALQDDPTLAAGLIRMHFHDCFIEGCDGSVLIDSTKDNTAEKDSPGNLSLRGFEVIDAIKKELERQCPGVVSCADILAMAARDAVFFCXGAPVYDIPKRKKGLK

SEQ ID NO: 177907 - protein, 79 aa, Glycine max
  Clone ID: PAT_MRT3847_131666C.1.pep
EHNLFFPHNSVKYAFLDHNTSGEDQIRVLDGTPVFLYKILGPSCIEKECRALDIKPHQPLAGATGKVCKLFLRGRPQPS

SEQ ID NO: 177908 - protein, 65 aa, Glycine max
  unsure (1)..(65): unsure at all Xaa locations
  Clone ID: PAT_MRT3847_131667C.1.pep
WXXXXXSSXDTXXLTNMLNSKGIGGWDLPTIXIIKXKSSCLXFINHSNIANSSSCDNIGYSITDK

SEQ ID NO: 177909 - protein, 62 aa, Glycine max
  Clone ID: PAT_MRT3847_131668C.1.pep
YLYWCWARLSLFCQRFPKQVACLIAQLTAVTLFLSRSPGLPQSPHNVSKHQKAARHIDERVG

SEQ ID NO: 177910 - protein, 76 aa, Glycine max
  unsure (1)..(76): unsure at all Xaa locations
  Clone ID: PAT_MRT3847_131669C.1.pep
AEIHLLIALGKPSCPQKLKSKLFPXAXISFYFLFFILCDMIYSPKINIFSAXXAGESNLIIDKKNVIKERDLTKDY

SEQ ID NO: 177911 - protein, 44 aa, Glycine max
  Clone ID: PAT_MRT3847_13166C.1.pep
GGSQGDTQRRRATGKATAKVPPRGQLTGRHWTATKKGRPGKNPT

SEQ ID NO: 177912 - protein, 114 aa, Glycine max
  unsure (1)..(114): unsure at all Xaa locations
  Clone ID: PAT_MRT3847_131670C.1.pep
PTAXKIFRKAQXPKAQRXTNXLXRHGRNNGKKXXXXRXTKQAREXXHXXTDXNPXQXXGXAXIXRGRPRRSFLFXXAGXXRRQAGGXGPXTPPXQAXXXPTTGXREAAXRNNKT

SEQ ID NO: 177913 - protein, 125 aa, Glycine max
  unsure (1)..(125): unsure at all Xaa locations
  Clone ID: PAT_MRT3847_131671C.1.pep
FRSLIKTHICGGSGGQIILTLYVGXLHALVTSQELRDHLYAQGQIESIKMVRQRAXSLGTHTTRGCAXKGLXELYNKLVFKGLRLKLLWGXPQTSKPESDGSDQTRPKASVAHSADVALAQLYSQ

SEQ ID NO: 177914 - protein, 373 aa, Glycine max
  Clone ID: PAT_MRT3847_131672C.1.pep
MPSACRKGDGSLHIPANRTYKRQHILSTLLRSAHARCDRNTQRKTLNRRAMARTPKPKGGPSAAASAATAFFKPGTAVEVSSEDDGFRGSWFTGTVIRRLASERFLVEYDNLLADDKTTKKLREVLGLRHLRPLPPTETDREFKFGDEVDAFHNDGWWEGHITQELENERFAVYFRVSKEQLVFSKEQLRLHREWLNHDWVPPLQQKQQRQQGNGESKKVLLTPNVKSVETVKGKGIGVGAIVEVSSDEDGFSGAWFAATVVEALGKDKFLVEYHDLLADDDSQLREEIDALHIRPHPLDTDVDGQFSILDEVDAFYNDGWWVGVISKALADSRYVVYFRSSNEELEFENSQLRLHQDWIGGKWVMPCKALKL

SEQ ID NO: 177915 - protein, 170 aa, Glycine max
  unsure (1)..(170): unsure at all Xaa locations
  Clone ID: PAT_MRT3847_131673C.1.pep
YKNLDFGGDLNSXIALVGPNGTWKNSLLELINGELEPXNGLVQPPINFGLAHFTHPWVENLNWKWFAFHFLIKNSLETKEERLKXPLGKFGLVCQTPGIPIKNLFHGPKSPVIFSWVGYXPALLVLLDEPTNPLDIETIDLLAVALNECDGGMVLGNHEFKGINQGGHEI

SEQ ID NO: 177916 - protein, 198 aa, Glycine max
  unsure (1)..(198): unsure at all Xaa locations
  Clone ID: PAT_MRT3847_131674C.1.pep
MRTSWADLAANSASENAGTSNSTAPSRPVYVPPHLRNRGPSESLAPAPPSNNNNNVGSRWGALPPRNGWGNRSGGWDRREVNPFGGQEDAAAEEELGGEEQQESTGINFDAYEDIPVETSGENVPPAVNTFAEIDLGNALNQNIRRCKYVKPTPVQRHAIPISLAXRDLMACAQTGSGKTAAFCFPIISGIMRGQAQV

SEQ ID NO: 177917 - protein, 70 aa, Glycine max
  Clone ID: PAT_MRT3847_131675C.1.pep
EPPGRALKVVNTDGSIKVSVSDNLLSLINSSKSKASYLYPGPLKENVQTVLLYSLVDPYSPPHPKSVNFT

SEQ ID NO: 177918 - protein, 60 aa, Glycine max
  Clone ID: PAT_MRT3847_131676C.1.pep
HSMLVGMPSKDPLPKVQGTKVKLTGLKVSGRTSLGSSLLGKRWYSKYRCQAFWGIQVSSL

SEQ ID NO: 177919 - protein, 100 aa, Glycine max
  unsure (1)..(100): unsure at all Xaa locations
  Clone ID: PAT_MRT3847_131677C.1.pep
DAAIKLGYFVLSFMVVIFIYGSLVLPVHPLCKRICICSSTENLFQMSLISLSIVCLLPLNLIFRLDPLXYLVGLNPSILVFFSKPRIYFLCEIEGLFDFN

SEQ ID NO: 177920 - protein, 79 aa, Glycine max
  Clone ID: PAT_MRT3847_131678C.1.pep
NTNLPTTNFLIGDIISSDILKNNQTLKKMETWDVTYEMDDLTHQGNKPQRDGVYLKILNSTDQFKPDMFQSNPRQNLGD

SEQ ID NO: 177921 - protein, 65 aa, Glycine max
  Clone ID: PAT_MRT3847_131679C.1.pep
VPMLILSLPVPFSPIQLKVFPYHLHFYLFPPSFESYSQSPKNIFEFLFIKSRPLFFIFTLSLNYF

SEQ ID NO: 177922 - protein, 120 aa, Glycine max
  Clone ID: PAT_MRT3847_13167C.1.pep
TTVSCAATPFLNSSAYSKSAVEGQLVLSGSCRALSSIAGASVFSGSETAVPVSCLWRLRQPMTCMKAKVSPTTGAVGGSRAGVRTISQADKCPNPPTIYALDPSSRPKLQHRGVHWIHTD

SEQ ID NO: 177923 - protein, 245 aa, Glycine max
  unsure (1)..(245): unsure at all Xaa locations
  Clone ID: PAT_MRT3847_131680C.1.pep
IPISLYVSIELVKVLQSIFINHDQEMYYEETDRPARARTSNLNEELGQVDTILSDKTGTLTCNSMEFVKCSIGGIPYGRGMTEVEKALARRGKDVESEVDGGSSDLLGQSNDFVDSRHPIKGFNFRDERIMNGQWVNEPYTDFIQRFFRVLAICHTAIPDVDKESREISYEAESPDEAAFVIAARELXGFEFFARTQTSISLHELNYESGKKVDXRVYQLLHVFRSQQFPQRMSVIVRNEENQLL

SEQ ID NO: 177924 - protein, 55 aa, Glycine max
  Clone ID: PAT_MRT3847_131681C.1.pep
YVSSSGLHRLFYITSFTDTPASNKSAHWSLALRSFSKSSIRYSFSNFYDFPSSRI

SEQ ID NO: 177925 - protein, 87 aa, Glycine max
  unsure (1)..(87): unsure at all Xaa locations
  Clone ID: PAT_MRT3847_131682C.1.pep
GTKTDILILYLSHMLLLISSQLTSXRNIREASDAXQETDEVIDAKLVAASEAVXQETHEVIDTRLPAAPQADPHTHEEADTRLLCCR

SEQ ID NO: 177926 - protein, 66 aa, Glycine max
  unsure (1)..(66): unsure at all Xaa locations
  Clone ID: PAT_MRT3847_131683C.1.pep
VSNIKSQDYCRSCCMAEXNCGMALSINXXGPLRKEKFISRSSTSISRGRTRGDIESGTEGAESKRI

SEQ ID NO: 177927 - protein, 57 aa, Glycine max
  Clone ID: PAT_MRT3847_131684C.1.pep
VAGRPAPTHPPTNPLCPPLPPAHPPPHPPDCDLYQVIKNTIYSNDFMIKNLSPSTVN

SEQ ID NO: 177928 - protein, 99 aa, Glycine max
  Clone ID: PAT_MRT3847_131685C.1.pep
KNQEGFKISVFKTPRPFLAPKRGKFKYKVPLFFVSGIKIEAFKAVYNPRLGWGPPGGNPGVFQNKFFNWAPFFPPPAPFDGDFLKKKEIFWGGFFRDLL

SEQ ID NO: 177929 - protein, 73 aa, Glycine max
  Clone ID: PAT_MRT3847_131686C.1.pep
VHKAILELWRPDPSELTLLLTKGVDSTLLKVPPNAITLTGSSDPCYVEGYHLADASDGRFTLHLKVLNLTELE

SEQ ID NO: 177930 - protein, 40 aa, Glycine max
  Clone ID: PAT_MRT3847_131687C.1.pep
QLRNLRHHLCEGSFPCANMQNYSDSNGNTVTTIVSTLNSI

SEQ ID NO: 177931 - protein, 47 aa, Glycine max
  Clone ID: PAT_MRT3847_131688C.1.pep
RNNKRFFMLLSVFNSMSQRMSCETCYRAIVSSMSLLFMFRDIYYLRN

SEQ ID NO: 177932 - protein, 96 aa, Glycine max
  Clone ID: PAT_MRT3847_131689C.1.pep
RQTTEGDTTPTLLSHNTPLPLPNSPPNSLQFKHQTFFFTFPNMNPKSNPTLLRLRTLTCSVPDGNDHDHGWCHGLFFSYGEAFLQQKPANESYELK

SEQ ID NO: 177933 - protein, 117 aa, Glycine max
  Clone ID: PAT_MRT3847_13168C.1.pep
FILNGARGFSPSYGGHFPPSTPPGFLLFFPPRVFLFILPGSILSAKASQFLFFPNPHFAFFKATFNLLFPRPKFPGPPPGPGFPFLPPHQFVFPKAIYFFLTPILSDKKKKKKTRVG

SEQ ID NO: 177934 - protein, 91 aa, Glycine max
  Clone ID: PAT_MRT3847_131690C.1.pep
DRDDNDARGGLDVYLMQRITNFLRAPSLLFRCPQTIHRSATYSFWVPLAYLLGKPEINSFPRLARTQPSPIQGPLNQGFTKGSKVTGPNGA

SEQ ID NO: 177935 - protein, 127 aa, Glycine max
  unsure (1)..(127): unsure at all Xaa locations
  Clone ID: PAT_MRT3847_131691C.1.pep
QLERKEAEQAGANKETRIVTPLMEFVRQRRAVDSGMQASSAVAKVSRRSRAALPGKPGSXNTKRGSEKKKYVQKDNAKGVARKESKDKSAFVVVPRRDNQSAESMHGIEGPFSGISLTSDSXKKKIL

SEQ ID NO: 177936 - protein, 68 aa, Glycine max
  unsure (1)..(68): unsure at all Xaa locations
  Clone ID: PAT_MRT3847_131692C.1.pep
SGRQLLTYGXRISYAELFVTNDAVDVSTINRVASRYIYFKDVVIATSGHIXRLLEYNWFRRRTLWIRY

SEQ ID NO: 177937 - protein, 100 aa, Glycine max
  Clone ID: PAT_MRT3847_131693C.1.pep
CNCAGKNSISIIVPIVVPIVVVIVLFIVGVCFLRKRASKKYNTFVQDSIVDDLTDVESLQFDLATIEAATNGFSDENKIGQGGFGVVYKGILLNRQEIAV

SEQ ID NO: 177938 - protein, 376 aa, Glycine max
  Clone ID: PAT_MRT3847_131694C.1.pep
MMSCQAWPEPIVRVQSLADSGLSSIPSRYIRPHSQRPSNTTSFKLSQTEHDHGHGRETRDHDHVNIPVIDLEHLFSEDEILREKIFRHVDEACREWGFFQVVNHGVSHELMKSSRELWREFFNQPLEVKEEYANSPTTYEGYGSRLGVQKGATLDWSDYFFLHYRPPSLRNQAKWLAFPQSFRKVIAEYGEEVVKLGGRILKMMSINLGLKEDFLLNAFGGESEVGACLRVNFYPKCPQPDLTFGLSPHSDPGGMTILLPDDFVSGLQVRRGDEWVIVKPVPNAFIINIGDQIQVLSNAIYKSVEHRVIVNSNKDRVSLALFYNPRSDLLIQPAKELVTEERPALYSPMTYDEYRLYIRLNGPCGKAQVESLAFQP

SEQ ID NO: 177939 - protein, 138 aa, Glycine max
  unsure (1)..(138): unsure at all Xaa locations
  Clone ID: PAT_MRT3847_131695C.1.pep
MMSCQAWPEPIVRVQSLADSGLSSIPSRYIRPHSQRPSNTXDHVNIPVIDLEHLFSEDEILREKIFRHVDEACREWGFFQVVNHGVSHELMKSSRELWREFFNQPLEVKEEYANSPTTYEGYGSRLGVQKGATLDWSD

SEQ ID NO: 177940 - protein, 59 aa, Glycine max
  Clone ID: PAT_MRT3847_131696C.1.pep
ITIRRLYDMILSWWKLTLLDCKDFNGILRFWLLGIWKQLLDFDQLDGPHHPMKFFNHWR

SEQ ID NO: 177941 - protein, 340 aa, Glycine max
  Clone ID: PAT_MRT3847_131697C.1.pep
LEVPPIPLCLCAFLVPSKIPTKAKTMSCQAWPEPIVRVQSLAESGLSSIPSRYIRPHSQRPSNTTSFPTPKPFQTDHHHGHDQKTSDHDHDHDHVNIPVIDLKHVFSEDPILREQVFGQVDQACREWGFFQVVNHGVSHELMKSSRELWREFFNQPLEMKEEYANSPTTYEGYGSRLGVQKGATLDWSDYFFLHYMPPSLRNQAKWPAFPESLRKVIAEYGEGVVKLGGRILKMMSINLGLKEDFLLNAFGGESEVGACLRVNFYPKCPQPDLTGGLSPHSDPGGMTILLPDDFVSGLQVRRGDEWITVKPVPNAFIINIGDQIQVLALSRFVKTSNPFY

SEQ ID NO: 177942 - protein, 375 aa, Glycine max
  unsure (1)..(375): unsure at all Xaa locations
  Clone ID: PAT_MRT3847_131698C.1.pep
MESTDSSSGSQQPNLPPGFRFHPTDEELVVHYLKKKAASAPLPVAIIAEVDLYKFDPWELPAKAAFGEQEWYFFTPRDRKYPNGARPNRAATSGYWKATGTDKPVLTSGGTHKVGVXKALVFYGGKPPRGIKTNWIMHEYRLTDNKPNNRPPPGCDLGNKKNTLRLDDWVLCRIYKKSNTHRSPMEHDREDSMDDMIGGIPPSINVGHMSARFHHLSKMTTAYNNGALLENDHHNLLEGMMIGNSNGGMNTTTTTTPGPMSSHLGGSKEELSFVPTMTHSSNTSKRTLSSLYWNDEDVAGTSSSNKRFNLELSGDNNNHGSVVRDDQENGTASSIATLLNQLPQTPSLHQQSILGSIGDGLLRTTYQIPGMNWYA

SEQ ID NO: 177943 - protein, 80 aa, Glycine max
  Clone ID: PAT_MRT3847_131699C.1.pep
VKIKISKKELKKLLGGEKNNSYKPGGHGPAFAEQVLGRLIPAKDPASNETPDVPHRSWRPGLQSIPEVNLMGSKGGVDCV

SEQ ID NO: 177944 - protein, 59 aa, Glycine max
  Clone ID: PAT_MRT3847_13169C.1.pep
TCFWFFLDKSHFIFFPYCSCNLCLQRSENVLMNYYNSSVTHDECQVADDNEGMMIIMCY

SEQ ID NO: 177945 - protein, 102 aa, Glycine max
  Clone ID: PAT_MRT3847_1316C.1.pep
RRKTATIIGRTRATSSTRTGHELKRPAGASSTTALGLPAKAKAARVRSSMEEKPTSSSNLGTEASYEAATAAETMTSPAATALDDERLSTERTGLTLGLSNN

SEQ ID NO: 177946 - protein, 70 aa, Glycine max
  unsure (1)..(70): unsure at all Xaa locations
  Clone ID: PAT_MRT3847_131700C.1.pep
ARETLFFIGPALGLVIHAHCKGAGWVFKYHTLLHKDPDRFLCPNLXEPYRSLLGARTDIIHDPGRGTPIN

SEQ ID NO: 177947 - protein, 48 aa, Glycine max
  Clone ID: PAT_MRT3847_131701C.1.pep
YEFRHMTTEHIHEDVDHLRGDLVMLHLQKSDHNEYKSSEFGRMHKKIA

SEQ ID NO: 177948 - protein, 163 aa, Glycine max
  Clone ID: PAT_MRT3847_131702C.1.pep
SSVMEATNVASWEKVKDNYEIWKTLMKNYLVGNDLWDAIETPSTPRHDAHRMNAMALHIIQRSCGSKNFDEIWQFDKAQAAWNHLCVRYSDNELKAKPDIEQGVVGDDDFENKELYKYVEDGDWKKTESFISGNKVEVSRLAPDSGFVLHVAAMAGHANIVRE

SEQ ID NO: 177949 - protein, 110 aa, Glycine max
  Clone ID: PAT_MRT3847_131703C.1.pep
GSLGQQGLLKGPFWGCPANFPPLGAFFWENSSPRVPSRSPRLLRTQNAHSLAPIPGVVVGPRLNPPRNLAIFPGEQAKPFYTKKSFFVQNGLVSRKNFGSLGSLFQWGPG

SEQ ID NO: 177950 - protein, 43 aa, Glycine max
  Clone ID: PAT_MRT3847_131704C.1.pep
NGHVKKNTTITMYHYFHWIILSLNCNIHELNIKLFFKDQFNLI

SEQ ID NO: 177951 - protein, 158 aa, Glycine max
  unsure (1)..(158): unsure at all Xaa locations
  Clone ID: PAT_MRT3847_131705C.1.pep
PTRPPTRPPTRPPTRPGASQSIIHRDVKTTNILLDDNFVAKVADFGLSKTGPALDQTHVSTAVKGSFGYLDPEYFRRQQLTEKSDVYSFGVVLMEVLCTRPALNPVLPREQVNIAEWAMSWQKKGMLDQIMDQNLAXKVNPASLKKFGETAEKCLAEY

SEQ ID NO: 177952 - protein, 175 aa, Glycine max
  Clone ID: PAT_MRT3847_131706C.1.pep
LKKARDELDTYVGQDRLVNESDLPNLFYLKKIILETLRLHPPAPLAIPHVSSEDINIGEFNVPRDTIVMINIWAMQRDPLVWNEATCFKPERFDEEGLEKKVIAFGMGRRACPGEGLALQNVGLTLGLLIQCFDWKRVNEEEIDMREANWFTLSRLTPLNAMCKARPLVNKINLK

SEQ ID NO: 177953 - protein, 42 aa, Glycine max
  Clone ID: PAT_MRT3847_131707C.1.pep
HAQLFGEKTALPNLGSIRGGEGAYEKMQRLTKLATGPLYKGR

SEQ ID NO: 177954 - protein, 65 aa, Glycine max
  Clone ID: PAT_MRT3847_131708C.1.pep
CLDLPRLVFCRSSLSPCCGGSRRDIFKLSMWISLPSYALEDFINEHKEAESRSKEAQGEAEQHVL

SEQ ID NO: 177955 - protein, 75 aa, Glycine max
  Clone ID: PAT_MRT3847_131709C.1.pep
SKKCPLIFGRKKNFYNPPPQISKRKKKNPPVFCEMVTPKKIWSFWALATDLIPKNLHLEKMVLGVGQVLHLFSVV

SEQ ID NO: 177956 - protein, 128 aa, Glycine max
  Clone ID: PAT_MRT3847_13170C.1.pep
KKTFSPFFWFLLRKLPPPFGPMVQNPSPVCLNFLEEKKFFKGPALVFFTRYLRGRPFGFFPPQNGGHFGGFWRPIFRVTFWGRKVKIWDPPQRYGLKTPGGIHSILSKGKTGRFFCNTPNFFVKVLFS

SEQ ID NO: 177957 - protein, 96 aa, Glycine max
  Clone ID: PAT_MRT3847_131710C.1.pep
KTPGSYAFFFVGADKGNSLNSPKRLIKLVKVGGVIGFATPLWNGFVVAPPDAPPRKSVRYSRGFVLELTKALPVDPRIEICMLPVGDGIPISRRTK

SEQ ID NO: 177958 - protein, 54 aa, Glycine max
  Clone ID: PAT_MRT3847_131711C.1.pep
HSIKIKFTILENNTTSFQNDKVIYNIHMGSNTLDVTYGTNSGKWYSLNSGMKCQ

SEQ ID NO: 177959 - protein, 124 aa, Glycine max
  Clone ID: PAT_MRT3847_131712C.1.pep
PTRPRTRLPSPSFQFLTKPKTRKKVFFKLLSLPSNSIFNINIICYLQAFFYADINQFPMLIPTAIKANPILPLPKPHLDLYNLHLNLPRLLSSLPCKYQNVQRPFFQYYLPQLEIQHKQNLYIF

SEQ ID NO: 177960 - protein, 64 aa, Glycine max
  Clone ID: PAT_MRT3847_131713C.1.pep
KKKKKKKKKKKKKKKKKKKKKKKKKKKKKKKKKKKKKKGGAVLGVPTFLPRPCNVLFFFWGPLI

SEQ ID NO: 177961 - protein, 129 aa, Glycine max
  Clone ID: PAT_MRT3847_131714C.1.pep
WSYAITYTDNLGVSLATAWYTASGTNEGATYIRMCAALAATSPGTLSICMSRVANGEPSTPRRGIPTHPGGCVLIPSSRAMQTCLNHVSKGLHSSGRTTSGSFSECELRLCHQHRPHTLGTLGGGGGGG

SEQ ID NO: 177962 - protein, 62 aa, Glycine max
  Clone ID: PAT_MRT3847_131715C.1.pep
LSQVTIAIIISTQSPSSVVYPQVMLCRPILGFSHLLYALTQDLTITTLSLLNKVLILLHSSL

SEQ ID NO: 177963 - protein, 38 aa, Glycine max
  unsure (1)..(38): unsure at all Xaa locations
  Clone ID: PAT_MRT3847_131716C.1.pep
ARNSARERAQAPGEAGXLSLRHSQISFYLKRFKRKLEL

SEQ ID NO: 177964 - protein, 80 aa, Glycine max
  unsure (1)..(80): unsure at all Xaa locations
  Clone ID: PAT_MRT3847_131717C.1.pep
LIISHDSQANEMLHHKANXGYLSYHTGQSLEKINQDTDCDFFMKAKEAKEYGFIDGAIMNPLKALQPLPAAVEGKDRDSI

SEQ ID NO: 177965 - protein, 197 aa, Glycine max
  Clone ID: PAT_MRT3847_131718C.1.pep
VRQNCLTGSVGINLPHSLWLQWDDQVIFSVLDDLLEISQTHSQKDFRNIEGTLVLALKLLCKVFLQLIQDLSQLPGFNKLWLAVLSRLEIYMKVKVRGRRSEKLQELVPELLKNTLLVMKAGRVLVQSNTVDGSSLWELTWLHINNFAPSLQSEVFPEQDSEHLQHKQTEKVEGLGPEESNSVSSNETAGKNGPGIG

SEQ ID NO: 177966 - protein, 67 aa, Glycine max
  Clone ID: PAT_MRT3847_131719C.1.pep
HQPSTKNSFEIQPLLRQKKPEIEVDAPLHFITVPCLRIQTAELKKEETFLAKLYVLFSGARPTCANF

SEQ ID NO: 177967 - protein, 62 aa, Glycine max
  Clone ID: PAT_MRT3847_13171C.1.pep
ARRSWFIISSRAVCTILISFYVCQEMLRLIKRMRMCTFGARLFERNRAGVCWKSNQVTTRFP

SEQ ID NO: 177968 - protein, 364 aa, Glycine max
  unsure (1)..(364): unsure at all Xaa locations
  Clone ID: PAT_MRT3847_131720C.1.pep
MGRASSLLIIFLVLGSSFATYNVVTMIRHYGSSEGVAVHDGALFFDPITEMPDHVKNRKTSKVPFHVALTATDAPYNKWQCRVMYYWYKQQKKLPGSEMGGFTRILHSGNPDNLMNEIPTVEVDPLPAGFDRGYIGLNRPXAFVQWLEKTKIEEEYVLMAEPDHIFLRPLPNLAFGGHPAAFPFFYIRPDQNEKTIRKFYPEELGPVTNVDPIGNSPVIIRKDLIAKIAPTWMNISLKMKEDPETDKAFGWVLEMYAYAVASAVHGVRHILRKDFMLQPPWDLETNKKYILHYTYGCDYNMKGELTYGKIGEWRFDKRSHLRGPPPKNLPLPPPGVPESVVTLVKMVNEASANIPNWDSSSTSS

SEQ ID NO: 177969 - protein, 49 aa, Glycine max
  Clone ID: PAT_MRT3847_131721C.1.pep
GRPFLANTVVSLFGTPPERRGAFRGPRQPSAQILESQTQHQRGGKKNES

SEQ ID NO: 177970 - protein, 161 aa, Glycine max
  unsure (1)..(161): unsure at all Xaa locations
  Clone ID: PAT_MRT3847_131722C.1.pep
TLKPVLSIFIGGILPYGAEIIELVIILTXIRLNQLYYIYGILLIVPVNLMITCAEITIVQCYSQPYSEDNKGRWEPYLSAGCCALNLFLYXELYWNTRSEITELESRTRYFSFMTLETYAFYVWTGTKSIYARLCVDTGSTATEKSDRFEAHIRGLMQREA

SEQ ID NO: 177971 - protein, 83 aa, Glycine max
  Clone ID: PAT_MRT3847_131723C.1.pep
SGYTGVKNENGILDCLRIQLETCRRKVSMSLFINKSVGTTGQGCELITGLRDSEEGDNQFFVPFYFLYIVSTNFTLIRSKHNL

SEQ ID NO: 177972 - protein, 80 aa, Glycine max
  unsure (1)..(80): unsure at all Xaa locations
  Clone ID: PAT_MRT3847_131724C.1.pep
PPKFVIPLTNKEKEKNFVLLKGSKLPQRPKKRAKFIQRTLNLVSPGTWLCDLTLERYEVREKKISKXETNRVESNGQHGL

SEQ ID NO: 177973 - protein, 150 aa, Glycine max
  Clone ID: PAT_MRT3847_131725C.1.pep
MRVGQSNGSVREIASPDRGAHDKRGTQNTPLNDNNNKSVVSSDTAHDSKKGGGGSPSGSGDAAPPVWPPKFVIALTNKEKEEDFLLLKGSKLPQRPKKRAKFIQRTLNLVSPGTWLCDLTLERYEVREKKISKKRPRGLKAMGNMDSDSE

SEQ ID NO: 177974 - protein, 177 aa, Glycine max
  Clone ID: PAT_MRT3847_131726C.1.pep
SEAAADLDSGRKSTKKRKRTADASNKEDRVADEEKKGHKKDKTDRKNDGPEMDNKSTKKKAKKDDKPLDKGFALEENVSKVEKKLKKKHKNEEQSELDVIDDAEASFAELFKINDAENLNLVDEMRARDKVPKDVKLAGDTVTSFAKRKNAKMQNIESLSAPEAEVGMGGPSTWGDE

SEQ ID NO: 177975 - protein, 136 aa, Glycine max
  Clone ID: PAT_MRT3847_131727C.1.pep
RGIASPDRGAHDKKGTHNNHLNGNNTNKSVVSSDTAHESKKGGGSPSGSGDVAPPVWPPKFVIALTNKEKEEDFLLLKGSKLPQRPKKRAKFIQRTLNLVSPGTWLCDLTLERYEVREKKISKKTKRVESNGQHGL

SEQ ID NO: 177976 - protein, 154 aa, Glycine max
  Clone ID: PAT_MRT3847_131728C.1.pep
EEAKATGVLGELPHRTGVRTIRGGPKTTTLNDNNNKSVVSSDTAHDSKKGGGGSPSGSGDAAPPVWPPKFVIALTNKEKEEDFLLLKGSKLPQRPKKRAKFIQRTLNLVSPGTWLCDLTLERYEVREKKISKKVGEKKRPRGLKAMGNMDSDSE

SEQ ID NO: 177977 - protein, 47 aa, Glycine max
  Clone ID: PAT_MRT3847_131729C.1.pep
IWTPEKGFALKTRVHIVIILFNFTKGINHAANKLKEHGDAGGDPLTA

SEQ ID NO: 177978 - protein, 153 aa, Glycine max
  Clone ID: PAT_MRT3847_13172C.1.pep
MSPSFVFDPPSDEEIEHSEHEEEEEEESVGEPESGSESESEGEGGEVEEGHKEARVPKKKKKKTQSPWDFAKYTESVAEEHARRSTTSVDEKISKALKQRSTPLVAELDHSSESEPDEQEDYRPEEEDEEEGNDGDIKSFFAPSGGTSFHADS

SEQ ID NO: 177979 - protein, 135 aa, Glycine max
  Clone ID: PAT_MRT3847_131730C.1.pep
FHKLCFFVSLSKFQLGFLLMGTSLLRSHDCLQGHHDALSPTPSSIRSQRNPNPSPNPYQTRRRRLHDGDRSGMVVKGPSANLVMGHVKILKRGETLSAETRGGDDEGFDLVLGSTNRLGPDPSSVPVPGFLAMRR

SEQ ID NO: 177980 - protein, 168 aa, Glycine max
  Clone ID: PAT_MRT3847_131731C.1.pep
NYQFGFNISWARLHVLGYDIYISQDSSCESDVFELLVKPVRLVRDNELLDQEFVNIMHALQVVHFYCWKGSALLNNMSNIDSKVLKVTEVQREKISGLNSVLLNDNDFASKVFCNMPSEEKGCICFDWSEVLAAVAAWEDYASNLSKQIHLQLPYWRMHESIYNVQLE

SEQ ID NO: 177981 - protein, 50 aa, Glycine max
  Clone ID: PAT_MRT3847_131732C.1.pep
YVSIEGRLQCMILLQLLSHEKSFVDWPLWQASLPLDIIQRNLPIFYQHLA

SEQ ID NO: 177982 - protein, 41 aa, Glycine max
  Clone ID: PAT_MRT3847_131733C.1.pep
QFSFHVKIRTVEFGYNIINNSPPHNNLYQNHHYSERIRATT

SEQ ID NO: 177983 - protein, 125 aa, Glycine max
  unsure (1)..(125): unsure at all Xaa locations
  Clone ID: PAT_MRT3847_131734C.1.pep
WGGRDDAKVSIPATVILRYMFAPAEMRADENLHLELEEDVKEECTKLGPVDSVXICENHPQGVVLVRFKDRKDAQKCIELMNGRWFGGRQIHASEDDGSVNHALVRDLEEDAIRLEQFGAELEGD

SEQ ID NO: 177984 - protein, 94 aa, Glycine max
  Clone ID: PAT_MRT3847_131735C.1.pep
FSNVIIDRYSYLMMVVAVEVVDGLKLKLRGTTYDLTDSNSNDVPQGRCSPRTFQYATRKLHQWPERLFCDSGHATGSMPPFKFFFLLMIMKIWV

SEQ ID NO: 177985 - protein, 236 aa, Glycine max
  Clone ID: PAT_MRT3847_131736C.1.pep
ISGPFPHGFSELKNLTSLFLQSNNISGQLPLDFSVWNNLSVVNLSNNSFNENIPFSISKLTHLTSLVLANNSLSGQIPDLDIPSLRELNLANNNLSGVVPNSLLRFPSSAFAGNNLTSAHALPPAFPMEPPAAYPAKKSKGLSEPALLGIIIGACVLGFVLIAVFMIVCCYQNAGVNVQAVKSQKKHATLKTESSGSQDKNNKIVFFEGCNLAFDLEDLLRASAEILGKGTFGMTY

SEQ ID NO: 177986 - protein, 172 aa, Glycine max
  Clone ID: PAT_MRT3847_131737C.1.pep
AKRKAGKPPTIDDNHHSGFSVEKKPKREWSCGLCQITTPNEKGLNNHLEGKKHKAKASLRTKKIGLDARLDGQKLQRGITSTNIGILEPRKEDQVVQNSQGLGGLDNENEIATSKETGETNALTKRKKFKFYCAFCKVQTASEIIMQSHKNGKRHLAMIKKFSQNNVVANFY

SEQ ID NO: 177987 - protein, 376 aa, Glycine max
  unsure (1)..(376): unsure at all Xaa locations
  Clone ID: PAT_MRT3847_131738C.1.pep
MPGRRRRKLKSLSDTITDSRRASVEVENEYLELQTWSDLPTELLELILSRLSLDDNVRASVVCKRWHSVATSVCVVNQSPWLMYFPKFGDWYEFYDPAHRKTYSIELPELRGSRVCYTKDGWLLLYRPRTHRVFFFNPFTMEIIKLPRFEMSYQIVAFSCAPTSPDCVLFTVKHVSPTVVAISTCYPGATEWTTLSYQNRLPFVSSIWNKLVFCNGLFYCLSLTGWLXLFNPSERTWSVLAVPPPKCPENFFSQKXWKGKFMTEHEGDIIVIYTCSSENPIIFKLDQMLMEWEEMTTLDGVTLFASFLSSHARIDLPGIMRNSVYFSKVRFYGKRCISFSLDDCRYYPRKQWHDWGEQDPFENIWIEPPKDFSGFT

SEQ ID NO: 177988 - protein, 81 aa, Glycine max
  unsure (1)..(81): unsure at all Xaa locations
  Clone ID: PAT_MRT3847_131739C.1.pep
AAAPXFNSRFLFLTQTFSLARGTTSLGKIKFPIKGQKKDSHTNLDGNQRKGLHQGSLLTGVKHKKPLPLPLQREKKHHHTH

SEQ ID NO: 177989 - protein, 599 aa, Glycine max
  unsure (1)..(599): unsure at all Xaa locations
  Clone ID: PAT_MRT3847_13173C.1.pep
MANHSLVLDNNTSVSTVTVAEQPLVIGQEFPDVETCRRTMKDIAIAMHFDLRIVKSDRSRFIAKCSKEGCPWRVHVAKCPGVPTFTVRTLHGEHTCEGVQNLHHQQASVGWVARSVEARIRDNPQYKPREILQDIRDQHGVAVSYMQAWRGKERSMAALHGTFEEGYRLLPAYCEQIRKTNPGSIASVVATGQENCFQRLFISYRASIYGFINACRPLLELDRAHLKGKYLGTLLCAAAVDADDALFPLAIAVVDSESDENWMWFMSELRKLLGVNTDNMPRLTILSERQRGLVEAVETHFPTASHGFCLRSVSENFRDTFKNTKLVNIFWNAVYALTAAEFESKITEMMEISQDVISWFQQFPPYLWAVAYFEIRLXGHFTLGVTELLYNWALECHELPVVQMMEHIRQQMVSWFNDRQDMGMRWTSILVPSAEKRILEAIADAHCYQVLRANEVEFEIVSTERTNIVDIRSRECSCRRWQLYGLPCAHAAAALISCGHNAHMFAEPCFTVQSYRMTYSQMINPIPDKSQWRDLGEGAEGGGGARFDIIICPPKTRRPPGRPKKKVIRVENFKRPKRVVQCGRCHMLGHSQKKCTMPI

SEQ ID NO: 177990 - protein, 50 aa, Glycine max
  unsure (1)..(50): unsure at all Xaa locations
  Clone ID: PAT_MRT3847_131740C.1.pep
SALLKNNVYGANTPDVNCTIXKLAVNVHNIFGIETIPQKCVHKPTEYIHA

SEQ ID NO: 177991 - protein, 153 aa, Glycine max
  Clone ID: PAT_MRT3847_131741C.1.pep
MVFVSCIPKTLKPSIPLPMKDGRTLSSYGSVYIPPHQRLRSLANFNNSLSPVRAKLHENPTPAVTTLQPSFTEQLPDKQRSRFVSSYDDTVSEEGSDREFQPPSLPNASPIDNTDEWKRKFTMLLRDKSKQELVSREKKDRRDFDRIAVLASR

SEQ ID NO: 177992 - protein, 110 aa, Glycine max
  Clone ID: PAT_MRT3847_131742C.1.pep
AITGCRTVGLWLQKLFGSFFQESSNLFLLLGVRFLKGKKITLCAGHRLRESFSFPLLVYLLNTLLFDIGLRVIFKLFTVTFLILLLNFKFKLVKSWISAPTLLFVIGLPG

SEQ ID NO: 177993 - protein, 84 aa, Glycine max
  Clone ID: PAT_MRT3847_131743C.1.pep
RLGPCWCGRLLVLCRLPLSVGLPRPILCPLWSRGWGGCFFHVWLILCPPLEGGNSPPGHKVHCKELSAFFHKWHALELGSFKHS

SEQ ID NO: 177994 - protein, 68 aa, Glycine max
  Clone ID: PAT_MRT3847_131744C.1.pep
IKLPISIYPIIMAVDKQTTYVLWGQCTEILILILKPPVNIVFSFEMIKDPTPILDPRVMAYLVPLSKV

SEQ ID NO: 177995 - protein, 84 aa, Glycine max
  Clone ID: PAT_MRT3847_131745C.1.pep
VLFLLPPYEGKPEEEPGARIDRFTAALTPKAIQTLSEDFSARAIKKNVRIHGHHKNAKHMCARVTGDNLGIRERSADLILQNRL

SEQ ID NO: 177996 - protein, 42 aa, Glycine max
  unsure (1)..(42): unsure at all Xaa locations
  Clone ID: PAT_MRT3847_131746C.1.pep
SMNXIYKSSEITVRRMTSLSTYIQDDANFHKFPVVSFFWAQD

SEQ ID NO: 177997 - protein, 121 aa, Glycine max
  unsure (1)..(121): unsure at all Xaa locations
  Clone ID: PAT_MRT3847_131747C.1.pep
MMNNLTIETEDSFASLLELAANNDVEGFKRMIERDPSCVDEVGLWYSRQKGSRRMVNELRTPLMVAATYGSIDILDLILSLSGCDINNPVAFDKSTALHCAASGGSENXVDVXILLLPAGA

SEQ ID NO: 177998 - protein, 54 aa, Glycine max
  Clone ID: PAT_MRT3847_131748C.1.pep
MGVRKNKRSSKGKKGGQKKAADRFAKKDWYDTKAPSLFQVNDVRRTRVARTHGS

SEQ ID NO: 177999 - protein, 88 aa, Glycine max
  Clone ID: PAT_MRT3847_131749C.1.pep
TTPMNPCMLHLQKLAVELKGDIWLSMLLKPVLVSCNHLLCRSCHYERIAAGPACAVRYAAFDLTDIMFMLSVDNVWMISLSVDATCLR

SEQ ID NO: 178000 - protein, 87 aa, Glycine max
  Clone ID: PAT_MRT3847_13174C.1.pep
SESAGSSGTLHRSPRVIYRDGPLAWVLNCHKRISGLAWESKSRMIVFLSLWVALHGGQACSNGERGAQAMGLMRWPMYIFFLCVWYC

SEQ ID NO: 178001 - protein, 93 aa, Glycine max
  Clone ID: PAT_MRT3847_131750C.1.pep
MLERELLGREIMNVIACEGSERIERPETYKQWYVRNTRAGFKQLPLNEELMAKFRTKLKEWYHRDFVFDEDNKWMLQGWKGRILYASTCWVPA

SEQ ID NO: 178002 - protein, 76 aa, Glycine max
  Clone ID: PAT_MRT3847_131751C.1.pep
GRAATTMLADGCPYLYAIEEKGYNHGLSTTQMHVMDAICDAHMCAYGLNPGISRTRLFGTITIPLLSYLFLMRVQS

SEQ ID NO: 178003 - protein, 89 aa, Glycine max
  Clone ID: PAT_MRT3847_131752C.1.pep
MANSRIARFFMEVAPPQYVTVMRHRTSKMLDTITEDEREISTSDSVMSPPKKSKSAVAVAASSASASVTNVKGRCFLKEVHRSLSILNQ

SEQ ID NO: 178004 - protein, 232 aa, Glycine max
  unsure (1)..(232): unsure at all Xaa locations
  Clone ID: PAT_MRT3847_131753C.1.pep
ELGRFEYIPTSFLSILFIFCFCPMVLSLLSQNQTKTMINLSKNLPPPVPWNASYPPCSWMGVDCDPTNSSIVGISLIRYSLSASDFLPLVCKIQTLEHFDVSNNRLSSVPDGFITECGKIKGLKKLNFSGNMLGGDLPSFHGFDALESLDMSFNNLEGSIGIQLDGLVSLKSLNLTSNNFGGSIPTKLGNSTVLEHLVLSVNQFGGKIPDELLSYENLTEVDXRANLLFRSI

SEQ ID NO: 178005 - protein, 41 aa, Glycine max
  Clone ID: PAT_MRT3847_131754C.1.pep
SSGTHYVRLSRRVLGMSGSIMSNQTNAAESESRVIFDLCTL

SEQ ID NO: 178006 - protein, 50 aa, Glycine max
  Clone ID: PAT_MRT3847_131755C.1.pep
ILFGKSETSSSLLHRLVFPWHERTVAVPSYILKEPFPCRNPGSENVQIWG

SEQ ID NO: 178007 - protein, 55 aa, Glycine max
  Clone ID: PAT_MRT3847_131756C.1.pep
GLAFEFYFLIIVTLVKVTLVTKLVAYPKASYRDSIHTRIDVHIHRRSRPIPVHPC

SEQ ID NO: 178008 - protein, 90 aa, Glycine max
  unsure (1)..(90): unsure at all Xaa locations
  Clone ID: PAT_MRT3847_131757C.1.pep
KARPAQVRQGVRWKLVLFFWFWVGVGFFFNLKRFGCGGNWGCGSSCRCGTGCGGCRMSPDLGSTEXTTTGTLVMGGAPVKVQFGGAEMGV

SEQ ID NO: 178009 - protein, 342 aa, Glycine max
  unsure (1)..(342): unsure at all Xaa locations
  Clone ID: PAT_MRT3847_131758C.1.pep
MGSLERSKKKVLLWKKAMLHFSLCFVMGVFTGLAPTGKSSLFSTTVGVSNRTEFAPQPSEMLHLTTNVNRIWIAPMPDTMPVKPRILENEKKKXNKKLHAKKQPQLKPRRLIIIVTPTSTKLPHQAVFLRRLANTIKLVPQPLLWIVVEAKTNSKELPEILRKTGIMYRHVVFKENFTELEAELNHQRNLALKHIEHHRLNGIVHFAGLSNVYDLQFFHQLRDIEVFGTWPTALLAAHRKKVKIEGPVCDSSQVIGWHLKNMNNETDTITPPIHISSFAFNSSILWDSERWGRTSSVQDTSQNSIKFVKQVVLEDEAKLKGIPPEDCSKILLWRFNFRARTH

SEQ ID NO: 178010 - protein, 125 aa, Glycine max
  Clone ID: PAT_MRT3847_131759C.1.pep
MDSFRVFGTWPTALLAAHRKKVKIEGPVCDSSQVIGWHLRNMNNETDTITPPIHISSFAFNSSILWDPERWGRTSSVQDTSQNSIKFVKQVVLEDEAKLKGIPPEDCSKILLWRFNFRARTITNH

SEQ ID NO: 178011 - protein, 46 aa, Glycine max
  Clone ID: PAT_MRT3847_13175C.1.pep
KYKEVLLLRIKEGVVYSTVLEKTTGCNHNTSLYFYYQFHILDLMIS

SEQ ID NO: 178012 - protein, 105 aa, Glycine max
  Clone ID: PAT_MRT3847_131760C.1.pep
GCWCKFSPPRFSLALLWRVDGLLVPSGGGFSFEPNGSQEVFYHACLFFKFLRRRSPYGRAFLVLYGTRGVGSVLTTVIRLWSPQNRLKKLSWGVRCYRKGGLGGA

SEQ ID NO: 178013 - protein, 167 aa, Glycine max
  Clone ID: PAT_MRT3847_131761C.1.pep
TRPVSITFLNFYPHISLYYFNSAYVEKEKEIMELGLSLGDSSRPLLGFMEKPREASNQLGLGFNTTLSIGPIITTHKDHQQDEDEEYQEEEEEETKPKNNNTHRIQGPDGLSSNPNNNNNTVLHQLDLLPQLALPWHPPSENGSLSSELGGSSRGLDVNAQPPAVET

SEQ ID NO: 178014 - protein, 173 aa, Glycine max
  Clone ID: PAT_MRT3847_131762C.1.pep
SLRKQGMKEKYVSPIIAFYANKWVLSKKTRQFLESSCDKVGEGGMNSKASVILQGVVDLLPVGDKARKVIPVGFYFALLSRSLELGLRIESKAKLQDQITSLLHFSQVEDFLLPESGAESMSSSMEFVTMESIISAYVASSSRVSHTPEASRYRVAELWDAYLFNVAADPDMG

SEQ ID NO: 178015 - protein, 41 aa, Glycine max
  Clone ID: PAT_MRT3847_131763C.1.pep
MPNEKAQNNIVVVGHVDPEEATTINELKKPVRTKESSKQAI

SEQ ID NO: 178016 - protein, 95 aa, Glycine max
  unsure (1)..(95): unsure at all Xaa locations
  Clone ID: PAT_MRT3847_131764C.1.pep
TRYWGAPLPLHSFKFFFCXPSLFFFCYYNTLSKLFFSRFSGQDHFQIAFAYSARGSSFFSLGFFCFLTRERRLKLLIKQRFPHLHPLFLVFFVSF

SEQ ID NO: 178017 - protein, 110 aa, Glycine max
  unsure (1)..(110): unsure at all Xaa locations
  Clone ID: PAT_MRT3847_131765C.1.pep
MGVFTFEDEINSPVAPATLYKALVTDADNVIPKALDSFKSVENVEGNGGPGTIKKITFVEDGETKFVLHXKYETKGDAEPNQDELKTGKAKADALFKAIEAYLLAHPDYN

SEQ ID NO: 178018 - protein, 52 aa, Glycine max
  Clone ID: PAT_MRT3847_131766C.1.pep
RSSVVVIALKATKGASLHYIIGKWEIMFLPVLHDKLVPLGSLPQRLMVHHVR

SEQ ID NO: 178019 - protein, 158 aa, Glycine max
  Clone ID: PAT_MRT3847_131767C.1.pep
MGVFTFEDEINSPVAPATLYKALVTDADNVIPKALDSFKSVENVEGNGGPGTIKKITFLEDGETKFVLHKIESIDEANLGYSYSVVGGAALPDTAEKITFDSKLVAGPNGGSAGKLTVKYETKGDAEPNQDELKTGKAKADALFKAIEAYLLAHPDYN

SEQ ID NO: 178020 - protein, 120 aa, Glycine max
  unsure (1)..(120): unsure at all Xaa locations
  Clone ID: PAT_MRT3847_131768C.1.pep
MGVFTFEDEINSPVAPATLYKALVTDADNVIPKALDSFKSVENVEGNGGPGTIKKITFLEDGETKFVLHKIESIDEAXTVKYETKGDAEPNQDELKTGKAKADALFKAIEAYLLAHPDYN

SEQ ID NO: 178021 - protein, 127 aa, Glycine max
  Clone ID: PAT_MRT3847_131769C.1.pep
MGVFTFEDEINSPVAPATLYKALVTDADNVIPKALDSFKSVENVEGNGGPGTIKKITFLEDGETKFVLHKIESIARHGGGSAGKLTVKYETKGDAEPNQDELKTGKAKADALFKAIEAYLLAHPDYN

SEQ ID NO: 178022 - protein, 71 aa, Glycine max
  Clone ID: PAT_MRT3847_13176C.1.pep
RLEIRSIGDPFPRQVISAMLSTRTVMTQQGGISLSPSRRSAPGTWGQCPHHLQRSVPYTSAHLPRHRLRLS

SEQ ID NO: 178023 - protein, 114 aa, Glycine max
  unsure (1)..(114): unsure at all Xaa locations
  Clone ID: PAT_MRT3847_131770C.1.pep
RGSFPKAIKLGKPGVFPSQGCKKPAPEIKFGGPKKKILPSQPPGGKLGSLKGAPPGFFFFFFWFFFFFFFFFFFFFFFFFFFFFFFXXXFFFFFFFFXXYEISYFISSIKTYIA

SEQ ID NO: 178024 - protein, 158 aa, Glycine max
  Clone ID: PAT_MRT3847_131771C.1.pep
MGIFTFEDEITSPVAPATLYKALVTDADNIIPKALDSFKSVENVEGNGGPGTIKKITFVEDGETKFVLHKIEAVDEANLGYSYSVVGGAALPDTAEKITFHSKLAAGPNGGSAGKLTVEYQTKGDAQPNQDQLKTGKAKADALFKAIEAYLLANPDYN

SEQ ID NO: 178025 - protein, 862 aa, Glycine max
  Clone ID: PAT_MRT3847_131772C.1.pep
HFFIEKEVTSTLVMDSLYSGLKALEGQNKCKKGRVKLLDAEEIPAPIVHAEKDMFVLVDDVLLLLERAAIEPLPPKDEKGPQNRTKDGNSGEDFSKDSIERDERRLTELGRRTLEIFVLAHIFSNKIEVSYQEAVALKRQEELIREEEAAWLAECEQKAKRGNEREKKSKKKQAKQKRNNRKGKDKGREERPIVSVNDKQQHNAADEKNDSNMEEAQAVSEKLDPMEDVSDVSDSVDGVAETLQLDSEDRDASPVNWDTDASEVNPPTEARYNGIGSVSTIQNGTSEKRSSSVIDDSSSTCSTDSLPSVVMNDPHKGNCFSNYKVQKSPSRGKNQGKTSSNVGRLTIEIDSLPSGSAADAGDFNDESGNGKIGKSESEVAVISLQDRLKWAEKHVVRKEEEVLSLNKLGIKDLVETKRPVDNESLQKEKISTVPSSPISPPRNLSVQMKLEHKTSATVDPVHVRKTSSSGSQQTDKDPSSPFTSASPVPAVSKTEIQKPSTARLSERSVAQVPMMSRPSSAPLVPGPRPTAPVVVSMVQTAPLLARSVSATGRLGPDPSPATHSHVPQSYRNAMMGNPVASTAASLAHSSSSSSGVIPSPGYSQPSSFVSSMFLSQSSDKMDTNTSQSGVPFGMITRDVLQNGPNWIDSSQRESSRSMHYDQPSGLNDVQNHDLYRPVHSRSMGNMSTEFPACTSGRQNQGELVDEFPHIDIINDLLDEEHGIGKASRASSVFHSLNDGPQLLNRQFTFPGDLGTDDDLGSSTSSCRLERSRSYHDAGFQQGYSTSGWHYDSLQDYVPQASTLSYGNGKVDGMIPNQWQVAGSDLSYLGMRNTENSYSYYQDYSNMACGVNGYTVFRPSNGP

SEQ ID NO: 178026 - protein, 158 aa, Glycine max; identical to SEQ ID NO: 178019
  Clone ID: PAT_MRT3847_131773C.1.pep

SEQ ID NO: 178027 - protein, 62 aa, Glycine max
  Clone ID: PAT_MRT3847_131775C.1.pep
QPHRIIVMDPPPITQIKHVVSMVILFSGHQVVLKGLRSVSSNERSPTNVMHLRKLLGLFKLE

SEQ ID NO: 178028 - protein, 85 aa, Glycine max
  Clone ID: PAT_MRT3847_131776C.1.pep
ISDIGSILMGRQRINLWQFQLCSYISSIYSKLCFYAVILSYRRSKVLCFDSVAVAYIVGSKPTTTCAMEFIYDSVRPGSVFNICS

SEQ ID NO: 178029 - protein, 85 aa, Glycine max
  Clone ID: PAT_MRT3847_131777C.1.pep
VDLGCLQARVAFSSTRGWRRTTETHGMTVFTRAELAHGIAQLLCHGILLSKRGRGQNSGHGHILGHLLQDLDKEANLHLRRLLQQ

SEQ ID NO: 178030 - protein, 60 aa, Glycine max
  Clone ID: PAT_MRT3847_131778C.1.pep
VRNGHGICLKFWPCFGPIPSYTNDGVWILHSHLFDHHSPYTSTLLDFRPVVVPISSTPEV

SEQ ID NO: 178031 - protein, 73 aa, Glycine max
  Clone ID: PAT_MRT3847_131779C.1.pep
APGTEREYRSGQQSVTGVTSVDDSNSYWRIRGKSATVCERGTPIKCGQPIRLTHVNTGRNLHSHHFTSPLSGN

SEQ ID NO: 178032 - protein, 76 aa, Glycine max
  unsure (1)..(76): unsure at all Xaa locations
  Clone ID: PAT_MRT3847_13177C.1.pep
HAVYAARGRQGSPEHRXGLYTLQGIDEINGKPTPNXNPHGNATQELEHGQPPREKTTPHNGKPRVLTLKQDPHYWP

SEQ ID NO: 178033 - protein, 79 aa, Glycine max
  Clone ID: PAT_MRT3847_131780C.1.pep
DFSAFLFGPPRFQNPPPLPFFFTHGIKGCLGPLNLPRVNLYVRFFGAQFAKQIFFPFFFLELVDPLGWDWFVSFRAVFV

SEQ ID NO: 178034 - protein, 82 aa, Glycine max
  Clone ID: PAT_MRT3847_131781C.1.pep
LHCFSFTAKQKLPRQKKGSKILTKLHPHTHDRTIIINSKQRKSKIPNSLTQRYKQTTNKLKKIKANNRSFSGKGGINEKREI

SEQ ID NO: 178035 - protein, 66 aa, Glycine max
  Clone ID: PAT_MRT3847_131782C.1.pep
FWRPILVSKTIQFTPKKHHLLILYLITSSSNTLTIATVKFQPLKSEQILYRKLINLAKKTQPFATN

SEQ ID NO: 178036 - protein, 79 aa, Glycine max
  Clone ID: PAT_MRT3847_131783C.1.pep
VSSPSEFILPFDNTNTSNITTKDTTRISLNKFLSPTSIFFKDFEEDDEAHTVNLSRPLAQSAPAITQSSLKASFDAFFQ

SEQ ID NO: 178037 - protein, 92 aa, Glycine max
  Clone ID: PAT_MRT3847_131784C.1.pep
LIQLVRYSCTADKYRSHILQTFHFQERSSLITRLGTFNDLEGTQRNSGYNVLEEPVSITGLETCSLSYKVHWPLSIVLSRKALTKYQLLFRF

SEQ ID NO: 178038 - protein, 71 aa, Glycine max
  Clone ID: PAT_MRT3847_131785C.1.pep
VERPLRIPPTMALIPNTYTSVKKPPPIPISQRSSIATFHFYAQCLCRNKFHLLKLISAVIPLLIDPLTPVF

SEQ ID NO: 178039 - protein, 125 aa, Glycine max
  unsure (1)..(125): unsure at all Xaa locations
  Clone ID: PAT_MRT3847_131786C.1.pep
HLQTIFVKLYHSSTSSRFSFSEELSRHHEKDRRLLVNLLSPYNSXLLLSTSENTKCFIVPFGEHLFLFAIFRPSLIAATQLSILREHALNRAIGRTYLLLLCSYSMASCNQIVLSPQVLRAISRD

SEQ ID NO: 178040 - protein, 53 aa, Glycine max
  Clone ID: PAT_MRT3847_131787C.1.pep
IPRALKVHLCYSQKLNHNQIIAIENLETFKKFSTLLSHLLSNQVPSFNASSLT

SEQ ID NO: 178041 - protein, 58 aa, Glycine max
  Clone ID: PAT_MRT3847_131788C.1.pep
SVCYFKKKKKKKKKKKKKKKKKKKKKKKKKKKKKKKKKKKKKKKKRGAPPLITSSPRK

SEQ ID NO: 178042 - protein, 272 aa, Glycine max
  Clone ID: PAT_MRT3847_131789C.1.pep
MIGRRDREGPLMRNNSTNSLRKSRVLTSVAIGVLIGCGFAFLFPNGFFVSDSVAPNRHIPLAGSKTQKNSAGCESSDRVNMLKSEFVAVSEKNAELKKQVRELTERLQLAEQGKDQAQKQFLTLGKQPKAGPFGTVKGLRTNPTVVPDQSVNPRLAKILEKVAVKQELIVCLANTNVKEMLEVWFTNIKRVGITNYLVAALDDETAKFCESNQVPVYKRDPDDGVDIIGRTGSNHAVSGLKFRILREFLQLGYSVLLSDVDIVHLQNPFDHL

SEQ ID NO: 178043 - protein, 67 aa, Glycine max
  Clone ID: PAT_MRT3847_13178C.1.pep
EASPLRKMFAVACIGGGIQGGGALKLSLLAPYGRLLGGRHAGGCLMWVWGPMWELGGQAIGDYYRDH

SEQ ID NO: 178044 - protein, 130 aa, Glycine max
  Clone ID: PAT_MRT3847_131790C.1.pep
MRIDFTGKAVYTAIWVAAVSLFMELLGFSTQKWLTAGGLGTVLISLAGREIFTNFLSSIMIHATRPFVVNERIQTKIKGYEVTGKVEHVGWWSPTIVRGSDCEAVHIPNHNLSVNVVRNLSKKSHWRIKT

SEQ ID NO: 178045 - protein, 538 aa, Glycine max
  unsure (1)..(538): unsure at all Xaa locations
  Clone ID: PAT_MRT3847_131791C.1.pep
CFQRTDWKKSSSRYILTSYFQPLLLWTGVMLICRDLDPLVLPSETSQAIKQRRLSFVRSLSTVLTFAYCSSSLIRQAQNICMGTNDSSDERNMRIDFTGKAVYTAIWIAAVSLFMXLLGFSTHKXLTAGGLGTVSISLAGREIFTNFLSSIMIHATRPFVVNERIQTKIKGYEVTGKVEVCIYHLTYXKGCLGGTENIMLFSHVSWWSPTIVRVSDCEAVHIPNHNLSVNVVRNLSKKSHWRIKTHLAISHLDVNKINSIIADMRKVLAKNPXIEQKKLHRRVFLENIDPENQALMILVSCFVKTRHSEEYLRVPTRPLLDLLRVISHHRARLATPIRTVQKMCSDTDLDVDPFDDTIPTRSRSKNNRPFPLINPPYKVKPSTTTNEDKDTKIDETLPSDFKVERDKFAATSSSVQKTSKSQKLKKERVGSSEKGTTSKNLSKSNEFGSGETTSPSKLDEEKSVMSSSSASHSLEENIVLDAALLGSKRTLAIDEELIQSIPAEPQEVAVHQDGSEPPISKDKKDGEMSSFPTPKQKD

SEQ ID NO: 178046 - protein, 61 aa, Glycine max
  Clone ID: PAT_MRT3847_131792C.1.pep
NQFHCHSPSCTIVESETRSWRYPLNHPIFLNPLFLPFVSLIISNTQSYIFLLTQYFKISPT

SEQ ID NO: 178047 - protein, 208 aa, Glycine max
  unsure (1)..(208): unsure at all Xaa locations
  Clone ID: PAT_MRT3847_131793C.1.pep
ARVRIDFTGKAVYTAIWIAAVSLFMXLLGFSTHKXLTAGGLGTVSISLAGREIFTNFLSSIMIHATRLFXXNAGFQPNFGGYEAAEKVEHVSWWSPTIVRVSDCEAVHIPNHNLSVNVVRNLSKKSHWGIKTHLAISHLDVNKINSIIAYMRKVLAKNPQVEQKKLHIRVFLENIDPENQALMVDDISFLFIGLYNIYKFINSNILLS

SEQ ID NO: 178048 - protein, 41 aa, Glycine max
  Clone ID: PAT_MRT3847_131794C.1.pep
RGLAFFPIFFFFVTWSPESSPSPTNSTNSIFLRMAFFQGFP

SEQ ID NO: 178049 - protein, 691 aa, Glycine max
  unsure (1)..(691): unsure at all Xaa locations
  Clone ID: PAT_MRT3847_131795C.1.pep
MAAPLACLVGSGLSIQSNKLTLGKDVNGRYLFSYHRLSAQSKESKTICIKASLDQRKHEGRRGFLKLLNVGVGLPVLLGGGKAYADEQGPSSSRMSYSIFLEYLXKVSIYKIGSFIIVEPSIIXINIMLSLASRXKIYRDKVVAQTLARTSMEXLPILLLDVVIIEQQSGSQMXNYLGIFRSXMLEVGRRCFLSRLFPGGMGGPGGGFPLAFGQSKAKFQMEPNTGVTFDDVAGVDEAKQDFMEVVEFLKKPERFTAVGARIPKGVLLVGPPGTGKTLLAKAIAGEAGVPFFSISGSEFVEMFVGVGASRVRDLFRKAKENAPCIVFVDEIDAVGRQRGTGIGGGNDEREQTLNQLLTEMDGFEGNTGIIVIAATNRVDILDSALLRPGRFDRQVTVDVPDIRGRTEILKVHGSNKKFEADVSLEVIAMRTPGFSGADLANLLNEAAILAGRRGKTAISSKEIDDSIDRIVAGMEGTVMTDGKSKSLVAYHEVGHAICGTLTPGHDPVQKVTLVPRGQARGLTWFIPADDPTLISKQQLFARIVGGLGGRAAEEVIFGEPEVTTGAAGDLQQITSLAKQMVTTFGMSDIGPWSLMDSSAQSDVIMRMMARNSMSEKLAEDIDAAVKRLSDEAYEIALSQIRSNREAIDKIVEVLLEKETMSGDEFRALLSEFVEIPAENRVPPSTPSPVVV

SEQ ID NO: 178050 - protein, 63 aa, Glycine max
  unsure (1)..(63): unsure at all Xaa locations
  Clone ID: PAT_MRT3847_131796C.1.pep
FQLXITGLCXFYRVPXTPNRGQLGPQLTRLSXKKXCNPXAGXRGXXPXXGXXWRXXXKQTXXX

SEQ ID NO: 178051 - protein, 520 aa, Glycine max
  Clone ID: PAT_MRT3847_131797C.1.pep
KWAKRKSRRRKTASWLRECVLQLGPTFIKLGQLSSTRSDLFPREFVEELAKLQDMVPAFSPKKARKFIESELGAPINILFEEFEDRPIAAASLGQVHRAILHNGEKVVIKVQRPGLKKLFDIDLKNLKLIAEYFQRSETFGGPLRDWIGIYEECTTILYQEIDYINEGKNADRFRRDFRNIKWVRVPLVYWDYTASKVLTMEYAPGIKINYVDTLASRGYDRLRISSHTMEAYLIQILRTGFFHADPHPGNLAVDVDEAIIYYDFGMMGEIKSFTRERLLELFYAVYEKDAKKVMQCLIDLGALQPTGDLSSVRRSIQFFLDNLLSQTPDQQQTLSAIGEDLFAIAQDQPFRFPSTFTFVIRAFSTLEGLGYILNPDFSFVKIAAPYAQELLDIRQKRPTGPQLVEEIRKQADDARTNSISMPYRVQRIEEFVKQLEAGDLKLRVRVLESERAARKATILQMATMYSVLGGTLLNLGVTLSSQGNQAFANGSFIGAGILGALFLRSMQRVKKLDKFENMI

SEQ ID NO: 178052 - protein, 75 aa, Glycine max
  Clone ID: PAT_MRT3847_131798C.1.pep
KALLTGNPLKTPPFFHPPPLGKWFKKPHSLRPPGGKPWKAKNPSPKQGLNRNFGLSGLNKKTYLFGRSLGGRAWV

SEQ ID NO: 178053 - protein, 74 aa, Glycine max
  Clone ID: PAT_MRT3847_131799C.1.pep
VWEKIVDFGWTGGIEKISEGGRVGWVLKIFRCRVDGLYLFVKMGGFVTSLGFFGGGYGLFLGGLFIKSISKKED

SEQ ID NO: 178054 - protein, 49 aa, Glycine max
  unsure (1)..(49): unsure at all Xaa locations
  Clone ID: PAT_MRT3847_13179C.1.pep
RPSQTIYAQFIGHHTRQDYKHTRRLPLEAPXYALLHRPYRLPHTCPAII

SEQ ID NO: 178055 - protein, 67 aa, Glycine max
  unsure (1)..(67): unsure at all Xaa locations
  Clone ID: PAT_MRT3847_1317C.1.pep
WVPRPSSLGVXCPVCFLFSPCFXCVLRXWFSXPFXRVXVFPVGLCLSFALGSFSSGXCFLAPXLEVX

SEQ ID NO: 178056 - protein, 85 aa, Glycine max
  Clone ID: PAT_MRT3847_131800C.1.pep
FLKCNVNAPLVVFITHRMEKQYVYGKQTLNWKAFGIPVVDRLYSVTNGSDLRNLYLKWFYPFQNPIEEALENCLVSMDLKNMCNE

SEQ ID NO: 178057 - protein, 122 aa, Glycine max
  unsure (1)..(122): unsure at all Xaa locations
  Clone ID: PAT_MRT3847_131801C.1.pep
QVLVVHAWVNAQNVKDMIXSIFQKIANFKEELKNLLPKEVESARVAYESGKAAIPNKIQECRSYPLYKFVREELGTGLLTGEKVRSPGEEFDKLFTAMCQGKIIDPLLECLGEWNGAPLPIC

SEQ ID NO: 178058 - protein, 29 aa, Glycine max
  Clone ID: PAT_MRT3847_131802C.1.pep
HAFVHAYVHAFAQTRSGIIFTFPLNRKYH

SEQ ID NO: 178059 - protein, 119 aa, Glycine max
  unsure (1)..(119): unsure at all Xaa locations
  Clone ID: PAT_MRT3847_131803C.1.pep
GMNIFDLDAWRKTDMSXTDHHWVEQNIKSDFSLWQLGTLPPGLIAFHGHVHTIDPFWHMLGLGYQENTSFADAETAGVIHFNGRAKPWLEIAFPHLKPLWTKYIDFSDYFIKSCHIRAL

SEQ ID NO: 178060 - protein, 60 aa, Glycine max
  Clone ID: PAT_MRT3847_131804C.1.pep
LEMKHCVYSWVTLERTEIIDCVLLCMRCTTTMTVGCYSPLTPLSLFLEEYSRPCCYKHIA

SEQ ID NO: 178061 - protein, 115 aa, Glycine max
  Clone ID: PAT_MRT3847_131805C.1.pep
DKIDDIRSIRVRGLFSTKSSTNLRRKVGKRWKGRREPYHTKTTFKNPWKKSKTCGGFCNSSRTEMKSPENSKACGCGCEHSEKSKSVEKKYSVWEWNSMLGLKEGVVHGSVVDNA

SEQ ID NO: 178062 - protein, 181 aa, Glycine max
  Clone ID: PAT_MRT3847_131806C.1.pep
RLQTQVLSVKIGVVGAGTASIFKEALQSSNRSLDIAFVPSKATGKVLATELPKIGSKCTVLYPASAKASNEIEEGLSNRGFEVTRMNTYTTVPVQHVDHTVLKIALAAPVVTVASPSSIRAWKNLLSDSEWNNSVACIGETTATMARSLGFTNVYYPAQPGIEGWVESILEALGSYDELLR

SEQ ID NO: 178063 - protein, 196 aa, Glycine max
  unsure (1)..(196): unsure at all Xaa locations
  Clone ID: PAT_MRT3847_131807C.1.pep
EMVRQDNRRQLSAKVEQLDEEVAQGQQALAXGQXQETAMLQVLMRVEQEQKVTEDARRFAEQDASTQRYAAQVLQEKYEEATAALAEMEKRAVMAESMLEATLQYQSGQVKVLQSPRSSQSDSPVSRNNQEPDIPARRISLLSRPFGLGWRDRNKGKPTNEEPAEGNPSVEEQNTISEQDVNGLKVQDESRKEVSA

SEQ ID NO: 178064 - protein, 128 aa, Glycine max
  Clone ID: PAT_MRT3847_131808C.1.pep
YAAQVLQEKYEEAPAALAEMEKRAVMAESMLEATLQYQCGQVKVLQSPRSSQLDSPVSRNNQEPDIPARRISLLSRPFGLGWRDRNKGKPTNEEPAEGKPSVEEQNTISEQDVNGLKVQEESRKEVSA

SEQ ID NO: 178065 - protein, 183 aa, Glycine max
  unsure (1)..(183): unsure at all Xaa locations
  Clone ID: PAT_MRT3847_131809C.1.pep
FELSGIPPAPRGVPQIEVTFDLDANGIMNVSALEKGTGKTNKIVITNDKGRLSKEEIERMLADAEKYKEEDEAEAGRIQAKNGLESYAYSLKNTVSDPKVEEKLSSEDKESLTSAIDKTVAWIDENQTATKEEYESEHKTLEXVANPIMTKIYSQKGGAPGGMPGAGGPPQDPQDGPTVEEVD

SEQ ID NO: 178066 - protein, 36 aa, Glycine max
  Clone ID: PAT_MRT3847_13180C.1.pep
FPKRRKLEMQTLFNRKSVHYTGPASKREFHLKAVGM

SEQ ID NO: 178067 - protein, 59 aa, Glycine max
  Clone ID: PAT_MRT3847_131810C.1.pep
IETERLAGFPPTINQAEGFQGVTGIYLVVNQKLQEEALLAKCLGRRICYQCGRKFNIAF

SEQ ID NO: 178068 - protein, 93 aa, Glycine max
  Clone ID: PAT_MRT3847_131811C.1.pep
MDGAPQSAGAGGPAPFLLKTYDMVDDASTNDIVSWSSTNNSFVVWNPPEFARLLLPTYFKHNNFSSFIRQLNTYVSFSIPLFRLRIHGALPSF

SEQ ID NO: 178069 - protein, 59 aa, Glycine max
  Clone ID: PAT_MRT3847_131812C.1.pep
IPGGETKEGDDKRNVQTPLEASGYKEGPGLVGSSKLLICSLVETQFYFRRTNFTNSFLI

SEQ ID NO: 178070 - protein, 39 aa, Glycine max
  Clone ID: PAT_MRT3847_131813C.1.pep
QQVGFPGLKTPIPTLKSSIYRGTCTGYSFFTLTRGKTHF

SEQ ID NO: 178071 - protein, 83 aa, Glycine max
  Clone ID: PAT_MRT3847_131814C.1.pep
ATRPDYSLTPMKKNKNQKYTLHNFTCAHAPATLDDNGASVNEFKGVLEMLNNETVVEELPDALPEFGRSPMVRQLIRVTDFPF

SEQ ID NO: 178072 - protein, 317 aa, Glycine max
  unsure (1)..(317): unsure at all Xaa locations
  Clone ID: PAT_MRT3847_131815C.1.pep
MAAASGMPEEETAMFPDKSVHPRLDVYVWDMDETLVLLNSLLKSSYAEGSXKDVQKGVEIGRTWENLILQICDDYFFYEQIENYNKPFLDALAQYDDGRDLSDYDFNQDELGSPHEDDANNRKLAYRHRVIAQKYLQGLRNILDHETIKLWDELYDKTDEYTDRWLSSARTFLKECSGEDKDAVSSVAFANTSSNSTNSNHVNVLVTSGSIVPSLVKCMLFHLDSLITHGNVYSSWEVGKIQCFRWIKERFNHPNVRFCAIGDGWEECEAAEIMRWPFVKIDPRPGKLHRFPGLTLTTVSHYFSVVYGRPGNENDEE

SEQ ID NO: 178073 - protein, 49 aa, Glycine max
  Clone ID: PAT_MRT3847_131816C.1.pep
FCPFKGNPLTLPVRKPGIINVGTLVQKSLGKIGLKNQLDQKGHFKNFPP

SEQ ID NO: 178074 - protein, 46 aa, Glycine max
  Clone ID: PAT_MRT3847_131817C.1.pep
TRSFYSFPRSVSVLQVISMYLLYSVHGFRLSELFHLCIIDIKTYLC

SEQ ID NO: 178075 - protein, 131 aa, Glycine max
  Clone ID: PAT_MRT3847_131818C.1.pep
LWTDQGCPQMGHYADKCADNTCDETQKYFLHSADCNNFARWRYWVYMTLAGKRATGQAKAALIGSPGDTHELRIFKGIVRPGSTHCDEVDAQLEVAAIEKDKFLSYYTVVNPTFAKEAAANIIVHKGQVTT

SEQ ID NO: 178076 - protein, 70 aa, Glycine max
  Clone ID: PAT_MRT3847_131819C.1.pep
ARAFAEFKAVENKRMVTNEEQRHSPRDQKILPLADYNGQSLGTLFSPRLRSGAAVAGWDEEALMLASRHA

SEQ ID NO: 178077 - protein, 65 aa, Glycine max
  Clone ID: PAT_MRT3847_13181C.1.pep
MFCHGSGIPHIGGTVRTKLIDLNLLSPEEINWLNSYHATCRNILAPYLDEVENAWLKKATEPVGA

SEQ ID NO: 178078 - protein, 90 aa, Glycine max
  unsure (1)..(90): unsure at all Xaa locations
  Clone ID: PAT_MRT3847_131820C.1.pep
SRSNFYFVLVFQFLVSMSCSAQQQAVELSVFSFFSRFLSYQCVCVCVYTYIAIFAFLEVFIMFCMHPTCVLVWXVWDYYSSYNIQXIDFT

SEQ ID NO: 178079 - protein, 101 aa, Glycine max
  unsure (1)..(101): unsure at all Xaa locations
  Clone ID: PAT_MRT3847_131821C.1.pep
CYTHPLNLINVRTQLQGENTLPKPIQNLRPTLAFQTGSTLHVPAAGTPPRVGPIXVGERLVQQEGLPALFSRVSVTVLHHTLYFTTRMGLYHVLKTTRTDS

SEQ ID NO: 178080 - protein, 102 aa, Glycine max
  unsure (1)..(102): unsure at all Xaa locations
  Clone ID: PAT_MRT3847_131822C.1.pep
LIKASEQRPKRQKQQRPTQDTTAXQKKXKRPKSSKNPQKKKETPQKNEKAHKTPPKKPKKRPKQNKTTEGATEKKKGRXGRDKQPPTRKKATQKKTTVRTSN

SEQ ID NO: 178081 - protein, 67 aa, Glycine max
  Clone ID: PAT_MRT3847_131823C.1.pep
DSCTITTTLKWLHLNPSKCCFLQPHTPHDSQPCYVTDTLFYKLPLYITRVYIPPMYKPFDYCLKGFI

SEQ ID NO: 178082 - protein, 58 aa, Glycine max
  unsure (1)..(58): unsure at all Xaa locations
  Clone ID: PAT_MRT3847_131824C.1.pep
XKTSHSIFSLFNQQSQWPPIPDYSPHPSPISNPTTVLPHHVNNTPPFPSSPRNPSISH

SEQ ID NO: 178083 - protein, 71 aa, Glycine max
  Clone ID: PAT_MRT3847_131825C.1.pep
VCWLVCNVYKGCFVGQISKGNKASSFILNKKNVFQQAMLGILPGFHGDPCMRKTFAFALFYAPSLLSFSLL

SEQ ID NO: 178084 - protein, 64 aa, Glycine max
  Clone ID: PAT_MRT3847_131826C.1.pep
HNFVHIPTRNKMKIKVLVLFIPTLLLAQGGHASYYQNFPLHIKTGFGGQYSNYVACSNFMLVVQ

SEQ ID NO: 178085 - protein, 57 aa, Glycine max
  Clone ID: PAT_MRT3847_131827C.1.pep
QRLPTKQSGAAVACLITEEANTHVILKRSRRRRGALDDDIRRRPPTTSKTLTRAAFR

SEQ ID NO: 178086 - protein, 363 aa, Glycine max
  unsure (1)..(363): unsure at all Xaa locations
  Clone ID: PAT_MRT3847_131828C.1.pep
MLTCIARPKKLVGDSAASEDPSSRGVKSLTGQLKEMALKASGAYKQCGGPCATAPPSRVSRGGGTELDSESSRAAMSYLQSLRELEARLYGISSGEGTPSSSGRRVVLLLEDYEEPKEWVAQVEPGVLITFVSLPRGGNHLKRILFSREIFNKWQAQIWWAENYDKVMELYNVQRLNRQAFPLPTPPRSEDESSKRESVLDFPVTPPRLGRSPPWHSFRPGGGGMGMGYSSSDSFGHHSMQSSRHYYDPNGVNSTPKASSTISAAAKTDISSSMDVDASIRSSSSREADRSGDLSISNASDLDSEWVEQDEPVVYITIRALLGCQKVLRRIRFSREKFGEXMLDCGGKRTVPEYMNNTCELDS

SEQ ID NO: 178087 - protein, 112 aa, Glycine max
  Clone ID: PAT_MRT3847_131829C.1.pep
ARVETARTFNLIYTKEILPWTHMMEVPELHGFGPAANRLLEAYKMLLKFLGNLRNLRDSHAALAFGSSETSDGPSSVTRIISECESALTVLNRDLGILSASIAREQVEKMIH

SEQ ID NO: 178088 - protein, 69 aa, Glycine max
  Clone ID: PAT_MRT3847_13182C.1.pep
LHEAKPSSLISLPLTLKSSSLPFRSASLVRQSLPFLHQCVEGQCLPSINAATKFSQSKVILKVIMFLSW

SEQ ID NO: 178089 - protein, 162 aa, Glycine max
  unsure (1)..(162): unsure at all Xaa locations
  Clone ID: PAT_MRT3847_131830C.1.pep
NVPSWTGSYSIGYAANSHRNFPLMSYPIGYIVNPYGNKLIYNELAYDKDILAAXFSRCYHSLTDEHASIFNKIMHMIATQSGGVYFLYGYGGTGKTFVWKTLSSTIHSNSGIVLTMASSGILSMLLPGXRTTHSRTSGIASILLPKHSTNIIYYVFYFTVTY

SEQ ID NO: 178090 - protein, 193 aa, Glycine max
  Clone ID: PAT_MRT3847_131831C.1.pep
VYAAKWPLSGQTKITLTPGSGIPVGPVINAGEIYQVLPLGGRTHTRDVIAMEDLARSIQNPPADWHGDPCLPKGNSWTGVTCSNGFHARVTTLNLTNAGVSGSLPLTLGRLSALEHLWLGENKLSGTIPDLSGLKELETLHLEKNNFEGPLPPSTKKLPKLRIIESDFENKSPNTNLKQSEVKVEQMALEIHP

SEQ ID NO: 178091 - protein, 441 aa, Glycine max
  Clone ID: PAT_MRT3847_131832C.1.pep
NNHNIQALHDQSPDFRNWLSAIISYQQSCMDGFNNETNGEQEIKEQLHTGSLDQMGKLTGIVLDIVTNLSKILQSFDLKLDLNPASRRLLELDAEGYPTWFSAADRRLLAKMNQGGAPPPNAVVALDGSGQFKSVKQAIDSYPKNFKGRFIIYVKAGIYNEYITIPKKSENILIYGDGPTKSIITGNKNFIDGVKTMHTATFANTAPGSSAKSIAFENTAGAKKHQAVAFRNQGDMSAMFDCAMHGYQDTLYVHANRQFYRNCEISGTIDFIFGASATLIQNSRVIVRKPEANQFNTVTADGTKQKNMATGIVLQNCEILPEQALFPSRFQTKSYLGRPWKEFARTVVMESNIGDFIQPEGWTPWDGNLYLDTLYYAEYANVGPGSNVQGRVKWRGYHPNINKNEAAQFTAGQFLRGGPSGNADDWLKATGVPYTIGFTKP

SEQ ID NO: 178092 - protein, 73 aa, Glycine max
  Clone ID: PAT_MRT3847_131833C.1.pep
EPDLDTLYYAEYANVGPGSNVQGRVKWRGYHPNIGSSEAAQFTAAQFLRGGPAGDADGWLKATGVPYTIGFTK

SEQ ID NO: 178093 - protein, 79 aa, Glycine max
  unsure (1)..(79): unsure at all Xaa locations
  Clone ID: PAT_MRT3847_131834C.1.pep
PCKGNQKLWCLYAKNDGMTTKHVVSKMVKVRNRLCGVDTNIVRERTHHAEACCXRLAILKKDVWRDESGIRSGFTLTVI

SEQ ID NO: 178094 - protein, 89 aa, Glycine max
  unsure (1)..(89): unsure at all Xaa locations
  Clone ID: PAT_MRT3847_131835C.1.pep
QRRKGARGPGTKCHIIKHGPSPVKRHCKARQAKVPPPATIETTXGTKGRGNSARKGSEAQPEPPSGQHEGEAQGGSPPKKQEGSRPQPP

SEQ ID NO: 178095 - protein, 100 aa, Glycine max
  unsure (1)..(100): unsure at all Xaa locations
  Clone ID: PAT_MRT3847_131836C.1.pep
LFVERMPLSIRGGVGAKNAILMNMPNAVLTTWRXLCRNLVYEVSKMTSKYTKCTVSFTISTGTMADNTIDTAILTCSLIPRGVAKGKGCGENFAISLEIS

SEQ ID NO: 178096 - protein, 105 aa, Glycine max
  Clone ID: PAT_MRT3847_131837C.1.pep
FGLLRDRPDTGGGANSQHLRKATQPMLMKAHAFTKCSRATNRMVRTHMEYPLNEDINDEYRNYIGAKGTPASHRQKDAHLEKMALWQKAIKCGMGHCRSRKRKQP

SEQ ID NO: 178097 - protein, 63 aa, Glycine max
  Clone ID: PAT_MRT3847_131838C.1.pep
PSERDPGACMILAELAEKAGFPPGVINIVHGAAKTVDFIIDEPRIKAISFVGSNKAGEYIYSR

SEQ ID NO: 178098 - protein, 77 aa, Glycine max
  Clone ID: PAT_MRT3847_131839C.1.pep
ETKPNIFFLKKNFFFYPWTEVFFSVFFRGVIRWGAPISFLRLKKPKYTGTLNLKVFRAPSERIKLKKKKKNERRNNR

SEQ ID NO: 178099 - protein, 55 aa, Glycine max
  Clone ID: PAT_MRT3847_13183C.1.pep
TTTSKADEMYSYGSDHYFTVIFNEIITNHNKSNKNTKSISILYILNKYINFHYTK

SEQ ID NO: 178100 - protein, 95 aa, Glycine max
  Clone ID: PAT_MRT3847_131840C.1.pep
TIGWCMFLGEAPISWKCKKQDSVSKSSTKTEYHTMSATCSKIIWLHGLLSKLGFSQAKPTPLHVDNTSAIQIATNPVYHKRTKHIEVDCHSVWES

SEQ ID NO: 178101 - protein, 58 aa, Glycine max
  Clone ID: PAT_MRT3847_131841C.1.pep
MGKTYGMGSARKLKSHRMRHKWADMSYNKSHLVNEWKKPFAGSSHSKGIVLEKIGFEA

SEQ ID NO: 178102 - protein, 70 aa, Glycine max
  Clone ID: PAT_MRT3847_131842C.1.pep
AGQKSLERICVACKIISFSCLLMLLYSIHFSLDLTALLFLDIIYIVFHNVFYVLFYHLYPFWGGGGGGGG

SEQ ID NO: 178103 - protein, 59 aa, Glycine max
  Clone ID: PAT_MRT3847_131843C.1.pep
PEWHLGGSNRNYLIRRSWRSILKSPGSTSCSMKRLHYSYHSAWYFRFNNPQTPHARHLI

SEQ ID NO: 178104 - protein, 123 aa, Glycine max
  unsure (1)..(123): unsure at all Xaa locations
  Clone ID: PAT_MRT3847_131844C.1.pep
SVTVLSNHIFSHRYPPSITIDRPPVPKPPSXNSASWPKYTINYVAYAEEXMKINVHLGKPPKTPCCNLIQGLAGLDALESLCTALKAAVLGINSSVPENLSLLVNYXGKGGPNGVVCYLIRLS

SEQ ID NO: 178105 - protein, 230 aa, Glycine max
  Clone ID: PAT_MRT3847_131845C.1.pep
MPSSLQLDRFNPITDAVTTATVAIANGVNCPKQPQAPPSTAARRLMVPSLSSGRGIAASDTVALHHANVVGLNQCCSVVTQHINAPVAAVWAVVRRFDNPQGYKNFVKSCHVITGHGIRVGAVREVRVVSGLPAEMSTERLEILDDERHVISFSVVGGDHRLRNYRSVTTLHANGNGTLVIESYVVDAPQGNTKEETCVFVDTIVRCNLQSLAQIAENRTKNCENTAQHC

SEQ ID NO: 178106 - protein, 87 aa, Glycine max
  unsure (1)..(87): unsure at all Xaa locations
  Clone ID: PAT_MRT3847_131846C.1.pep
XXTILXSXLLANFLTXGNXXASVDLQRTHRIKGMIXMVATVGIPENTGXXIGLCXMNNSXRGRXXSXXIXTIXXQXXEXXXPGXXXK

SEQ ID NO: 178107 - protein, 40 aa, Glycine max
  unsure (1)..(40): unsure at all Xaa locations
  Clone ID: PAT_MRT3847_131847C.1.pep
XXTLSHXRFDPGXRIXXVGPDGGKAXXEXXEVEEDPNXXA

SEQ ID NO: 178108 - protein, 206 aa, Glycine max
  unsure (1)..(206): unsure at all Xaa locations
  Clone ID: PAT_MRT3847_131848C.1.pep
GGPFNLGELARICKGGCLIRGVFLAKNKKAYQRTPYLASLIVDPEFSREMVQSQPPXKRVLGLPVSTGISTPRMWASPASFDTHRRARLPANLVQAQRDLFGGHTYXRVVPPGAFHTEWTKFAPKSGTGVGAPNSLIMGFGCLINFGPGQPLSGNCLFLLRIFGRQKPATVFLLNLFLILINQRGVFWLPKKKKKKKKKKKKKKPK

SEQ ID NO: 178109 - protein, 51 aa, Glycine max
  Clone ID: PAT_MRT3847_131849C.1.pep
WRAKSRLVLVVSCLGGALRPVNVRTVCFVGPLSKCTGREESVKCYISLGIS

SEQ ID NO: 178110 - protein, 66 aa, Glycine max
  unsure (1)..(66): unsure at all Xaa locations
  Clone ID: PAT_MRT3847_13184C.1.pep
AYPAEMITDGMRXFYGHSPGPKDICYPTTLWKARLNPPDAYPPNSAHLASINELYHPNVDDMDPSI

SEQ ID NO: 178111 - protein, 71 aa, Glycine max
  Clone ID: PAT_MRT3847_131850C.1.pep
KRRGKAQIKKGGPPSSKPEKINWARKTGTPPLTKFGEKKPLKNKTPPWGRRAPKNEAKKTPRPPRGKPVRN

SEQ ID NO: 178112 - protein, 99 aa, Glycine max
  unsure (1)..(99): unsure at all Xaa locations
  Clone ID: PAT_MRT3847_131851C.1.pep
GSRIMATVSRLGAKLLSILLDLCEAYIIPYLDVDARSLRPFYAPMLVALNAIDLTXNAFGGHPGHLTXDSKLPMGVXRLSHRRECDIFSEDSSLSAYII

SEQ ID NO: 178113 - protein, 66 aa, Glycine max
  Clone ID: PAT_MRT3847_131852C.1.pep
HPGSKSGGFRGPKTHGVGGPVLKETANGPKIGGPSFAKGFFYLVPSGTKEPTRSTSGDSGGCLKSS

SEQ ID NO: 178114 - protein, 92 aa, Glycine max
  Clone ID: PAT_MRT3847_131853C.1.pep
GMHEFLPAEGVPGLSLPPRGRDSFFGGTKGDPSLGAAPANLYLRLPRVFIGGSGRQLQFFFQHQLFFGSPTTLLLSKKHCHGGLVPKIQKKP

SEQ ID NO: 178115 - protein, 56 aa, Glycine max
  unsure (1)..(56): unsure at all Xaa locations
  Clone ID: PAT_MRT3847_131854C.1.pep
LQEQQSILLSRAGVLLKTAYGCPNLQRASEVWXRSTFISPYLEGHIYQRHARAVMI

SEQ ID NO: 178116 - protein, 88 aa, Glycine max
  Clone ID: PAT_MRT3847_131855C.1.pep
RGFLVKFLDEIQSILLFVANTSVRPFGNSILDITIVVQRGESYYLSCKELPENLRVAPLKKLSQHERGLSMEKALKAYGKDIETLHHT

SEQ ID NO: 178117 - protein, 213 aa, Glycine max
  unsure (1)..(213): unsure at all Xaa locations
  Clone ID: PAT_MRT3847_131856C.1.pep
MDTKSAVELMESSAEVHFSGFHMDGFEQRKASIEQPTTSETDMYKQPFVIGVAGGAASGKTTVCDMIIQQLHDQRVVLVNQDSFYNNLTEEELTRVQDYNFDHPDAFDTEQLLRVMDKLKHGEAVDIPKYDFKSYKSDDMLRRVNPSDVIILEGILVFHDPRVRXLMNMKIFVDTDADVRLARXIRRDTTEKGRDIGAVLDQYXKFVKPAFDD

SEQ ID NO: 178118 - protein, 93 aa, Glycine max
  unsure (1)..(93): unsure at all Xaa locations
  Clone ID: PAT_MRT3847_131857C.1.pep
FLLTLTLSIITGFXGTHHLARRIXLSKXLXIILTSKPITSXERTKLRLIDTIVSSQELLNPSKFSALENGERFKPWIHSLYNTYKISSLYQSR

SEQ ID NO: 178119 - protein, 150 aa, Glycine max
  Clone ID: PAT_MRT3847_131858C.1.pep
MDAKSAVELMESSSEVHFSGFHMDGFEQRKASIEQPTTSETDMYKQPFVIGVAGGAASGKTTVCDMIIQQLHDQRVVLVNQDSFYNNLTEEELTRVQDYNFDHPDAFDTKQLLHVMDKLKHGEAVDIPKYDFKSYKSDDVLRRVNPSDVI

SEQ ID NO: 178120 - protein, 46 aa, Glycine max
  Clone ID: PAT_MRT3847_131859C.1.pep
NSIILVNGVFLLYYPLKIFSLSQFIVVGKVSVDYPLCRMAHKLVWQ

SEQ ID NO: 178121 - protein, 47 aa, Glycine max
  unsure (1)..(47): unsure at all Xaa locations
  Clone ID: PAT_MRT3847_13185C.1.pep
QLKRYPAFLGNGIXIATQCLSFDMGMGENPFIAFVEDMDEDRKGHIQ

SEQ ID NO: 178122 - protein, 63 aa, Glycine max
  Clone ID: PAT_MRT3847_131860C.1.pep
AIIFCGAIIFDFIPAGPAGRAHRVTADILWPNLMKRFSKSLLDDDFEARFKEFEDDSEIEDVL

SEQ ID NO: 178123 - protein, 311 aa, Glycine max
  Clone ID: PAT_MRT3847_131861C.1.pep
CRDRFKANGVEPPKRSGNLWLCKTTSDGSSEFIDLDILVSKLSCNDIEELRCAVGELRLLAKQNSQNRMLIAEVGAIPHLVDLLYAPDAGTQEHVVTALLNLSINVDNKERIMASEAVPGILHVLENGSMEAQENAAATFFSLSGVDENRVAIGASGAIPALVTLFCEGSQRGKVDAAKALFNLCLSQGNKGRAIRAGIVPKLIEMLTEPDGDMRDEALTIMAVVANHSDGQAAIGSMNVVSTLVELVSNGSPGNKENATSVLLLLCNGDPFYLSIVSSLGLVNPLLDLAGNGSERAKRKASQLLELIGNH

SEQ ID NO: 178124 - protein, 70 aa, Glycine max
  Clone ID: PAT_MRT3847_131862C.1.pep
QYIPQTNNSQNQDIFTSFKILAAIAPYLLASHSLSFAFCEIGLLGSSTFSSTRPDPSTTTFPCVVLSSTT

SEQ ID NO: 178125 - protein, 74 aa, Glycine max
  Clone ID: PAT_MRT3847_131863C.1.pep
CLCLSLEGGTKKAFRLCLLKKEGRREKRGKEEVIKFFHGRSFKFPQKFTFFFPFNQPLSPSFGPCTPDHSHMDQ

SEQ ID NO: 178126 - protein, 65 aa, Glycine max
  Clone ID: PAT_MRT3847_131864C.1.pep
MSSGQSTTAYPPPSSAPAQPPIGYPTKESPQYPQKSVVETKSKGDGFWKGCCAALCCCCVLDACF

SEQ ID NO: 178127 - protein, 58 aa, Glycine max
  Clone ID: PAT_MRT3847_131865C.1.pep
TQKTCNEGYPTLKKEDYSLSYRGDCMLLKHFSEGKDRITIKPDVSFLCNYSEFSPLPS

SEQ ID NO: 178128 - protein, 50 aa, Glycine max
  Clone ID: PAT_MRT3847_131866C.1.pep
SNHFAACIYNDLSYLSITNFKRIFKSDPAMHIHFHPFWFHLEFHHNQKKL

SEQ ID NO: 178129 - protein, 56 aa, Glycine max
  Clone ID: PAT_MRT3847_131867C.1.pep
KITERCANNNVHFIFVDNCVRHLARCRIQTISPTKEWFAPRPPSCSKSLRLSQSAS

SEQ ID NO: 178130 - protein, 503 aa, Glycine max
  unsure (1)..(503): unsure at all Xaa locations
  Clone ID: PAT_MRT3847_131868C.1.pep
MAISIPSRQLFIDGEWKVPLLNNRFPIINPATEDIIGHIPAATKEDVDLAVDAAKRAFSHNKGKDWSSAPGSVRARYLRAIASKITEKKDELGKLEAIDCGKPLDEALADLDDVIGCFNYYAELAEGLDAKQNAPVSLPMETFKSYVLKEPIGVVALITPWNYPLLMATWKVAPALAAGCTAILKPSELASVTCLELAEICREVGLPPGVLNIVTGLGNEAGAPLSSHPDVDKISFTGSSATGSRIMTAAAQLTKPVSLELGGKSPIIVFEDVDLDKTAEWTIFGCFFTNGQICSATSRLIVHESIATEFVNRIVKWAKNIKISDPFEEGCRLGPIVSEGQYKKVLKCISTAKSEGATILIGGSRPEHLKKGYFVEPTIITDVTTSMQIWREEVFGPVLCVKTLRTDEEAIELANDTDYGFGSAVISKDLERXERMAKAFKAGIVWINCPQPCFTQAPWGGIKRSGFGRELGEWGLDNYLSVKQVTQYISDEPWGWYQSPSRL

SEQ ID NO: 178131 - protein, 62 aa, Glycine max
  Clone ID: PAT_MRT3847_131869C.1.pep
GHFFFFHLPNIGFKVKKVYTVGKVIGLLEESRRSLYSCTVIVRSTMNKLLIKGIHYPPSFLY

SEQ ID NO: 178132 - protein, 64 aa, Glycine max
  Clone ID: PAT_MRT3847_13186C.1.pep
FFFFFFFFFFFFFFFFFFFFFLKRGEKKKGQKWGRKKGGNLEGPQRGPGREGADTTPFTVEPKP

SEQ ID NO: 178133 - protein, 123 aa, Glycine max
  Clone ID: PAT_MRT3847_131870C.1.pep
MAISIPSRQLFIDGEWKVPLLNNRFPIINPATEDIIGHIPAATKEDVDLAVDAAKRAFSHNKGKDWSSAPGSVRARYLRAIASKITEKKDELGKLEAIDCGKPLDEALADLDDVIGLFNYYAE

SEQ ID NO: 178134 - protein, 64 aa, Glycine max
  Clone ID: PAT_MRT3847_131871C.1.pep
VAPDCSWSTKGVVHIHVIMLAHNPGGKDITETVFMAVAKGCGFQGFRVVCCAFKAYVMKFLTKV

SEQ ID NO: 178135 - protein, 291 aa, Glycine max
  Clone ID: PAT_MRT3847_131872C.1.pep
HASGLGNEAGAPLSSHPDVDKISFTGSSATGSRIKFGSASCWQPVSLELGGKSPIIVFEDVDLDKTAEWTIFGCFFTNGQICSATSRLIVHESIATEFVNRLVQWAKNIKISDPFEEGCRLGPIVSEGQYKKVLNCISTAKSEGATILIGGSRPEHLKKGYFVEPTIITDVTTSMQIWREEVFGPVLCVKTFSTEEEAIELANDTHYGLGSAVMSKDLERCERISKAIQAGIVWINCAQPSFIQAPWGGVKRSGFGRELGEWGLENYLSVKQVTKYISDEPWGWYQSPSKL

SEQ ID NO: 178136 - protein, 185 aa, Glycine max
  Clone ID: PAT_MRT3847_131873C.1.pep
GQPATVKVAANLVRLLAYNNKNFLQTGLIVGGWDKYEGATILTGGSRPEHLKKGFFVEPTVITDVTTSMQFLREEVFGPVLCVKTFSTEEEAIDLANDTVYGLGSAVISNDLERCERITKAFKAGIVWINCSQPCFTQAPWGGIKRSGFGRELGEWGLDNYLSVKQVTQYISDEPWGWYQSPSRL

SEQ ID NO: 178137 - protein, 57 aa, Glycine max
  Clone ID: PAT_MRT3847_131874C.1.pep
TAKKDLITGVTTVPVPGFHEIIACPFTTKTVLVRFTSNTPLNGTLNPAREPLFILRG

SEQ ID NO: 178138 - protein, 29 aa, Glycine max
  Clone ID: PAT_MRT3847_131875C.1.pep
LRLFNLTEGTRKQSLCIQPYFSFSVISIE

SEQ ID NO: 178139 - protein, 57 aa, Glycine max
  Clone ID: PAT_MRT3847_131876C.1.pep
LLINVHAYTISNLKDISLLSEKATSLVTFLTLFCSYITSLSEKNDKKKFLQMPIQVD

SEQ ID NO: 178140 - protein, 87 aa, Glycine max
  unsure (1)..(87): unsure at all Xaa locations
  Clone ID: PAT_MRT3847_131877C.1.pep
MATDRWTTLHRLRERLDETLTANRNEILALLSRIEPKGKGILQHHQVIDDFEXEMPHENRQKLTDGAFGEVLQSTHEAILLPPWVAF

SEQ ID NO: 178141 - protein, 64 aa, Glycine max
  Clone ID: PAT_MRT3847_131878C.1.pep
EYLLNHFNSICLYLRHLIQQIFFKLLYKRDSGNFQTCTVAPALCWPTPCRLWACLPSKSCESIP

SEQ ID NO: 178142 - protein, 59 aa, Glycine max
  Clone ID: PAT_MRT3847_131879C.1.pep
IKYSLTGTTIHLQESLLAATCYCAQVQEVLHPSLPDPQKFIPTIAQKAHASYILPYRNI

SEQ ID NO: 178143 - protein, 46 aa, Glycine max
  Clone ID: PAT_MRT3847_13187C.1.pep
NGEDTYRRNFHLGWVLMQIETFETQVMLTASLWTREYFLKKWCQGK

SEQ ID NO: 178144 - protein, 71 aa, Glycine max
  Clone ID: PAT_MRT3847_131880C.1.pep
PPPHPHPRPRFTTEQGNVLASSPLLTSYLLHQLTLINVLLTYVGWTSKYGRLVPRPCSPLCYIIGSVIRVF

SEQ ID NO: 178145 - protein, 52 aa, Glycine max
  Clone ID: PAT_MRT3847_131881C.1.pep
RALCCGKRSCSASIIVMRGVDSMDLFTHCTLSHEYYRMVKPQLSSTCISSDF

SEQ ID NO: 178146 - protein, 38 aa, Glycine max
  Clone ID: PAT_MRT3847_131882C.1.pep
IITDELKLRILTSSSMIYQLKKKKKRLLSKLTHKVVII

SEQ ID NO: 178147 - protein, 42 aa, Glycine max
  Clone ID: PAT_MRT3847_131883C.1.pep
YIFNLHERDSQNTILYHEISVTFIPSVIFCPFFIKKLLNNTF

SEQ ID NO: 178148 - protein, 192 aa, Glycine max
  Clone ID: PAT_MRT3847_131884C.1.pep
MFRNGSSILARSARAIKVTQTARALSILAAPKALPARSTFALGNAGSIRTLKTLDFGGSKEDVVERTDYPKEKLAQIFAKDTMAVIGYGVQGRAQSLNMKDNGLNVIVGVREDGESWKLAQQDGWVPGKNLFPIAKAAEKGSVIMYLLSDAAQKSSWNEVKPYVTKGKTLYFSHGFSVVYKERTGVVPPKDV

SEQ ID NO: 178149 - protein, 57 aa, Glycine max
  Clone ID: PAT_MRT3847_131885C.1.pep
FRIIHWMVVVYPFKLLIQYLWLGSIRQFWKSRKWKRKKKQNRKSRVEKRLSSILISS

SEQ ID NO: 178150 - protein, 63 aa, Glycine max
  Clone ID: PAT_MRT3847_131886C.1.pep
TSLYGNSIIVSMCPHTKRVSRDLPIQETLMMNVNQLRLCHVQRSFLHLVVISSADLFQVIGLL

SEQ ID NO: 178151 - protein, 63 aa, Glycine max
  Clone ID: PAT_MRT3847_131887C.1.pep
FIARNPVEETIPALKRAVILDYPQEYSPSLYGTFIHHCCWEGFWNYKCPRFLLVSQKSSPKLK

SEQ ID NO: 178152 - protein, 82 aa, Glycine max
  unsure (1)..(82): unsure at all Xaa locations
  Clone ID: PAT_MRT3847_131888C.1.pep
DQGNDVESTNILEFIDQCTNTMQLKQIHAHMLRTSRFCDPYXSSKLLTAYAISSCSCLIYAKNVFNQIPQPNLYCWNTLIRG

SEQ ID NO: 178153 - protein, 55 aa, Glycine max
  Clone ID: PAT_MRT3847_131889C.1.pep
KYLTFEGKSVFGLFSRLIAKHVFDSKKFLALKFSKKMVLVPQKKKKKKKNLKKKK

SEQ ID NO: 178154 - protein, 98 aa, Glycine max
  Clone ID: PAT_MRT3847_13188C.1.pep
FFFFFFFFFFFFFFFFFFFFFFFNKKKNQGPLKNKTKTWTTKILPKKLTKGDREKPDRPGAHEKKPPLLPWGGQTPKTLGLGRRENPKTRGPLAPLNP

SEQ ID NO: 178155 - protein, 65 aa, Glycine max
  Clone ID: PAT_MRT3847_131890C.1.pep
PRGKELPGTLMNPGFSVRNGEYSVEKYQNELFKWRKLPMHQQLHGLSANKKLKTILFSATNEIAS

SEQ ID NO: 178156 - protein, 91 aa, Glycine max
  Clone ID: PAT_MRT3847_131891C.1.pep
VLTTFVASVVHRVCVRVFRRRPRARVCVMCPPAPDRYYHVGLLWNCFEGHCMSVRCLTGSSLWHLVFCVHGFIICLHGWAPFSSNGHLMVL

SEQ ID NO: 178157 - protein, 86 aa, Glycine max
  Clone ID: PAT_MRT3847_131892C.1.pep
NDHSVTRNVGLKLWMEKMQLSSYLKYWENEGVLHSSVHMAICLVCYLKKKEMKRRLLVMNIILFYFSCWEFYSAFKYEQFMHTWGH

SEQ ID NO: 178158 - protein, 50 aa, Glycine max
  Clone ID: PAT_MRT3847_131893C.1.pep
RFYARIMCCDLYKLHSWAEGFVEFEAGMYYHSTSEADNAYYPSSWVGPAY

SEQ ID NO: 178159 - protein, 84 aa, Glycine max
  Clone ID: PAT_MRT3847_131894C.1.pep
VKAAVYISSLLTFLQLFSFIVHLNQLTATYILELYNPVFYILDDFIHFPAHLFLSFLGSLPIAYDIHTYMYISVHLFYWLYHSL

SEQ ID NO: 178160 - protein, 193 aa, Glycine max
  unsure (1)..(193): unsure at all Xaa locations
  Clone ID: PAT_MRT3847_131895C.1.pep
MGNGIGKLTVCFTGNGGGGRRKQDISILITEPLDEGLGHSFCYVRPDPTRISSSKVHSEETTTFRTISGASVSANTSTPLSTAFVDLYSYGCIDRAAAFESSTSFAALPLQPIPRTLVNSGPFSGNLNGGGFPGSGPLERGFMSGPIERGFMSGPIDRGLFXSGPIEREGNGIGNGSDHFQRSFSHGGLGLGL

SEQ ID NO: 178161 - protein, 102 aa, Glycine max
  Clone ID: PAT_MRT3847_131896C.1.pep
MGNGIGKLTVCFTGNGGGGRRKQDISFLITEPLDEGLGHSFCYVRPDPTRISSSKVHSEETTTFRTISGASVSANTSTPLSTAFVDLYSYSCIDRARAFESS

SEQ ID NO: 178162 - protein, 64 aa, Glycine max
  Clone ID: PAT_MRT3847_131897C.1.pep
KESLRSHFNCLIDKGPCDEYSLAIRSHMAEMLEDGCDKCDMEQKHVSHFFISTLRNDFPDLYEA

SEQ ID NO: 178163 - protein, 48 aa, Glycine max
  Clone ID: PAT_MRT3847_131898C.1.pep
KQIMKIKCGVKRDDDSRNMINRQKEVVNVHHITREKKSLKMCAYFVLV

SEQ ID NO: 178164 - protein, 135 aa, Glycine max
  Clone ID: PAT_MRT3847_131899C.1.pep
SGGFSTPAKKVLFFGEKTGGGGAPLGNPGAKPKMVPSPMGTPPELGPSKIGPKQNFPCKGAHFFGNPRPPGKKKKKTPPGGNPKVGMGPPPPIRGGAGGAEFLKHLRSLCENPPRNRWKPRGEPPPPPTQEPFFG

SEQ ID NO: 178165 - protein, 94 aa, Glycine max
  Clone ID: PAT_MRT3847_13189C.1.pep
MAGTEAKKTESKKPAAKQSGGKKKEVKKETGLGLTHRKAENFGEWYSEVVVNAEMIEYYDISGCYILRPWSMAIWEIMQEFFDPEIKKMKIENC

SEQ ID NO: 178166 - protein, 40 aa, Glycine max
  unsure (1)..(40): unsure at all Xaa locations
  Clone ID: PAT_MRT3847_1318C.1.pep
LVKRCHKPDRXEFSKDAARTTIGFXEIGCMGYFFKLIFIP

SEQ ID NO: 178167 - protein, 50 aa, Glycine max
  unsure (1)..(50): unsure at all Xaa locations
  Clone ID: PAT_MRT3847_131900C.1.pep
MGKTHGMGAARKLKSHRRRQRWXDKXYKKSHLGNEWKKPFAGSSHAKGLS

SEQ ID NO: 178168 - protein, 75 aa, Glycine max
  Clone ID: PAT_MRT3847_131901C.1.pep
LNSNTAYGAGRANIRLIKGCLLSRPFQKDELNSISVTTIQKPDIFFLVTEKLYTVVVLGERAKKNTHKSDCLFKC

SEQ ID NO: 178169 - protein, 189 aa, Glycine max
  unsure (1)..(189): unsure at all Xaa locations
  Clone ID: PAT_MRT3847_131902C.1.pep
TRPPRFPLNPSALLLAKKQATNMSVGALKEGDLXGKRAFVRVDLNXPLADNLNIXDDTRLRAAVPTIXFLXTGHGATVILSSPLXRPKRGTPNYSEKPLVPMLAQLLQIEGTTANDSIAEETEKXVAQLPKRRAWLLENVRLYKEEEKIDPVFAKKEAALAELYVNDAFSTDHTAHALTEGVAKHLKPS

SEQ ID NO: 178170 - protein, 48 aa, Glycine max
  Clone ID: PAT_MRT3847_131903C.1.pep
SSVVISGVSQYTDISSSRLAGMFLTFTRLCLNLWVSGSERHACLYGSQ

SEQ ID NO: 178171 - protein, 39 aa, Glycine max
  Clone ID: PAT_MRT3847_131904C.1.pep
LVFRFQTSERQLDKGAQQLQFLTLSRHFMNHKIKHFEQK

SEQ ID NO: 178172 - protein, 89 aa, Glycine max
  Clone ID: PAT_MRT3847_131905C.1.pep
ARDFYMQFLAPSTQLRSCQGDRVWRRAEEFWKDPWLIVGKLGWGRGQNYGMTEPASVLGGHEYLATSAGIPSRSPLTVRSLEYYVLNKK

SEQ ID NO: 178173 - protein, 55 aa, Glycine max
  Clone ID: PAT_MRT3847_131906C.1.pep
ERKVRPMAAPNAIYIQVDHGKAASLFRIEDSPSSLMARLQTSKATVQPHNSTHLT

SEQ ID NO: 178174 - protein, 87 aa, Glycine max
  unsure (1)..(87): unsure at all Xaa locations
  Clone ID: PAT_MRT3847_131907C.1.pep
MFPFGHKGQRMKGTIGVIPKNVFDINHLTHVYRIRRTRLKLLRRALHTSTFLXASSFSIQLIRAPKAIGGKGKVGKAPILEGRLPFP

SEQ ID NO: 178175 - protein, 78 aa, Glycine max
  unsure (1)..(78): unsure at all Xaa locations
  Clone ID: PAT_MRT3847_131908C.1.pep
VVLKVWLLLLFLVGDTAARMGLSFFKSDQSSSSDNDEHSXPACDLCLCTRSLPSQCXLXNIKLNSCHSDSRSCMCTRS

SEQ ID NO: 178176 - protein, 46 aa, Glycine max
  Clone ID: PAT_MRT3847_131909C.1.pep
INSHSMKQTLKVSFMTVKLHLIHKQSQLLAEQCLETNIILIFVFYY

SEQ ID NO: 178177 - protein, 68 aa, Glycine max
  Clone ID: PAT_MRT3847_13190C.1.pep
LLLLTVFLRNMSNLKLFQDYDEDQANLCLMTKSHENNQEKSVRNKWYIDSGCSKHMTGDVSKFTTFSP

SEQ ID NO: 178178 - protein, 173 aa, Glycine max
  unsure (1)..(173): unsure at all Xaa locations
  Clone ID: PAT_MRT3847_131910C.1.pep
MALTFFGFCTVYEGNLLLFLAEIAYSGWSFTSLTPLRKVEKGPQLLVVFVVVTAAALEEEHMACFDQQHSGKEGQTVAIVEGLPISNLDDSSNLDCIYCLKDHNYFVVVGFAAGEMKMNPGHFMDSSKDNSIISCTELVGSXEAHLLKSNSSLTRSHIAKSSTTGNINHTPLL

SEQ ID NO: 178179 - protein, 54 aa, Glycine max
  Clone ID: PAT_MRT3847_131911C.1.pep
MGMEPIYIFQPERLLLGCTKDSINSLRSRASSSEINSEGEYTHTFLGAPRRFFV

SEQ ID NO: 178180 - protein, 146 aa, Glycine max
  Clone ID: PAT_MRT3847_131912C.1.pep
MALRNGGRKISFEVLSVEDESDPTERNRKKRRHRASKKKKKLLDRADSDSADPRSAPLENGGACNGFELDASRYCGGGGGGGGSVVVCEEVREAESGFNFGELRQRNVNCGSSEDLAASVVVRDEKDDGGVNASPVEKGTNEPDRN

SEQ ID NO: 178181 - protein, 174 aa, Glycine max
  Clone ID: PAT_MRT3847_131913C.1.pep
TRPPTRPPTRPLVLVKESDLSDFDFSFHAAMKPVRSDSDVALDTSADAAVADTSPKLKRSCSNIETKRPGSRSAPEMPARSRSYGDLGNLVAGLALDATATPHGAPEASPASVKTSRTADRVMLKKRSSSQVLPSRSRKLWWRLFLWSHRNLHMPPVGAHTDRLALPRRVHLGH

SEQ ID NO: 178182 - protein, 65 aa, Glycine max
  Clone ID: PAT_MRT3847_131914C.1.pep
VFPHEVYSLHHHLAAVVARTGLLIAGDKNAFINLCFNVVCSPNTPDYIFVKRTQFQDFAALCYFG

SEQ ID NO: 178183 - protein, 110 aa, Glycine max
  unsure (1)..(110): unsure at all Xaa locations
  Clone ID: PAT_MRT3847_131915C.1.pep
KLETTKYYCTVIDASGHRDYIKNMITGTSEADCAALIIDSTTXGLEAGICKDXRYDEIIXEVYDYLKKVGYNPDRISFSSISECEGDKIIERATNLDXDKDTTLIDALDQ

SEQ ID NO: 178184 - protein, 98 aa, Glycine max
  unsure (1)..(98): unsure at all Xaa locations
  Clone ID: PAT_MRT3847_131916C.1.pep
FPVERVSSLKNPASRNGLAKLSSQKKGQRPVSNNQKRRSNHVCLGPGRLAPEKISWNVLDLKKENCFXCTVGRTQTNARYTLGSPDEVVAFLKDPANV

SEQ ID NO: 178185 - protein, 97 aa, Glycine max
  unsure (1)..(97): unsure at all Xaa locations
  Clone ID: PAT_MRT3847_131917C.1.pep
AGISPQVIIGLVKFANVDIRVRGTGGGHTSXMSAVRQAISKAIIAYYAKYVDEHSKNLLKASLVAYDRTLLVADPRRCEPKKFGGRGARARFQKSYR

SEQ ID NO: 178186 - protein, 57 aa, Glycine max
  unsure (1)..(57): unsure at all Xaa locations
  Clone ID: PAT_MRT3847_131918C.1.pep
TPSCLLRXPPIRYXYXXDTSSLIXCILIHRYHSYKXXEXIXXDDNLLNLASGSPNVQ

SEQ ID NO: 178187 - protein, 53 aa, Glycine max
  Clone ID: PAT_MRT3847_131919C.1.pep
FLLLRKMSINGFYQPICINYNTTLLFCCLRLLSDLVCNVLLLDLLYPRFINTV

SEQ ID NO: 178188 - protein, 45 aa, Glycine max
  Clone ID: PAT_MRT3847_13191C.1.pep
SGFFHLKVLQLLLWHNIGLLVESGLFSAYYFCCVSRFNFFFHHKR

SEQ ID NO: 178189 - protein, 47 aa, Glycine max
  unsure (1)..(47): unsure at all Xaa locations
  Clone ID: PAT_MRT3847_131920C.1.pep
MTTQVPPHSIQLHTTTHRYETGNLPPRARFXPPNYEASVKAPYIYHT

SEQ ID NO: 178190 - protein, 167 aa, Glycine max
  Clone ID: PAT_MRT3847_131921C.1.pep
LIPSGPAEISVQRKQLKAIIDSLLPACTAPDMETGVPFKAQAIIANPPAYGHVHVAEALGVPLHIFFTMPWTPTYEFPHPLARVPQSAGYWLSYIIVDLLIWWGMRRIINNFRKTTLKLAPIAYFSMYRGSISHLPTSYMWSPHVVPKPSDWGPLVDGCGYWFLSLA

SEQ ID NO: 178191 - protein, 516 aa, Glycine max
  unsure (1)..(516): unsure at all Xaa locations
  Clone ID: PAT_MRT3847_131922C.1.pep
GSRKIQSDGTVKVDLEKDAPLASELLKFQSFEESTMSGTLSSESXKSVPRLQIVILVVGTRGDVQPFLAIAKRLQEYGHHVRLATHDNFKTFVKSANVDFYPLGGDPRILAGYMARNKGLIPSGPAEISVQRKQLKAIIDSLLPACISPDMETGVPFRAQAIISNPTACGHTHVAEALGVPLHIFFTMPWTQXPTYEFSHPLARVPQSAGYWLSYIIVDLLIWWGIRGIINNFRKTTLKLAPIAYFSMYRGSISHLPTSYMWSPHVVPKPSDWGPLVDVVVSPYMANILPCFLSLASKYQPQEDFVQWIQKGPPPLYFGFGSMPLEDPKGTTDVILEALKDTEQRGIIDRGWGNLGNLAELSDNVFLLEECPHDWLFPQCSALVHHGGAGTTATGLKAGCPTTIVPFFGDQFFWGDRINQKGLGPAPIPISQLSLENLSNSIKFMLQPEVKSRAMEVAKLIENEDGVTAAVDSFHRHLPAELPLPIPFAVVDDHANPLQWFFLQLAKFCTLPCGGV

SEQ ID NO: 178192 - protein, 110 aa, Glycine max
  Clone ID: PAT_MRT3847_131923C.1.pep
LLIEVFEGTMRLENVQVLPDDIYVNDIVDTAKLVSKSSLQWFIHKVQDIIILSTLRHLVVNDANKSRYSLEYLDKDKTIVAHMAGRIDAYIKMSHDWPIFCSSYNLLFSK

SEQ ID NO: 178193 - protein, 234 aa, Glycine max
  Clone ID: PAT_MRT3847_131924C.1.pep
LEEVGPLRCWPGGLCLSRSIGDMDVGEFIVPVPHVKQVKLSTAGGRIILSSDGVWDALSAEMALDCCRGMPPEAAATHIVKESVQAKGLRDDTTCIVIDILPLEKPPTSVPTQKKPVKGMLKSIFRKKSSESSTFIEKEYLEPDVVQELYEEGSAMLSERLETKYPLCNMFKLFICAVCQVEIKPGEGISIHEGLTNPGRLRPWDGPFLCSSCQEKKEAMEGKRTSDRLSSGSD

SEQ ID NO: 178194 - protein, 150 aa, Glycine max
  Clone ID: PAT_MRT3847_131925C.1.pep
GPLRCWPGGLCLSRSIGDMDVGELIVPVPHVKQVKLSTAGGRIILSSDGVWDALSAEMALDCCRGMSPEAAATHIVKVRSSFAQFFNAIVSPCNLCHFVVCITCFYFYHFFLSLFFLQESVQAKGLRDDTTCIVIDILPHEKPPTSVLTQ

SEQ ID NO: 178195 - protein, 54 aa, Glycine max
  Clone ID: PAT_MRT3847_131926C.1.pep
AKFTFIICSSSCKGTSHSKNLTRERRKTMERRNTIIEETDETTVNKRRKRIKPN

SEQ ID NO: 178196 - protein, 59 aa, Glycine max
  unsure (1)..(59): unsure at all Xaa locations
  Clone ID: PAT_MRT3847_131927C.1.pep
EXRXNPTKXRXXNKGPKQSRKKXRXXRLLALVLLCSKTLASHHRNVLDPSDXHLEPSTR

SEQ ID NO: 178197 - protein, 95 aa, Glycine max
  unsure (1)..(95): unsure at all Xaa locations
  Clone ID: PAT_MRT3847_131928C.1.pep
QRIAIARPIIKKPRILLLDXATSALESESERVVQEALDKVAVGRATIIIAHRLSAIRNANVIAVVQSGKIMQMGSHHELIQNDNGLYTSLVCLQQ

SEQ ID NO: 178198 - protein, 50 aa, Glycine max
  Clone ID: PAT_MRT3847_131929C.1.pep
RIVFMQKGWCLTMGDREDHVDKVIPIWLEGNLIKTVINNRALSTLKIVRY

SEQ ID NO: 178199 - protein, 62 aa, Glycine max
  Clone ID: PAT_MRT3847_13192C.1.pep
RKRMAPTWAKGFEGKPLNAYNATLKPRQTAQYGSLLKCNPLCEGPELACKRTTRGPPFRKSD

SEQ ID NO: 178200 - protein, 253 aa, Glycine max
  Clone ID: PAT_MRT3847_131930C.1.pep
MADKYNLKNPAVKRILQEVKEMQSNPSDDFTSLPLEENIFEWQFAIRGPRDTEFEGGIYHGRIQLPSEYPFKPPSFMLLTPNGRFETQTKICLSISNHHPEHWQPSWSVRTALVALIAFMPTNPNGALGSLDYKKEERRTLAVKSREAPPKFGTPERQKLIDEIHEYMVSKAPSVPQPSASEASEENPRNEEAGTHANSLNPESLTAGEVILDQEVDGIVEEQEEVLANANPAGVEASKEVQPSVSRYEVLQK

SEQ ID NO: 178201 - protein, 69 aa, Glycine max
  Clone ID: PAT_MRT3847_131931C.1.pep
MGVPTWRKPVIYWGCLFVIINVFVQISNAFYLPGSYMHTYSNGDPIYAKVIAMHFIFREATYTYYSLPY

SEQ ID NO: 178202 - protein, 52 aa, Glycine max
  Clone ID: PAT_MRT3847_131932C.1.pep
LQNLNSAPKLTGPLYTKNGITFFIQKKLELFFNHLCILSYATFITNNNEPKK

SEQ ID NO: 178203 - protein, 78 aa, Glycine max
  unsure (1)..(78): unsure at all Xaa locations
  Clone ID: PAT_MRT3847_131933C.1.pep
RGPXXXAXPFLXKTXXPAXRXRFGXFSXPNRXPSHXRFKXXNPPXVMIXXXITIDRIXQKSKSVSSLSKSALNQKXKT

SEQ ID NO: 178204 - protein, 54 aa, Glycine max
  Clone ID: PAT_MRT3847_131934C.1.pep
PAVDRWHKSSHCPSFLIHFHWCTFVSIVFDVVLVSFMILHRSGQYPLDDLCVRE

SEQ ID NO: 178205 - protein, 146 aa, Glycine max
  Clone ID: PAT_MRT3847_131935C.1.pep
RSLEQSVELVSGDLVLNRGDPEWWSFYDLGILGSHGCGKFPGPMAIIVSEETPQGIIGDTLSKFIIWGLYITFVLAVGRFIRLQCSDLRMRIPFENLPSCDRLMAICEDIYAARAAGELEVEEVLYWTLVKIYRSPHMLLEYTQTE

SEQ ID NO: 178206 - protein, 131 aa, Glycine max
  unsure (1)..(131): unsure at all Xaa locations
  Clone ID: PAT_MRT3847_131936C.1.pep
VTPMIRANLEKQGYXIILSHNGVKRFTWTRAQLLSLSVFYKHSFYXFXSHKFIEATPILACSNXFVFFWRHHTNSIWNNFHFQNDYPIKIVNSAIYLHTNIIXQIIRVPXVTLEPLSEGLSPHHISLSLVG

SEQ ID NO: 178207 - protein, 78 aa, Glycine max
  unsure (1)..(78): unsure at all Xaa locations
  Clone ID: PAT_MRT3847_131937C.1.pep
SXXXVSSSRVXLESIDXFKXALDXXXIHEWXXXLXSLLAALQEQGQGWEPKXSVISFXIFLTEXILLPRGLYSRXRIA

SEQ ID NO: 178208 - protein, 85 aa, Glycine max
  unsure (1)..(85): unsure at all Xaa locations
  Clone ID: PAT_MRT3847_131938C.1.pep
VTSSAMVSVSLRVVLGWRREQPERLGSTHXQSARTGMILTKAYAPTARTSSGVTSQKSSAQVCSAIVHLELGGLGRGRTPWQRHR

SEQ ID NO: 178209 - protein, 87 aa, Glycine max
  Clone ID: PAT_MRT3847_131939C.1.pep
QRARKRVNMSLWNSPSSTSRVQSPQNTPIIPASCSPKLVKRMQQETCYKCDQRGHWSYYCPYKSPKTKPISPSPKQDSTVSYKRVCF

SEQ ID NO: 178210 - protein, 99 aa, Glycine max
  unsure (1)..(99): unsure at all Xaa locations
  Clone ID: PAT_MRT3847_13193C.1.pep
SYWLFQKKQNSVCPPWEGSAPIYPGGSLDPXPLADHPRGFSXLSVKELKNEXLAMSSMFGFFVQAIVTGKSPLKNLTDTLCVLATNKAWAYASNFVPGK

SEQ ID NO: 178211 - protein, 51 aa, Glycine max
  unsure (1)..(51): unsure at all Xaa locations
  Clone ID: PAT_MRT3847_131940C.1.pep
KKQVFNRKKIPYFFYMILVSLLCNLARFHIHLFKNINSWSVVCLSEXXXXQ

SEQ ID NO: 178212 - protein, 63 aa, Glycine max
  Clone ID: PAT_MRT3847_131941C.1.pep
VAGVVDAGAVPLFAVGEDGAGAVAIRTNGRRNATASSKSTEIGKTAKDKGLCVCLCLKQRLRE

SEQ ID NO: 178213 - protein, 43 aa, Glycine max
  Clone ID: PAT_MRT3847_131942C.1.pep
NQSITTPIASARRRGCNRGGHISQVHKAYSEPATHFASQSAQA

SEQ ID NO: 178214 - protein, 46 aa, Glycine max
  Clone ID: PAT_MRT3847_131943C.1.pep
NGAFKTVLSTPVRWDLLNIKIIHETLSLNFNCFNLKPKLSSPFVIL

SEQ ID NO: 178215 - protein, 62 aa, Glycine max
  Clone ID: PAT_MRT3847_131944C.1.pep
EQISCTVFNYLLTLQILKKKGVVILPDIFANSGGVTVSYFEWVQVTINCYDFTWLHIWFLSY

SEQ ID NO: 178216 - protein, 44 aa, Glycine max
  Clone ID: PAT_MRT3847_131945C.1.pep
TKFSLMHIHLPLSKTYHTSSSTINSNFISKYLLQYQPLLHSTYL

SEQ ID NO: 178217 - protein, 124 aa, Glycine max
  Clone ID: PAT_MRT3847_131946C.1.pep
NVALISDAFSLSIIFQFTLACIKMGRIELAQKAVALAEKRLPVDSWPEYYDTRTGKFIGKQARMYQTWTIAGFLTSKMLLKNPEMASMLFWEEDYELLDICVCGLSKSGRKRCSRGAARSQILV

SEQ ID NO: 178218 - protein, 150 aa, Glycine max
  Clone ID: PAT_MRT3847_131947C.1.pep
ERIGFEVVIFVQMGIDQLRWRWWNAVVLIGMVGVTVVTVTGSDSHEKQEQVVSRIAFGSCSNQSAPQVPKFFLFCYVLFFYFNFSTFYSSSVLFCLVFVLFFFTHVAVSCNGTCMLMILFLCFNHDVPILVLARCCSANVTSALSKLQAS

SEQ ID NO: 178219 - protein, 43 aa, Glycine max
  Clone ID: PAT_MRT3847_131948C.1.pep
MSLSEFRPLDDKFLIEYIKSVPALSSKLADNFDDLSVKEVGDG

SEQ ID NO: 178220 - protein, 204 aa, Glycine max
  unsure (1)..(204): unsure at all Xaa locations
  Clone ID: PAT_MRT3847_131949C.1.pep
MISNVFLKPQVVGLLPSKLVFPHRSKASSSLSLPTHFSTAPLSSYGPSLHKGTPIPSQTLPQDDAVLCQEAFTRVFHLAALRLPSSQCSALEGRLRGHLLNWPRLRNIARVPGDDLDPSLAPLLPQPGNANGDFDYDDEEERRLFSLQRRIHGKADGDGDVLGPVLYRDRLARTFNTSGXXKFRHLAKISRPNRNKRRRKSREA

SEQ ID NO: 178221 - protein, 54 aa, Glycine max
  Clone ID: PAT_MRT3847_13194C.1.pep
VCLLTLAGATPKSVLELMNVKDLTLAHVKSHLQVGYSLFIPISLSFSIVFELNE

SEQ ID NO: 178222 - protein, 56 aa, Glycine max
  Clone ID: PAT_MRT3847_131950C.1.pep
GRADDNDGDEQNKVHHLKRRMLRDKTHLMRLKERSIPRERFDALSRGCSNNSHYEH

SEQ ID NO: 178223 - protein, 207 aa, Glycine max
  Clone ID: PAT_MRT3847_131951C.1.pep
PGSTHASVRLREDDRRGNKIAVGIAHGLAYLHYDCDPPIVHRDIKPSNILLDSDMEPHIADFGIAKLLDQSSASNPSISVPGTIGYIAPENAYTTTNSRESDVYSYGVVLLELITRKKAAESDPSFMEGTIVVDWVRSVWRETGDINQIVDSSLAEEFLDIHIMENITKVLMVALRCTEKDPHKRPTMRDVTKQLADANPRARSTKG

SEQ ID NO: 178224 - protein, 62 aa, Glycine max
  Clone ID: PAT_MRT3847_131952C.1.pep
GCPAITFATIIVEGILANLVHQFDWSLPGGAAGEDLDMSETPGLAANRKYPLYAVATAYERN

SEQ ID NO: 178225 - protein, 49 aa, Glycine max
  Clone ID: PAT_MRT3847_131953C.1.pep
YPCILHLSKVIHRRLHLITSIFFCNTVILHTYEAPLQLYYWMLNLNVHK

SEQ ID NO: 178226 - protein, 73 aa, Glycine max
  unsure (1)..(73): unsure at all Xaa locations
  Clone ID: PAT_MRT3847_131954C.1.pep
LRIPTPQXREATKPSGARRGRENRXXPRAPPEAEKERHKPGGEEPEHRKHHTRKRQKPXHQXGDKQPENPPTK

SEQ ID NO: 178227 - protein, 33 aa, Glycine max
  unsure (1)..(33): unsure at all Xaa locations
  Clone ID: PAT_MRT3847_131955C.1.pep
IRSXEDDMNSSWEQRLVKRYYYKLLKEYCLAEM

SEQ ID NO: 178228 - protein, 116 aa, Glycine max
  Clone ID: PAT_MRT3847_131956C.1.pep
SPKTGKKSPYSLGGRSKKKILGKNGPPPPPLGLGGGPLNWPNQTLPPNLGFFGGGGKPPSNFLVNRGGGKPLLKSNRALHGKILAPKNPEKGAPPEENLPIPKTRGGNKGKIIWKG

SEQ ID NO: 178229 - protein, 89 aa, Glycine max
  Clone ID: PAT_MRT3847_131957C.1.pep
IFPTPSSILHKLIVITQWLIPSYPYGDPIFAYGPQAISHPQMIPPMLGLASTRVALPLDLAEDGPIYVNAKQYHGILRMRQSRAKLDAH

SEQ ID NO: 178230 - protein, 112 aa, Glycine max
  Clone ID: PAT_MRT3847_131958C.1.pep
RLREDDRRGDPKGTLIVLLLFLSLFLLLILPYPVSLSSLPFFFFHFPSYHLFFFFGLYFGGVFFFSFVLFYLLILGFGLFYCVWNTSGEVRNFVVSHLHVEFEVSFVFVKVT

SEQ ID NO: 178231 - protein, 263 aa, Glycine max
  Clone ID: PAT_MRT3847_131959C.1.pep
LQPNTSSTCFFIPLPDPKGLDLILSDSSDEYIEGYMKQFLFLNLPNTEFNSSQVDCNHSMAHSSYPYGDPIFAYGPQAISHPQMIPPMLGLASTRVALPLDLAEDGPIYVNAKQYHGILRRRQSRAKLEAQNKLIKNRKPYLHESRHRHALNRVRGSGGRFLSTKQLAQSNAEFVTGAHSGSDPTNRYQKEHLSEVESHSSKDGDNSSFITTCSDRPCLSGNNVNFRQQECMFLGNSANMGGSPQFSGGLTFGGAKQRTSVVR

SEQ ID NO: 178232 - protein, 91 aa, Glycine max
  unsure (1)..(91): unsure at all Xaa locations
  Clone ID: PAT_MRT3847_13195C.1.pep
IQXXSQKFQEKSXNSFQXXAEKLFRRXXMVSTTMCVKPCEVSTYGKARLSKLREVLALFRAIHTKVPPYAIKCTDVQETVEYXGPYLTIDP

SEQ ID NO: 178233 - protein, 61 aa, Glycine max
  Clone ID: PAT_MRT3847_131960C.1.pep
MRCRACTVIITLGRFDYSLVVSSLNDFLAVLNALSIFAYLNSSTYCYHSFLVNYSSLIVPG

SEQ ID NO: 178234 - protein, 73 aa, Glycine max
  Clone ID: PAT_MRT3847_131961C.1.pep
LLYNCESETTKENCRTVLGLKQLIKLDRQMNQMQCLDINIMPSLFLKHTLEVGQETDIIDMLVYRHWNVIELF

SEQ ID NO: 178235 - protein, 57 aa, Glycine max
  Clone ID: PAT_MRT3847_131962C.1.pep
PLVRPRVRPRVRFHGRASWPCNFCKSIQVQFLSHLLSMLIALMVLGIQFRRNFTPSS

SEQ ID NO: 178236 - protein, 86 aa, Glycine max
  Clone ID: PAT_MRT3847_131963C.1.pep
EGIGPRDFSRTLAERLVIDVTKVLHELDLLPARVISTNTITVTGESGEENEEKVLFAKKSEIETQREITSVWKKFVMERKKMNGVC

SEQ ID NO: 178237 - protein, 46 aa, Glycine max
  Clone ID: PAT_MRT3847_131965C.1.pep
ITLTLTKIVQLTKNFSKYLTTLGSLHTYLYSFPMQICDIFTRKVPI

SEQ ID NO: 178238 - protein, 153 aa, Glycine max
  unsure (1)..(153): unsure at all Xaa locations
  Clone ID: PAT_MRT3847_131966C.1.pep
FSASFLVCFGFLEAAYLSACLLEFHKGAWYLVVLLAVSMTVMLSWHYGTMKKYEFDLQNKVSTEWLIDISPGLGISRVPGIGFIYTDIVXGIPAFFSHFITNLPAFHQVLILVSFKSIAAPYVPESERYLIGWIVPKDFKIYRCIVRSDIVTN

SEQ ID NO: 178239 - protein, 475 aa, Glycine max
  Clone ID: PAT_MRT3847_131967C.1.pep
FGSRLLRGLEHCHSRGVMHRDIKGSNLLLDSNGNLKIGDFGLAALFQPSHGQPLTSRVVTLWYRPPELLLGATDYGVTVDLWSAGCILAELFVGKPIMPGRTEVEQLHKIFKLCGSPSEEYWKKSKPPHATVFKPQQPYKCVISQTFKDIPSSALSLLEVLLSVEPKDRGTASLALQHEFFTAMPLPCDPSTLPKYPPSKEFDAKLREEETRRRRAANKGYEHESVGRNFRESKAVPIPDANAEFQATVRRQGQCNSKCTTKKYNPEEDGDYGFHREPAKSRALDVLSHSGQSVHPSVYGSSRNMNLKEEDLTSPDHGFRSRKSELRKQKSYWQGSTAKLSRFSNSVAVQGDPLLDMSGDSSANSQWPEDQFGMRCSHQADGDSKQLLDGLKSSQKNDFHPIGKDRAKGYANKNARMHHSGPLLAPEDNLEEMLKEHERQIQQAVRKARLGKDKTKKADSESGLTESLFHHVRNQ

SEQ ID NO: 178240 - protein, 89 aa, Glycine max
  unsure (1)..(89): unsure at all Xaa locations
  Clone ID: PAT_MRT3847_131968C.1.pep
QGLKQKLEEFNPLTVAPARKNVGYDPKPKLEVETQKKGFFIKVFSENSFQGLLVFILEAFXKMGLYVLPNRVFCGPSFSLKAFGNKKNH

SEQ ID NO: 178241 - protein, 175 aa, Glycine max
  Clone ID: PAT_MRT3847_131969C.1.pep
MFKFLKEVVSGSGTGLKDLPYNIGEPYASAWGSWLHFRGTSKDDGSPVSIFSLSGSNSQDGHLAAGRNGVKRLRTVRHPNILSFLHSTEIETVDAGSPKVTIYMVTEPVMPLSDKIKELGLEGTQRDEYYAWGLHQIAKAVSFLNNDCKLVHGNVCLASVVVTQTLDWKLHAFDV

SEQ ID NO: 178242 - protein, 51 aa, Glycine max
  Clone ID: PAT_MRT3847_13196C.1.pep
PGYGFIFGGAPPEAGYCKNHCQHEQSHGGPPDKKGLLSKIKQKIFGGPCFK

SEQ ID NO: 178243 - protein, 49 aa, Glycine max
  Clone ID: PAT_MRT3847_131970C.1.pep
DIQEREHVALWGNRVELRFNLEEATSNSKGLSSNCFPRLTIEVLRKDPF

SEQ ID NO: 178244 - protein, 113 aa, Glycine max
  Clone ID: PAT_MRT3847_131971C.1.pep
HKHIYLYNKKGILLLVRRQRVFPTKLQREQTRIIVWNHVQRNLVPLELRTLWQQSNRVIHTNFLPHIYFISILCPSLKDEDSFTVTKFTTINMNTTYSSNSPIIHTDLHPLSK

SEQ ID NO: 178245 - protein, 30 aa, Glycine max
  Clone ID: PAT_MRT3847_131972C.1.pep
FWAPPLAKRNELQPLWVIIYWILATQITFF

SEQ ID NO: 178246 - protein, 51 aa, Glycine max
  Clone ID: PAT_MRT3847_131973C.1.pep
PLQLLLQTYVHRRMQSATSENSMPLLMPISERFHVRAMPMNATQTHVLHCH

SEQ ID NO: 178247 - protein, 65 aa, Glycine max
  Clone ID: PAT_MRT3847_131974C.1.pep
HKQRLDDAETPNGPRVEPKMPEPKMARPKNTLGGTSRRRDLETQDGTEGNHRARGDTQRTHRIKG

SEQ ID NO: 178248 - protein, 159 aa, Glycine max
  Clone ID: PAT_MRT3847_131975C.1.pep
MAGGSIKRHSFSEEDHGFASSMEPGYSGHNHHFHHGFVSRTLGYGTFYNRGVRSQSIFSPRSGRFYDARFEDHQPHFLQACSLCKKRLGDNSDIFMYKGDTPFCSEECRQEQMERDEAKEKNNNLSSSMKALRKKEQRNSVSPNKTQDYSFRAGTVAAA

SEQ ID NO: 178249 - protein, 44 aa, Glycine max
  Clone ID: PAT_MRT3847_131976C.1.pep
ILKNNCTICQRLIKHHNMISKQKLRRKMRHSFFSIVNTLIQEEC

SEQ ID NO: 178250 - protein, 76 aa, Glycine max
  Clone ID: PAT_MRT3847_131977C.1.pep
MSIVALALAYVAPSIKARVLPPAPAPSSHGIAVGQGIAYVLMLFALVHTFIMHQPVHQFTMSFFSVAFIPSSLFVQ

SEQ ID NO: 178251 - protein, 73 aa, Glycine max
  Clone ID: PAT_MRT3847_131978C.1.pep
PEGRGCKRLPKIKCEKPFFWEFSPPPPGGNFKYLGGIKKGPRACLPSLKPRGGFPKYFGGGVKKRRFVLYVGQ

SEQ ID NO: 178252 - protein, 75 aa, Glycine max
  Clone ID: PAT_MRT3847_131979C.1.pep
ALRIAPLAMKAMHNASDIYNVDQAMDHINEQTEYMTEIQDAVSAPIGAAADLAEGALVPVLEELEGDELPAQFLQ

SEQ ID NO: 178253 - protein, 81 aa, Glycine max
  Clone ID: PAT_MRT3847_13197C.1.pep
ILRLQKEEFPKGKRKARKRRRLALQGRAVKDVRRRQKADSLTDEDLGPFSNSSEESMFSEDEIQAGRIRPAGSSSDEAGSA

SEQ ID NO: 178254 - protein, 49 aa, Glycine max
  Clone ID: PAT_MRT3847_131980C.1.pep
VLNDQVKHNAHYLLSIRTDHHTIGLSLALAQSLTSGFHAGSYYAINPID

SEQ ID NO: 178255 - protein, 95 aa, Glycine max
  unsure (1)..(95): unsure at all Xaa locations
  Clone ID: PAT_MRT3847_131981C.1.pep
XAXXCXVMXLSXXFTXLGLARXSXARDEDFWHAVWPXXPIXSXLRDLLKPGPASVEIADXPMXIXETQXPXTFFXKXXLXXGKXXKVXFSKPPFQ

SEQ ID NO: 178256 - protein, 56 aa, Glycine max
  Clone ID: PAT_MRT3847_131982C.1.pep
CTSGQFMFANQDGLQQRFKAVRPLVVSPPSAADSDPCSISRSLVLYVLTLMKMSQR

SEQ ID NO: 178257 - protein, 48 aa, Glycine max
  Clone ID: PAT_MRT3847_131983C.1.pep
GVLRHGPLCLFCCSVYSFSSGFFILSEVYAISVVQHPFFIFSNTFFKI

SEQ ID NO: 178258 - protein, 145 aa, Glycine max
  Clone ID: PAT_MRT3847_131984C.1.pep
AGSRSKNNVNESYVANHGGLPDVDYLERKNPKDETFRVKPFYNNANPPAYTREEQFEGGFNQHDSWGNARRVKESQDTATSRKSPGHAGSHSKNNVNKPFAANHGGLPDVDNSERRTQKDETPRAKPFYNNAMIPPSYVKPNSKL

SEQ ID NO: 178259 - protein, 255 aa, Glycine max
  unsure (1)..(255): unsure at all Xaa locations
  Clone ID: PAT_MRT3847_131985C.1.pep
MQSTTSIIQMGEPRLQAEHTIEMGEAKALVPESVVKKEKRNEEWALEKKQELDAAKKKRFETRKLIFNRAKQYSKEYDEQQKELIRLKREAKLKGGFYVEPEAKLLFIIRIRGINAMDPKTRKILQLLRLRQIFNGVFLKVNKATVNMLHRVEPYVTYGYPNLKSVKELIYKRGYGKVNKQRIXTLGKHGIICVEDLIHEIMTVGPHFKEANNFLWPFKLKAPLGGLEKKRNHYVEGGDAGNREDYINELIRRMN

SEQ ID NO: 178260 - protein, 74 aa, Glycine max
  Clone ID: PAT_MRT3847_131986C.1.pep
LLQFRTIPYIVVSFPLQLIKDPFGCCMRLGASLKQTKKYSYNQKEKTLYKETYWLKHYHFVLTLFFPFIGIAGL

SEQ ID NO: 178261 - protein, 59 aa, Glycine max
  Clone ID: PAT_MRT3847_131987C.1.pep
TKPLPMSRRLFIQRARGNSFETPHIDWELKVSCYISLTDRGCFNLSLTVIIHPRLSKST

SEQ ID NO: 178262 - protein, 93 aa, Glycine max
  Clone ID: PAT_MRT3847_131988C.1.pep
GLTQDLKTGPVKVPAVGWSEHPPKFTMWPRTLIAHCCFFNSHSKYEMGCYRKSLAILKATPLLFKENGPVLSQVHTGEVIALLSCKLCNAKFF

SEQ ID NO: 178263 - protein, 98 aa, Glycine max
  unsure (1)..(98): unsure at all Xaa locations
  Clone ID: PAT_MRT3847_131989C.1.pep
NGVPLIACPLYAEQRMNPTXLAEELGLALRTPVLPTXKVVRREEIEHMVREIIQGDENGKSNGIRERVKETQRSAVKALSEGGSSYVALSQVAKIIEG

SEQ ID NO: 178264 - protein, 111 aa, Glycine max
  Clone ID: PAT_MRT3847_13198C.1.pep
LQQVRRAVQCGVWCKKKEIHPQFYEESKVYCNGELVLTTGGTQKEYVVDVWSGNHPFYLGSRSASMVSDDQVEKFRKKFGELKEIMEIPVLKGEIVIPSRRKGVSKGGKKK

SEQ ID NO: 178265 - protein, 58 aa, Glycine max
  Clone ID: PAT_MRT3847_131990C.1.pep
GQKLIPFKTLAKHFKRAINRFSYPANCPPNLIQGSGPVKPITAFKTKKGEPPFLPGRG

SEQ ID NO: 178266 - protein, 77 aa, Glycine max
  Clone ID: PAT_MRT3847_131991C.1.pep
AVSLHVGEHVQVAYTHHNKSPRHPRSLAGKDERFCLCQGALDNLGRLRQQDGLAKGAHEGMMVIEAYKAVHDQAPCP

SEQ ID NO: 178267 - protein, 39 aa, Glycine max
  Clone ID: PAT_MRT3847_131992C.1.pep
IIHFNWIARTVLKKWSTNYQFLFIIELTAQLGFVSNICS

SEQ ID NO: 178268 - protein, 65 aa, Glycine max
  unsure (1)..(65): unsure at all Xaa locations
  Clone ID: PAT_MRT3847_131993C.1.pep
PQXXQPIPKFSNPNSKFEGQSIPRPGGWPFYSGGEPWKGRRGPTQTGGGWPSLKKVSREAYPLAF

SEQ ID NO: 178269 - protein, 92 aa, Glycine max
  Clone ID: PAT_MRT3847_131994C.1.pep
WDSTGFPSDDTVRRAQLQAIIRRLQGIVASMSRMPTFRRRFRNLIKVLYIEALQAGASASHIGGTLIPKHREKGSIQSKDNVDELDEPSNEC

SEQ ID NO: 178270 - protein, 93 aa, Glycine max
  Clone ID: PAT_MRT3847_131995C.1.pep
MEGTSNKGLLECGRKCTPPPFLLKTYMLVEDPATDDVISWNAKGTAFVVWQPPEFARDLLPTLFKHSNFSSFVRQLNTYVRFGKILHSIRISI

SEQ ID NO: 178271 - protein, 55 aa, Glycine max
  unsure (1)..(55): unsure at all Xaa locations
  Clone ID: PAT_MRT3847_131996C.1.pep
IKKXELKAKIVTWERHDVGVTTRHALTLSIKRLIILSRPFTVQRNDLYVHECFPS

SEQ ID NO: 178272 - protein, 72 aa, Glycine max
  unsure (1)..(72): unsure at all Xaa locations
  Clone ID: PAT_MRT3847_131997C.1.pep
FSLHPSLRIGIESLAAGVFPSCNPSKGSQSKKDRFSSLASHQAPLCRWWLQKDSTEVAGKQSDSDXMEXXML

SEQ ID NO: 178273 - protein, 72 aa, Glycine max
  Clone ID: PAT_MRT3847_131998C.1.pep
GVGPLFLVSRFYIFSLRHVFSCEFRAFFSFPQEIIFSPFTPRFSISPLRKGCSPGGPGLKFVGEPKVPPKGP

SEQ ID NO: 178274 - protein, 70 aa, Glycine max
  Clone ID: PAT_MRT3847_131999C.1.pep
VITARMHPAAAKEVTLPSMSITASASRSFPGTLTGSPDTGTYSFEELVQKGSKGHKVRIHVRTKGSTKKG

SEQ ID NO: 178275 - protein, 55 aa, Glycine max
  unsure (1)..(55): unsure at all Xaa locations
  Clone ID: PAT_MRT3847_1319C.1.pep
PRVRFCMMSXGGSYLTWIDFLLLADIGSCIFANTKGFSLCLLSLLGSLNLKFCVH

SEQ ID NO: 178276 - protein, 65 aa, Glycine max
  Clone ID: PAT_MRT3847_131C.1.pep
KLTSPPVVCPLKNSFFKVGSTNLLFPGQRGKFPRILVKRKIPVKGPFFFFFPSPKPIGLKTSRFF

SEQ ID NO: 178277 - protein, 115 aa, Glycine max
  Clone ID: PAT_MRT3847_132000C.1.pep
EQIIDPTLAGKIRPDSLRKFGETAEKCLADFGVDRPSMGDVLWNLEYALQLQEAVVQGDPEENSTNMIGELSPQVNNFNHEVSVSAAQFEATSLDDLSGVSMSRVFSQLVKSEGR

SEQ ID NO: 178278 - protein, 310 aa, Glycine max
  unsure (1)..(310): unsure at all Xaa locations
  Clone ID: PAT_MRT3847_132001C.1.pep
MAMVSMAFGVSTATFPNLNRCRGVAYASLSNKASTTSLGVRVTEGEGNLPKLVLTSPAGSEAEIYLFGGCITSWKVPSGKDLLFVRPDAVFNGNKPISGGVPHCFPQFGPGPIQQHGFARNMDWTVVDSENTXGNPVVTLELKDAPYSRAMWDFSFHALFKVTLNAKSLATELTVKNTDNKAFSFSTTLHTYFQASVSNASVKGLKGCKTLNKDPDPKNPVXGKEERDVVTFPGFVDCAYLDASSELQLDNGLGDLISIKNTXSDAVLWNPYLQMEACYKDFVCVENAKIGSVQLEPEQTWTAVQHLSIA

SEQ ID NO: 178279 - protein, 341 aa, Glycine max
  Clone ID: PAT_MRT3847_132002C.1.pep
MAMVSTSVAFGVSTATFPNLNRCRGVAYASLSNKASTTSLGVRVTEGEGNLPKLVLTSPAGRCVILYKTIFPSLHNTTMCVRWLNLWVCSEAEIYLFGGCITSWKVPSGKDLLFVRPDAVFNGNKPISGGVPHCFPQFGPGPIQQHGFARNMDWTVVDSENTEGNPVVTLELKDAPYSRAMWDFSFHALFKGTLNAKSLATELTVKNPGNKAFSFSTALHTYFRASASNASVKGLKGCKTLNKDPDPKNPVEGKEERDVVTFPGFVDCVYLDASSELQLDNGLGDLISIKNTNWSDAVLWNPYLQMEACYKDFVCVENAKIGSVQLEPEQTWTAVQHLSIA

SEQ ID NO: 178280 - protein, 52 aa, Glycine max
  Clone ID: PAT_MRT3847_132003C.1.pep
LMSNLLIVCIGSYYFYIDIPCSMHNAQCPMLNAEGNFSNFILFSPSGSLYDS

SEQ ID NO: 178281 - protein, 106 aa, Glycine max
  Clone ID: PAT_MRT3847_132004C.1.pep
QKHKGPPLLHWISWGGGDHIIKQLVFWWPLELQQHHPLPKVLLLRGHHMVLNFFWGGSGLHLRHLSFWHRGWNIPGSLGYGTLRKGSWPSSQEEGKHTPKKRGRGG

SEQ ID NO: 178282 - protein, 94 aa, Glycine max
  unsure (1)..(94): unsure at all Xaa locations
  Clone ID: PAT_MRT3847_132005C.1.pep
QRSNPGRWLRLTSRPSNPAPEPAVCAKEDVAEEKSAIDTPXPSSADEINAVVIAAKTSVAAEKKPIEGSAHRDAALARDATEXRLSLIKAWEES

SEQ ID NO: 178283 - protein, 65 aa, Glycine max
  Clone ID: PAT_MRT3847_132006C.1.pep
DGLEKTTKRGKKKLLLNWIRPVLLRTISKNWVKFGGPYPLRVLWKMEGLILGRVIKIGKNLNLEG

SEQ ID NO: 178284 - protein, 71 aa, Glycine max
  Clone ID: PAT_MRT3847_132007C.1.pep
RGGGRRVKKGGRGVGARWSGYWKEAVWLPLVSDQAGKHHCHHVDFFHRIQLDFQLVVLSSSHQSLCLQDLV

SEQ ID NO: 178285 - protein, 65 aa, Glycine max
  Clone ID: PAT_MRT3847_132008C.1.pep
NKKITVSYYSFFSLSKYIPQTVLSNMTTRTAYKNLKGNKPIFFKIVFFFFKDWLIRGGRVLFAAA

SEQ ID NO: 178286 - protein, 95 aa, Glycine max
  Clone ID: PAT_MRT3847_132009C.1.pep
PPTRPTTAGPTGATTRSVYQKHQWADLHGSPEDQMAQPGSVTKADTVPCSEAGPDIHLTDVGPRPHDHMAENDTTNENILCGPFCGSFQPSTNSL

SEQ ID NO: 178287 - protein, 264 aa, Glycine max
  unsure (1)..(264): unsure at all Xaa locations
  Clone ID: PAT_MRT3847_13200C.1.pep
FCIFGSLLGSMDFSDLAHKFSRCIGTIGNLGLQLLWXFQGIILSECYFISVVGNLLKSYFILLGLLKKYKSLQLPGVTYFANLLVCKRADQFSXVVPLFLWLVTGAALVVRLSVLMGVLKKSKETIFKELKNAKSIEEVNEVVALHDPLEPIRLELSYADGKEAVAKAANLIFVEHLKRHKLGGELDLILLEPQLNEALQIVGSKGPEPDLLLVYGPVRSHLGFPAWRLRYTEIIHMGSLNFLRYGSLMKAIYNFTKVHQNYGT

SEQ ID NO: 178288 - protein, 43 aa, Glycine max
  unsure (1)..(43): unsure at all Xaa locations
  Clone ID: PAT_MRT3847_132010C.1.pep
GLCWAWRSRLRNENLGVGFSWPYMQNFPYLSIXIKGFRGVXRL

SEQ ID NO: 178289 - protein, 39 aa, Glycine max
  Clone ID: PAT_MRT3847_132011C.1.pep
RIVFFTIPISFNLSPITSTIQRIRSNQEPEGVSIIHTID

SEQ ID NO: 178290 - protein, 131 aa, Glycine max
  unsure (1)..(131): unsure at all Xaa locations
  Clone ID: PAT_MRT3847_132012C.1.pep
LMAPNPTKVKTLKFNSTVQIVLQNTAIIAAENHPIHFHGFNFHVLAQGFGXNYNATRDEPKFNFVNPQIRNTIAVPVGGWSVIRFQANNPGVWLMHCHLETHLPWGLSTAFEVENGPSIRVPPPPADLPKC

SEQ ID NO: 178291 - protein, 181 aa, Glycine max
  Clone ID: PAT_MRT3847_132013C.1.pep
MDAMTLSLPLPPVPVCTVPASASTSSSVSLTHSWSATARQRLSSHRTRPIFRNYSSAVPKLTVVTCGAAVTEINETQFKDTVLKANRPVLVEFVATWCGPCRLISPSMESLAKEYEDRLTVVKIDHDANPRLIEEYKVYGLPTLILFKNGQEVPESRREGAITKVKLKEYVDALLESISVS

SEQ ID NO: 178292 - protein, 153 aa, Glycine max
  Clone ID: PAT_MRT3847_132014C.1.pep
MDTVTLSLLSLPPVPVRTVSASASTSSSVPLTHSYSCSARQRLSSHRTRLSFRNHSSAVPKLTVTCGAAVTEINETQFKDTVLKANRPVLVEFVATWCGPCRLISSAMESLAKEYEDRLTVVKIDHDANPQLIEEYKVYGLPTLILFQNGQEV

SEQ ID NO: 178293 - protein, 308 aa, Glycine max
  Clone ID: PAT_MRT3847_132015C.1.pep
MSTIAKRDLSSNEEESELRRGPWTLEEDSLLIHYIARHGEGRWNMLAKSAGLKRTGKSCRLRWLNYLKPDIKRGNLTPQEQLLILELHSKWGNRWSKIAQHLPGRTDNEIKNYWRTRIQKQARQLNIESGSKRFIDAVKCFWMPRLLQKMEQSNSPSPHHSSMTNMMNLGNSGEASMSSMSSSFNINPSMSSSSSPPQREFIMDDANHFNTMSNPINPSPDSFQFSQLLEISEHPKSPSNVFENNVCSYPIQDNCYVDTNNYGMEGINMDPLSAMDTYDFPQFDFQTAGNGWMLDSMGDSTLWNMEAM

SEQ ID NO: 178294 - protein, 123 aa, Glycine max
  unsure (1)..(123): unsure at all Xaa locations
  Clone ID: PAT_MRT3847_132016C.1.pep
MALRCLGMSLSVLFTLGLARXSHAIDDDFYXAVWPNTPIPSSSGDLLYPGPARVEIDDHPMQIEETQCPKTLFYKEDLHPGKTMKVQFSKPPFXQPWGGGTWVKETXDPPIEGYRLEELCLLK

SEQ ID NO: 178295 - protein, 54 aa, Glycine max
  Clone ID: PAT_MRT3847_132017C.1.pep
GGFFLKIKKKFPFGDGIRRKVQVEPGMVEVESYQIQGSVKRKEKNGLKKRKNNV

SEQ ID NO: 178296 - protein, 50 aa, Glycine max
  Clone ID: PAT_MRT3847_132018C.1.pep
TKSEEGDSLFSTMPAITYLEPTYTTAYEKQSRLCPEDHFMRMKCSKVFTE

SEQ ID NO: 178297 - protein, 199 aa, Glycine max
  Clone ID: PAT_MRT3847_132019C.1.pep
TDSIGCAPISHQGRAHSVLASKPGTTAASASTPEFEPFITTFLHSFTVFLFDSICCFFCFVSLTMLTMSKQKKNQNAKRLLISINVLGSAGPIRFVVNEEELVAAVIDTALKSYAREGRLPVLGNNTTGFVLYCPHLGSDALSPWERIGSHGVRNFVLFKKPEGVADVDGSTALSRSSRGSGSWKAWFNKSLNLKISTH

SEQ ID NO: 178298 - protein, 173 aa, Glycine max
  Clone ID: PAT_MRT3847_13201C.1.pep
MAITLNNGFKMPIIGLGVWRMEGNEIRDLILNSRSIWMRCWLVAADYKNEAEVGDALKEAFDSGLVKREDLFITTKLWNSDQGHVLEACKDSLKKLQLTYLDLYLVHFPVAVRHTGVGNTSSPLGDDGVLDIDTTISLETTWHAMEDLVSSGLVRSIGISNYDIFLTRDWLAY

SEQ ID NO: 178299 - protein, 86 aa, Glycine max
  Clone ID: PAT_MRT3847_132020C.1.pep
PHARWSYRTQIEQSPSRNVAYSPFSVVNMGVPKLVVSNSKLCSRSFWQHEKNSEGQKQQKHPLHPLHHCVLCLACFVSPSVVFSHV

SEQ ID NO: 178300 - protein, 57 aa, Glycine max
  Clone ID: PAT_MRT3847_132021C.1.pep
IPSCQGGGYELGLFFIFPPLGGENKERGFMMCSNIHVDVPFSFSLYQVKFLYGGLGP

SEQ ID NO: 178301 - protein, 358 aa, Glycine max
  unsure (1)..(358): unsure at all Xaa locations
  Clone ID: PAT_MRT3847_132022C.1.pep
MENNEILEELLNIEVEIQDVQEQIRALIERQESLYERKSELSAILEACKESGNEANNAASSAAENWSGEFEWDSEADDVRLNVFGISSYRANQREIINAIMSGRDVLVIMAAGGGKSLCYQLPAVLRDGIALVVSPLLSLIQDQVMGLTALGIPAYMLTSTNKGDEKFIYKTLEKGEGELKILYVTPEKISKSKRFMSKLEKCHHAGRLSLISIDEAHCCSQWGHDFRPDYKSLSILKTQFPRVPIVALTATATQRVQNDLIEMLHIPRCVKFVSTVNRPNLFYMVKEKSSVGKVVIDEIAEFIQESYPNNESGIVYCFSRKECEQIILXAKELRERGISADYYHADMDVNAREKVHM

SEQ ID NO: 178302 - protein, 72 aa, Glycine max
  unsure (1)..(72): unsure at all Xaa locations
  Clone ID: PAT_MRT3847_132023C.1.pep
PTNNIPRTSWKXIRIAIREHPRPGVLFFLLLLSEFSQRWTLEPFTHPPPHLFIAKDGIRSHGSSPTPAISST

SEQ ID NO: 178303 - protein, 64 aa, Glycine max
  Clone ID: PAT_MRT3847_132024C.1.pep
KSNNSSLCTTNSCRPTLQNLSEPVFNSHSRGNPRIIRYYCRLRSKVKGTLVTLLSSSRSCTDAW

SEQ ID NO: 178304 - protein, 64 aa, Glycine max
  Clone ID: PAT_MRT3847_132025C.1.pep
RERERELVSSFFFFFLVVKKILSHKTLKTINFDITISKSLHYHVSEQRTSRMLPLIWYLVHYSI

SEQ ID NO: 178305 - protein, 88 aa, Glycine max
  unsure (1)..(88): unsure at all Xaa locations
  Clone ID: PAT_MRT3847_132026C.1.pep
LACTETEAKRGHTLMXVATVSLFLXTITLSATHRSTTAQDIARKSKLGDNEPLRTENKFKGFIENYWRSYSTEAEYLRPLEIFSQNIV

SEQ ID NO: 178306 - protein, 133 aa, Glycine max
  unsure (1)..(133): unsure at all Xaa locations
  Clone ID: PAT_MRT3847_132027C.1.pep
PLSRPSKRKPGAEREKIWQADRPNTPIPRSLREHLKPGPARVENEDHPMQIEETQDPKTFFKKEDLHPGKTMKAQYSKQTLPQRRGTXARHGGKKDPRKEGTRGKKRGSTKEPSEGEEKSEQNPGEQKEGTPQ

SEQ ID NO: 178307 - protein, 36 aa, Glycine max
  Clone ID: PAT_MRT3847_132028C.1.pep
LKKKQKKKKKKKKKKKKKKKKHKKKHKKTHQAEQSL

SEQ ID NO: 178308 - protein, 73 aa, Glycine max
  Clone ID: PAT_MRT3847_132029C.1.pep
IVGKPPKRNRPLCYGGGGGLPDFSRGPQKNWWTKKKGEKQKRAPRKMGPTFKTFLGGGKRRKGGKKKNPGAPH

SEQ ID NO: 178309 - protein, 90 aa, Glycine max
  Clone ID: PAT_MRT3847_13202C.1.pep
NLAKLTLFRQFYIVVIGYLYFTRIVVFALKTIAAYKYQWVSNLAEEAASLAFYVVMFYMFRPVERNEYFVLDEEEEEAAEIALRDEEFEL

SEQ ID NO: 178310 - protein, 96 aa, Glycine max
  unsure (1)..(96): unsure at all Xaa locations
  Clone ID: PAT_MRT3847_132030C.1.pep
PRVRKAMAHADKXSTVSPTYSREIAGNPLIAPHLHKFHGIINGIDPDIWDPYNDKFIPVSRHIYRCFLFFSYIGPTMAQLSKLSPNIVAAYKLCTY

SEQ ID NO: 178311 - protein, 244 aa, Glycine max
  Clone ID: PAT_MRT3847_132031C.1.pep
MEKKRFGVLMCAEDSEYVKKVYGGYSGVFVRMLAEEGETWDVYKVACGDFPDEDDLGLYDGFVITGSCSDAHGNDTWVNDLLNLLRKLDSMNKKILGICFGHQILGRALGGKVTRSPTGWDLGVRTITLSPSLPFALISLDLPSRLSIIECHRDEIRELPAKAEVIAWSDKTGIEMFRYGDHIMGIQGHPEYSKDILFHLIDRLIQRNYIIDAFGKQARDRAALWEPDREAWKKLCVTFLKGRL

SEQ ID NO: 178312 - protein, 197 aa, Glycine max
  unsure (1)..(197): unsure at all Xaa locations
  Clone ID: PAT_MRT3847_132032C.1.pep
DSVIVPALALSYHHLPSHLKRCFAYCXFPKDYEFDKECLIQLWMAENFLQCHQQSKSPEEVGEQYFNDLLSRSFFQQSSINDLSPIFFLTSSRIRNKTYFVMHDLLNDLAKYVGGDIYFRLEDDQAKSIPKTARHFSFETNDIYCYDEELGSYMMLKGFVHLCQQVRVWIFFTIGGIARCQYIKLFSKFKFLRXLSL

SEQ ID NO: 178313 - protein, 98 aa, Glycine max
  Clone ID: PAT_MRT3847_132033C.1.pep
VLFLVFVLGLGLLLHVARGCDAHCVVALCTRPVRILLKIRPGVGWVRLVTCPRIGVIPSLVPCAFCAWRRYLAVRAKFTKVCLGVLVVLFTARKNVFS

SEQ ID NO: 178314 - protein, 92 aa, Glycine max
  Clone ID: PAT_MRT3847_132034C.1.pep
KTVGLKKRRRGVRGVSNPFFPPIIVFFGIGGGFYRGPLRWDIPPRGVRWADFPFGGGVVSGQPEKPEKKFFYNKSPPTRSYNPRIKKGSICP

SEQ ID NO: 178315 - protein, 45 aa, Glycine max
  Clone ID: PAT_MRT3847_132035C.1.pep
LSFLRNVLLVQDSFKPSFILHLSVELIYYCVSSYVIYFREKPFIE

SEQ ID NO: 178316 - protein, 46 aa, Glycine max
  Clone ID: PAT_MRT3847_132036C.1.pep
MSVEPKGDVGLIGLAVMGQNLILNMNDKGFTVVAYNRTTSKVDHFL

SEQ ID NO: 178317 - protein, 61 aa, Glycine max
  Clone ID: PAT_MRT3847_132037C.1.pep
TNTHTLKINNTSTKNRKFPLINELIRGQGVGHGQENEAQGCVYLGARSEPQWTGFLNIKDA

SEQ ID NO: 178318 - protein, 106 aa, Glycine max
  unsure (1)..(106): unsure at all Xaa locations
  Clone ID: PAT_MRT3847_132038C.1.pep
MXXXYLXGXLXXXXXXXGNXFXXXXXXXXXXXXXXKXGPXXXPGXXXIPGRXXHXXGAXXFXFFFFFXXLQLLXFCRLLAAVLEPNRLEXEPNSELTYACXRXITX

SEQ ID NO: 178319 - protein, 136 aa, Glycine max
  Clone ID: PAT_MRT3847_132039C.1.pep
MARTKQTARKSTGGKAPRKQLASKAARKSAPSTGGVKKPHRYKPGTVALREIRRYQKSTELLIRKLPFQRLVREIAQDFKSDLRFQSSAIGTLQESVESYLVSLFEDTNLCAIHAKRVTIQSKDIQLARRLRGERN

SEQ ID NO: 178320 - protein, 101 aa, Glycine max
  unsure (1)..(101): unsure at all Xaa locations
  Clone ID: PAT_MRT3847_13203C.1.pep
LAREVFHSSSEISVGYIVMRDPFXGVXXNFFXXKGXXVVGVYHPLNDEKPTKVLPWRNKKVYAWPVDDAESRQKMRPEQVDAIVPSPPPVFLPLTPPHPMF

SEQ ID NO: 178321 - protein, 136 aa, Glycine max
  Clone ID: PAT_MRT3847_132040C.1.pep
MARTKQTARKSTGGKAPRKQLASKAARKSAPSTGGVKKPHRYKPGTVALREIRRYQKSTELLIRKLPFQRLVREIAQDFKSDLRFQSSAIGALQESVEAYLVSLFEDTNLCAIHAKRVTIQSKDIQLARRLRGERG

SEQ ID NO: 178322 - protein, 781 aa, Glycine max
  Clone ID: PAT_MRT3847_132041C.1.pep
MEYFIKLIKKKHGKDISKDSRALGKLRREAERAKRALSSQHQVRVEIESLFDGVDFSEPLTRARFEELNNDLFRKTMGPVKKAMEDAASLKNLPLLKPILPPRVRSVCVRERAMAGSWARRSLIVLAIISFGCLFAISIAKEEATKLGTVIGIDLGTTYSCVGVYKNGHVEIIANDQGNRITPSWVAFTDSERLIGEAAKNQAAVNPERTIFDVKRLIGRKFEDKEEVQKDMKLVPYKIVNKDGKPYIQVKIKDGETKVFSPEEISAMVLIKMKETAEAFLGKKINDAVVTVPAYFNDAQRQATKDAGVIAGLNVARIINEPTAAAIAYGLDKKGGEKNILVFDLGGGTFDVSILTIDNGVFEVLATNGDTHLGGEDFDQRIMEYFIKLIKKKHGKDISKDNRALGKLRREAERAKRALSSQHQVRVEIESLFDGVDFSEPLTRARFEELNNDLFRKTMGPVKKAMEDAGLQKSQIDEIVLVGGSTRIPKVQQLLKDYFDGKEPNKGVNPDEAVAYGAAVQGSILSGEGGEETKDILLLDVAPLTLGIETVGGVMTKLIPRNTVIPTKKSQVFTTYQDQQTTVSIQVFEGERSLTKDCRLLGKFDLSGIPPAPRGTPQIEVTFEVDANGILNVKAEDKGTGKSEKITITNEKGRLSQEEIDRMVREAEEFAEEDKKVKERIDARNSLETYVYNMKNQVSDKDKLADKLESDEKEKIETAVKEALEWLDDNQSVEKEDYEEKLKEVEAVCNPIISAVYQRSGGAPGGAGGEGEDEDDSHDEL

SEQ ID NO: 178323 - protein, 137 aa, Glycine max
  Clone ID: PAT_MRT3847_132042C.1.pep
MAKPSSANGRTRSHVQIFIVVGMCCFFYILGAWQRSGFGKGDSIALEITKKGADCNVVPNLSFDSHHGGEVSKIDEFESKSKVFEPCDARYIDYTPCQDQRRAMTFPRENMNYRERHCPPEEEKLHCMIPAPKGDVT

SEQ ID NO: 178324 - protein, 667 aa, Glycine max
  Clone ID: PAT_MRT3847_132043C.1.pep
MACSFSRGSLLPLAIIVSLGCLFAISIAKEEATKLGTVIGIDLGTTYSCVGVYKNGHVEIIANDQGNRITPSWVAFTDSERLIGEAAKNLAAVNPERVIFDVKRLIGRKFEDKEVQRDMKLVPYKIVNKDGKPYIQVKIKDGETKVFSPEEISAMILTKMKETAEAFLGKKINDAVVTVPAYFNDAQRQATKDAGVIAGLNVARIINEPTAAAIAYGLDKKGGEKNILVFDLGGGTFDVSILTIDNGVFEVLATNGDTHLGGEDFDQRIMEYFIKLINKKHKKDISKDSRALSKLRREAERAKRALSSQHQVRVEIESLFDGVDFSEPLTRARFEELNNDLFRKTMGPVKKAMEDAGLQKNQIDEIVLVGGSTRIPKVQQLLKDYFDGKEPNKGVNPDEAVAYGAAVQGSILSGEGGEETKDILLLDVAPLTLGIETVGGVMTKLIPRNTVIPTKKSQVFTTYQDQQSTVSIQVFEGERSLTKDCRLLGKFELSGIPPAPRGTPQIEVTFEVDANGILNVKAEDKGTGKSEKITITNEKGRLSQEEIERMVREAEEFAEEDKKVKERIDARNSLETYVYNMKNQVSDKDKLADKLESDEKEKVETAVKEALEWLDDNQSVEKRYEEKLKEVEAVCNPIISAVYQRSGGAPGGGASGEDDDEDSHDEL

SEQ ID NO: 178325 - protein, 79 aa, Glycine max
  Clone ID: PAT_MRT3847_132044C.1.pep
KILPLSRGVPLKAKSVTWLCFDREFKEGIGPKRGHLLQIWKAPSSFSCSAMSQPRAHIPDESDDHGFLQNWENPCNVMC

SEQ ID NO: 178326 - protein, 669 aa, Glycine max
  unsure (1)..(669): unsure at all Xaa locations
  Clone ID: PAT_MRT3847_132045C.1.pep
MAGSWARRSLIVLAIISFGCLFAISIAKEEATKLGTVIGIDLGTTYSCVGVYKNGHVEIIANDQGNRITPSWVAFTDSERLIGEAAKNLAAVNPERTIFDVKRLIGRKFEDKEVQRDMKLVPYKIVNKDGKPYIQVKIKDGETKVFSPEEISAMILTKMKETAEAFLXGKKINDAVVTVPAYFNDAQRQATKDAGVIAGLNVARIINEPTAAAIAYGLDKKGGEKNILVFDLGGGTFDVSILTIDNGVFEVLATNGDTHLGGEDFDQRIMEYFIKLIKKKHGKDISKDNRALGKLRREAERAKRALSSQHQVRVEIESLFDGVDFSEPLTRARFEELNNDLFRKTMGPVKKAMEDAGLQKSQIDEIVLVGGSTRIPKVQQLLKDYFDGKEPNKGVNPDEAVAYGAAVQGSILSGEGGEETKDILLLDVAPLTLGIETVGGVMTKLIPRNTVIPTKKSQVFTTYQDQQTTVSIQVFEGERSLTKDCRLLGKFDLSGIPPAPRGTPQIEVTFEVDANGILNVKAEDKGTGKSEKITITNEKGRLSQEEIERMVREAEEFAEEDKKVKERIDARNSLETYVYNMKNQISDKDKLADKLESDEKEKIETAVKEALEWLDDNQSMEKEDYEEKLKEVEAVCNPIISAVYQRSGGAPGGGGASGEEDEDDSHDEL

SEQ ID NO: 178327 - protein, 668 aa, Glycine max
  Clone ID: PAT_MRT3847_132046C.1.pep
MIMARSFSRGSLLPLAIVSLVCLFVISIAKEEATKLGTVIGIDLGTTYSCVGVYKNGHVEIIANDQGNRITPSWVAFTDSERLIGEAAKNLAAVNPERTIFDVKRLIGRKFEDKEVQRDMKLVPYKIVNKDGKPYIQVKIKDGETKVFSPEEISAMILTKMKETAEAFLGKKINDAVVTVPAYFNDAQRQATKDAGVIAGLNVARIINEPTAAAIAYGLDKKGGEKNILVFDLGGGTFDVSILTIDNGVFEVLATNGDTHLGGEDFDQRIMEYFIKLIKKKHGKDISKDSRALGKLRREAERAKRALSSQHQVRVEIESLFDGVDFSEPLTRARFEELNNDLFRKTMGPVKKAMEDAGLQKSQIDEIVLVGGSTRIPKVQQLLKDYFDGKEPNKGVNPDEAVAYGAAVQGSILSGEGGEETKDILLLDVAPLTLGIETVGGVMTKLIPRNTVIPTKKSQVFTTYQDQQTTVSIQVFEGERSLTKDCRLLGKFELSGIPPAPRGTPQIEVTFEVDANGILNVKAEDKGTGKSEKITITNEKGRLSQEEIERMVREAEEFAEEDKKVKERIDARNSLETYVYNMKNQIGDKDKLADKLESDEKEKIETAVKEALEWLDDNQSVEKEEYEEKLKEVEAVCNPIISAVYQRSGGAPGGGASGEEDGDSHDEL

SEQ ID NO: 178328 - protein, 669 aa, Glycine max
  Clone ID: PAT_MRT3847_132047C.1.pep
MAGSWARRSLIVLAIISFGCLFAISIAKEEATKLGTVIGIDLGTTYSCVGVYKNGHVEIIANDQGNRITPSWVAFTDSERLIGEAAKNQAAVNPERTIFDVKRLIGRKFEDKEVQKDMKLVPYKIVNKDGKPYIQVKIKDGETKVFSPEEISAMVLIKMKETAEAFLGKKINDAVVTVPAYFNDAQRQATKDAGVIAGLNVARIINEPTAAANALGLDKNKGGRGKNILVFDLGGGTFDVSILTIDNGVFEVLATIGDTHLGGEDFDQRIMEYFIKLIKKKHGKDISKDNRALGKLRREAERAKRALSSQHQVPLEIESLFDGVDFSEPLTRARFEELNNDLFRKTMGPVKKAMEDAGLQKSQIDEIVLVGGSTRIPKVQQLLKDYFDGKEPNKGVNPDEAVAYGAAVQGSILSGEGGEETKDILLLDVAPLTLGIETVGGVMTKLIPRNTVIPTKKSQVFTTYQDQQTTVSIQVFEGERSLTKDCRLLGKFDLSGIPPAPRGTPQIEVTFEVDANGILNVKAEDKGTGKSEKITITNEKGRLSQEEIDRMVREAEEFAEEDKKVKERIDARNSLETYVYNMKNQVSDKDKLADKLESDEKEKIETAVKEALEWLDDNQSVEKEDYEEKLKEVEAVCNPIISAVYQRSGGAPGGAGGEGEDEDDSHDEL

SEQ ID NO: 178329 - protein, 103 aa, Glycine max
  Clone ID: PAT_MRT3847_132048C.1.pep
SWAWCRLGPWGVSCSSLGVGGACAGVVLPHGAVVLGALAGSFAVPLGVRVPASFVPVVVALLPCLPWPPPGGGRVLFFHPPPSVVFSRGFHPVGRHPGSSPAP

SEQ ID NO: 178330 - protein, 161 aa, Glycine max
  Clone ID: PAT_MRT3847_132049C.1.pep
MRGIFLICLVENMGIARKCSYCGNLGHNARTCKSTPGQGQLKLFGVQLDVSSSPSSSNSFSSSSPSYSGMKRSFSTNYLLSSWASSSVPSSFSSPSLLGANENSDSYLLNANSLISTIQDTKKGVPWTEEEHRIFLIGLEKLGKGNWRGISKSFVTTRTPT

SEQ ID NO: 178331 - protein, 57 aa, Glycine max
  Clone ID: PAT_MRT3847_13204C.1.pep
TVKIPKWHSQFFFISLVYHIHHQSLISPLFLDVDTKGSVHEFFPQDCTDTLFNASSS

SEQ ID NO: 178332 - protein, 73 aa, Glycine max
  Clone ID: PAT_MRT3847_132050C.1.pep
QNRDSIMYIVKNLVNDVSLLDPLTCHHETVGMYSRTCEKKLKFIVFKCVFASAYVCQLLERDFTQKNRLLPQK

SEQ ID NO: 178333 - protein, 110 aa, Glycine max
  unsure (1)..(110): unsure at all Xaa locations
  Clone ID: PAT_MRT3847_132051C.1.pep
MKQRLHWRYQDHFMVMATQIGTMETIXLNARKEDGASINPTCNVSGIFGIRHEPMLVACARQLIARMSVFGSSRPAVHSLGLTDHNVDTSKGIVIAAMDNAMWCENAVEP

SEQ ID NO: 178334 - protein, 117 aa, Glycine max
  Clone ID: PAT_MRT3847_132052C.1.pep
TTLYIKRVKLVYAFSNVTLIISHVATPFLNVSSPRSYLVKKKHVKFSKKISAAAVATTTTTEEIQEYEFPFLIPFSTFVFPSFTMIVSPAMGKMSIPNFCRPLLLLVHYERRFINWK

SEQ ID NO: 178335 - protein, 43 aa, Glycine max
  Clone ID: PAT_MRT3847_132053C.1.pep
HLLIIMNTRDDHRIELQDLTMYKSPLRGEKSPTPSPDYATAPP

SEQ ID NO: 178336 - protein, 43 aa, Glycine max
  Clone ID: PAT_MRT3847_132054C.1.pep
HQLPKKKKTILLLNTNFYQLNLHFHTPPSNPSNLNSHEKPPPL

SEQ ID NO: 178337 - protein, 56 aa, Glycine max
  Clone ID: PAT_MRT3847_132055C.1.pep
SQESVRINSLLNLSLIDQCLTFRILIPNEYIRMVINIFQYWLKGKANEHMLGPTSI

SEQ ID NO: 178338 - protein, 107 aa, Glycine max
  unsure (1)..(107): unsure at all Xaa locations
  Clone ID: PAT_MRT3847_132056C.1.pep
TLVKNRELRGIHMRWAMLGALHCVLTQLLCRNEEKLGEAVXFKDGSLIFIEGGLRYXCIPSRIHAQSILGIWATQDILMGSVQGHRIAGGPLGEGTDPIXPSGSFDP

SEQ ID NO: 178339 - protein, 68 aa, Glycine max
  Clone ID: PAT_MRT3847_132057C.1.pep
SFYFFIFFFLSLCSERRKGGGTGIPYHVHLNNLYQTSQTCGRFIPPTHVIFPRVGPPPKKFFLISDLP

SEQ ID NO: 178340 - protein, 229 aa, Glycine max
  Clone ID: PAT_MRT3847_132058C.1.pep
METNNQQQQQQGAQAQSGPYPVAGAGGSAGAGAGAPPPFQHLLQQQQQQLQMFWSYQRQEIEHVNDFKNHQLPLARIKKIMKADEDVRMISAEAPILFAKACELFILELTIRSWLHAEENKRRTLQKNDIAAAITRTDIFDFLVDIVPRDEIKDDAALVGATASGVPYYYPPIGQPAGMMIGRPAVDPATGVYVQPPSQAWQSVWQSAAEDASYGTGGAGAQRSLDGQS

SEQ ID NO: 178341 - protein, 144 aa, Glycine max
  Clone ID: PAT_MRT3847_132059C.1.pep
MLPICEQISEYYYCYPFDHYTEFIFRNQFYKTDYYEYENYEKFERYTRLVLVDPKSSEGSIEGNGYAKGPAMFMATDDLVVAPMSPISGLSLLSRLNIPLSDLKEKVVVIGIKEGFNILKASLISRSALTNGLSHLLTDVKEEQ

SEQ ID NO: 178342 - protein, 109 aa, Glycine max
  Clone ID: PAT_MRT3847_13205C.1.pep
PKMGAQKKKKFFFQTFLPLAPPQGEGLLCPPCFGTPPIRGPLVPPPTPKKCVDKWAPAPSQLGGGGPNYKESFLAVVPFFFGGGIGVTQKGELNLPQTKPFFSARKLVF

SEQ ID NO: 178343 - protein, 76 aa, Glycine max
  Clone ID: PAT_MRT3847_132060C.1.pep
IICFLFNPLCFHPSFISRYRLSIFHIVLLVHNYAMNIWQTILGLLYYHSLCNDSISAFPTVNIQASDVCVTPSRLK

SEQ ID NO: 178344 - protein, 35 aa, Glycine max
  Clone ID: PAT_MRT3847_132061C.1.pep
MLRNSELLVYLDHLNKVLRFIYHVLSLYLVGAKAV

SEQ ID NO: 178345 - protein, 456 aa, Glycine max
  unsure (1)..(456): unsure at all Xaa locations
  Clone ID: PAT_MRT3847_132062C.1.pep
SGVVQGFKAPCGQTCGAPRRSCRHMXAPCHPSSPCPDIRCEFPVTITCSCGRITANVPCDVGGSSSNYNADAIHEASIIQTLPVPLQPVDANGKKVPLGQRKLICDDECSKLERKRVLADAFDITAPNLHASDFGDNSLSSELLLDFFRREPKWVLAVEERCKILVLGKTRGTGTTHGLKVHIFCPMLKEKRDAVRLIADRWKLAITAAGWEPKRFIVISVTPKSKAPARVIGVKGTTTLNVPLPPVFDPLVDMDLRLVVSFPDLPRDTEINSLVLRFGGECELVWLNDKNALAVFHDPARAATAMRRLDYATVYQGAVLVAPNAGALVASSATNAWGGAGAMKGGGALPALKGNSWKKAVAQDSGWEDSWGGEEWIAGSVNIQPSVWKKEAPLAASLNRWNVLEQESSSSLSSTTVRAEVSGKKTENAGEEGGSKEEEKLDAASEVVDDWEKAYE

SEQ ID NO: 178346 - protein, 61 aa, Glycine max
  Clone ID: PAT_MRT3847_132063C.1.pep
KPLNSPPHSSLNPYLLIHLSQYFFTLPLNPQPIFYHISKNNSLTLSLIPSTILYYFPTSST

SEQ ID NO: 178347 - protein, 112 aa, Glycine max
  unsure (1)..(112): unsure at all Xaa locations
  Clone ID: PAT_MRT3847_132064C.1.pep
CQRACKFAXRETIEKAIEHERKRRETPEAMDEDMEGENVSKIKAAHFEKSMKYARRSVSDADIRKYQAFAQTLQQSRGFGSDFNFPAAVSRTPGFEPFATFAGGADENDLYS

SEQ ID NO: 178348 - protein, 54 aa, Glycine max
  Clone ID: PAT_MRT3847_132065C.1.pep
KIMSNLSKDNILGAIRNPLNLGTTPQKTRYRIPLGTHQIQAANVLPNFFNKKTP

SEQ ID NO: 178349 - protein, 61 aa, Glycine max
  Clone ID: PAT_MRT3847_132066C.1.pep
PISIVVMPDHCLARRFSQRMAASTGGAAPYLERTIIEPGNTSAMIYVSKGQGSYASSYGSI

SEQ ID NO: 178350 - protein, 138 aa, Glycine max
  unsure (1)..(138): unsure at all Xaa locations
  Clone ID: PAT_MRT3847_132067C.1.pep
KKTVIWKHADPGDRKGELSILHDSTLDTDMGLFLHEDENAKAEMVCLRHILGPVHHANKESKALHQTETHMGLLSPIITVILGALKKVQTLRTHLEEKDRANAANMYLSXLQTGPAPYRRSRYGVTNEPMTKRPELMM

SEQ ID NO: 178351 - protein, 232 aa, Glycine max
  Clone ID: PAT_MRT3847_132068C.1.pep
MPSVHSSPGYSMENPALASLLRHTTGENKRSNKLSSGGGLLKMLKLFPMLSSGCKMVALLGRPRKMLKDSATTGTIFGYRKGRVSLAIQEDTRQMPVFLIELPMLASALNKEMASDIVRIALESETKSNKKKLLEEYVWAVYCNGRKVGYSIRRKQMSDDELHVMQHLRGVSMGAGVLPTSSDHKDCDGEMTYIRASFQRVVGSMDSQALYIINPDATAHGPELSIFFLRPH

SEQ ID NO: 178352 - protein, 121 aa, Glycine max
  unsure (1)..(121): unsure at all Xaa locations
  Clone ID: PAT_MRT3847_132069C.1.pep
SAELLSCKLDTVTGQYYPEWAPINCLVHRQPIYITDGNYVRKHDAIIEYDACTIPNDCGSLVDGKAGNHRQIAGFHVAGLKGRLRYASLIPYDEPAVQAQSAEGYSDFLPVEVDXQDGVAH

SEQ ID NO: 178353 - protein, 56 aa, Glycine max
  Clone ID: PAT_MRT3847_13206C.1.pep
MHLLYNILLKISNKCIVICNYSFSLKLPFRVIFLCIGDAIGIFNMRLYRVRERVNI

SEQ ID NO: 178354 - protein, 44 aa, Glycine max
  Clone ID: PAT_MRT3847_132070C.1.pep
MNLSLCRNVIHGSDAVESANKEIALWFPEGPANWQSSQHSWIYE

SEQ ID NO: 178355 - protein, 69 aa, Glycine max
  Clone ID: PAT_MRT3847_132071C.1.pep
FSQTPLLINKQMAAAAAFTVLLSPIIPTVTNFTPFSSLSSLSPLGTNTKTTFFLSSLNHFSETLKSFLL

SEQ ID NO: 178356 - protein, 162 aa, Glycine max
  unsure (1)..(162): unsure at all Xaa locations
  Clone ID: PAT_MRT3847_132072C.1.pep
LEQTLKLLHKALEILNEGSGQQNTIAGIEAXMGVMYYVLENYTESYNAFKNAVSKLHATGEKKSAFFGTVLNQMGLACVQLHALDEAAELFEEARVILEQENGPCHPXTLGVYGNLAGTYDAIGRLDEAIYIEILEXIVVMRKEKLGTTNPDVDEKKSWTSC

SEQ ID NO: 178357 - protein, 92 aa, Glycine max
  unsure (1)..(92): unsure at all Xaa locations
  Clone ID: PAT_MRT3847_132073C.1.pep
MMGLRVTKLFSRLLAKNEMRILMVGLDAPGKTTISYKLKLGEIVTTIPTIXFNVETAEYKNISLTVWNVAVQDKIRPLXKHFFQNTYGLIFV

SEQ ID NO: 178358 - protein, 64 aa, Glycine max
  Clone ID: PAT_MRT3847_132074C.1.pep
YASRCYNVGSLFVWRQSEHRRGFFRTSMDKCSLSMSSAHWSLRSRRSSRNLLIFMVSDHIEVCL

SEQ ID NO: 178359 - protein, 60 aa, Glycine max
  Clone ID: PAT_MRT3847_132075C.1.pep
LNMLIGSEGQRDEHSLNCSMTNEKNEEHQCHNTIWYNEISDGQPQSQAQPKPVAKSERSK

SEQ ID NO: 178360 - protein, 40 aa, Glycine max
  Clone ID: PAT_MRT3847_132076C.1.pep
LYLRWALLYSPIIYQYSPKSSMERFTKNNPDAWGAPAIQD

SEQ ID NO: 178361 - protein, 366 aa, Glycine max
  Clone ID: PAT_MRT3847_132077C.1.pep
KSESGMRSLNVPKTITCRVLSIDTLKTLVETSLIGDDVEQSMLKVENQEDQGKLHWLSDANKKPSIVLAGLHACGDLSVTMLKTFVECKDVKAVVSLGCCYNLLSEEMIKDGESQFGFPMSHAVRSIGLSLGKSARDLACQSAERWRSLDMHAGIHNFELHAFRAAFQMVLSKYYPEIVMSTPSIGRKGKALRRRHQRRSAESQLHLKGSTCHMRHNFPSVVPSESETDGILGSMSEIQTLPGEIPSNERAGCEVIKSDDKLSHFENFCQSGLSHLGIKHSQDINLQGIWKEAEPFAVRLGPFRPLCPAFGPLLLTLFFLLPGVFLQEQGSALEACLLPIFDPKISPRNVAIIAKKIDKDLRSSCC

SEQ ID NO: 178362 - protein, 154 aa, Glycine max
  unsure (1)..(154): unsure at all Xaa locations
  Clone ID: PAT_MRT3847_132078C.1.pep
METENGDTRSKKMEEYEVIEQIGRGAFGSAFLVLHKSEKKRYVLKKIRLAKQTEKFKRTAHQEMNLIAKLNNPYIVDYKDAWVEKEDHICIITGYCEGGDMAENIKKARGSFFPEEKVCKWLTQLLIAVDYFASNRVIHRDLKCFNIXLTKDNN

SEQ ID NO: 178363 - protein, 94 aa, Glycine max
  Clone ID: PAT_MRT3847_132079C.1.pep
EASYDTKFEEINKVLFGREEGQQQGEERLQESVIVEISERQIRELSKHARSSSRKTISSEDKPCNFRSRDPIYSNKLGKLFEITPGNNPQLRDL

SEQ ID NO: 178364 - protein, 131 aa, Glycine max
  unsure (1)..(131): unsure at all Xaa locations
  Clone ID: PAT_MRT3847_13207C.1.pep
EERLGLSKPSHYRASLLSVSIGGGLLGYYTGVXSGALIYIKEDCAQDKPRRCFHXTFGRMEGTAAFVGAAARGXINDGDGRKKATLIADVIFTLGAIVMAAAPDPYILIIGRDLAAXGVXDALDSDTELIV

SEQ ID NO: 178365 - protein, 221 aa, Glycine max
  unsure (1)..(221): unsure at all Xaa locations
  Clone ID: PAT_MRT3847_132080C.1.pep
MSKSLSNTNNVQQGKTNLLQNPFEFSDEQILDNVYRTHFHCVEKCDVTSLHTVASCVINHSIEITDTVITKGSQLSDRFREDTTITSQQLTAKLKRIACQMVCTARGDHYAHHTTMLILEQLKAYSWDAKALIVQAAFALEYGKFLYLPLTTQYQMSEKSLADLNGLLMIQHNTQHLTFFNSVVKKVMQVIECITEWERLTSAXYDIKDVPTLAETLHEIP

SEQ ID NO: 178366 - protein, 67 aa, Glycine max
  Clone ID: PAT_MRT3847_132081C.1.pep
KSRSKTWMSVEDLQSKSRALRAGDFPPCDSGPTGRAGPHVTRHPSTLLRELTAVPMAVHVLSEEFRE

SEQ ID NO: 178367 - protein, 63 aa, Glycine max
  Clone ID: PAT_MRT3847_132082C.1.pep
WGIFAPLPLGFFVGGNLLLGGAFSGATLNPGVTFGPPFVRWTWPHPWFFWAGPFIGGGNVGVI

SEQ ID NO: 178368 - protein, 39 aa, Glycine max
  Clone ID: PAT_MRT3847_132083C.1.pep
RSRLILVLFTPRCTTAVLPLAAFFKSDFRELAMGIERGG

SEQ ID NO: 178369 - protein, 107 aa, Glycine max
  Clone ID: PAT_MRT3847_132084C.1.pep
PNLEFQSKIINLKYLFEDIKATFEPKAVKVALYNSSRRLHPPNSIQKKLYTIFTSLTQSINDCLQIPNYEELPACLKINISREDIHNKQKITFKSKKLFLTLKCSSS

SEQ ID NO: 178370 - protein, 331 aa, Glycine max
  Clone ID: PAT_MRT3847_132085C.1.pep
MALYTHLISFSSSSFLHSPSPLCLPKPLFPSFTLTVGNSTSHTTSLAVRSSYSEMGSSPEPINFRKPGIPSMSHLRLSMNESSKPSFKWRRVLLKVSGEALAGDHSQNIDPKITMAIAREVAAVTRLGIEVALVVGGGNIFRGSSWAGSSGLDRSSADYIGMLATVMNAIFLQATMESIGIPTRVQTAFRMSEVAEPYIRRRAVRHLEKGRVVIFAAGTGNPFFTTDTAAALRCAEINAGVVLKATNVDGVFDEAPKRNPQARLHETLTYQEVTSKDLSVMDMTAITLCQENNIPVIVFNLNKPGNIEKAIKGERVGTLIGATWNSTVSRA

SEQ ID NO: 178371 - protein, 99 aa, Glycine max
  Clone ID: PAT_MRT3847_132086C.1.pep
SESFVLFLQPGLTLSKPMVPGISSENQGQPSPISVLEPPFEDDNAVIESLGCLRGGSRVSLKSNLIDKSPPIESIARTLSWDDSCAEGFGGGAPQVHTL

SEQ ID NO: 178372 - protein, 85 aa, Glycine max
  Clone ID: PAT_MRT3847_132087C.1.pep
MCRASTALYTGCKADGEQGHTLHAAPIDANCGSFATYGPASCVELNVGVLARHFLPEDEDNGTQEDFERHVVQERGGTTPLLSVD

SEQ ID NO: 178373 - protein, 63 aa, Glycine max
  unsure (1)..(63): unsure at all Xaa locations
  Clone ID: PAT_MRT3847_132088C.1.pep
VETNGANAFKDSKLCNMLTMHELHRRLHEDTGITLDYLHPGCIGTTGLFRXHIPLFITLLTPF

SEQ ID NO: 178374 - protein, 49 aa, Glycine max
  Clone ID: PAT_MRT3847_132089C.1.pep
GLLKNWGENGTPPRPIFMKKHGIHAMGNCKALHEGAGVLVIFPPFPPIE

SEQ ID NO: 178375 - protein, 514 aa, Glycine max
  unsure (1)..(514): unsure at all Xaa locations
  Clone ID: PAT_MRT3847_13208C.1.pep
MSLNLQLKNKNVETIGFQFVRSNSFSFTFPFHHQYQCHAHASLSFPSPPRTRFCPPTTVFSAVTAEHPAAPPVRMVAVVGHGVASPLKSASWEQVMLHTVQRLKWVDEGYELLVFTDECIISNGQMTIKLQRELLNADILVIVAVTNKESVEWINNNCKTIENVICLDSSPDLKNKLGGYDVPSEDKAKESYEVVQTVSEAWDRHNSDDIRFCLLVLINAYIRPVPGLKNLGAKGFSTLNCMLKNCGRQVLNCLLDPNCRKALQCLNKCSPVDQVCNYXCIASYESTNLEAFSLCVLLKNNCLELKAEIPDKPYVPPMIEFQGQNXSHEMAEDLFVGWLESFKGSWRVVAGQNPAYDQFPCQYQFFYRGKAKGSFWYEPVFQVKTLEGQLVWSRRKYRVRRGKVPGTFYFSVLDNGVVSNEFWTIVDVSDNLSWGLFYYHGAARVAGQSYTGAVLVSPDGAFPNDTERTKIVAALDKCEIKEWEVYSVDNCSCIDPPLGSKIFSRVHQRLTIVF

SEQ ID NO: 178376 - protein, 433 aa, Glycine max
  Clone ID: PAT_MRT3847_132090C.1.pep
RYVLQKPFTEEQCRQSCMEDCLCSVAIFRLGDSCWKKKLPLSNGRVDATLNGAKAFMKVRKDNSSLVVPPIIVKKNSRNTLIVLLSGSACLNLILVGAICLSSFYVFWCKKKLRRVGKSGTNVETNLRCFTYEELEEATNGFEKVLGKGAFGIVYEGVINMGSLTLVAVKRLNTFLLEEVQKEFKNELNAIGLTHHKNLVRLLGFCETQDERLLVYEYMSNGTLASLVFNVEKPSWKLRLQIATGVARGLLYLHEECSTQIIHCDIKPQNILLDDYYNARISDFGLAKILNMNQSRTNTAIRGTKGYVALEWFKNMPITAKVDVYSYGVLLLEIVSCRKSVEFEADEEKAILTEWAFDCYTEGVLHDLVENDKEALDDMKTLEKLVMIALWCVQEDPGLRPTMRNVTQMLEGVVEVQIPPCPSSQLSIQYSLD

SEQ ID NO: 178377 - protein, 92 aa, Glycine max
  Clone ID: PAT_MRT3847_132091C.1.pep
IHACSHSLVLWPVIVAWVLLLSVRSTIPISTSIHTIHAVGHSTIGSVSYCATYKVPMQVMNFCFLLRVRECIYADPPHRISSLLPAFPHDTV

SEQ ID NO: 178378 - protein, 46 aa, Glycine max
  Clone ID: PAT_MRT3847_132092C.1.pep
FRVYTSKIGKQPKSTFTCLHSYARAYRESYIIPPVKTWPIVTSCKC

SEQ ID NO: 178379 - protein, 219 aa, Glycine max
  Clone ID: PAT_MRT3847_132093C.1.pep
MADIGDSSSKGKNVLESLPKIEQLTQGVADVNIESGQDDGEWVVYAKKSKNRARSTTVKPWSPPVHNSRPTGNTKMAHKPVTRNDGGVGRASGSGNPWQSQNANFKRPAGRGNGRPQLTASESESSNNVTSNPVIRPPLEHGWNWQSISGSKQSKSVDDSLVKGEISEESPMKQPFQDDEGDEMEGFDAEDAQDDVLMRDEHHSMIREMSQAYASQGYI

SEQ ID NO: 178380 - protein, 739 aa, Glycine max
  Clone ID: PAT_MRT3847_132094C.1.pep
MWRLKIADGGNDPYIFSTNNFVGRQTWEFDPEAGSPEERAQVEAARQHFYHNRFKVKPCADLLWRFQVLRENNFKQTIPRVTIEDGEEITYQKVTSAVRRGAHHLAALQTSDGHWPAQIAGPLFFLPPLVFCMYITGNLESVFPEEHRKEILRYTYYHQNEDGGWGLHIEGHSTMFCTALNYICMRMLGEGPNGGHDNACARARKWIRDHGGVTHIPSWGKTWLSILGVFDWCGSNPMPPEFWILPSFLPMHPGPITPLILQLREELFTQPYEKVNWKKARHQCAKEDLYYPHPLIQDLIWDSLYIFTEPLLTRWPFNKLIREKALQVTMKHIHYEDETSRYITIGCVEKVLCMLACWVEDPNGDAFKKHLARVPDYLWVSEDGMTMQSFGSQEWDAGFAVQALLATNIIEEIGPTFAKGHDFIKKSQVKDNPFGDFKSMHRHISKGSWTFSDQDHGWQVSDCTAEGLKCCLLLSMLPPEIVGEKMEPERLYDSVNVLLSLQSKKGGLAAWEPAGAQEWLEYSNPTEFFADIVVEHEYVECPGSAIQALVLFKKLYPGLRRKEIENFITNAVRSLEDTQTADGSWYGNWGVCFTYGSWFALGGLAAAGKTYTKCAAIRKAVKFLLTTQREDGGWGESYLSSPKKIYVPLEGSRSNVVHTAWALMGLIHAGQADRDPMPLHRAAKLLINSQLEEGDWPQQEITGVFMKNCMLHYPMYRDIYPMWALAEYRRRVPLPSTEV

SEQ ID NO: 178381 - protein, 762 aa, Glycine max
  Clone ID: PAT_MRT3847_132095C.1.pep
MWRLKIADGGNDPYIFSTNNFVGRQTWEFDPEAGSPEERAQVEAARQHFYHNRFKVKPCADLLWRFQVLRENNFKQTIPRVTIEDGEEITYQKVTSAVRRGAHHLAALQTSDGHWPAQIAGPLFFLPPLVFCMYITGNLESVFPEEHRKEILRYTYYHQNEDGGWGLHIEGHSTMFCTALNYICMRMLGEGPNGGHDNACARARKWIRDHGGVTHIPSWGKTWLSILGVFDWCGSNPMPPEFWILPSFLPMHPAKMWCYCRLVYMPMSYLYGKRFVGPITPLILQLREELFTQPYEKVNWKKARHQCAKEDLYYPHPLIQDLIWDSLYIFTEPLLTRWPFNKLIREKALQVTMKHIHYEDETSRYITIGCVEKVLCMLACWVEDPNGDAFKKHLARVPDYLWVSEDGMTMQSFGSQEWDAGFAVQALLATNIIEEIGPTFAKGHDFIKKSQVKDNPFGDFKSMHRHISKGSWTFSDQDHGWQVSDCTAEGLKCCLLLSMLPPEIVGEKMEPERLYDSVNVLLSLQSKKGGLAAWEPAGAQEWLELLNPTEFFADIVVEHEYVECTGSAIQALVLFKKLYPGHRRKEIENFITNAVRFLEDTQTADGSWYGNWGVCFTYGSWFALGGLAAAGKTYTNCAAIRKAVKFLLTTQREDGGWGESYLSSPKKIYVPLEGSRSNVVHTAWALMGLIHAGQADRDPMPLHRAAKLLINSQLEEGDWPQQEITGVFMKNCMLHYPMYRDIYPMWALAEYRRRVPLPSTEV

SEQ ID NO: 178382 - protein, 90 aa, Glycine max
  Clone ID: PAT_MRT3847_132096C.1.pep
MGFRLPGIRKASFSANQASSKAVDVEKGYLAVYVGEKMRRFVIPVSYLNKPSFQDLLSQAEEEFGYHHPNGGLTIPCSEDVFQHITSFLN

SEQ ID NO: 178383 - protein, 82 aa, Glycine max
  Clone ID: PAT_MRT3847_132097C.1.pep
VTSCKASDFHYCNLERVEPYMSKYTTGDRESESTCGNNCTEDCICVGYLYHTENSMCWVAYDLQTLTRRANSSHVDSIKVPN

SEQ ID NO: 178384 - protein, 104 aa, Glycine max
  Clone ID: PAT_MRT3847_132098C.1.pep
GRKKPPPARGGGANPKPPEGRARPTKRLGGGEKRGRGGTPGNSGPVPGGEPTFPKGGRNKRWGQQGQRGPRGERGNRKKSPGTIRRGTKGGKAGGAKERATPKE

SEQ ID NO: 178385 - protein, 76 aa, Glycine max
  Clone ID: PAT_MRT3847_132099C.1.pep
PLYFWYLHITRCLKATAISSPWKGVLKKKKVSLFKWDGHPLHNSFFGSLSSSAMPIPSFLDAESNRNCHHGGLYIF

SEQ ID NO: 178386 - protein, 96 aa, Glycine max
  unsure (1)..(96): unsure at all Xaa locations
  Clone ID: PAT_MRT3847_13209C.1.pep
PFSATWNPYVELFQRLQRHALNLQVVMXFHKCGGNVGNNCRIPLPPWGLEEISKNPELXYTDRSGRRILRHLLGLDRVCLKENSFSVLDYMEACAN

SEQ ID NO: 178387 - protein, 63 aa, Glycine max
  Clone ID: PAT_MRT3847_1320C.1.pep
CNIIMHKASVIGVISLILQIYFVLIVFIFKIGIEIFVLTNLFGTKTFTIIFHAWVCIFFLILI

SEQ ID NO: 178388 - protein, 540 aa, Glycine max
  Clone ID: PAT_MRT3847_132100C.1.pep
MDVEETEELVSLDPDLLLLPEVSPFALKSSPYVVEELFTQWLSLPDTCRLVKSLLADAKAGARLNALENSTNTNALSINSLPSLFPAGSTPPLSPRSSSGSPRTTKQRNSPSLGSPLKLASEPVREREVIPQFYFKNGRPPPSEMKEHFLYQIDSRFYGHLDGLQLHEFKSFTKELCKLPSFFSTALFKKIDVNFTGSITRDQFIDYWIRGNMLAMDLPTQIYTILKQPYRTYLVQDDFKPVLRELLSTHPGLEFLQTTPEFQERYAETVIHRIFYYMNRSGNGRLTLRELKRGNLIDAILHVDEEEDINKVLRYFSYEHFYVIYCKFWELDTDHDFFIDSSSRIGSRNHSLTYRIVDRIFSQVPRKFTSKIEGKMNYEDFVYFILAEEDKSSEPSLEYWFKCIDLDGNGVLTPNEMQFFYEEQLHRMECMAQEPVLFEDILCQIVDMIGPENEGYITLRDVKGSKLSGNVFNILFNLNKFITFETRDPFLIRQEREDPNLTEWDRFAHREYIRLSMEEDGEDMSNASGDVWEESLEAPF

SEQ ID NO: 178389 - protein, 56 aa, Glycine max
  Clone ID: PAT_MRT3847_132101C.1.pep
ENYCNVYDHSLFRIRDMTIINSQLARDPFPSPFYRLYGALFFLPSCFGIPVKIGIV

SEQ ID NO: 178390 - protein, 87 aa, Glycine max
  unsure (1)..(87): unsure at all Xaa locations
  Clone ID: PAT_MRT3847_132103C.1.pep
GNIGNVPLVLIXALCRAQSNPFGXMEKCSTDGTAYVSFGXWVGAIILYTYVFQMLAPPPEGTFEIDNESVPLKSTPMSDATPEQAPL

SEQ ID NO: 178391 - protein, 69 aa, Glycine max
  Clone ID: PAT_MRT3847_132104C.1.pep
VSYIDNKCIHFHKQYRYLPNRLHIKLGALNKIINQYTCKRSHIIFKLVKNTTICFFLLYIGTNIIIYNF

SEQ ID NO: 178392 - protein, 56 aa, Glycine max
  Clone ID: PAT_MRT3847_132105C.1.pep
KGPFFLHVIRSVRRRERHSLYEVLTLGGQIRVKVFLRCFLSLGGFMKKGPLFQTHW

SEQ ID NO: 178393 - protein, 62 aa, Glycine max
  unsure (1)..(62): unsure at all Xaa locations
  Clone ID: PAT_MRT3847_132106C.1.pep
KTGAPPHHHXLTTPPTSSSQQHYVYYQTITYYISFHKNQPTFNLTPFSYLLTLNKPTSTNFK

SEQ ID NO: 178394 - protein, 54 aa, Glycine max
  unsure (1)..(54): unsure at all Xaa locations
  Clone ID: PAT_MRT3847_132107C.1.pep
LCDDFFGEVSICYEDVSGALWGIDDHSKSILPXXYNAIGQMLMILIIHNHELIM

SEQ ID NO: 178395 - protein, 34 aa, Glycine max
  Clone ID: PAT_MRT3847_132108C.1.pep
KILSRWSNCSSRVMGCPVIGLFIINCVRCYIKLK

SEQ ID NO: 178396 - protein, 70 aa, Glycine max
  Clone ID: PAT_MRT3847_132109C.1.pep
GCEKTTEGYGCEKTTEGYGCEKTTEGGSACLTPHIYKQSITIAGSWLARIDGCLLASHSLHIASNIDRIN

SEQ ID NO: 178397 - protein, 527 aa, Glycine max
  Clone ID: PAT_MRT3847_13210C.1.pep
MSLNLQLKNVETIGFQFLHNNAFSFTYPFHHQYHTHASLSFPSPPQTRFRPPTTVFSALTAEQIAAPPVRMVAVVGNGAASPLKSASWEQVMLHTAKRLKWVDEGYELLVFTDECIISNGPMTMKLQRELLNADILVIVAVTNKESVEWINNNRKTIENVICLDSSPDLKNKLGGYDVPSEVRGSMFGNFFGNSQSEKAKESYEVVQTVSEAWDRHNSDDIRFCLLVLINAYIRPVPVLKNLRAKGFSTLNCMLKNCGRQVLNCLLDPNCRKALQCLNKCSPVDQVCNYRCIASYESANLEAFSLCVLQKNNCLELEAEIPDKPYVPPMIKFRGKNLSYEMTEDLFVGWLGSLEWSWRVVAGQNPAYDQFPCQYQLFYRGKAKGSFWYEPVFQVKTLEGQLVWRRRKYRVRRGKVPGTFYFSVLDNGVVSNEFWTIVDVADNLSWGLFHYRGAARVAGQSYTGAVLVSPDGAFPNDRERTKIVAALDKCEIKEWELYTVDNCSCIDPPLGIPEGSSLHTIVQIEVPK

SEQ ID NO: 178398 - protein, 56 aa, Glycine max
  Clone ID: PAT_MRT3847_132110C.1.pep
HASADAWVRAQWVIVLITSPKLILILMMMITHSGLHCFKISNQLDFVFVIAFLAWA

SEQ ID NO: 178399 - protein, 102 aa, Glycine max
  unsure (1)..(102): unsure at all Xaa locations
  Clone ID: PAT_MRT3847_132111C.1.pep
EKAEKATARTEEKKVIADEHAKAEKSRAEIKLHKAKAKHAAEKLSANQSHYSLHHNHNNPALSKTTQTHYQQEHQHQPLKAGPMPETAYPSYALEXNPSPPK

SEQ ID NO: 178400 - protein, 55 aa, Glycine max
  Clone ID: PAT_MRT3847_132112C.1.pep
VPVLGGSFTTRFGKADRFFYLNKRAVCVADLFFASPAPFFGESPNKKKKKKKKKP

SEQ ID NO: 178401 - protein, 52 aa, Glycine max
  Clone ID: PAT_MRT3847_132113C.1.pep
FAALHVLLVMYPDEAFSVASMVEAISGVAMLAYEALASAARSSMLSRLLLAM

SEQ ID NO: 178402 - protein, 106 aa, Glycine max
  unsure (1)..(106): unsure at all Xaa locations
  Clone ID: PAT_MRT3847_132114C.1.pep
XXXVXXXAXGXXXXXXXXGNXXGKKFXPXNXXPXXXXNXXXXXXXXKXXXXXXPXXKXXPXWGXXXXXXXFFFFFFFFXXLLXXLLSSSRSRTRAEFRAYVRVXAX

SEQ ID NO: 178403 - protein, 49 aa, Glycine max
  Clone ID: PAT_MRT3847_132115C.1.pep
TLKGKSDSAAPYYHIPISNTSKLEQLPHPNRHIVGGAFLYLRCLDTQNI

SEQ ID NO: 178404 - protein, 71 aa, Glycine max
  Clone ID: PAT_MRT3847_132116C.1.pep
KGKGFWAHWIGHFFFHQELKTFHIVLVLQQAFSNYLVKKFLCLIIFIFFKKSNDDYVKRNRFWGATLVFHF

SEQ ID NO: 178405 - protein, 41 aa, Glycine max
  Clone ID: PAT_MRT3847_132117C.1.pep
KVHVIDSFMIFNATFLIKKNYDFLINILMTLVSMTLRISFK

SEQ ID NO: 178406 - protein, 62 aa, Glycine max
  unsure (1)..(62): unsure at all Xaa locations
  Clone ID: PAT_MRT3847_132118C.1.pep
QGKXSEPFXXPLXXXPXGPXTISIGVSXQTFXEXTSLKTPGFAXPLVSHCRTALRPKGRSSS

SEQ ID NO: 178407 - protein, 272 aa, Glycine max
  unsure (1)..(272): unsure at all Xaa locations
  Clone ID: PAT_MRT3847_132119C.1.pep
EQSGKRLAIEPRNATASSPFALPEGAREGRPQTPNAQNGSALPPFPGREWTIEGSNDPQIHRWFXSHIEPSSLLMHNGMSSLKGVSSNSDSPTIPFQSSNYLNTTVPDSSLNPGMTHNIGESGFLQTPENGGQGNPTNKTFVKVYKSGSFGRSLDITKFTSYPELRSELARMFGLEGELEDPVRSGWQLVFVDQENDVLLLGDGPWPEFVNSVGCIKILSPQEVQQMGNNGLELLNSVPIQRLSNGVCDDYAGREDPRNLSTGITIVGSLNY

SEQ ID NO: 178408 - protein, 63 aa, Glycine max
  Clone ID: PAT_MRT3847_13211C.1.pep
VLCRVAPMRIVPKGCALPVATDGRGSLVLEDKSLPQGGMSVVMIVVVRWGLTIDGRADDQRSD

SEQ ID NO: 178409 - protein, 126 aa, Glycine max
  Clone ID: PAT_MRT3847_132120C.1.pep
GSRVYKSGSFGRSLDITKFTSYPELRSELARMFGLEGELEDPVRSGWQLVFVDQENDVLLLGDGPWPEFVNSVGYIKILSPQEVQQMGNNELELLNSVPIQRLSNGVCEDPRNLSTGITTVGSLNY

SEQ ID NO: 178410 - protein, 116 aa, Glycine max
  Clone ID: PAT_MRT3847_132121C.1.pep
VNNGVEAVRAVQRHTYDVILMDVYMPVMNGLQTTKLIRSYEETGNWEAAREAGIEQCSPASNECSVPLKNRIHIIAMTANTMSESADECYANGMDSFVSKPVTFQKLKDCLEQYLR

SEQ ID NO: 178411 - protein, 129 aa, Glycine max
  Clone ID: PAT_MRT3847_132122C.1.pep
FRSFRRPADPFCPIAEMKNPRKKKRPKPQKKLEKNKGVAAAAADVAENENENEEEKRKRSILEALVEAFSLSSVREASMDYNIVGGDPDRALEILRKGFSDTSEVSFSCFTYGSNSSSSFKTGLELGSK

SEQ ID NO: 178412 - protein, 116 aa, Glycine max
  unsure (1)..(116): unsure at all Xaa locations
  Clone ID: PAT_MRT3847_132123C.1.pep
QKGGRXXETXEAGSTXPXXXXXXDQGQKDXTRNKXPXKGGGGGXAFFFXXPXGXXPGDGGQEXQAPQSRXQXKXXKAXXXAPGGKEPXXXGPESXXKXQXXXNGQSXGRXXXXXAK

SEQ ID NO: 178413 - protein, 242 aa, Glycine max
  Clone ID: PAT_MRT3847_132124C.1.pep
ALIMEAGAIEPLIHLLEKGNDGAKENSAAALFSLSVIDNNKAKIGRSGAVKALVGLLASGTLRGKKDAATALFNLSIFHENKARIVQAGAVKFLVLLLDPTDKMVDKAVALLANLSTIAEGRIEIAREGGIPSLVEIVESGSQRGKENAASILLQLCLHNQKFCTLVLQEGAVPPLVALSQSGTPRAKEKCILPPALPPKPVKKHNSFSVIFVISVKESRGRGNHEDKAIMIISLPFSLFPQ

SEQ ID NO: 178414 - protein, 62 aa, Glycine max
  Clone ID: PAT_MRT3847_132125C.1.pep
PLKSIPVIPHPKGLRTVNLIFLLEDFRGRLLYYSEPGIFQPYPFQRKCKVGSKNFEKAHYKS

SEQ ID NO: 178415 - protein, 180 aa, Glycine max
  unsure (1)..(180): unsure at all Xaa locations
  Clone ID: PAT_MRT3847_132126C.1.pep
VLRDCMSRAPVVRFSTAKRAAQLKFFLEDPLNFDTLSLVFNSYSKHTXXSSRFARLQGIQCAMAGKNAYLRFTCSTGDAMGMNMVSKGVQNVLDFLQNDFPDMDVIGISGNYCSDKKPAAVNWIEGRGKSVVCEAIIKEEVVQKVLKTNVSALVELNMLKNLAGSAVAGALGGFNAHASN

SEQ ID NO: 178416 - protein, 76 aa, Glycine max
  unsure (1)..(76): unsure at all Xaa locations
  Clone ID: PAT_MRT3847_132127C.1.pep
PQIKLETVLADFRFPTXNQTRHCFKREGEYHLREPAKGEGAPECAKFAKYNGSLYHGQWVDRCNEQRENGPFPGPL

SEQ ID NO: 178417 - protein, 71 aa, Glycine max
  Clone ID: PAT_MRT3847_132128C.1.pep
FSSVMQRLTSLQSRCKAREVLIRLAPKMAQALVFSSHKQACVMARLRRPMLLKRVPETVSEVFRGQLAHGV

SEQ ID NO: 178418 - protein, 156 aa, Glycine max
  Clone ID: PAT_MRT3847_132129C.1.pep
FIWFEQGCLLKPRSSVVASTNRGCKAIYASGGASSVVLRDCMSRAPVVRFSTAKRAAQLKFFLEDPLNFDTLSLVFNRSSRFARLQGIQCAMAGKNAYLRFTCSTGDAMGMNMVFKGVQNVLDFLLNDFPDMDVIGISGNYCSDKKPAAVNWIEGR

SEQ ID NO: 178419 - protein, 105 aa, Glycine max
  Clone ID: PAT_MRT3847_13212C.1.pep
RSPTTAAPCSVSHCVAALAVVALSGSAFAGFEGQTQNKFIVTYNVVPDVFGLFAFYTMPRTLREAKDLHFDWASERNAVDNNTDLYCRKGDHRVCVLFDKAGSVA

SEQ ID NO: 178420 - protein, 150 aa, Glycine max
  Clone ID: PAT_MRT3847_132130C.1.pep
EFELGTRGSSRVDLQRLTGRSLEGLPLEGFDYDSILGQCCEMPVGYVQIPVGVAGPLLLDGFEYTVPMATTEGCLVASTNRGCKAIYASGGASSVVLRDCMSRAPVVRFSTAKRAAQLKFFLEDPLNFDTLSLVFNRFDFLNSLECVHEN

SEQ ID NO: 178421 - protein, 80 aa, Glycine max
  Clone ID: PAT_MRT3847_132131C.1.pep
VYLVWDDEAMSMEERRMSLPKYQVHDESSQVSHTTSLIDGVAFTSNQMSIGFMLPVFRFSCLHIVSYLKRYILYKFLILF

SEQ ID NO: 178422 - protein, 97 aa, Glycine max
  unsure (1)..(97): unsure at all Xaa locations
  Clone ID: PAT_MRT3847_132132C.1.pep
LSSLLAATSAPIPGKHIGGPKLTADATLLGCTDACGTMDPASGYXNLNTQXYGFYTPGLSTTLCNNLLSCGPFFEILCYQNLRKCNPTNPSILITAT

SEQ ID NO: 178423 - protein, 86 aa, Glycine max
  Clone ID: PAT_MRT3847_132133C.1.pep
FNKRQKLGPPEAWFRILSKNIFIQGWGNNLVPLPLPFFGLDRGFLKKPKPIWFLPGTIAKEPGGWLLSGGPEGRLLGLGRDFSGSN

SEQ ID NO: 178424 - protein, 118 aa, Glycine max
  unsure (1)..(118): unsure at all Xaa locations
  Clone ID: PAT_MRT3847_132134C.1.pep
MVLTTSWRGLFSTLSSPSLTILLLLSLPLFLFSLSISFSCLSYLILLYSYFIFFQFCSFLSSFFLSVLFHILLILFFVINFXFIFLYFLLFFIISLLFFFLIFVFLPLFFSLLIFFSF

SEQ ID NO: 178425 - protein, 149 aa, Glycine max
  Clone ID: PAT_MRT3847_132135C.1.pep
IAFSIIVIGNSAVFIGLWSAHFVWTYYCVARTNRFGLVFKLVVLMCLPIPLLLWPIVGIVGSLLGGIGYGFFAPLLATFQAVGKGENVNQKFHHCFIDGCRSTIERSYTVVQDVTDFCFHSYFSYMDELRENLPHHEKPLDIQLSLLPC

SEQ ID NO: 178426 - protein, 66 aa, Glycine max
  Clone ID: PAT_MRT3847_132136C.1.pep
AHTLYLFNLYPKPIGVVAVAVKGQGKTLNGLTLSSESVFGFFRARMPAKDDGSARERGLVLFLKIG

SEQ ID NO: 178427 - protein, 57 aa, Glycine max
  Clone ID: PAT_MRT3847_132137C.1.pep
MPLAIITFFSYSLEGRIIPRHKVLVENQINIKLRYIMLTSTDEEFNKMVKGIIRKRL

SEQ ID NO: 178428 - protein, 76 aa, Glycine max
  Clone ID: PAT_MRT3847_132138C.1.pep
GKKTPPFFHRGGGTKPPPTWFWGKECSRAPFFFGGGPFLNFGDTPRVFPKGGGLFNKVALKGKIFGGDKKCGGLPS

SEQ ID NO: 178429 - protein, 151 aa, Glycine max
  Clone ID: PAT_MRT3847_132139C.1.pep
MSRYPEVLWAQRSDKVYLTVALPDAKNVSVKCEPQGLFTFSASGVQEEAYSFSLELYGCIEPEGCKTKSGLRNILCSIQKGEKGWWKRLLKSEEKPAPYLKVDWNRWCDEDDEESTSDLVSNDDARFVGEDDRSSDDEGMLYLPDLEKARG

SEQ ID NO: 178430 - protein, 38 aa, Glycine max
  Clone ID: PAT_MRT3847_13213C.1.pep
QYYEDAPVSLIRSIILNRRIPPQCCSTSLKQQQRPQVH

SEQ ID NO: 178431 - protein, 36 aa, Glycine max
  Clone ID: PAT_MRT3847_132140C.1.pep
NTRVCTSEHLVRHTVLDCLRNCFSRWPDIPQVEILS

SEQ ID NO: 178432 - protein, 94 aa, Glycine max
  Clone ID: PAT_MRT3847_132141C.1.pep
YLFFLASFLLVVFRVSLALSVALIRFQVLLSCISVDVSLRFCFVFVHVLFAFLFFLSPFSWAFFSFVLSSLFFCCWVRVFFFQLCLFQLSIKIK

SEQ ID NO: 178433 - protein, 87 aa, Glycine max
  Clone ID: PAT_MRT3847_132142C.1.pep
GGKGRGFSTFGRKKPGILTPKATGKRFQKSPFFRGPGKKQKSQPQKNLGGNLGGEKLFYPPAFSQSPNFYPKKGWDFRRTPKGDPFA

SEQ ID NO: 178434 - protein, 106 aa, Glycine max
  Clone ID: PAT_MRT3847_132143C.1.pep
KRPMGGGNDPGGKTSNPTPPISWRNFKRPLGKNKGANPIPFKRWAIPTFFLRFIRPFPFLGLKNTLTKGGGLPEPVLYRGPKPPVRTGDQLIYSRRFGKISAKKLF

SEQ ID NO: 178435 - protein, 79 aa, Glycine max
  Clone ID: PAT_MRT3847_132144C.1.pep
NGQGYKKISYLIYPGLKRPSKIREAQGSITFFWINQRPTETSHSLKREIKLPHPGFIPSTKSLNGKKEPYVSSSPSESR

SEQ ID NO: 178436 - protein, 69 aa, Glycine max
  Clone ID: PAT_MRT3847_132145C.1.pep
GVALRPLLPTAHSHLKPETGLLQIRKELGVFANLRPATVYSPLVDASTLKREVAEGVDIMLIRELTGGI

SEQ ID NO: 178437 - protein, 111 aa, Glycine max
  Clone ID: PAT_MRT3847_132146C.1.pep
FTSLPFEFRLLFTILCGSFFMSPESKKFCCCKIMVFQFCYCFFFFFLCFVEAVEWDEGRCMDVLMCVWNLLGLLDLACEVSEYLSGFGLELNLSHLFHLFWVNWWSLGPFG

SEQ ID NO: 178438 - protein, 258 aa, Glycine max
  unsure (1)..(258): unsure at all Xaa locations
  Clone ID: PAT_MRT3847_132147C.1.pep
MAASLQLFQCKLARPFRSFPLRRSTPPLSLRCCASPPSSYSITLIPGDGIGPEIISVAKDVLVLVGSLEGIKFEFQEVLMGGAALDATGVPLPDDTLSAAKQSHAVLLGAVGGYKWDKNEKHLKPETGLLQIRKELGVFANLRPATVYSPLVDASTLKREVAEGVDIMLIRELTGGIYFGEPRALXTNENGEEIGFNTEIYATHEIDRIAHFAFAQRPHLRGHRRSCPRGFSRRDQIRVARCSYGCSCIGCHRSPCTR

SEQ ID NO: 178439 - protein, 151 aa, Glycine max
  Clone ID: PAT_MRT3847_132148C.1.pep
NNYSLASLDLPLVEFPYPNQNPLSEHKKQMMSGWMQDTAEEQNSASASWPNSNANNELSCVSLCAYKPISSQIHEAEWRHVPNNITHTNVAASDNYNLLQQPLHPTNLNFLTPKPTFYPLEMSSDVGFLDPQASFTSKTDGDVFLSSNNNL

SEQ ID NO: 178440 - protein, 409 aa, Glycine max
  unsure (1)..(409): unsure at all Xaa locations
  Clone ID: PAT_MRT3847_132149C.1.pep
MAACLQLWQCKLARPFDSLPVRRSIPLSLRCSAAPSSSKPTRSYSITLIPGDGIGPEIISVAKDVLVLAGYLEGIKYDFREMLMGGAALDATGLPLPHETLSAAKQSHAVLLGAVGGYKWDRNDKHLKPETGLLQIRKELGVFANLRPATVYSPLVDASTLKREVAEGVDIMLIRELTGGIYFGEPRGFGTNDNGEEIGFNTEIYATHEIDRIAHFAFKVAQKRRRKLCSVDKANVLEASXLWRKRFLAIAQEYPDVELSHMYVDNASMQLIRDPKQFDTMVTNNIFGDILSDEASMVTGSIGMLPSASLGASGPGLFEPIHGSAPDIAGQDKANPFATVLSAAMLLRYGLGEEKAAERIENAVMDTLNRGFRTGDIYSAGTKLVGCKQLGEEILKSVESNVPAGAAAV

SEQ ID NO: 178441 - protein, 107 aa, Glycine max
  Clone ID: PAT_MRT3847_13214C.1.pep
SSNCYIVAIGLILTGCPACYRIVNRTKTNRWVSVTGPKARILDMDNVMKSVSSAAAQSSNRLSPTGGPLTGQCVTDSLNVCAVLYRDRTAAVAHLACAAAPNGHTTP

SEQ ID NO: 178442 - protein, 735 aa, Glycine max
  unsure (1)..(735): unsure at all Xaa locations
  Clone ID: PAT_MRT3847_132150C.1.pep
RFDELAIDAKLPKTRFSQCIGMNESKEFAGELFDALARRRGITSASITKDQLREFWEQITDQSFDSRLQTFFDMVDKDADGRITQEEVKEIIALSASANKLSKIQNRAEEYAALIMEELDPDNLGYIELYNLEMLLLQAPAQSTHITTDSRVLSQMLSQKLVPTKEYNPIKRGFRSLAYFVEDNWKRIWVIALWLSICAGLFTWKFIQYKHRAVFDVMGYCVTSAKGAAETLKFNMALILLPVCRNTITWLRSKTKLGMAVPFDDNINFHKVIAFGIAIGVGIHAISHLTCDFPRLLHATDEEYEPMKQFFGDERPNNYWWFVKGTEGWTGIAIVVLMAIAYTLAQPWFRRNRLKLPKPLKRLTGFNAFWYSHHLFVIVYGLFIIHGYFLYLSKKWYKKTTWMYLAVPMILYGCERLLRAFRSGYKSVRILKVAVYPGNVLALHVSKPQGFKYSSGQYIYVNCSDVSPFEWHPFSITSAPGDDYLSVHIRTLGDWTSQLKGVFAKACQPASDGQSGLLRADMLQGNNKPRMPRLLIDGPYGAPAQDYKNYDVILLVGLGIGATPLISILKDVXLNNIKQHKDVEEGEGGKGXKRKPFATKRAYFYWVTREEGSFEWFKGVMNEVEENDKEGVIELHNYCPSVYEEGDARSALITMLQSLHHAKNGVDIVSGTRVKTHFARPNWRNVFKHAAIKHPDQRVGVFYCGAHGLVGELKRLSLDFSRKTSTKFDFHKENF

SEQ ID NO: 178443 - protein, 117 aa, Glycine max
  Clone ID: PAT_MRT3847_132151C.1.pep
CTLLALPCRSPCFLVSLPEERCRRATSPPQTISTHCLSAPDTTLFSGPSHSSLFFTPLSSLRSTPTLFVCYSELIFRVSAQKFNVCKRKLRTEECKKKAQCNARLGACVSAVRADAW

SEQ ID NO: 178444 - protein, 89 aa, Glycine max
  unsure (1)..(89): unsure at all Xaa locations
  Clone ID: PAT_MRT3847_132152C.1.pep
LSGPGIVSKRYKGTETPGSQLFICEGVTDWLEVERFVFEQVAXMMKVVMKIDKIGSSCVRAKEPVLSPTVVLSVKYSRLTLRFDLWEGE

SEQ ID NO: 178445 - protein, 69 aa, Glycine max
  Clone ID: PAT_MRT3847_132153C.1.pep
MKLDGLSDTVNFKSDHTEWVSDGFSATIGLHEGSVDTHDVISASHAAKLSDGSSNDPMDLPRFALNETI

SEQ ID NO: 178446 - protein, 88 aa, Glycine max
  unsure (1)..(88): unsure at all Xaa locations
  Clone ID: PAT_MRT3847_132154C.1.pep
DPNKGSLGIIAPIASAFVVGVNMLASGPFMVGSMXPARSFGPYVVSVYLVANWICWVGPFKXAGXAGMIYVDVFVGSYAPVPASETYL

SEQ ID NO: 178447 - protein, 143 aa, Glycine max
  unsure (1)..(143): unsure at all Xaa locations
  Clone ID: PAT_MRT3847_132155C.1.pep
MWKLVGTAYYVTYLRTFQGVITFRACVIMLKLNSEGNGVITLSSREQAYLTHDDLIHVDCSDSRDHDFTXSTGDLRWNESDKFQPSEVDPGLYLAWLSRILXATEEKAPPDALKLFTRSTGVILSHSLLECGLMXWDHISRTL

SEQ ID NO: 178448 - protein, 194 aa, Glycine max
  unsure (1)..(194): unsure at all Xaa locations
  Clone ID: PAT_MRT3847_132156C.1.pep
MASSTITSSFLTSPPSSLFNKSSSPSFHATPTLRPLAPRASMSAWLGGQLFSAMVVRKPAHLFLDELNVEYDEQDNYAVIKHAALFTSTIMSKLLARPNVKLFNAVAAEDLIVKNGRVGGVVTNWALVSLNHDTQSCMDPNVMEAKVVVSSCGHDGPFGATXVKRLKSIGLIDSVPGMKALDMNKAXDAIVRLT

SEQ ID NO: 178449 - protein, 63 aa, Glycine max
  Clone ID: PAT_MRT3847_132157C.1.pep
MAVRSTVSRFPMDTDAREGSGLLWGVTVTPFAATDENTRAPSYGSGGDLLPRCENCWAYFNTY

SEQ ID NO: 178450 - protein, 177 aa, Glycine max
  unsure (1)..(177): unsure at all Xaa locations
  Clone ID: PAT_MRT3847_132158C.1.pep
MASSTXTSSFLTSPPSSLFNKSSSPSFHATPTLRPLAPRASMAASAPPYDFGSFRFDPIRESIVSREMTRRYMIDMVTHAGSAGLSCAYELSKNPSINIAIVEQSVSPGGGAWLGGQLFSAMVVRKPAHLFLDELNVEYDEQDNYGGIKRAGLVTCTIVSKLLGRANGRLCDAGGGG

SEQ ID NO: 178451 - protein, 53 aa, Glycine max
  unsure (1)..(53): unsure at all Xaa locations
  Clone ID: PAT_MRT3847_132159C.1.pep
RKGPTFGAMMISGQKAAHLXLRSLGLPNALDSVGNVHPELVLAAAESAEIAEA

SEQ ID NO: 178452 - protein, 252 aa, Glycine max
  unsure (1)..(252): unsure at all Xaa locations
  Clone ID: PAT_MRT3847_13215C.1.pep
MMNSTEEEYRGCEIMEKDVHVTFLELMYYLLPSPYESQEINHLTLAYFVISGLDILDSLHKVAKDAVVSWVLSFQAHPGAKTDLNDGQFYGFHGSKTSQFPPDENGVLIHNNSHLASTYCAISILKIVGYELSNLDSETIVTSMMELQQPDGSFIPIHTGGETDLRFVYCAATICFMLDNWSGMDKEKTKDYILRCQSYDXGAKSCSCATFCAFASLRFMGIIGDYILSRWAXSSLIDAQLLVGWILQKQGN

SEQ ID NO: 178453 - protein, 456 aa, Glycine max
  Clone ID: PAT_MRT3847_132160C.1.pep
MGSSFSSCYEGESVSPSPKPTKVVATKGGSSSNRVSITDLSFPGSTLSEDLSVSLVGSNLHVFSLAELKIITQGFSSSNFLGEGGFGPVHKGFIDDKLRPGLEAQPVAVKLLDLDGSQGHKEWLTEVVFLGQLRHPHLVKLIGYCCEEEHRLLVYEYLPRGSLENQLFRRYTASLPWSTRMKIAAGAAKGLAFLHEAKKPVIYRDFKASNILLDSDYNAKLSDFGLAKDGPEGDDTHVSTRVMGTQGYAAPEYIMTGHLTAMSDVYSFGVVLLELLTGRRSVDKGRPQREQNLVEWARSALNDSRKLSRIMDPRLEGQYSEVGARKAAALAYQCLSHRPRSRPLMSTVVNVLEPLQDFDDVPIGPFVYTVPAEQQQYNEVAKESETPKERKRENGHHHNRRHHHHRHNGHRHHPLKSPKTPMPSDQSQNDEHRNGRKSGSNSPDTFNASEAQRSMG

SEQ ID NO: 178454 - protein, 64 aa, Glycine max
  Clone ID: PAT_MRT3847_132161C.1.pep
VLRQALHALVQRNLRDNRSRSQSAFCTSDNSSPKGTTGTRRSEADIHEAYQPPLRVEGYANSNG

SEQ ID NO: 178455 - protein, 79 aa, Glycine max
  Clone ID: PAT_MRT3847_132162C.1.pep
IVDITALDKERTPRDGFDLMHACTLLRNMHLTDLLVTIELDLTRLDHDIVRHAEQLNRARRVLSGDPPVDPRQHRDRCT

SEQ ID NO: 178456 - protein, 285 aa, Glycine max
  Clone ID: PAT_MRT3847_132163C.1.pep
TASLPWSTRMKIAAGAAKGLAFLHEAKKPVIYRDFKASNILLDSDYNAKLSDFGLAKDGPEGDDTHVSTRVMGTQGYAAPEYIMTGHLTAMSDVYSFGVVLLELLTGRRSVDKGRPQREQNLVEWARSALNDSRKLSRIMDPRLEGQYSEVGARKAAALAYQCLSHRPRSRPLMSTVVNVLEPLQDFDDVPIGPFVYTVPAEQQQYNEVAKESETPKERKRENGHHHNRRHHHHRHNGHRHHPLKSPKTPMPSDQSQNDEHRNGRKSGSNSPDTFNASEAQRSMG

SEQ ID NO: 178457 - protein, 350 aa, Glycine max
  Clone ID: PAT_MRT3847_132164C.1.pep
MASSTITSSFLTSHPSSLFNKSSSSSFPSFHATPTLRPHRPRASMSAAAPPPPYDFGSFRFEPIRESIVSREMTRRYMTDMVTHADTDVVVVGAGSAGLSCAYELSKNPSVNIAIVEQSVSPGGGAWLGGQLFSAMVVRKPAHLFLDELGLEYDEQDNYVVIKHAALFTSTIMSKLLARPNVKLFNAVAAEDLIVKNGRVGGVVTNWALVSMNHDTQSCMDPNVMEAKVVVSSCGHDGPFGATGVKRLKSIGLIDSVPGMKALDMNKAEDAIVKLTREVVPGMIVTGMEVAEIDGAPRMGPTFGAMMISGQKAAHLALRSLGLPNALDSVGNVHPELVLAAAESAEIADA

SEQ ID NO: 178458 - protein, 410 aa, Glycine max
  Clone ID: PAT_MRT3847_132165C.1.pep
MGALSNPHHVPLVIQNENKHATFPWLLPPSPPPSSHHTLVRISRLDPPHPSAETKTEKKNKQYHNMASSTITSSFLTSPPSSLFNKSSSPSFHATPTLRPLAPRASMSASAPPYDFGSFRFDPIRESIVSREMTRRYMIDMVTHADTDVVIVGAGSAGLSCAYELSKNPSINIAIVEQSVSPGGGAWLGGQLFSAMVVRKPAHLFLDELNVEYDEQDNYVVIKHAALFTSTIMSKLLARPNVKLFNAVAAEDLIVKNGRVGGVVTNWALVSLNHDTQSCMDPNVMEAKVVVSSCGHDGPFGATGVKRLKSIGLIDSVPGMKALDMNKAEDAIVRLTREVVPGMIVTGMEVAEIDGAPRMGPTFGAMMISGQKAAHLALRSLGLPNALDSVGNVHPELVLAAAESAEIAEA

SEQ ID NO: 178459 - protein, 195 aa, Glycine max
  Clone ID: PAT_MRT3847_132166C.1.pep
MGCRVSHSQKPTKKFKLPIKFLKDCNGVDHASVPRKIRSAVKKRGRESFFGDSEKVNHRMNGMESPQKDGIKKSKKQRTPGWSTRQVSPGPITKDEEEVVETLYALAGMFPSDKASNAVKSELDSESLPENSTVLQDQEESQSANVTLEASGATQDARKRCSRGCQKISFWMKPIIKGSLAAASLLWYPVTWNSL

SEQ ID NO: 178460 - protein, 61 aa, Glycine max
  Clone ID: PAT_MRT3847_132167C.1.pep
RVCSLLSKGLRPTVKESTPKCSKKKCGTGCQKIMKCMHSVMDEGFLYHHTKIYKKKKLSRA

SEQ ID NO: 178461 - protein, 57 aa, Glycine max
  Clone ID: PAT_MRT3847_132168C.1.pep
VNPRHMWIISQHSLTSRMKSMLVECRSLGIQSIQITTAYTAVIHLRPDLIFHQVSTS

SEQ ID NO: 178462 - protein, 39 aa, Glycine max
  Clone ID: PAT_MRT3847_132169C.1.pep
HASAHASGYLYNCTGLHLRKFLEPWDLTLITVVTEIYLK

SEQ ID NO: 178463 - protein, 38 aa, Glycine max
  Clone ID: PAT_MRT3847_13216C.1.pep
GSSGYLQIFHIRHDNLCHAGAGPHNDDQHDNIRYITTY

SEQ ID NO: 178464 - protein, 49 aa, Glycine max
  unsure (1)..(49): unsure at all Xaa locations
  Clone ID: PAT_MRT3847_132170C.1.pep
KFIELYETPLLXNLLMIFXSSLXPLAFIYLPERGNFYFXXVIQSPYFFN

SEQ ID NO: 178465 - protein, 826 aa, Glycine max
  unsure (1)..(826): unsure at all Xaa locations
  Clone ID: PAT_MRT3847_132171C.1.pep
NIGSLRVLLGDGNLGMWIHKHMNVKYTDMFHKTLGDMFSKLLASYDIEVEGTMNLXIHSDPYVSISVSNAVIGRTYVMSDXQSSVWLIHFXVSIPDLAAAVHFLGKDNDFVCSXLIGIVANQIEQIYSGAVVEGTFPILNNNGKPCKQGAVLTLSIQYIPMEKLCIYHQGVGAGPEYIGVPGTYFPLRRGGTVTLYQDAHVPDGSLPNVLLDSGMYYVNGKCWQDIFDSISQARRLIYITGWSVWHKVRLVRDAAGYASDYTLGDLVKSKSQEGVRVLLLIWDDPTSRSIFGYKTDGVMATHDEETRRFFKHSSVQVLLCPRSGKRHSWIKQKEVGTIYTHHQKTVIVDADAGNNRRKIIAFVGGLDLCDGRYDTPHHPLFRTLNTIHKDDYHNPTFTGNIGGCPREPWHDLHSKIDGPAAYDVLTNFEERWLKASKPHGIKKLKISYDDALLRLERIPDVIGINDAPSVGEDNPEVWHVQIFRSIDSNSVKRFPKDPKDATSKNLVCGKNVLIDMSIHTAYVKAIRAAQHYIYIENQYFIGSSYNWSQHKDLGANNLIPMEIALKIAEKIKANERFAVYVVIPMWPEGVPTGAATQRILFWQNKTMQMMYETIYKALVEAGLEAAFSPQDYLNFFCLGNREAMNLYDNAGVTGAPPPANSPQAASRNSQRFMIYVHSKGMIVDDEYVILGSANINQRSMEGTRDSEIAMGAYQPHHTWARKQSYPHGQIHGYRMSLWAEHTGTIEECFLQPESLECVRRVKAMGEMNWKQFSAKEATEMKGHLLKYPVEVDRNGKVRPLQDCEEFPDVGGKIVGSFLAMKENLTI

SEQ ID NO: 178466 - protein, 68 aa, Glycine max
  Clone ID: PAT_MRT3847_132172C.1.pep
VHLVPTVGRGKMYPAVSCQFSLVHPWLALGLASKVRPLSKASILIRQLCRHKYSLTTPKSHHGDRATT

SEQ ID NO: 178467 - protein, 552 aa, Glycine max
  Clone ID: PAT_MRT3847_132173C.1.pep
MGRKEKQNAKAIDEEHDVVNFNGASTPSLVFSSDDDEANQDLSLKIVEKAMRMRAAKHAPNDDVSSPFSQKSELAVPLNDVVSDLPSAIADSEVTEKKKTAKLKREAAGDQSVVIAEEQEMEETSNATENHEFVEGSPVLIGHNMVLRKLLRGPRYFDPPDSSWGACFNCGEDGHAAVNCSAAKRKKPCYVCGGLGHNARQCTKAQDCFICKKGGHRAKDCLEKHTSRSKSVAICLKCGNSGHDMFSCRNDYSPDDLKEIQCYVCKRVGHLCCVNTDDATPGEISCYKCGQLGEADRRGSRLRDEITSGATPSSCFKCGEEGHFARGCTSSIKSGKRNWESSHTKDKRSQKENDYMGNRSASNDMVGARRKKRSPTEERGFSTPKKSKSRGGWTAEYPTEERGFTTPKKSKSRGGWTTEHPTEERGFTTPKKSKNRGGWTSEHPLEQKDYTTPKKSKSRGGWMSEHPEEFFPPMSSRSNGYRSLGTPSSRNNKIHSFGGGSHTPSYKSSKVWNDHAGTSMSQGSARSNHHRFSASRFGNSSSDGHGRNYNWW

SEQ ID NO: 178468 - protein, 138 aa, Glycine max
  Clone ID: PAT_MRT3847_132174C.1.pep
MGLEDLVGKLRKSISQVDEKFVEEMRGDKGRSIMKESLGAISEKGSKGEVVDYVGFSSWCNFGYYEADFGWGKPTWVSGVGSIGSVSMFMNLIILVDTRLGDGIEAWVTLDEEDMTHLEANTELLTCATLDPSPLAMS

SEQ ID NO: 178469 - protein, 52 aa, Glycine max
  Clone ID: PAT_MRT3847_132175C.1.pep
GPKPKYSVSTLDVQKDGMFPLYPEIASSTRVCELTNESPSPPVGFVLSVNYA

SEQ ID NO: 178470 - protein, 111 aa, Glycine max
  unsure (1)..(111): unsure at all Xaa locations
  Clone ID: PAT_MRT3847_132176C.1.pep
RDTLIKLDRNKRVDXLKKVWGDXKQRKFYLIQHAFGHIIKVFIHKGLPSEAMDIYEXMRQSHERLVSLPFXVILKGCIPYXPELRYKVKDVFLXFFPGMIIISPFKVFVQR

SEQ ID NO: 178471 - protein, 66 aa, Glycine max
  Clone ID: PAT_MRT3847_132177C.1.pep
VLIGHFLHFFKITICCRLELCNMKGVLPDRCTYLCKGYLQEEMLFGVREIGNQKMALALAKWSAYV

SEQ ID NO: 178472 - protein, 80 aa, Glycine max
  Clone ID: PAT_MRT3847_132178C.1.pep
IKLRANNKISIQQNIKHLNIVTNNRSPSLGRRNTKSSIRKPLQFRSPNVFLMEISEERKLYFSSSSEPFCRLLAAVRTRG

SEQ ID NO: 178473 - protein, 185 aa, Glycine max
  unsure (1)..(185): unsure at all Xaa locations
  Clone ID: PAT_MRT3847_132179C.1.pep
SDVDIEGVTCAPTHGISIGSLGVHNSQACVSNLTVRNTIIKESDNGLRIKTWQGGTGSVTGLRFENIQMENVRNCIIIDQYYCMSKECLNQTSAVHVNDVTYRNIKGTYDVRXPPIHFACSDTVACTNITLSEIELLPYEGELLDDPFCWNAYGTQETMTIPPLDCLREGEPDTVVELSAYDCRS

SEQ ID NO: 178474 - protein, 54 aa, Glycine max
  unsure (1)..(54): unsure at all Xaa locations
  Clone ID: PAT_MRT3847_13217C.1.pep
LTTPMHLSKKKNLITYPINLLNETLFMTQTVKLTKMRLKKTKFXTPCAIWVKKT

SEQ ID NO: 178475 - protein, 74 aa, Glycine max
  Clone ID: PAT_MRT3847_132180C.1.pep
ESERSQLGIYVTDTEQHAHNVKASVQNLSKTPRSSNIHNNLSTFISSVSLRSIRSHDPPHCALVRDPMDRKHSL

SEQ ID NO: 178476 - protein, 84 aa, Glycine max
  unsure (1)..(84): unsure at all Xaa locations
  Clone ID: PAT_MRT3847_132181C.1.pep
MPNPKVFFDMTIGGQSAGRIGMGLYADVTLRTAENFRAPWTRQKGXGRTGKPFNSRGSAFNRGIPSLMGKVGDSTAGNGPGGRR

SEQ ID NO: 178477 - protein, 54 aa, Glycine max
  Clone ID: PAT_MRT3847_132182C.1.pep
RNRNRKKENGKYTPPRRKKKKFLMKKQKMKLKGKKVAHKKKESNHKLKKWDWAI

SEQ ID NO: 178478 - protein, 234 aa, Glycine max
  unsure (1)..(234): unsure at all Xaa locations
  Clone ID: PAT_MRT3847_132183C.1.pep
RVRLDDPYASAIRNCDPEGPLMLYVSKMIPTSDKGRFYAFGRVFSGKVSTNMKARIMGPNFVPGEKKDLYVKSVQGTSIWMGKKYETVEDVPCGNTVALAGLDHFITKNATITNETEIEAHPIRAMKFSVSPLVSVAVNCNAASDLPKLVEGLKRLAKSDPIMMCTISETGEHIIGATGELHLETCVKDLKDDXMNGIEISISDPIVSFRXTVLEKVCHTVMSXSPKQHXRLYM

SEQ ID NO: 178479 - protein, 71 aa, Glycine max
  Clone ID: PAT_MRT3847_132184C.1.pep
RKSHQNNLHPPRCCRFGPSTYGHHPLLHLMLPRARVSQADHVLFCTWSGCTLRLPTSFISAPGGQRVAPRH

SEQ ID NO: 178480 - protein, 75 aa, Glycine max
  Clone ID: PAT_MRT3847_132185C.1.pep
KKTFPFFFLDFLDGKKPGFGFGTAGIKWLWPLGKKFGKKKIGVKRGFLCQPGVNFEIPNTVFWKMNVKGLPFYIG

SEQ ID NO: 178481 - protein, 51 aa, Glycine max
  Clone ID: PAT_MRT3847_132186C.1.pep
SMGIGALGHANPMISFFYCSIKRYPFLSGLTLKTDSRIHSLSLIRLYPLPS

SEQ ID NO: 178482 - protein, 36 aa, Glycine max
  Clone ID: PAT_MRT3847_132187C.1.pep
FCRILTPVPFCRILTAVSFCRLRTPVPFCRLRTAVP

SEQ ID NO: 178483 - protein, 96 aa, Glycine max
  Clone ID: PAT_MRT3847_132188C.1.pep
RILPAHPHRRHCHSSAHLQLSQPPSSSSPASRRAPGSRISSPSYLLYYIYIAASRGFVYIYGSDQLYYIINININYRTTSCGLIYGSTVLYIICYY

SEQ ID NO: 178484 - protein, 1029 aa, Glycine max
  unsure (1)..(1029): unsure at all Xaa locations
  Clone ID: PAT_MRT3847_132189C.1.pep
MAGSHFHFPRDSEEHRPPTRQSASKVCRVCSDEIGYGEDGKLFVACHVCRFPVCRPCYEYERSEGNHCCPQCNTRYKRHKGCPRVAGDDEEHSDADDFHDNPDEKHDVNHLENKDYKEQQWHPNGQAFSSAGSVVGKEFEGEKEFFSNGEWEERLDKWKARQEKRDLQNKEEGKDDQGEDDYLLAEARQPLWRKVPISSSLINPYRIVIIMRLVILVFFLRFRILTPAYDAYPLWLASVICEIWFALSWILDQFPKWFPITRETYLDRLSIRFEREGEPNLLAPVDVYVSTVDPLKEPPIITANTVLSILAVDYPVEKVCCYVSDDGASMLLFDTLSETSEFARRWVPFCKKYSIEPRAPEFYFSQKIDYLKDKVHPTFVKERRAMKREYEEFKVKINALVAKAQKKPEEGWVMQDGTPWPGNNTRDHPGMIQVYLGSGGALDVEGKELPRIVYVSREKRPGYNHHKKAGAMNALVRVSAVLSNAPFMLNLDCDHYINNSKAIREAMCFLMDPQLGKKLCYVQFPQRFDGIDRHDRYANRNIVFFDINMKALDGIQGPVYVGTGCVFNRKALYGYDPPVSEKRPKMTCDCWPSWCCCCCGGSRKSKSKKKSGGGGGLFSRLYSKKKKTMGKSYVRRGYESMFDLEEIEEGLEGYDGLEKSSLMSQKQFEKRFGQSPVFIASTLKENGGIPEGTNSQSLIKEAIHVISCGYEEKTEWGKEIGWIYGSVTEDILTGFKMHCRGWKSVYCMPKRPAFKGSAPINLSDRLHQVLRWALGSVEIFLSRHCPLWYGYGGKLKWLERFAYTNTIVYPFTSIPLLAYCTIPAVCLLTGKFIIPTLTNLASVWFXGSIHLHHFNXVLELRWSGVSIEDLWRNEQFWVIGGVSAHLFAVFQGLLKVLGGVDTNFTVTAKAADDAEFGELYLFKWTTLLIPPTTLIILNMVGVVAGVSDAINNGYGSWGPLFGKLFFAFWVIVHLYPFLKGLMGRQNRTPTIVVLWSILLASIFSLIWVRIDPFLPKQTGPVLKQCGVEC

SEQ ID NO: 178485 - protein, 144 aa, Glycine max
  unsure (1)..(144): unsure at all Xaa locations
  Clone ID: PAT_MRT3847_13218C.1.pep
TWPSVQLSVTVSSSEDHTTTATTIVNCTYLDTLVDDYTMATXPREFVPHYIRWPMNTLLTYILTSVITGDIKYKPNHSNIQISSLCYDRGSKLXTKHXKNLALTXEEKTVVLINRGISADSSAKRANEFQKHAAHDSAKDHIPD

SEQ ID NO: 178486 - protein, 45 aa, Glycine max
  Clone ID: PAT_MRT3847_132190C.1.pep
RFWAGGLFMERKFGCPQYGEGCLVGKDIFVVHIRQQPWERSNVYL

SEQ ID NO: 178487 - protein, 185 aa, Glycine max
  Clone ID: PAT_MRT3847_132191C.1.pep
MITIMMVADTVAVTAAKGLGVLRAYQSTCNFSVADQISAMIQTYDAVAPPPVKPTTYRLRRRTLLRRKQLTKRRLSGDDSGDAGNEGFLFGDGGDGPFGGGGDFGGGGVGGGGWNFNRFGGGNNWDEPSSSVPDPAFDFVYQVLSWIMLSNCLHFSFKRIVRIVAAGSIVDSDREKVPARLVPIC

SEQ ID NO: 178488 - protein, 1045 aa, Glycine max
  unsure (1)..(1045): unsure at all Xaa locations
  Clone ID: PAT_MRT3847_132192C.1.pep
MTLNSMAGSHFHFPRDSEEHRPPTRQSASKVCRVCSDEIGYGEDGKLFVACHVCRFPVCRPCYEYERSEGNHCCPQCNTRYKRHKGCPRVAGDDEEHSDADDFHDNPDEKHDVNHLENKDYKEQQWHPNGQAFSSAGSVVGKEFEGEKEFFSNGEWEERLDKWKARQEKRDLQNKEEGKDDQGEDDYLLAEARQPLWRKVPISSSLINPYRIVIIMRLVILVFFLRFRILTPAYDAYPLWLASVICEIWFALSWILDQFPKWFPITRETYLDRLSIRFEREGEPNLLAPVDVYVSTVDPLKEPPIITANTVLSILAVDYPVEKVCCYVSDDGASMLLFDTLSETSEFARRWVPFCKKYSIEPRAPEFYFSQKIDYLKDKVHPTFVKERRAMKVGREDRTKSSFREYEEFKVKINALVAKAQKKPEEGWVMQDGTPWPGNNTRDHPGMIQVYLGSGGALDVEGKELPRIVYVSREKRPGYNHHKKAGAMNALVRVSAVLSNAPFMLNLDCDHYINNSKAIREAMCFLMDPQLGKKLCYVQFPQRFDGIDRHDRYANRNIVFFDINMKALDGIQGPVYVGTGCVFNRKALYGYDPPVSEKRPKMTCDCWPSWCCCCCGGSRKSKSKKKSGGGGGLFSRLYSKKKKTMGKSYVRRGYESMFDLEEIEEGLEGYDGLEKSSLMSQKQFEKRFGQSPVFIASTLKENGGIPEGTNSQSLIKEAIHVISCGYEEKTEWGKEIGWIYGSVTEDILTGFKMHCRGWKSVYCMPKRPAFKGSAPINLSDRLHQVLRWALGSVEIFLSRHCPLWYGYGGKLKWLERFAYTNTIVYPFTSIPLLAYCTIPAVCLLTGKFIIPTLTNLASVWFXGSIHLHHFNXVLELRWSGVSIEDLWRNEQFWVIGGVSAHLFAVFQGLLKVLGGVDTNFTVTAKAADDAEFGELYLFKWTTLLIPPTTLIILNMVGVVAGVSDAINNGYGSWGPLFGKLFFAFWVIVHLYPFLKGLMGRQNRTPTIVVLWSILLASIFSLIWVRIDPFLPKQTGPVLKQCGVEC

SEQ ID NO: 178489 - protein, 182 aa, Glycine max
  Clone ID: PAT_MRT3847_132193C.1.pep
MITVMMVADTVAVTTAKGLGVLRACQSTCNFSLADQISAMIQTYDAVAPPPVKPTTYRLRRRTLLRRKQRTKRRLSGDDSGDAGDEGFLFGDGGDGPFGGGGGFGGSGGGWNFNRFGSGHNWDEPSSSVPDPAFDFVYQVLSWIMLSNCLHFAFKRIVRIVAAGSIVDSDREKVPARLAPIC

SEQ ID NO: 178490 - protein, 220 aa, Glycine max
  Clone ID: PAT_MRT3847_132194C.1.pep
MSEACVRFTSLLHSAFPFHSLHSPNPKRRWFFPPATAHCQMRPTMMLRALTKQFLGIVGDTANTVAKKPPPPPPLVSRKPAFIDAFLYKMKKNPNLLLNKTIWSRRSTILPEFVDSTVKIYNGKTTIRCRITEGKVGHKFGEFALTRKRKTREQANSKNVKQLKKKKASPGAAPLCICKGKAAYNIPPPYLRIIVFEDLIVFPARILATRILMKFDRDCS

SEQ ID NO: 178491 - protein, 127 aa, Glycine max
  Clone ID: PAT_MRT3847_132195C.1.pep
MRPTMMLRALTKQFLGIVGDAANTVAKKPPLPPPLVSRKPAFIDAFLYKMKKNPNLLSNKTIWSRRSTILPEFVDTTVKIYNGKTTIRCRITEGKVGHKFGEFALTRKRKTREQANAKNVKQLKKKK

SEQ ID NO: 178492 - protein, 43 aa, Glycine max
  unsure (1)..(43): unsure at all Xaa locations
  Clone ID: PAT_MRT3847_132196C.1.pep
GEIILSYLTMACXMCKSNRKTHAGTKVKLKFLFLQVLPRSHGH

SEQ ID NO: 178493 - protein, 294 aa, Glycine max
  Clone ID: PAT_MRT3847_132197C.1.pep
MAKKPVKYFVVDAFTESAFKGNPAAVCLLEEEKEDSWMQGVATEFNLSETCYLTPIAESERSDISLNRFRLRWFTPATEVELCGHATLASAHVLFSSGLVKSDIIEFVTLSGVLTAKKVSGINDGEGASEDGLFIELDFPADTVTEFNSADISQISAALNDAPIIDIKRTTVGDHLLVELASGKDVVELQPDIGAIAKCPGGGILVSGTAPPESGFDYYCRTFFPKVGINEDPITGSAQCALAPYWAKKMGKCDLSVYAASPRGGVVHVHFDDQSKRILMRGKAVTVMNGCVMI

SEQ ID NO: 178494 - protein, 72 aa, Glycine max
  Clone ID: PAT_MRT3847_132198C.1.pep
ALRVEELRSASTMLECVCSHLKNGDGRSSCTSKVESGVQNSVSNRVRSRNLSPLSETEATHSRSPEPHEQNS

SEQ ID NO: 178495 - protein, 62 aa, Glycine max
  Clone ID: PAT_MRT3847_132199C.1.pep
ATPKKNWITTYCNYYMIHDHTLFKIISIHFSKTKQKKKYTLIPDIEERKTAHPNPMHLFQPF

SEQ ID NO: 178496 - protein, 84 aa, Glycine max
  Clone ID: PAT_MRT3847_13219C.1.pep
TFAHIQFDRVRLSVKSALSPNHFAVTSSDHWRNMLDHTIPNYLFIRGVIFGFQAVTPICIFIASFSIAEPPQSPFRRFLLVWSL

SEQ ID NO: 178497 - protein, 344 aa, Glycine max
  unsure (1)..(344): unsure at all Xaa locations
  Clone ID: PAT_MRT3847_1321C.1.pep
MEKGAMVFPFPIAVSCLFIIVHIFANSVSGSLVFNFYAASCPTAELIVRNTVSSSSSSDPSIPGKLLRLVFHDCFVEGCDASLMLLGNNTEKSDPANRSVGGFSVIESAKRVLEFLCPGTVSCADIIALAARDAVEIVGGPMIEIXPTGRVGGMVFSCFKCQTQHMGQVASNVRPNIPWTPVLQLDEMINRFSDKELSLFDLVILSGAHTIFTAHCSSFRDRFQEDSKGKLTLIDKTLDSTYADKLMQECPLSASPSVQVNNDPETSMVFDNQYYRNLLTNKGLFQSDSALLRDNRTRKFVEDLANDQEFFFESWGQSFLKLTSIGVKTGDEGEIRRSCASTNA

SEQ ID NO: 178498 - protein, 51 aa, Glycine max
  Clone ID: PAT_MRT3847_132200C.1.pep
PFVFIYFLVFLFSVFFFFNLVIQNPAVLRYKIFGKNQSETHTQGLHIKRKS

SEQ ID NO: 178499 - protein, 69 aa, Glycine max
  Clone ID: PAT_MRT3847_132201C.1.pep
FYLDLFETFVVPSFRWNFISISSLDKFEFSCSFGNNKVSLYQNSNMVGYGSFIDNLYMLDDISSYNEIL

SEQ ID NO: 178500 - protein, 107 aa, Glycine max
  Clone ID: PAT_MRT3847_132202C.1.pep
LRLYNSPSLSICILYPVNFMAAVELQEIDHMDIHPTNILQHVFEKATPLSMFREFQFSTSDKDRMEIDDNDFQLFLADKPYVSDLNEGYFAVLMNDLRKEIWSRLTD

SEQ ID NO: 178501 - protein, 43 aa, Glycine max
  Clone ID: PAT_MRT3847_132203C.1.pep
EKLQMDLHDEASMHYFQDLIKDSESALFRQMVETIHRWAQYWR

SEQ ID NO: 178502 - protein, 105 aa, Glycine max
  Clone ID: PAT_MRT3847_132204C.1.pep
TSVSPLLGLNHMMLMKLPQDHYGIMLSVLVIALSFTRGRWSFLLLLTSVLHHHPNLAPFMFTLALAYMFDGRLDDYALIRPLSHSIPNTSQLKIDLYRWLRHTLT

SEQ ID NO: 178503 - protein, 49 aa, Glycine max
  Clone ID: PAT_MRT3847_132205C.1.pep
SIHHTRSSYICKPNTHVFCTIPHYISTVLKTVNTNVSWVWVSSRRVGRS

SEQ ID NO: 178504 - protein, 82 aa, Glycine max
  unsure (1)..(82): unsure at all Xaa locations
  Clone ID: PAT_MRT3847_132206C.1.pep
LMAGRAQLVWRAACPXFFCVLFXTSGEKKMTVVYITLPARPHSRAGSLQVARIGLHWPMTLCMFHVNGIISKLTFTFPRLLH

SEQ ID NO: 178505 - protein, 132 aa, Glycine max
  Clone ID: PAT_MRT3847_132207C.1.pep
ALSPFQEGLVFRTPFRAIPENPSLELGPQFKKVSHFLTRFQSIPRFVELARLKVPAHVWFGPGVTLKGKPGFFPNPGVNLEIPSGPVFPPKEIYGPWALLKKPFFEFLNPCGCAIFGFSPPLTKIWVLLLVW

SEQ ID NO: 178506 - protein, 122 aa, Glycine max
  unsure (1)..(122): unsure at all Xaa locations
  Clone ID: PAT_MRT3847_132208C.1.pep
QWFLQEEKREXXGACLFTXXDXXRPDVVLETAWRPNIMDFAMPYFIXVMKEXLAKVDKLDGSESLRKEEELGSEAQPIVYGQPHLMVXTGPSVAVPPQAPFGYGYRAPAYGXQPQPGFGSSM

SEQ ID NO: 178507 - protein, 71 aa, Glycine max
  Clone ID: PAT_MRT3847_132209C.1.pep
TYGHRYILKMWKCNSPRYTDLISIGYRIGLIRLTKTSNSYRIVSASINLKNVELEFTKRFQYHFIWLQDKA

SEQ ID NO: 178508 - protein, 98 aa, Glycine max
  Clone ID: PAT_MRT3847_13220C.1.pep
PSPPFLLFFSLLLFTFFFCFFFFFFFFKKKIWGFFFKKTPFGPLVFKGGVHPLSIVLFTFFFTPPLDLQVSEGWLKKPFYLLSLETCYQRPFLGKTSP

SEQ ID NO: 178509 - protein, 39 aa, Glycine max
  Clone ID: PAT_MRT3847_132210C.1.pep
ALPFYTCNLIDLCSAIIDVISLSSLKSSIQIEFNIHKRI

SEQ ID NO: 178510 - protein, 67 aa, Glycine max
  Clone ID: PAT_MRT3847_132211C.1.pep
LPQPRMTQFMEPNSQWPLWVLHVPLLQRLQATCRGPMIPSGVHNVIRLVVEESRRMLYMAHPIKPTQ

SEQ ID NO: 178511 - protein, 53 aa, Glycine max
  unsure (1)..(53): unsure at all Xaa locations
  Clone ID: PAT_MRT3847_132212C.1.pep
RXXRTIKIFSLKIEXXLAYTGLNSNHVRFYWSNRPFPQFFSIGIFLIQHRGSI

SEQ ID NO: 178512 - protein, 68 aa, Glycine max
  Clone ID: PAT_MRT3847_132213C.1.pep
GSSGRTHAPVRTDDSQRLVFFYSTHIIGSRGQCQIEFPLTVALWLENNRTPKDNILAFCYFENSKLSI

SEQ ID NO: 178513 - protein, 72 aa, Glycine max
  unsure (1)..(72): unsure at all Xaa locations
  Clone ID: PAT_MRT3847_132214C.1.pep
MATESSIRIFETGIKWPSFKEAATFGSPFRHIATKDQGIYFKRPXFHGIGKDSLPNRIGNAPSNIASSFLGI

SEQ ID NO: 178514 - protein, 74 aa, Glycine max
  unsure (1)..(74): unsure at all Xaa locations
  Clone ID: PAT_MRT3847_132215C.1.pep
IPSASQAGKVIIWPAAKKGAQWKGKVLNPSTTPVXRVSRSSTGTILAVVDGNNNVTLXKKPVDGEGPQVPPVDP

SEQ ID NO: 178515 - protein, 144 aa, Glycine max
  Clone ID: PAT_MRT3847_132216C.1.pep
MLLQSYFTTIPIFLLLLVFPHTKADVHSEKQALLDFAAALHHGPKVNWNSSTSICTSWVGVTCSHDGSHVLSVRLPGVGLRGSLPPNTLGKLNGLISLSLRCNSLRGNLPTDLLSLASLRFVYLQHNNLSGEIADSLAPGLIFV

SEQ ID NO: 178516 - protein, 267 aa, Glycine max
  Clone ID: PAT_MRT3847_132217C.1.pep
NQQPGLNIITEYIIGYMYPERPVANMCFKVYGYISMVQALTFLQDFKLGHYMKIPPRTMFMAQVVGTILSVFIYTVTAWWLMRTIPHLCDTTMLDPDSPWTCPMDNVFFDASVIWGLLGPRRIFGDLGEYAKVNLFFLGGAIAPFLVWLAHKAFPEQRWITLIHMPVLLGATSMMPPATAVNFTSWILVGFLSGYIAYRYRQEWWKRCNYVLSGGLDAGTAFMTILLFLALNNNNIMLNWWGNNPEGCPLANCPTEKGIVVKGCPVH

SEQ ID NO: 178517 - protein, 56 aa, Glycine max
  Clone ID: PAT_MRT3847_132218C.1.pep
ARCTRCLRCSTRCHSQCKITESRLPLSVCDSPICKVLEKLIFPGDLAGFRPAYSEP

SEQ ID NO: 178518 - protein, 542 aa, Glycine max
  unsure (1)..(542): unsure at all Xaa locations
  Clone ID: PAT_MRT3847_132219C.1.pep
GPSRVDPRVRSFPKGPAPRPVETVRSSSSSSKRSLSSPSPPNNTKRCKVSEDSSSTTVPSVAPVNESGTANESAEPELRPSDLPDTASLKAVDGCDAMSPDRSPSAPVEGEALVSPQCQGDTAEKLKGVPMAAAGGRSKKRPSKLSPKVAWGKLLSQCSQNPHVSMSDLIFTVGQGRNCNLWLKDPTVGNVLCKLSHIERGGSSVALLEITGGKGSIQVNGKTYRKNARLILSGGDEVVFGSSGKHAYIFQQLTNNNINPADIPSSVSILEAQSAPINGTQVEARSGDPSAVAGASILASLSNLPKDLSLLSPPAKTGKNVQQNADISSLPSGNGDDMPDSEMKDATNDVASEVFSADKTVNKNPNLDTAEVNINVDPDVGKVTAATYELRPLLRMLAGSCPEVDLSGGITRILERQGTRRELLKDVDTPTILASTKRQAFKDSLQQRILKAEKIDVSFETFPYYLSDTTKNVLIASTFIHLKCKGFGKYAXDLPSVSPRILVSGPPGSEIYYETLSKALVKHFGARLLIVDSLSLPGGSPS

SEQ ID NO: 178519 - protein, 81 aa, Glycine max
  Clone ID: PAT_MRT3847_13221C.1.pep
ANLIELQSLPPTLHYLLQIQYITKIIHTCKITGKKQILQQRIRSTLPITGSIFRTFLKKTCHTYRENGKDAHVCKHNSNVD

SEQ ID NO: 178520 - protein, 141 aa, Glycine max
  Clone ID: PAT_MRT3847_132220C.1.pep
MVETRRSSSSSSKRSLSSPSPPNNTKRCKVSEDSSSTTVPSVAPVNESGTANESAEPELMLSDLPETASLKAVDGCVAMSPDKSPSVPVEGEALVSPQCQGETAEKSKGVLMAAATTTGGRSKKQRPSKLSPKVAWGKLLS

SEQ ID NO: 178521 - protein, 192 aa, Glycine max
  unsure (1)..(192): unsure at all Xaa locations
  Clone ID: PAT_MRT3847_132221C.1.pep
IFKIVFFHAPFPLVLLIYCSKIVICHKLLGGFTFTRIVFQVPAWSCSWXLNNSHYIYAGLRNGSVLVFDMRQTAGPMKSLVGLTSNPVHTVHALAQTSSLSSGVKTILSASAVGLCQWNIDSEERWTWNISLHLRRPLMVPETDNQGVCISLAYCPSSDDIVASYRPKYDMSMDLRHSQPSPTPPSTQHGVQ

SEQ ID NO: 178522 - protein, 143 aa, Glycine max
  Clone ID: PAT_MRT3847_132222C.1.pep
FDKFLHGSTLEECYSAVASVANGWLDLLDNQGKDIADSELLDYISESSTMSKSFADYGLQKSCAVATARRLADFLGDTMVKDKGLRCQYIVASEPKGTPVSERAVPVAIFETDAEVMKFYVRKWCKVSSNVDIRSIIDWSYYK

SEQ ID NO: 178523 - protein, 76 aa, Glycine max
  Clone ID: PAT_MRT3847_132223C.1.pep
QESPISNSRVFSESTKSGKINDSHSLCPAHRVTFFPLQIRTQKSRKLLPYSCLVVRSDSVYVINVLQVALEVIPNN

SEQ ID NO: 178524 - protein, 65 aa, Glycine max
  Clone ID: PAT_MRT3847_132224C.1.pep
QMGDKRAPVRRMIKKEGADMICLQETKKEAVDKAMCQALWGDVEVCWEMFPANIIVGGALRLWSE

SEQ ID NO: 178525 - protein, 125 aa, Glycine max
  unsure (1)..(125): unsure at all Xaa locations
  Clone ID: PAT_MRT3847_132225C.1.pep
MSLGTAEEESGSEIHIPAEIDWHMLDKSKFFFLGAALFSGVSCALYPMVVLKPRQQVSSSRFSCLNISCAILRHEGFRGFYKGFPTSLMGTHPARALYMSSLEFTRXNVGTAFVQFGFSETSAVA

SEQ ID NO: 178526 - protein, 184 aa, Glycine max
  unsure (1)..(184): unsure at all Xaa locations
  Clone ID: PAT_MRT3847_132226C.1.pep
KVGKQTFLEGLVTSLPTLGAGQSAFNVHFEWDSDMGIPGAFYIENFKQVEFFLVSLTLEDIPNHGSIHFLCNSWVYNXKKYKSGRIFFANKTYLPSEKPGPLVKYREEELKTLRGDGTGERKEHERIYDYDVYNDLGDPDSNARLARPVLGGSTTLPYPRRGRTGRKKSRKDPKSESRSDFCLP

SEQ ID NO: 178527 - protein, 133 aa, Glycine max
  Clone ID: PAT_MRT3847_132227C.1.pep
NLLIKGGEGGPPFKSLISNLKQYKKTLNRGKGFTNKALGGKTSKTPFWSPGPLVFMGSKNWGAPPPVIGFYQTADPRKGRSPFFFFLKALKKSTFFSWARFLKKINSAPPWGGKNSSLFWGAICSNPAIGASL

SEQ ID NO: 178528 - protein, 1151 aa, Glycine max
  unsure (1)..(1151): unsure at all Xaa locations
  Clone ID: PAT_MRT3847_132228C.1.pep
QNPPQHITQREENTNFQLAPLRCPKGCSVLQLAATHLDLIQPGVEAASGSSHCHVAHQQFENLSSLSLPAYLQSHPSDQVKAGGILETEDARNSSAMSVKKVSGSSSRHRKSMKGFPGSTPSRTQRETWXRCNSSHKNLISEKISQSGLREKANDGTTLEGHTPKLIVKIQNRGRSPAQSATAGSSDDPSIMNSRASSPALSEKHDQFDRCSKEKSDFYRANIGADIYTESWQSNDFKDVLTGSDEGDGSPAAITDEQCRTGEDCKKVSDVSKATSSSPGNESRARNLQDASYSSINALIEGVKYTEADDVGMNLLANVAAGEISKSELGMPVGSPEKDTTTIEQSYAGDAAVVKSSEEYLVQDKCYTNVEHSKQDSRPGDLGADDDILASEGKATGEHNTSSMDLWVTETSLESKGKLIEKSSGTSSAGIPESTIQEVRDSDSSKLVKEKKVVVRVDAVGNVDVKVNVVASESETEAIENFSCTCEVVDVKCDNRASEGLSGDKETAGKSPAIRMSSDYVIATDENAPQSSGDIVDKVLEHVNERESEKNDDMAAQDHAKQSLKQKNESENDAIMVPENRGLCSGATGLDAEYVEENSGTKEVCDQDAGAGQILHTDLPSFPSREMDQHSGQRDSKLAAMESEEAEECTSTTGDTSSASVAGVSEVDTKVEFDLNEGFNADDGKCSEMPGSTPAARLVSPVPFSASSMSFGILSITVAAAAKSPFVAPEDLLKSKKELGWKGSAATSAFRPAEPRKVMEIPLDMSTTPIPNDEARKQSRAPLDFDLNVSDEVILDDVSSQNCARQTDCGTHSDNGHDPNKSMASHVSCSGGLGLDLNLVDGASDVGNCTLSSSHKMDVPLMQVKSAASGPPNGEMSFRRDFDLNDGPVVDEVTSEPLMSTQPARNSVPSQPPISGLRMSNAAEVGNFSSWFPSTANTYSAVTISSIMSDRGDRSFSIVAPNGPQRMLGPATGSNPFGPDIYKGAVLSSSPAVPYQSAPFQYPVFPFNSSFPLPSASFSGGSTPYVDTTSGGRLCFPAVNSQLIGSVGNVSAHYPRPYVVSFPDGSNSSGAENSRKRARQGLDLNAGPGSDLEGRDESSPLVPRQLSVASSQAQLEEQARMFHLSSDVLKRKEPDGGWDGYKQSSWQYHNL

SEQ ID NO: 178529 - protein, 87 aa, Glycine max
  Clone ID: PAT_MRT3847_132229C.1.pep
KIKKVEGENGFVLKEEIHLPCLKTFFFLAANGLSVYNCKGQLLFKVDFFGPATPDKNKLRLMDPTGRGLLTVLQKRPILLKRWKGFK

SEQ ID NO: 178530 - protein, 166 aa, Glycine max
  Clone ID: PAT_MRT3847_13222C.1.pep
MRSRRGGRRRRGDTWVVSVFVIIQIGVFIATMLVNDCWNNSHGDCVLQALGRFSFQPLPENPLLGPSQSKLDEMGALRRSLLTEHHQTWRLFTFPFLHAGVFHLLLNLSSVIYVGVSLEHHFGPIRIGILYALTAFVGSLGASIFFQNMPADGAFGALYGLLGTLL

SEQ ID NO: 178531 - protein, 225 aa, Glycine max
  Clone ID: PAT_MRT3847_132230C.1.pep
MGFSKGVEARRVLESGKKMIIVANMGFSKEEKSKRLLRGVKIVFFLITMVISLLLFSAPVLLVIADALVPSALLSAFSPSFLFSHFENYDFGYSLIDIPLVSIARSLVIFCVYSFCDRPRLSHGPYLGVTMLCSVMSLTFVCLKAVYVLSLNTNVSGRESGYDRSSQIVLFVWSCALAVGHVVVAYRTSCRERRKLLVYKIDIETVRLFSPPLYFLPRQNRKEEK

SEQ ID NO: 178532 - protein, 71 aa, Glycine max
  Clone ID: PAT_MRT3847_132231C.1.pep
PFQETTTFLGNVGHHSKVNCPPYFFLTLPDFSRGNPPINKKKKGAFFLFRKKFFLEELAQFFLFLGAPTGT

SEQ ID NO: 178533 - protein, 148 aa, Glycine max
  Clone ID: PAT_MRT3847_132232C.1.pep
GVCIIFFGGGLCSPALKFPYKKVPRGGGLGMGFGPFFLGKLPKGGGRYNFPDFWLFGGPVLKIFPPIFFLGKKPGGGPSQGPPLFFSLGNFFLGPPKQISRGGGQVRGVKGFYLRGFPSRDWYLFGPFLSATPLLAPFCLLYIKNWFF

SEQ ID NO: 178534 - protein, 43 aa, Glycine max
  unsure (1)..(43): unsure at all Xaa locations
  Clone ID: PAT_MRT3847_132233C.1.pep
LRLVTLYLQXRVXFLGVNXSRTVCTXDFISXKTYVQVXKQXSF

SEQ ID NO: 178535 - protein, 118 aa, Glycine max
  unsure (1)..(118): unsure at all Xaa locations
  Clone ID: PAT_MRT3847_132234C.1.pep
MELVAECERTLYPYITGSSVLPIKYKDGILMTADMRCSYGSTLRYKTVXRIKPIIKHSLLGATCEISYYHEIFRYLDELILYDNMYNDRNSLGPNDVHNYVTRVMYNTHNKFNPLSNS

SEQ ID NO: 178536 - protein, 164 aa, Glycine max
  Clone ID: PAT_MRT3847_132235C.1.pep
MSFAALSIPYAAGLGACAFLYFVVYPVIEYFRDVNGLRRYPNMHPLSGISSIPFMVLAHGGARSTYLEKLHRKHPVIRVGPNFLSYGDLRAVKDIYGHNTPCTKDGSYVITAGSHYHLADVIDKHDHARKRKLMSSAYAIKNLEGWEHKVADKTQKLLKHFDEC

SEQ ID NO: 178537 - protein, 52 aa, Glycine max
  Clone ID: PAT_MRT3847_132236C.1.pep
MRGSCFYPSSKLLFKTRFPLLRSRIALIVLLPTKIQYRLAPWGYHYLRELFL

SEQ ID NO: 178538 - protein, 226 aa, Glycine max
  unsure (1)..(226): unsure at all Xaa locations
  Clone ID: PAT_MRT3847_132237C.1.pep
VYXXXNHXXPWWXXXEXXEVVDDRRSLDSDSGGVXLNVXXXMADGSGQILTSVMERLAAAAAXEPYESVSCAFVSYGSCAKDLADGWKYRSRLWYGVSLSPSQAPFGGGGSGWDFWKSALEKDANGNWIELPLVKKSVAMLQALLLDESGLGGGLGIGGGSGTGMGGMAALYQLLDSDQPFLCMLRMVLLSMREDDDGEDHMLMRNTSFEDAVSEGRNPRSALLWR

SEQ ID NO: 178539 - protein, 78 aa, Glycine max
  Clone ID: PAT_MRT3847_132238C.1.pep
FVPKTGAKVDGSSPISAPKGWFPPGNVYPGGTPGLAIWAGPQLGFLAGGALFVSPPRVLAPKTLQIDVLSSNLVPVPI

SEQ ID NO: 178540 - protein, 73 aa, Glycine max
  Clone ID: PAT_MRT3847_132239C.1.pep
DGLVVIGFIFSVCKYLQYGVIIIIASYFHPIFLLSLSFISHHINDIILSYLFFFLSLFFSYIHSILGVYAHDF

SEQ ID NO: 178541 - protein, 72 aa, Glycine max
  Clone ID: PAT_MRT3847_13223C.1.pep
ETHDKAGLRFSHDELFTAWSTHVRTATTMLADGCTYLCAMVHDISNCTLPGDVDIGAQMPSINNRRAYTAQF

SEQ ID NO: 178542 - protein, 160 aa, Glycine max
  Clone ID: PAT_MRT3847_132240C.1.pep
MPKMKHLLRKLHIGGGAATINPSPNHNALSSHAHNHTPPPSTSTLPSPTVVSDRSPVVVEAQNEVADFNLLQEEEFQMQLALAISASDSDRRDTAESAQIDAAKQISLGYSASLTDTHALVQFQSLRYWNYHVIGYDEKVMDGFYDGYGVTSNFVERGKM

SEQ ID NO: 178543 - protein, 96 aa, Glycine max
  unsure (1)..(96): unsure at all Xaa locations
  Clone ID: PAT_MRT3847_132241C.1.pep
RRXAQPXXHFFFFFVHNXAPKRCILIKGEGQTYLFTTFTFLHLLTNQSISSFLPFMASLLRSLRLQDIYSSILFIYFSLTCITKPAFLSHNWSYYS

SEQ ID NO: 178544 - protein, 84 aa, Glycine max
  Clone ID: PAT_MRT3847_132242C.1.pep
LTDPKVHITHAMQLLFYLIRIFSFSFSLPISQANIPFDSLFPLQTLRVSVSFCMSLRVQAKHTVRENITTHITLLFSFKSAKKI

SEQ ID NO: 178545 - protein, 58 aa, Glycine max
  unsure (1)..(58): unsure at all Xaa locations
  Clone ID: PAT_MRT3847_132243C.1.pep
PXXXLXKPGASXRDTPETXGXEVDDHLTXSDDEAXCRWRXRHCXTXWGEXIVFGXXNX

SEQ ID NO: 178546 - protein, 139 aa, Glycine max
  Clone ID: PAT_MRT3847_132244C.1.pep
PRVREAGGLDAGPRLVKKLVGFGDNRTSKIAARIADEEVAHVAVGVYWFDSICEKLNCAPDFTFKDLLKEYNVELKGPFNYSARDKSGIPGDWYDDASSASTKDKKDKDGNQKQLSAVSDNHPAHSCNFYELNFYVLAM

SEQ ID NO: 178547 - protein, 96 aa, Glycine max
  Clone ID: PAT_MRT3847_132245C.1.pep
EALVVEKIGAEPDMVLFFDCPEEEMVKRVLSRNQGRIDDNIDTIKNRLKVFESLNLPVIDYYAKKGKLYRINAVGTVDEIFEHVRPVFEACEHEAR

SEQ ID NO: 178548 - protein, 192 aa, Glycine max
  Clone ID: PAT_MRT3847_132246C.1.pep
SQQRFAFPNIYPWILLPHALALPGGPGSGKGTQCAKIVETFGFKHLSAGDLLRREMVSDSEYGSMIMNTIREGKIVPSGVTVKLILREMKSSDNHKFLIDGFPRSQENRIAFEQIIGAEPHMVLFFDCPEEEMVKRVLSRNQGRIDDNINTIKNRLQVFESLNLPVIDYYAKKGKLYRVTLFSFIKSFLGLT

SEQ ID NO: 178549 - protein, 231 aa, Glycine max
  Clone ID: PAT_MRT3847_132247C.1.pep
MWSRATLFLRVLEPPIHINASLSQTFTTGFPFHFQEKDGICPKPLITFVLGGPGSGKGTQCGKIVETFGFKHLSAGDLLRREMVSDSEYGSMIMNTIGEGRIVPSEVTVKLILREMESSDNHKFLIDGFPRSQENRIAFEQIIGAEPHMVLFFDCPEEEMVKRVLSRNQGRIDDNINTIKNRLQVFESLNLPVIDYYAKKGKLYRINAVGTVDEIFEHVRPVFEACEHEAR

SEQ ID NO: 178550 - protein, 89 aa, Glycine max
  Clone ID: PAT_MRT3847_132248C.1.pep
MAGKKLCMFLVNDLLVHASSRQWRQPNMIISAAGHTWGSSPVMLTSTFMKHLSLIIKIFGVILTIYRKIHAQYEVLDVQQTRCIFNCRS

SEQ ID NO: 178551 - protein, 60 aa, Glycine max
  Clone ID: PAT_MRT3847_132249C.1.pep
NRQDPSPPNAVLYKLTVRKTFVRQGCHIVGIYGSRWSDLLGGHRDESRPFKIPKHLFYIK

SEQ ID NO: 178552 - protein, 46 aa, Glycine max
  Clone ID: PAT_MRT3847_13224C.1.pep
IIMCEILKFRSTRFTCKFSFAYMVAHHPHCNAGTLGLFHSLDKLDP

SEQ ID NO: 178553 - protein, 78 aa, Glycine max
  Clone ID: PAT_MRT3847_132250C.1.pep
KVKGLDVNALSFSHIRVNQAQKQSPPPSRAHGRITPYMSFPCPIELILFKKKNPVKKEVEPHLPPTKKKGPLQRGASS

SEQ ID NO: 178554 - protein, 46 aa, Glycine max
  Clone ID: PAT_MRT3847_132251C.1.pep
IIRKSQAKSFFFIVLKSAPVHEKPKILTNEPLNKLFPQAPFWHSHH

SEQ ID NO: 178555 - protein, 76 aa, Glycine max
  unsure (1)..(76): unsure at all Xaa locations
  Clone ID: PAT_MRT3847_132252C.1.pep
SNAPPTYPKVXHGVSRSAPFSGSSGGQNTGFRNPQFXASRPLQNSYARPPQQPMYRQPSPMYTNRRQWEXMKLPPG

SEQ ID NO: 178556 - protein, 44 aa, Glycine max
  Clone ID: PAT_MRT3847_132253C.1.pep
LPLRNKNFRRVKHSPFFPHNRSPNVNSEPLKVIKWLFISNPDRN

SEQ ID NO: 178557 - protein, 30 aa, Glycine max
  Clone ID: PAT_MRT3847_132254C.1.pep
SRTCCLYVMLVPSEMDHKTEQELKDTCPAI

SEQ ID NO: 178558 - protein, 96 aa, Glycine max
  Clone ID: PAT_MRT3847_132255C.1.pep
MATPNNSNINNATAKPGTLGVGVGAAPTPPKSQRGHNKPKCKQCGNVARSRCPYECCKSCCSRNQNPCHIHGSFLILLFSFSHHKETFLFFFATLK

SEQ ID NO: 178559 - protein, 45 aa, Glycine max
  Clone ID: PAT_MRT3847_132256C.1.pep
ILIEEHTIKEVYHHHACKRVNVAIYPFLVTYKGNILITINKSRAE

SEQ ID NO: 178560 - protein, 71 aa, Glycine max
  Clone ID: PAT_MRT3847_132257C.1.pep
LSSLFTLSWFHVLCCRLLGCVSLLADGIFALQSLLLLITPGFNRLPLGKFGSPPGSGPKFPVLPKSPPTLG

SEQ ID NO: 178561 - protein, 111 aa, Glycine max
  Clone ID: PAT_MRT3847_132258C.1.pep
QVIEDLQQELTREPADGELADATNMSITQVRKAIDVGQAARNKLIKHNLRLVLFVINKYFTDFASGPRFQDLCQAGVKGLITAIDRFEPNRRFRLSTYSLVWIRHAIIRSM

SEQ ID NO: 178562 - protein, 121 aa, Glycine max
  Clone ID: PAT_MRT3847_132259C.1.pep
GNGSKGVLFAHFPKWFVFPFWPKGLPFFPRVKGSRFEPLFLGRGVAIEANFVCLRFNCHWFFWAAKPLNFFSVYCQPKGFCLIGCLGCFLFRVLESLPWVCIGPLYFFLAWGGSLFGCFQA

SEQ ID NO: 178563 - protein, 189 aa, Glycine max
  unsure (1)..(189): unsure at all Xaa locations
  Clone ID: PAT_MRT3847_13225C.1.pep
STPQGISYAKLANLPPILGLYSSFVPPLIYSLLGSSRHLGVGPVSIASLVMGSMLSETVSYSQDPILYLKMAFTATFFAGLFQSSLGILRLGFVIDFLSKATLVGFMAGAAIIVSLQQLKGLLGIVHFTNKMQITPVLISVFKQRDEWSWQNLLLGFSFLLFLLTTRHISLKKXKLFWVSAAAPLTSVI

SEQ ID NO: 178564 - protein, 69 aa, Glycine max
  Clone ID: PAT_MRT3847_132260C.1.pep
VCLLATALRIARRFERAQSLSFWIGQGHCAEIEWKMSVDVLMKIERDCRRNKTAWESFFNVFVSGSGRV

SEQ ID NO: 178565 - protein, 43 aa, Glycine max
  Clone ID: PAT_MRT3847_132261C.1.pep
LLICSSSHINNLFFEILYYKYSFSFFSLLTFFHLVCRNLVRTH

SEQ ID NO: 178566 - protein, 153 aa, Glycine max
  unsure (1)..(153): unsure at all Xaa locations
  Clone ID: PAT_MRT3847_132262C.1.pep
DIQHLLGCYDGTLRKHGWHRAALQICSEGELXYLGNQSLIHHWIIPAIWSTQVILLGAVVCYRIDSDLIGEATDPNYRGCTLEPVSLADDLDAFAELNVRELTNGPXLMLFMSRSSVHAIVTREDAWKNLAYHLACRVNNDWYAYSTSCIRAK

SEQ ID NO: 178567 - protein, 53 aa, Glycine max
  Clone ID: PAT_MRT3847_132263C.1.pep
LGPGLCLLTCKHGPPKGLTPPFFKGGIFAKQNWEGLRIHHSKKMVLFLTEKKN

SEQ ID NO: 178568 - protein, 90 aa, Glycine max
  Clone ID: PAT_MRT3847_132264C.1.pep
MLDTVSDDSSSLNRPQDEPFSVPGVGERSPGPENCVRISLASRSKQEKRELRRRLQGELNRVRSLVNRIEEKLGVLGGYGNSDMMVDRGI

SEQ ID NO: 178569 - protein, 66 aa, Glycine max
  Clone ID: PAT_MRT3847_132265C.1.pep
QGIVVIVNLHMIVKGSLSDLSHAVYCTFKSQKALRDFTCYSIVEQMDDFSFVQHRIRLVPREAYVL

SEQ ID NO: 178570 - protein, 92 aa, Glycine max
  Clone ID: PAT_MRT3847_132266C.1.pep
PGSGSIHSLATGKIAIIFGDTGALTPTCSLKHGSGFFETAQYLKRNGGDHLICIRVNDPFVMNPWAKTFPENKDVKVLADGATQYTNALGLE

SEQ ID NO: 178571 - protein, 40 aa, Glycine max
  Clone ID: PAT_MRT3847_132267C.1.pep
GTKHAPLLLIGMISCNQHCYSEIYAINEIDPYSLIALISV

SEQ ID NO: 178572 - protein, 52 aa, Glycine max
  Clone ID: PAT_MRT3847_132268C.1.pep
LFNKYYTHVKGRYIGQIFINLIYSQKPWVSRIFIHNMKQEFSFVPHHYSKMP

SEQ ID NO: 178573 - protein, 111 aa, Glycine max
  Clone ID: PAT_MRT3847_132269C.1.pep
TGLYVLRATWTGDRDNATDDTRLALVCGSTSVTTFLSDKNVRITTSAKSPFVGSQLPLTKLTLSSYVRTLLTASSRARCQHESTAANAVAQEDPRFACVEPEPRFKRPDIW

SEQ ID NO: 178574 - protein, 72 aa, Glycine max
  Clone ID: PAT_MRT3847_13226C.1.pep
INSKACFSKHPQWPAKSFRLRQARELMLLLSFLGCLRVGSLCCELIILSRISFNFYKYCDTCCSHQLFISAF

SEQ ID NO: 178575 - protein, 362 aa, Glycine max
  Clone ID: PAT_MRT3847_132270C.1.pep
MAYHHHDHTNRKSLLDTLYCSEAEEDYGHFLNNSSPASPPFLLQSDMFSDEQELTSLLGKEHHNPLSTCLQTNPALDFARREAVEWMLKVNSHYSFSALTAVLSVNYFDRFLFSFRFQNDKPWMVQLAAVACLSIAAKVEETHVPFLIDLQQVDESRYLFEAKTIKKMEILILSTLGWKMNPPTSLSFLDYFTRRLGLKDHLFWEFLSKSQGVLLSLLGDSRFMSYLPSVLATATMMHVVKSVEPGLEAEYKSQLFGILRIDKEKPEKVNSCCKLLLEVWSGYEEEEQEQGKQCMKRKFGIGSIPGSPNGVMDVSFSCDSSSNDSSVSSSPEPLSKKSRSEEQEQLLLPNPNHSNSDFLHRL

SEQ ID NO: 178576 - protein, 349 aa, Glycine max
  Clone ID: PAT_MRT3847_132271C.1.pep
MAYHHQKSLLDTLYCSEEHWIGEGEFDQAEEEYGNSNSNSSSTLVNNSPESSPHLLLESDMFWDEQELASLLEKEQHNPLSTCCLQSNPALEGARIEAVEWILKVNAHYSFSALTAVLAVNYFDRFLFSFRFQNDIKPWMTRLAAVACLSLAAKVDETHVPFLIDLQQVEESRYLFEAKTIKKMEILILSTLGWKMNPPTSLSFLDYFTRRLGLKDHLFWEFLTKSEGVLLSLIGDSRFMSYLPSVLATATMMQVLKSVEPSLEAEYKSQLFGILRIDKEKVNSCCKLMLELWSEFEGKQCMKRKFGIGWIPGSPNGVMDVSFSCDSSSNDSWVSSSPEPLSKKSRSEK

SEQ ID NO: 178577 - protein, 128 aa, Glycine max
  unsure (1)..(128): unsure at all Xaa locations
  Clone ID: PAT_MRT3847_132272C.1.pep
WSNFVMFGYAAVKRSGWASXVQGFLTPSSSSEHFNACKWTESEPHLWELIFPIQVCGLNNGYARWSYEWANRXSWHVSFLNDNRKQFTVFDSVLGICQDFQTPGNPLRPAFFVPPVGAGYSVNAESYA

SEQ ID NO: 178578 - protein, 711 aa, Glycine max
  Clone ID: PAT_MRT3847_132273C.1.pep
MRRTMSNASACFFFFAFVVLVALHNAECRSLRPSVSDGVDAVQLPQESSYLQLKDQSVVVESSSDEHFCKQMYGFLPCSNNILGHLFLILVYEYLLFHGESYLAAGGEQIFKILGPGVFGASAFDILGALPESLILGVTGLSSDKESAQEYASTGVGLLAGSSIMLLTVVWGTCVFIGRQKLKNDSNYGGTNSSSGGIKESLTGYGITMDVDTRKMARIMVFSVIPLLIMQIPSIFNFSSIPRNVTLMVALTVAVAFLISYFIYQVFKPQIEKTRLEYIKHDDLILRIFQRVEKQTLQKILTDDGTPNVAAISGLYHEISQRGGKDLLASEVKELLFGTKLNDTNIKEEQIADMLKVFDRNGDQIITKEEFVTGLTEYINQSKHALDRQYLPKESLNKMYQTFIKPWIEHVRKQRELKGHLISEVLKHAQNDMVGRLRQDDGTPDKIAIKRLFEEIDVNQDNHISRSELEKVVKDIQFGKAVETEEAVTKLVQDLDLNRDDEISETEFVEGFTKWMNSNSSQAANSKSSSHEIRRTWEDVEKVIEENQTKGTSAWLTAIGYVVLGVTILALLAEPLIASVQKFSEEAGISSFFISFILVPLATNFREATSAIKEASHKKTSNTSQTMYEIYGAVFMNNILGFVVISILIYMREITWEFSADVLVVAIVCAVTGLTASFRPTFPLWTSFPAYLMYLVALLLVFVLKDVLNYV

SEQ ID NO: 178579 - protein, 203 aa, Glycine max
  Clone ID: PAT_MRT3847_132274C.1.pep
DREWGARMTKAGLVPPVTRKYEVIDQYCIVADEEDVRRKMRVSLPDDYAEKLSAQKNGTDESDMELPEVKDYKPRKQLGNEVIEQEVYGIDPYTHNLLLDSMPEELDWSLQEKHLFIEDTLLRTLNKQVRNFTGNGSTPMSYSLRSVIEDIKKFAEEDCDARMVKMCQGILKAIDSRPDDKYVAYRKGLGVVCNKEEGFAEDD

SEQ ID NO: 178580 - protein, 36 aa, Glycine max
  Clone ID: PAT_MRT3847_132275C.1.pep
TINLQLTPKGNVYAWQAHKSVSLSKITLCLILRSNN

SEQ ID NO: 178581 - protein, 127 aa, Glycine max
  Clone ID: PAT_MRT3847_132276C.1.pep
NSSPPCCFTSYSTVKFMSMNILDCTHYTSVFNTDNLKGVGPLDWVYGIKLSFSVPDTGCQSCKESGGTCGFDTDTEGLLCLCSSFANSTRECAAGSIISKGQNNAPWTHFLLVLLVVANFLTKVKLV

SEQ ID NO: 178582 - protein, 149 aa, Glycine max
  Clone ID: PAT_MRT3847_132277C.1.pep
TDCILPWRGEREPSPVCRYELPTDDPDYEQRARRGGGGGSGGDGAGSGAAPQVNWNMALGPAGGSADSSGGGGSGGDSSQRRRFRVSLPWPFRQFAETSNVGSANNDSNNNNNNSNSNSGSSGNNGGQSNSGNRGNQNFDSETRQEDLD

SEQ ID NO: 178583 - protein, 120 aa, Glycine max
  Clone ID: PAT_MRT3847_132278C.1.pep
GCEKTTEGGSLLASTFSFVVSLLLTLNNKNNNSISVFHFVLNFSQLILRISSFSLSLSIAQATNAQSCIKIKITYYYYYLLLLLSTSTKNCSYPSIVFATMCVKDQEKDHVCEGPRERYD

SEQ ID NO: 178584 - protein, 385 aa, Glycine max
  unsure (1)..(385): unsure at all Xaa locations
  Clone ID: PAT_MRT3847_132279C.1.pep
GLTGILVLICCFVAEEVSSAAAAARLGSRFSLVPFVIVVAVCTILAMIATLPLAQLFFFHILLIKKGITTYDYIIALREQEQQGIGGQQSPQMSPVSSLTGMSSASSFTTFHRGAWCTPPRLFLEDQFDVVPPETASVSSLGKKTMRDEPVKKKNTGAVKISPWTLARLNADQLSMAAAEAGKNRVTCFLSGLFRGPQIGLICSSVLISTRDLLSQNHHLAWFIAESCDQFGXLIRQNYYQIILMGIVHSLICEPKGTLSPSTTLXLSPSSSQAVSSSAGIVACSPESSLDSPDIHPFRVSTTEAEEARRLAGLSAAATANLKGIPLSRSTSDGYEASGGEDSDRVPTRIVQRSTNWTNLLFSADQEERAFETKSSSSMVYSRKL

SEQ ID NO: 178585 - protein, 107 aa, Glycine max
  Clone ID: PAT_MRT3847_13227C.1.pep
MGVNSYSNSMKIQAEIQMPPLEMHKVRLPPERTTLQKLRHRLSEIFFPDDPLHRFKNQTCLIKLLLALQYFFPIFQWAPLYNLSLLRSDIISGLTIASLAIPQAECY

SEQ ID NO: 178586 - protein, 40 aa, Glycine max
  Clone ID: PAT_MRT3847_132280C.1.pep
EQKVLHLKCNQEIKSHGIKVYLRTQKLSTGTRYDTTQIQE

SEQ ID NO: 178587 - protein, 150 aa, Glycine max
  unsure (1)..(150): unsure at all Xaa locations
  Clone ID: PAT_MRT3847_132281C.1.pep
PRVRTXARRRQKGPAARRPQKGTAARRRQKGTAARRRQKGTAARRRQKGPAARRRQKGTAARRRQKGIPLSRSTSDGYEASGGEDSDRVPPRIVQRSPNWTNLLFSADQEERAFETKSSSSMVYSRKLCPIWVLIRQNYFQIILMGIVHS

SEQ ID NO: 178588 - protein, 34 aa, Glycine max
  Clone ID: PAT_MRT3847_132282C.1.pep
KTIQIQLEIKIKKMIKSDRQLIYTNKDKREAYVC

SEQ ID NO: 178589 - protein, 208 aa, Glycine max
  Clone ID: PAT_MRT3847_132283C.1.pep
VKISPCTLARLNAEEVSKAAAEARKKIKSLQPVGRRMSPRIETNRRRPGKRIRLPADLPMEAIPKFSASNIDKGFIGTSSLAPLPPKARSVFQPSQAVSSSAGMVASSPESSLDSPDIHPFRVSSTEAEEARRLSDLSAAADVNLKGIPLSRSTSDGYEASGGEDSDRVPTRIVQRSTNWTNMLFSADQYERPFEHESSSSVVYSRKL

SEQ ID NO: 178590 - protein, 71 aa, Glycine max
  Clone ID: PAT_MRT3847_132284C.1.pep
PGTKKFPGHGLLKKKNPLLYALGDKIHTPFKTRPRVLAKTKTLLFKRAHLIKTPPLGPAQLTLVEAKNFWP

SEQ ID NO: 178591 - protein, 55 aa, Glycine max
  Clone ID: PAT_MRT3847_132285C.1.pep
VIYSICVSPVMPSSNHICHLCVRCKVTSCSRDISRGMCLPHATFICYTPAPVYHE

SEQ ID NO: 178592 - protein, 130 aa, Glycine max
  unsure (1)..(130): unsure at all Xaa locations
  Clone ID: PAT_MRT3847_132286C.1.pep
QLPNPQYYRLSENNAKPNTLLLHNHADADYLIVILNGTAILSLVNNNHRDCYTLXCGDALRDPSRTTYYVVNPDITXNLRVVALAIPRNKPGTVDSFFLSSTEAQQSYLQGFSRNILEASYDTTFQETNK

SEQ ID NO: 178593 - protein, 49 aa, Glycine max
  Clone ID: PAT_MRT3847_132287C.1.pep
PNELVPEHKVLTDPEKKTLLERYPVRKLSYLGFRYRSVQNYDERTMKIS

SEQ ID NO: 178594 - protein, 63 aa, Glycine max
  Clone ID: PAT_MRT3847_132288C.1.pep
LAWRLSSTEYPCYHHVDWRFYHVQQERISIFNKKLESEHSIRWQVHEHLIENSLLPTCEPTGN

SEQ ID NO: 178595 - protein, 95 aa, Glycine max
  Clone ID: PAT_MRT3847_132289C.1.pep
QRLVPVLPRIRRRGNYAVLLLRLLLPLPSFRRRRRWREERASYKVMGLTARATEIIIASRLVGMKALLAVGVKVLVVVVPVLGPAETLLNIISVT

SEQ ID NO: 178596 - protein, 95 aa, Glycine max
  Clone ID: PAT_MRT3847_13228C.1.pep
MLFSSSFTRTYHVTGEEVRPDSWAMTFGMTLTIALAEYGFEYEDLENDLTIMLPMILHMNTIHKMIPDVIHIGESIIDALIVDEDIDDGWNDMTS

SEQ ID NO: 178597 - protein, 125 aa, Glycine max
  Clone ID: PAT_MRT3847_132290C.1.pep
KKYFSFLGKKNRDILPDIGNPATGQKESNAKFGQMRGKMSTFQKIKPHVTVQMAIRPVDPEGDKGSKIVGATNRQITAKLKKNGAPMPLPVWPRRPTKYGRSRGFFSCTWSRFVPIGKPFIAWMA

SEQ ID NO: 178598 - protein, 52 aa, Glycine max
  Clone ID: PAT_MRT3847_132291C.1.pep
RAAFFFFFGLNGNWYHWKIIGFGHYLGFGGSLFIPKATPPVWTPGLNNFFFF

SEQ ID NO: 178599 - protein, 91 aa, Glycine max
  Clone ID: PAT_MRT3847_132292C.1.pep
NLPMHKMINTDLSRILKSPEIQRALRAPRKKIHRRVLKKNPLKNLRIMLKLNPYAKTMRRNTILRQARNHKLRVDKAAAAAAALQAKSDEK

SEQ ID NO: 178600 - protein, 74 aa, Glycine max
  Clone ID: PAT_MRT3847_132293C.1.pep
ESEFVIPLSGLGLLSELASESTQRPFRYTQSPLKVLNLTNLARDCTVDELTRLETLSGDSCDHNVQCKSEPINL

SEQ ID NO: 178601 - protein, 72 aa, Glycine max
  Clone ID: PAT_MRT3847_132294C.1.pep
LAALGVYMAAVTDVPTPEAVRVGKLFLTPFGYAMFVSPLKWLFMLAPLAMVFVEIRKKTKKKRRKRTKFKYN

SEQ ID NO: 178602 - protein, 50 aa, Glycine max
  Clone ID: PAT_MRT3847_132295C.1.pep
YLKNNRHLNILCQINQLTVISLLLLKIVDYHKINMGNLYNPASLYDPNQA

SEQ ID NO: 178603 - protein, 62 aa, Glycine max
  unsure (1)..(62): unsure at all Xaa locations
  Clone ID: PAT_MRT3847_132296C.1.pep
INGRFFSLSFFQPXNISILNTXDYFFQLGHISIFLFSHHGLHISLASINNGGLFWSGWEVHI

SEQ ID NO: 178604 - protein, 78 aa, Glycine max
  Clone ID: PAT_MRT3847_132297C.1.pep
GNLGVRNKDIIILMGITQCVMCNGDTFSKLGSDIIFEPMILLDHVPAWQRQPIRASTILRLRYISKFLTDYVTPNNNL

SEQ ID NO: 178605 - protein, 57 aa, Glycine max
  Clone ID: PAT_MRT3847_132298C.1.pep
MESFQGSRDDISYQMGLIWSQVKEPVIVPMLRVSVFLCLAMSLMMLVERVYMGIGIC

SEQ ID NO: 178606 - protein, 61 aa, Glycine max
  unsure (1)..(61): unsure at all Xaa locations
  Clone ID: PAT_MRT3847_132299C.1.pep
IEIHGVQSHVCCVRARPRSTYVRMFDDGKYEQPRREXAPFGTFMSVWCKSIKASDTQKEVP

SEQ ID NO: 178607 - protein, 71 aa, Glycine max
  Clone ID: PAT_MRT3847_13229C.1.pep
RNWRWQVTRLGLTYKNLPVGSGNINELGVGLTGVNRIVVCNLIKKTRVNLLGGGIRGCVSMPGLGSKCGEG

SEQ ID NO: 178608 - protein, 76 aa, Glycine max
  Clone ID: PAT_MRT3847_1322C.1.pep
KVFTLTHVIAHGSLSLYRCSQLGVAKVFTVDIDTSYFSLASWFFRVGFFVRSQSRLFFLFLMLVRIFSVDIGRTIF

SEQ ID NO: 178609 - protein, 44 aa, Glycine max
  unsure (1)..(44): unsure at all Xaa locations
  Clone ID: PAT_MRT3847_132300C.1.pep
RAFHTSTPCQVPSPGVLKGTLRKPIGLEAKFEFVVRACXVXXLL

SEQ ID NO: 178610 - protein, 54 aa, Glycine max
  unsure (1)..(54): unsure at all Xaa locations
  Clone ID: PAT_MRT3847_132301C.1.pep
SIYGXKNYLKILSHQQGMCVMTVFHQLMVVCAISLALIDALPKNEPFVLYHLLV

SEQ ID NO: 178611 - protein, 50 aa, Glycine max
  Clone ID: PAT_MRT3847_132302C.1.pep
FGFGTTISRTYHKNPKPSNHGALIALKHSVHTTLHDRTRICTNTNPTSEH

SEQ ID NO: 178612 - protein, 192 aa, Glycine max
  Clone ID: PAT_MRT3847_132303C.1.pep
MIDLARVQKELVECSKDAEGSGIKVSPKNDNLVLLIGTIPGPVGTPYEGGIFQIDITLPDGYPFEPPKMQFKTKVWHPNISSQSGAICLDILKDQWSPALTLKTALLSVQALLSAPQPDDPQDAVVAQQYLKDYQTFVNTARYWTESFAKASSRGIEDKVQKLVEMGFPEARVRSILEAVGGDENMALERLL

SEQ ID NO: 178613 - protein, 103 aa, Glycine max
  unsure (1)..(103): unsure at all Xaa locations
  Clone ID: PAT_MRT3847_132304C.1.pep
MWSPTIVLQLSQHISTNQTLTGDQTLVSEAGVFELGFLKAXNSSNYYIGVWXKEAPYKTIDWGANRDNPVSDKSTGKLTTFGGNLRRLDASPKKAWATNVTSP

SEQ ID NO: 178614 - protein, 49 aa, Glycine max
  Clone ID: PAT_MRT3847_132305C.1.pep
NNVTSRVQQNFPTKRFSLPLQEMNVQYKEEQSLSGRKWLRRIEDVSFNL

SEQ ID NO: 178615 - protein, 102 aa, Glycine max
  Clone ID: PAT_MRT3847_132306C.1.pep
RRRIVATTSPAHTPLDLDGNHIVPLTICMIDTGGFIGSHLSQKLMADTHHTRLAVDDYCYKIRHLVDPEPPYLSRRISFHRLNIKNDSRLKVLINIADLTIN

SEQ ID NO: 178616 - protein, 62 aa, Glycine max
  Clone ID: PAT_MRT3847_132307C.1.pep
CRSYSGSCRILVIQAIYPKSIRPSHLSRNGECRISKRSICDFASRIRKRASCCRGQAVGGDM

SEQ ID NO: 178617 - protein, 143 aa, Glycine max
  unsure (1)..(143): unsure at all Xaa locations
  Clone ID: PAT_MRT3847_132308C.1.pep
NEQTRQRLNDAAQASGEQRIKREKGKGXXGSGGRRRGVDFSDNSTSREGAEPLFFLSXXXXQDXXTRXGRKKDXPXNXKAQKXXEXAQAXXKKKKXXGXXXXXXXSTXHXXSXGXXXXAXXQPXXAXQXXGKXXEPXKDXKGE

SEQ ID NO: 178618 - protein, 263 aa, Glycine max
  Clone ID: PAT_MRT3847_132309C.1.pep
RVRLSSLGVGDYGPWFAVHYLAGCSSCSNILKDEDDLKYVLQMNNYFVKELEGNGHDQEPVLPANKPSVLLFVDRSSDSSETRGKSKEALKAFRVLAQHYHRVNQTGNKNNNSHDKFSIRDYHGFKSTSEHPRLKLSRPAQKIKLKEKISSIMIMNEGKQVSLDNIPSDLQGSSLNDILAYLLQQKKDGKLSSLAKDLGFQLLSDDIDVRLANTQQSHSEVQSNQFPTETSHKGHTDIVMLDGDTIRSAGELEENPKSTELSS

SEQ ID NO: 178619 - protein, 93 aa, Glycine max
  unsure (1)..(93): unsure at all Xaa locations
  Clone ID: PAT_MRT3847_13230C.1.pep
TYRSDQYAKYSIMSLEKMYKPKVFVEPELRIPLELVELNGYKSSKVKTTLGSKDEEMVPEDXLLLLFKKMGFKERIRLLVKGXTWVVKTQFIC

SEQ ID NO: 178620 - protein, 39 aa, Glycine max
  Clone ID: PAT_MRT3847_132310C.1.pep
LHQLSEHADQCMAVDNEPLGDMGLRALNLTTPSFVDLHH

SEQ ID NO: 178621 - protein, 164 aa, Glycine max
  Clone ID: PAT_MRT3847_132311C.1.pep
VLFYFCFQGSPCEDRNFRSDVDDNETEEASFSGQEDLNDLNDILEWAKENNHGPLQIVSEFYRLSCPARGSSLTFHPLEHLHPLEYHRSAETVLRLAGSTVDLKTSSTGLGLADAHIALLVEEANALSVWAVACLCGTLRLENVCFILCLCPRLYEICFVSIYC

SEQ ID NO: 178622 - protein, 133 aa, Glycine max
  unsure (1)..(133): unsure at all Xaa locations
  Clone ID: PAT_MRT3847_132312C.1.pep
VNLFAHESLKDQMAAFDRAYSTKDNKYAEIMNLTQSVAGDLKLVTDGKLYEGKHIAVSNISAWEKHVVQIPLMAQDEILSSNASDCRTXWRVKIARLXATAMHVGAIEIIICXFASTECNISGAMLLVDTYYT

SEQ ID NO: 178623 - protein, 65 aa, Glycine max
  Clone ID: PAT_MRT3847_132313C.1.pep
TLRYKSIQLNFILGTAFFPLQSCLNHSCCPNAKAFKREEDKDGQATIIAQRSICKGEEVGLYLST

SEQ ID NO: 178624 - protein, 96 aa, Glycine max
  Clone ID: PAT_MRT3847_132314C.1.pep
RSANGGSESDGEENIGWSTVNLDEEKQQQDFSASSTTILDEEPIVNRGLAAALLLCQNKGLLETTVQKVARVKAPNKSLPSAVYCIEDKMAIDDKY

SEQ ID NO: 178625 - protein, 60 aa, Glycine max
  Clone ID: PAT_MRT3847_132315C.1.pep
KEGANKNLVSNFLINKISFIEKQGFNSPTDLFSNTLVLAETFFTSGSFFLKRGLFYQGKF

SEQ ID NO: 178626 - protein, 77 aa, Glycine max
  Clone ID: PAT_MRT3847_132316C.1.pep
HASGHWSRHTPEGAKLEAEWNAKFAEYEKKYSEEAAELKAIITGELPAGWEKALPVSKLTNFQVSLNIYSGLNLLIS

SEQ ID NO: 178627 - protein, 72 aa, Glycine max
  Clone ID: PAT_MRT3847_132317C.1.pep
APRPRFRYRSKTAVAGCIYILKTLATCETLLESTGPDLTTLNIHTSGRAQHASPLEPQTPNTSTTPTNARPP

SEQ ID NO: 178628 - protein, 108 aa, Glycine max
  unsure (1)..(108): unsure at all Xaa locations
  Clone ID: PAT_MRT3847_132318C.1.pep
IFRPRGKGGWHEIKCVTVCSCMCLCHELRERRFLLNMAWRGXVCNHYHFLIFXTLAYVTTXPIDTYKIDIPYVPSYLGSSLSPLAPQDSSKGTQLPHYSXGSIMLIFT

SEQ ID NO: 178629 - protein, 115 aa, Glycine max
  unsure (1)..(115): unsure at all Xaa locations
  Clone ID: PAT_MRT3847_132319C.1.pep
ITPKGKHSYSLCTPLPDMDTTYGPSKPTFSGAYGAVCSAINKNTNAKAPLNMIGHISETCIDALRTLLQPKLVKHIRHENVIALRDVMIPIQRTSFMDVYLVYXLTDTDLYEITK

SEQ ID NO: 178630 - protein, 66 aa, Glycine max
  unsure (1)..(66): unsure at all Xaa locations
  Clone ID: PAT_MRT3847_13231C.1.pep
MLIYVAINSVMKMKVIVLVVCYSFGIMXCHSYDSFPXRMTTGLGARIPEVKCTNWQLAVEAHSIFG

SEQ ID NO: 178631 - protein, 39 aa, Glycine max
  Clone ID: PAT_MRT3847_132320C.1.pep
RDKSYFSCKYFFSSWFFLSKCVQVQIGLACNILKILNVL

SEQ ID NO: 178632 - protein, 59 aa, Glycine max
  Clone ID: PAT_MRT3847_132321C.1.pep
KHEQFRFGLFFAAARECPSYLSSLSPTQLKKPFAFCSRFSIAKQRRKEKELDDGHHKSR

SEQ ID NO: 178633 - protein, 67 aa, Glycine max
  Clone ID: PAT_MRT3847_132322C.1.pep
GHRDQGRAHAYSRLKSMPFVAAGVYNTDPTHLRTTAEGAELLYVCGPRTEGATVAQRSIVRGSTLGY

SEQ ID NO: 178634 - protein, 91 aa, Glycine max
  Clone ID: PAT_MRT3847_132323C.1.pep
FNFSLSSAMCNNLRCSSYSCLSRSYMATTSSKPWAFFLIFGFLGPFSSFQTHIRKASFFLGSFWLSFFLGGRKKWVLGRRVQARGSIWTIT

SEQ ID NO: 178635 - protein, 80 aa, Glycine max
  Clone ID: PAT_MRT3847_132324C.1.pep
ITKLPRDAQNIVLNELYSQVADSDDVVRKPTLVSWLQSLSYLCTKATNQNAANRKSESEDNPTLSSIADPYNSGRATARL

SEQ ID NO: 178636 - protein, 59 aa, Glycine max
  Clone ID: PAT_MRT3847_132325C.1.pep
SRLNSTSQNHLRDTNNRNHIFFIYWYSLYLFFSLLINIYFFLEESKVEQNLEYLKKEIV

SEQ ID NO: 178637 - protein, 63 aa, Glycine max
  Clone ID: PAT_MRT3847_132326C.1.pep
PTFACCDSAMGAEKLSIPALKREQLHESLSCLYFAQRIFELRLLADLNNHAECMKKCSTVKGT

SEQ ID NO: 178638 - protein, 64 aa, Glycine max
  unsure (1)..(64): unsure at all Xaa locations
  Clone ID: PAT_MRT3847_132327C.1.pep
IIDEVLGTCQIFDXVYLANQRFSVVNEYTSGQTKNIILNGGTNQLINGSKRKLHNAIMSVRRAY

SEQ ID NO: 178639 - protein, 167 aa, Glycine max
  unsure (1)..(167): unsure at all Xaa locations
  Clone ID: PAT_MRT3847_132328C.1.pep
LNIDSSKQSFXQFSIDLLGGGILVDNTGDWITLIQNSPITNLLRVAAWKKGWSMVKIVMSGNAALKRSDWASLVQGLLTNSNSSEHFDACQWTXSEPHSWELILPTEVCGPNNGLQMWRSDWANXTSWYWSFLIVNTKEFKVFDTSREFLKNLEFAGKTFISSFSFP

SEQ ID NO: 178640 - protein, 77 aa, Glycine max
  Clone ID: PAT_MRT3847_132329C.1.pep
DAWARARKIQRFLSQPFQVAEVFTGHLGKLVPLKETIKGFQQILAGEYDHLPEQAFYMVGPIEEAVAKADKLAEEHS

SEQ ID NO: 178641 - protein, 233 aa, Glycine max
  unsure (1)..(233): unsure at all Xaa locations
  Clone ID: PAT_MRT3847_13232C.1.pep
TTKATATNKDKEVTNKVTKFLDQTESDKQSKKTNNNNKKQQQGQPSWVFEDEVDDDLVSEFKDLPMKFQQTLIPDLERISTTSKAYITKANKEITRGFKPYVGNKYAPTITTLLSCAFALIPLLLVSLLFNKIKAYFSLQKLLIFIQAYLAIYFTILCLSSFVTGLEPLRFFYSTSRSTYLSLQVLQTLAYVLYLLLLLMYLVLVFSTDSGLGFKFLGLXQTFVGXAIGLHYY

SEQ ID NO: 178642 - protein, 139 aa, Glycine max
  unsure (1)..(139): unsure at all Xaa locations
  Clone ID: PAT_MRT3847_132330C.1.pep
MEEVCLNSEPLFDERNEVDVEGNSSIAEHDLESLNSQTNNSPLPTVGLEFDSFDEVYNFYNIYAKEXGFGIRVSNSWFXRKKKECYRAKLSCSSAGFKKKSEANNPRPKTRTXGCPAMIVIRXVESKRWRIVGSLSFNT

SEQ ID NO: 178643 - protein, 198 aa, Glycine max
  Clone ID: PAT_MRT3847_132331C.1.pep
ALFDESDEVDVEGNSSVAEHDLESLNSQPNNSPLPTVCLEFDSFDEGYNFYNIYAKEQGFGIRVSNSWFRLKKKERYRAKLSCSSAGFKKKSEANNPRPETRTGCPAMIVIRMVESNRWRIVEVELQHNHQVSPQSKRFYKSHKKMIVEASKSQPPSEPVTEVHTIKLCRTTVMGGDYNGYCGFGGRGGRGFVGVGVL

SEQ ID NO: 178644 - protein, 191 aa, Glycine max
  Clone ID: PAT_MRT3847_132332C.1.pep
MTRPLTHHPVGEITMEDVERVKAEALQIMGVFSLLPRLVVFDLDYTLWPFYCECRSKHDTPSLFPHSRGILHALKQERIDVAIASKSPTPDIATTYLDKLSIRSMFAAEEIFYTWKDKTEHFQRIHSKTGVPYNSMLFFDDDNNNIPGASELGVTSILVRNGVNLGAFRDGLTKFSQNKDASKKNRPKRPK

SEQ ID NO: 178645 - protein, 195 aa, Glycine max
  Clone ID: PAT_MRT3847_132333C.1.pep
MSRNDDVVEQNAATTTTTSSTTIRNRADPFLVACRCFSFLTSLAAILCIAVNVLSAVRSFKHASDIFDGIFRCYAVLIAAFVVLAETEWSFIIKFSKVLEYWAARGMLQIFAAVMTRAFPGYIGDRRDLFLLQSIASYLLLACGVVYVVSGILCIGFLKRARQKQEITREQATKDLEELERRREELEQLLLAERV

SEQ ID NO: 178646 - protein, 89 aa, Glycine max
  Clone ID: PAT_MRT3847_132334C.1.pep
GVVCFCLSKWTLFFTLRYHKFTLQGPKQINLLAENIEKKILKFLNNYFNGEEKGGRRSQGGLVLKAPFQVSGEKEFTLKGERIGPHKKV

SEQ ID NO: 178647 - protein, 84 aa, Glycine max
  unsure (1)..(84): unsure at all Xaa locations
  Clone ID: PAT_MRT3847_132335C.1.pep
RKRFGFECIDRKLPPQRRFRDALCEFVLMQLQLAPVFLTISLVTEYXHIYGRTFVYGCAKNTSTATSSCGYNAQLADDYTVYSY

SEQ ID NO: 178648 - protein, 89 aa, Glycine max
  Clone ID: PAT_MRT3847_132336C.1.pep
KRAGCGVARDVYTDKVKTQLLSTHYHYRYHPIPPFGLQAMATSFGGPGTTLAPVKGTKLQIPSFHWFSFGSGFGFFRAGPFPFFYTRFF

SEQ ID NO: 178649 - protein, 125 aa, Glycine max
  Clone ID: PAT_MRT3847_132337C.1.pep
LINLLKTRPFRMLLLTPPWEPPLKGSGRGKTKGSPFYWYAWVLFCLRILSKFIVFSGEVFCKKGSTPNGGFPCFPLPVGNPLVFFVGKGWGELCPCPKGIFPFSPFFFPLKKFLLPKKRKPVGRR

SEQ ID NO: 178650 - protein, 95 aa, Glycine max
  unsure (1)..(95): unsure at all Xaa locations
  Clone ID: PAT_MRT3847_132338C.1.pep
CRVNIHHRAHQAGPYQVFFNQQPSFLISSSIIKNHIKRLNFSFLCRYPGTGAIRICLMQQPYARXXAYSPPSRLSPTLXKAMGYXLQGDAREREE

SEQ ID NO: 178651 - protein, 58 aa, Glycine max
  Clone ID: PAT_MRT3847_132339C.1.pep
QVLYALLTDNIDLTPLLNIVVRVRTSHIENILLMLFSLIVELYLQKDLVQIKMLMKNV

SEQ ID NO: 178652 - protein, 103 aa, Glycine max
  Clone ID: PAT_MRT3847_13233C.1.pep
GKPRNPPKKPSPKKRIFFLFFFNRVSNFLPLNKGFNFFSWELFAFRFKARVGPFFLFFQGVFPGCLIKVKAPGKGSRKFSFSPKGKGKPLSNVVFPPMLLPFL

SEQ ID NO: 178653 - protein, 280 aa, Glycine max
  unsure (1)..(280): unsure at all Xaa locations
  Clone ID: PAT_MRT3847_132340C.1.pep
MEDNNLYLSLLLLFVSIVTLSLFVLFYKHRSAFAAPNLPPGATGYPVIGESLEFLSTGWKGHPEKFIFDRMIRYSSQLFKTSILGEPAVIFCGATCNKFLFSNENKLVAAWWPNSVNKVFPTTLLSNSKQESKKMRKLLPQFLKPEALQRYVGIMDTIARNHFASLWDNKTELTVYPLAKRYTFLLACRLFMSIEDXDHVAKFENPFHLLASGIISVPIDLPGTPFNKAIKAANAIRKELLKIIRQRKVDLAEGKASPTQDILSHMLLTCNENGQFMNEL

SEQ ID NO: 178654 - protein, 58 aa, Glycine max
  Clone ID: PAT_MRT3847_132341C.1.pep
VSLVIWDEDMFGRVMGVGLFVILIVVVSCMCCMVIMLGKDRVFQVNVLLGGGECIFYK

SEQ ID NO: 178655 - protein, 150 aa, Glycine max
  Clone ID: PAT_MRT3847_132342C.1.pep
QKTPWERGGSPCKTSKRQKQGQRQPIKNPTAPQKNLGIKTPGRQRRPQKKGRENGGPSGKGTLSGPFKGTGGGKKKPGGGGKPPFKNFCTQFSAPLNTPQGGHSLNGIPGGVKINHVSKNNRPLKNGPEGENLPEKKTPGLYGKPPGTKG

SEQ ID NO: 178656 - protein, 69 aa, Glycine max
  Clone ID: PAT_MRT3847_132343C.1.pep
TDGSDVSRGNLITSMVGSTALAGRSTFLVNSGFTTWVEPGPWILFHLLDGLQKFSGRLPSSLQPVPLYS

SEQ ID NO: 178657 - protein, 137 aa, Glycine max
  Clone ID: PAT_MRT3847_132344C.1.pep
EAILLDLLRVVSHHRARLATPIRTVQKIYSEADSENIPFGDTIFTRSSAGNRPFLLIEPLYKVNGEDKTKPSTRSTRASEEKDFKIDETMASDTKEDENFAATLTSSPDVNSKDKSKSLSEAQPKKENAVDAGKGPT

SEQ ID NO: 178658 - protein, 71 aa, Glycine max
  Clone ID: PAT_MRT3847_132345C.1.pep
EKEKKGVGRRKDGKKRERTFGDVIFDGDGYKAIWLRSGLGGWVGLRMKQKQKGRQYTINTSYHNINNQNNI

SEQ ID NO: 178659 - protein, 50 aa, Glycine max
  Clone ID: PAT_MRT3847_132346C.1.pep
REGSNFIGKLLTKNHSKKCPASLLPDMIFTNHFFSTFYNIMAVERTFILF

SEQ ID NO: 178660 - protein, 94 aa, Glycine max
  Clone ID: PAT_MRT3847_132347C.1.pep
KNKLYKETILTRGKKGQSKSSKSLGSQFFFGHPFPGGGFQGPQHHFIKVINPRGKGGPNFIKVKLYPKKKGLFWGGHKKTATCQILKIKGGSKN

SEQ ID NO: 178661 - protein, 90 aa, Glycine max
  Clone ID: PAT_MRT3847_132348C.1.pep
VVVVLATLIAFKHSLRAKKINLEDCPPSQTTPLFFISENQTYLPVSSENRQIRENLTIPDEFSRHQAKSNKNLATFKLPNDKTKHPTSLK

SEQ ID NO: 178662 - protein, 56 aa, Glycine max
  Clone ID: PAT_MRT3847_132349C.1.pep
VIFPGAHNGGSAREARSFQQSENRSSPTTHIGTGPSTISRHSSLFPDPSSVQISSS

SEQ ID NO: 178663 - protein, 452 aa, Glycine max
  Clone ID: PAT_MRT3847_13234C.1.pep
MAPLLYLGCRRVLLFSLLLFFFVSVCSEPHQPESKALSSDGSSRSRRRMLLLELDSEKEEFEQPLKKKSTKNQTKLIKPTTSLSSKNQTKTIKSNNLSSSKNQTKLAKTKATTLTDTEVVVKKLNSTTLKSKKLNSTSKGSTKSSSLLDLAKTSGTSGGKNKTTKATATKDKEVTNKKTKLDQTEESDKQSNKKSNTTNNKKKKEQQGQPSWVFEDEVDDDLVSEFKDLPMKFQQTLIPDLERISTTSKAYITKANKEITRGFKPYVGNKYAPTITTLLSCAFALIPLLLASLLFNKIKAYFSLQKLLIFIQAYLAIYFSILCLSSFVTGLEPLRFFYSASRSTYLCLQVLQTLAYVLYLLLLLMYLVLVFSTDSGLGSKFLGLAQTFVGFSVGLHYYVTVFHRVVLKQPPKTNWKIHAIYATCFFLICVIARADRKKKTYLEEGGEEGKKN

SEQ ID NO: 178664 - protein, 49 aa, Glycine max
  Clone ID: PAT_MRT3847_132350C.1.pep
SPFFVFSSPLFPRVRHPHTAFLCQNPRFSNLGFCFLNLVRVLLWVWFRN

SEQ ID NO: 178665 - protein, 88 aa, Glycine max
  Clone ID: PAT_MRT3847_132351C.1.pep
GFIFFGPTPMGKILGRGLFPKTGYNKTTPKTFKKEGLLGSVSSGKKIYKALVALKTVDFFQNKLMNFNLDLKKGFFIPLTFGFASKSV

SEQ ID NO: 178666 - protein, 39 aa, Glycine max
  Clone ID: PAT_MRT3847_132352C.1.pep
QWFNIIGKELLIKINYLLENRTHFRKVILTTLKKTTVVQ

SEQ ID NO: 178667 - protein, 116 aa, Glycine max
  unsure (1)..(116): unsure at all Xaa locations
  Clone ID: PAT_MRT3847_132353C.1.pep
MLQPAGGTRGDREEGTRHNTTXPKXQXHPRGXQHPPPRETPQQPTXPTXPTQPTPPSXNANRXTDXPRDAPTTPTQHAPTRAAAPPPPQAHTPANGRKRAPTSNXAXPHTAAATPK

SEQ ID NO: 178668 - protein, 50 aa, Glycine max
  Clone ID: PAT_MRT3847_132354C.1.pep
RSPSRVTRCGIIYSIWSMIAIFFVRILVLIGCSVSRDRKYSRYEDRSSKQ

SEQ ID NO: 178669 - protein, 51 aa, Glycine max
  unsure (1)..(51): unsure at all Xaa locations
  Clone ID: PAT_MRT3847_132355C.1.pep
EKTSGGLLVSRATQDQPFIXTIKTVWPGAFDQEGHQKTVSVNPGEPVFYPQ

SEQ ID NO: 178670 - protein, 49 aa, Glycine max
  unsure (1)..(49): unsure at all Xaa locations
  Clone ID: PAT_MRT3847_132356C.1.pep
LNIFFKNSLFVILPQPVNFDXVGINLERKIEXGCMVCXNNFNNLQHDIK

SEQ ID NO: 178671 - protein, 105 aa, Glycine max
  unsure (1)..(105): unsure at all Xaa locations
  Clone ID: PAT_MRT3847_132357C.1.pep
GPPPTAGAKHTSPPIPPAPQLAPHQGPGARIIERVTLVLPPGPREKKIQPPTRRRRVSSEEGIKKDQEQKPHPKKESYAEERTSFFSHISYEYLYPAXAACCMCL

SEQ ID NO: 178672 - protein, 380 aa, Glycine max
  Clone ID: PAT_MRT3847_132358C.1.pep
FGSRSNIRTVAAFNAQNKMLSVFCHELRVPQSQSLRRSQTSGFLFGLSQLALYASEALILWYGAHLVSKGVSTFSKVIKVFVVLVITANSVAETVSLAPEIIRGGEAVGSVFSILDRSTRIDPDDPDADPVESLRGEIELRHVDFAYPSRPDVMVFKDLNLRIRAGQSQALVGASGSGKSSVIALIERFYDPIAGKVMVDGKDIRKLNLKSLRLKIGLVQQEPALFAASIFENIAYGKEGATEAEVIEAARAANVHGFVSGLPEGYKTPVGERGVQLSGGQKQRIAIARAVLKDPTILLLDEATSALDAESECVLQEALERLMRGRTTVLVAHRLSTIRGVDCIGVVQDGRIVEQGSHSELVSRHEGAYSRLLQLQHHHI

SEQ ID NO: 178673 - protein, 75 aa, Glycine max
  Clone ID: PAT_MRT3847_132359C.1.pep
HASGKVAILNLSAGLRGHILDSCSYNIITYERDYCFFFIYLFDEYDLVGVINYVWVLLTSCFGLDVDMWDMRFVS

SEQ ID NO: 178674 - protein, 80 aa, Glycine max
  unsure (1)..(80): unsure at all Xaa locations
  Clone ID: PAT_MRT3847_13235C.1.pep
GSRDDVWGKLELTXVGVPFGENKRGCICQLLVTSRDLNVLNTNFEVDKAYRLEVLSEDESWELSEKRGGDLLFYTRTQPL

SEQ ID NO: 178675 - protein, 73 aa, Glycine max
  Clone ID: PAT_MRT3847_132360C.1.pep
MSFTQNLFIMFYFPLPLTDSFFFSIFLLYPFFYRGYPTSELVHWVTCDSMIWEKKKKKKKGFWFLYGIGHFGI

SEQ ID NO: 178676 - protein, 89 aa, Glycine max
  unsure (1)..(89): unsure at all Xaa locations
  Clone ID: PAT_MRT3847_132361C.1.pep
MIYLTDLNLMSGLLKTAGWRLAAHQPAFHAPYMAGPINKIDRSFIYPLPIFYSXTLKHLIKSMLAKNPQHLPTASEXTRHPHKQPYVLR

SEQ ID NO: 178677 - protein, 69 aa, Glycine max
  Clone ID: PAT_MRT3847_132362C.1.pep
KAYPAVVQSSQPNNATIELGLLGPRPVDKKKKVQIRKTLNEFYNLAGVPKRSQPFDRNEIYHSQTEESP

SEQ ID NO: 178678 - protein, 84 aa, Glycine max
  Clone ID: PAT_MRT3847_132363C.1.pep
FKVGSTGFCVLVSPTRCARYATDGQLLVPCEKLPKLGCTDASQVLKELQEAKSAYPNGFICFIGFDNVPQVPCITFIAYKPPGF

SEQ ID NO: 178679 - protein, 125 aa, Glycine max
  Clone ID: PAT_MRT3847_132364C.1.pep
MRTSLLLRSHNCLQGSHDVLSLTPSSIRSQRNPNPNPSPNPYQTRRRKLHDGDRSGMVVKGPCANLVMGQVKILKRGETLSPENPRRANSFDDDDGGFDFVLGSTNRLGPDPSSVPVPGFLALRR

SEQ ID NO: 178680 - protein, 75 aa, Glycine max
  Clone ID: PAT_MRT3847_132365C.1.pep
RGSKNALKSLTSLTKIYSFLINFKLFDFVQPFSFEQHDCPSTSSYILLSSECICGGVFDGRNKPPNKKEKMTTNK

SEQ ID NO: 178681 - protein, 52 aa, Glycine max
  Clone ID: PAT_MRT3847_132366C.1.pep
HKAGYCLFMLPSLSLLLSASLPEVTMAQATCLVTSESVDEGHLASSGSRSPM

SEQ ID NO: 178682 - protein, 58 aa, Glycine max
  Clone ID: PAT_MRT3847_132367C.1.pep
TLYIIQKKAPTLIHKRSMPSMGGSPILHTIEQDSLRDWPLGSPPILRMEPLLQPSMLG

SEQ ID NO: 178683 - protein, 120 aa, Glycine max
  unsure (1)..(120): unsure at all Xaa locations
  Clone ID: PAT_MRT3847_132368C.1.pep
MAKDPVRVLVTGAAGQIGYALVPMIARGVMLGPDQPVILHMLDIPPAAESLNGVKMELVXKDVMTKNVSIYKSQASALEKHAAANCKVLVVANPANTNALILKEFAPSIPEKNISWLTRL

SEQ ID NO: 178684 - protein, 80 aa, Glycine max
  unsure (1)..(80): unsure at all Xaa locations
  Clone ID: PAT_MRT3847_132369C.1.pep
QPPIRRLAPQGGVXKIRGFIFEETRGVLQIFLENVFCGAVSFPEPAKKKTVSPMDVVFALQRQGRALSGFGGLFLGFPPG

SEQ ID NO: 178685 - protein, 271 aa, Glycine max
  Clone ID: PAT_MRT3847_13236C.1.pep
SSEFGSSSPLTKKSHSSTRRRKKGKKNAKGRAVNSSKSKIYKKGDSLALKWFHSLKEAIYDLCRAFRQPMIWRPMSWFFLAHVTIPNLSTVIFYYETEVLKLEASFLGTSRVVGWLGLMLGTFIYNRHLKYMTLRKILMCAHIGLAFLNLLQIAVVSRKNIAFGISDKIMVLFGSALADGINQFKFMPFLILSGQLCPPGIEGTLFALFMSINNLGSTLGSFVGAGLASILNIDSGSFDNLLLGIIVHALCNFIPIAFLFLIPKEATGSST

SEQ ID NO: 178686 - protein, 328 aa, Glycine max
  Clone ID: PAT_MRT3847_132370C.1.pep
MAKDPVRVLVTGAAGQIGYALVPMIARGVMLGPDQPVILHMLDIPPAAESLNGVKMELVDAAFPLLKGVVATTDVVEACTGVNIAVMVGGFPRKEGMERKDVMTKNVSIYKSQASALEKHAAANCKVLVVANPANTNALILKEFAPSIPEKNISCLTRLDHNRALGQISERLNIQVSDVKNVIIWGNHSSTQYPDVNHATVGEKPVRELIADDAWLNGEFITTVQQRGAAIIKARKLSSALSAASAACDHIRDWVLGTPQGTWVSMGVYSDGSYNVPAGLIYSFPVTCANGEWTIVQGLPIDEFSRKKLDLTAEELSEEKALAYSCLN

SEQ ID NO: 178687 - protein, 94 aa, Glycine max
  Clone ID: PAT_MRT3847_132371C.1.pep
LQGQRSTFHDLSKSHWKMHYDKSAKNKYHISYGSKFVLSINVKLNIIPDSKMRTGGTKIKYQQKIIIFGPNGRHALIDCCQCSLSQQLALSIQL

SEQ ID NO: 178688 - protein, 332 aa, Glycine max
  Clone ID: PAT_MRT3847_132372C.1.pep
MAKDPVRVLVTGAAGQIGYALVPMIARGVMLGPDQPVILHMLDIPPAAESLNGVKMELVDAAFPLLKGVVATTDVVEACTGVNIAVMVGGFPRKEGMERKDVMTKNVSIYKSQASALEKHAAANCKVLVVANPANTNALILKEFAPSIPEKNISCLTRLDHNRALGQISERLTVQVSDVKNVIIWGNHSSTQYPDVNHATVATSAGEKPVRELIADDAWLNGEFITTVQQRGAAIIKARKLSSALSAASAACDHIRDWVLGTPQGTWVSMGVYSDGSYNVPAGLIYSFPVTCANGEWAIVQGLSIDEFSRKKLDLTAEELSEEKALAYSCLN

SEQ ID NO: 178689 - protein, 91 aa, Glycine max
  Clone ID: PAT_MRT3847_132373C.1.pep
PVLSSMSFEESSHTVHPPEVATWSLLHLLRLLLARHSAIDFAWLNSGNDRAEVLIHLVNRLVSPETDLNKYHAINLYAHLPAYFDEYHYMD

SEQ ID NO: 178690 - protein, 228 aa, Glycine max
  unsure (1)..(228): unsure at all Xaa locations
  Clone ID: PAT_MRT3847_132374C.1.pep
MSGKRKRKLKLLSDAITDNRRKTVAEVKTENLELQSWADLPAELLESILSRLILVDNIRASSVCKRWHSVASDVRVVNQSPWLMYFPKFGDCYEFYDPVQHKTLTFELPELNGSRVCYTKDGWLLLYRPRTHRVFFFNPFTRELIKLPRFEMTYQIVAFSCAPTSPGCVLFTVKHVSPTVVAISTCYXWATEWTTVNYQNRLPFVSSIWNKAVFLYGLFYCLSLTGWL

SEQ ID NO: 178691 - protein, 74 aa, Glycine max
  Clone ID: PAT_MRT3847_132375C.1.pep
IVIGPDPISLQMIRPLDRCVCVTDGNTRASRTHTTLMRRAVSISQCKAGSWLHVLGSIFEAQGVTCYSLDCISS

SEQ ID NO: 178692 - protein, 72 aa, Glycine max
  unsure (1)..(72): unsure at all Xaa locations
  Clone ID: PAT_MRT3847_132376C.1.pep
SGSFVGSKGGQGKTTCSLILCIMLGTVSYCXXXIFTYPGHNLIDPLHNXTPKPPPLTKAFPISTPWRRILLM

SEQ ID NO: 178693 - protein, 488 aa, Glycine max
  Clone ID: PAT_MRT3847_132377C.1.pep
PVLPFPFLTTRRCPPAPELFLLIISAVLLFPHRRSRCRRFRLPPGTLGLPLVGETLQLISAYKSDNPEPFMDQRVKRYGPIFTTHVFGEPTVFSADPETNRFILLNEGKLFECSYPGSISNLLGKHSLLLMKGSLHKRMHSLTMSFANSSIIKDHLLVDIDRLIRLNLDSWSDRVLLMEEAKKITFELTVKQLMSFDPGEWTETLRKEYVLVIEGFFSVPLPLFSSTYRRAIKARTKVAEALTLVVRDRRKESVTEEKKNDMLGALLASGYHFSDEEIVDFMLALLVAGYETTSTIMTLAIKFLTETPLALAQLKEEHDQIRAKKSCPEAPLEWTDYKSMAFTQCVVNETLRVANIIGAIFRRAMTDINIKGYTIPKGWRVVASFRAVHLNPDHFKDARTFNPWRWQSNSEASSPGNVYTPFGGGPRLCPGYELARVVLSVFLHRIVTRYSWFPAEEDKLVFFPTTRTQKRYPIIVKRREESKLSKSP

SEQ ID NO: 178694 - protein, 121 aa, Glycine max
  Clone ID: PAT_MRT3847_132378C.1.pep
MTVLVFFFAPFLVAWPCHAYNMLPLRVNTGSGACTAEEKCTRWRLAEKARSISGYATIADQSFIPAKEYVHGQHYGADSKTVHHQAYFYARDLEVHTKDTFVFHLNSTVLYTIIYCNNHRY

SEQ ID NO: 178695 - protein, 87 aa, Glycine max
  Clone ID: PAT_MRT3847_132379C.1.pep
KRYFIFQTLSCGMDINYANPMLLPLFCNRQIKHVSVKNHFLGSYFKMKSMSCMLLMSTPTKISESIHTQAELQPTPEKEMKTPIHCG

SEQ ID NO: 178696 - protein, 74 aa, Glycine max
  Clone ID: PAT_MRT3847_13237C.1.pep
HCGRNMQLRTVFQNLAINKLINLQQSEFLRVLHGLFQNILSPLIFPPSQCCRPQRHRRRRRIFLPNSHIQGLSC

SEQ ID NO: 178697 - protein, 63 aa, Glycine max
  Clone ID: PAT_MRT3847_132380C.1.pep
SSRIGSSTAARRRQNGASSTMALRLLKYSLSNGSEGQRTTQTIVSFSLLCIRWLCYNIPLAPN

SEQ ID NO: 178698 - protein, 67 aa, Glycine max
  Clone ID: PAT_MRT3847_132381C.1.pep
TRTGKVHFDHSSDHAQVSFLNLSFMFSWFDGTRKKKDVFSLIVLLFCVIVLFHFFVGTAFFFFFFLR

SEQ ID NO: 178699 - protein, 108 aa, Glycine max
  unsure (1)..(108): unsure at all Xaa locations
  Clone ID: PAT_MRT3847_132382C.1.pep
SLITGAAGSIASHTAKQIIHNYAECTIVERDXLDYWTRSENDHSXLSDPNLKGVKXGDVACADHGNYLLIDDYTDAFEHLDTQTAVDNCVHDYVEFYYNNNAGTHVLS

SEQ ID NO: 178700 - protein, 44 aa, Glycine max
  Clone ID: PAT_MRT3847_132383C.1.pep
FCGVELILMYYPNMLVALLHLGCTLGLVVRGYLGMDVVFICLGY

SEQ ID NO: 178701 - protein, 82 aa, Glycine max
  Clone ID: PAT_MRT3847_132384C.1.pep
TTRPVEYPIPQITLTATDNDSEQYLVTFPRTNSLTQLLVMDYLGPISDTLSDATYNSPFDFHINTANGVIHTFVEAEPVEIP

SEQ ID NO: 178702 - protein, 63 aa, Glycine max
  Clone ID: PAT_MRT3847_132385C.1.pep
MHSLTLLLFLFFLFFFFTGAGFFRADRRLSQKKPDRITDATQSCAKGVHVHHGRQHTRLDLCA

SEQ ID NO: 178703 - protein, 117 aa, Glycine max
  Clone ID: PAT_MRT3847_132386C.1.pep
VFSIPSFEFSFAGVVLVSCLPSVCLRWRVPCCYVWLFLLLFPFVFSVFLVPVLQFSVVLVYVFVVCCFGFVSGSFYLFFISLTLGFVRVVDFWLLEFFPFFVLLLWSHDVSVTKQKK

SEQ ID NO: 178704 - protein, 112 aa, Glycine max
  unsure (1)..(112): unsure at all Xaa locations
  Clone ID: PAT_MRT3847_132387C.1.pep
WGFFFFFFFGSGLSPSVVFSQPNPSVVFSQPYPSVVFSQRTXSVVFSQPNPSVVLSQPNPSVVFSQPNPSVVFSQPNPSVVLSHPNPSVVLSQPNPSVVFSQPNPSVVFSQP

SEQ ID NO: 178705 - protein, 70 aa, Glycine max
  unsure (1)..(70): unsure at all Xaa locations
  Clone ID: PAT_MRT3847_132388C.1.pep
PFYIAAQLTGAISASYXVRELLRPSNEIGGTSPAGSHIQALIMEMVTTYTMVFISMAVATDSNAVRITVI

SEQ ID NO: 178706 - protein, 86 aa, Glycine max
  Clone ID: PAT_MRT3847_132389C.1.pep
LWKIFFIFLRIFKYIFGSQYFFLEIYVILLKYPFYIKEIIIFYTNNQLYHESILHDAKAVHSNIHIYEIKFKVKTQLNMLCTLYDF

SEQ ID NO: 178707 - protein, 60 aa, Glycine max
  Clone ID: PAT_MRT3847_13238C.1.pep
EGEKFIQGNWDLSKIGFVVCKTTPSSTFGLGDIRPMLLISTGIALPPVILSFKSFPHYSK

SEQ ID NO: 178708 - protein, 80 aa, Glycine max
  Clone ID: PAT_MRT3847_132390C.1.pep
SLNSKSNFHSYPCLHEKLSITISNKIHNEKYFSMTPKQASKHTQTWIGFPFINWLYEMISSTTPVRAAEGDMVGFVRSSF

SEQ ID NO: 178709 - protein, 129 aa, Glycine max
  unsure (1)..(129): unsure at all Xaa locations
  Clone ID: PAT_MRT3847_132391C.1.pep
GPKFPSDPPSAHPSANPSGRSEIKERKEPLGVKGPKERELPSGWEITGTKGRCSNFXLNLTKALFRCQKPKACLFFRKNYLRALHLSREFNRQTRFTRGDQAKLRLVSRKGQEEGFIDHNNYPLRLFFN

SEQ ID NO: 178710 - protein, 539 aa, Glycine max
  Clone ID: PAT_MRT3847_132392C.1.pep
MSYRPSANARTEVRRNRYKVAVDADEGRRRREDTMVEIRKSRREESLQKKRREGLQSQQIPSSLHSTVIEKKLEHLPAMVTGVFTDDNNMQFEATTQFRKLLSIERSPPIEEVIQAGVVPRFVEFLMREDFPQLQFEAAWALTNIASGTSENTKVIIDHGAVPNFVKLLGSPSDDVWMFWAKYQMLLGNVAGDSPRCRDLVLGDGALLPLLAQLNEHAKLSMLRNATWTLSNFCRGKPQPAFDQVKPALPALASLIQSTDEEVLTDACWALSYLSDGTNDKIQGVIEAGVCSRLVELLLHPSPSVLIPALRTVGNIVTGDDLQTEVIINHQALSRLLNLLTNNYKKSIEKEACWTISNITAGNKKQFQDLIQDVIEASIIAPLVHLLQNAEFDIKKEAAWAISNATSGGSHEQIKFLVSQGCIKPLCDLLICPDPRIVTVCLEGLENILKVGEAEKNVSNTDGVNLYAQMIDDAEGLEKIENLQSHDNTEIYEKAVKILETYWMEEDDETMPPGDASQSGFNFGGTQPPAVPSGGFDFN

SEQ ID NO: 178711 - protein, 75 aa, Glycine max
  Clone ID: PAT_MRT3847_132393C.1.pep
RGPGGSFAYSDSEVWLHNLRLNMRIMVALTKVLSSRTVVRYPYVNAVTYGLSHNSSAIHYLCDCNHSSPNEYETN

SEQ ID NO: 178712 - protein, 1030 aa, Glycine max
  Clone ID: PAT_MRT3847_132394C.1.pep
MGEHAIPQCFQHLMAKKLLFLLTLLEILLCGQSKFMVYNTSQGIVPGKLNVHLVAHTHDDVGWLKTVDQYYVGSNNSIQGACVQNVLDSMVHALLADKNRKFIYVEMAFFKRWWRDQSEAVQDVVKKLVSSGQLEFINGAMAMHDEAVTHYIDMIDQTALGHQFLKEEFGVTPRIGWQIDPFGHSAVQAYLLGAEVGFDSFFFGRIDYQDRAKRKKEKSLEVIWQGSKSLGPSAQIFAGAFPENYEPPSGFYFEVNDASPIVQDNMQLFDYNVQDRVNDFVAAALLQANITRTNHIMWTMGTDFKYQYAHTWFRQLDKLIHYVNMDGRVNALYSTPSIYTDAKYATNESWPIKTDDFFPYADRANGYWTGYFTSRPAIKRYVRLMSGYYLAARQLEFFRGRVNSGPNTDSLADALAIAQHHDAVTGTEKQHVANDYSKRLSIGYKEAEELVSSSLACLVESPLLTRCQNPVTKFQQCPLLNISYCPASEVDLVQGKNLVIVVYNSLGWRRNEVIRIPVIEANVRVHDSNGIEIESQLLPQAEKYVDLRNYYVKAYLGQTPPKAPKYWLAFTVSVPPLGFSTYTVSTAKRTGSTRSSVDIYKSSEKSKFDVGQGNLKLTFSMDQEKCTNYVNIRNLVEEQVELSYLYYSGYNGTNQKDPQNSGAYIFRPNGTHPINHEKKVPLTVLHGPVLDEVHQQINPWIYQITRLYKGKEHVEVEFIVGPIPIEDGIGKEVATRISTTMETNNMFYTDSNGRDFIKRIRDYRTDWDLEVNQPAAGNYYPINLGIYTEDNKTEFSVLVDRAIGGSSLQDGQIELMVHRRLLLDDSRGVDEALNETDCVGDDCRGLTVQGKFYYRIDPLGEGAKWRRTFGQEIYSPLLLAFAEKDDKDDWMNSRVLTFSGIDSSYALPDNIAIITLQELDDGTVLLRLAHLYEIEEDKDLSVIATVELKKLLPGRKIKEVKEMSLSANQERTEMEKKRLAWKVEGSSGSKQVSRGGPVDPKELNVELAPMEIRTFILDFDDVSNQLFDAL

SEQ ID NO: 178713 - protein, 60 aa, Glycine max
  unsure (1)..(60): unsure at all Xaa locations
  Clone ID: PAT_MRT3847_132395C.1.pep
WFRFCXLRCFXXLCXVAVCXXXLXRWGPVSPFXCCXPGRRGVGXXAAFLPXXXSXRVTIR

SEQ ID NO: 178714 - protein, 137 aa, Glycine max
  Clone ID: PAT_MRT3847_132396C.1.pep
MQTALTFAAPNVVPLAPTKSVSHITIFPTKLKAPRSSPRYSPIRVATVEPDTSTVDYNSAFSVFPAEACETVGGEACMAEMYPETKLQPEAKTPRVVTENVEREYLEYDDPKTVFRGEACDDLGGTFCETEYQKGVY

SEQ ID NO: 178715 - protein, 80 aa, Glycine max
  Clone ID: PAT_MRT3847_132397C.1.pep
PMLLITDSNHYLNDPNDTDISERKGRIKGDRIANDIHNTVISPLQSRDRRKATATSRERTHSEAPTRRSRQRGTCYYLRE

SEQ ID NO: 178716 - protein, 443 aa, Glycine max
  unsure (1)..(443): unsure at all Xaa locations
  Clone ID: PAT_MRT3847_132398C.1.pep
MASYQQASTIEEVRTLWIGDLQYWVDEGYLSHCFGHTGEVISIKIIRNKLTGQPEGYGFVEFVSHAAAERVLQTYNGTQMPATDQTFRLNWASFGIGERRPDAAPEHSIFVGDLAPDAHASAHASDCLSISPSVRGAKVVTDPNTARSKGYGFVKFSDENERNRAMTEMNGVYCSTRPMRISAATPKKTTGAYGAPAAPVPKPVYPVPAYTSPVVQVQPPDYDVNNTTIFVGNLDLNVSEEELKQNSLQFGEIVSVKIQPGKGFGFVQFGTRXDGEADHHSPETFTYIPRCSWNMTIXSIKMQGKMIGQQVVRISWGRTLTARQMDPNXGVRDWGRQMDPNQWSAYYGYGQGYEAYAYGPAHDPSLYAYGAYPGYAQYPQQVEGAQDLSGMSVPTMEQREELYDPLAMPDVDKLNAAYLSVHGSAILGRSLWQKTCSSSLQQA

SEQ ID NO: 178717 - protein, 208 aa, Glycine max
  Clone ID: PAT_MRT3847_132399C.1.pep
APVVQVQPPEYDVNNTAIFVGNLDLNVSEEELKQNFLQFGEIVSVKVQSGKGCGFVQFGTRASAEEAIQKMQEKMIGQQVVRISWGRTLTARQDLPGGWGPQMDPNQWSAYYGYGQGYEAYAYGAAHDPSFYAYGAYAGYAQYPQQVEGAQDLSGMSVPTMEQREELYDPLAMPDVDKLNAAYLSVHGSAILGRLPWQKTCSTSLQQA

SEQ ID NO: 178718 - protein, 254 aa, Glycine max
  Clone ID: PAT_MRT3847_13239C.1.pep
MAMEVEQNQNHQLGFPFWKPLRRRFGPESPFFAHGNLERELLAKQLALELTEEKQQLEKWMQEEEGREVFCPIVGCGARLTSMEDFENHYNARHTASCSVCSRVYPTSWLLSIHVSEVHDSFFQAKVARGYDMYECLVERCGLKFKSYNSRQQHLVDKHKFPTSFEFFKKAKPSKKHRLKSQRKQAVCKEDSSGMMEVENASMDDLVSAVSKLNTSDSTPSSISFGRRHKGLSFVPRAVQRGGGSNSTASVTKK

SEQ ID NO: 178719 - protein, 156 aa, Glycine max
  Clone ID: PAT_MRT3847_1323C.1.pep
VCFFSNYSVHLCVFPLGFVHQGTNRTTYENFRYRADGRINVFNRGCLNNFLEMFCTKVKPSRNNFRAFAREEVPPRPRAPIIPRDRDDLGGDRRPKVEADLDIGEDLLKISQRRNIEELDEDIQGRGSNGPPGNTSEPDSIMSSDHRAPTIRSDAR

SEQ ID NO: 178720 - protein, 55 aa, Glycine max
  Clone ID: PAT_MRT3847_132400C.1.pep
MISISSFIFPYKYWISGWIEWDGERIEFDNAPSYSEKNWGGGFPRKWFWVQCNVF

SEQ ID NO: 178721 - protein, 78 aa, Glycine max
  unsure (1)..(78): unsure at all Xaa locations
  Clone ID: PAT_MRT3847_132401C.1.pep
ESEIHKPATSKSFLDNFLLKSQYNTXGFRLPGIXXASFAENQXSXKAVAVPKGYLXVYVGEXMKRFVIPXSYLTQSSF

SEQ ID NO: 178722 - protein, 389 aa, Glycine max
  unsure (1)..(389): unsure at all Xaa locations
  Clone ID: PAT_MRT3847_132402C.1.pep
MAVSFLARDVSDLCLGKPPLRSLSAAATVADALAALKSSDHETHVSLWSFCENKNEVRCVGKLCMVDVICYLCREDNLLSPSKALKEPLSSILPKDQSLVVHLQPSSSLFEAIDLILQGAQNLVVPILPTKRSGVSRRKQQQHQKASSTINSHSSCEFCWLTQEDVIRFLLGSIGVFTPLPALSIDSLGIISSDVLAIDYYSPASSAVGAISKSLAQQTSVAIVDSDGTFIGEISPFTLACCDETVAAATASSSAGDLMAYIDCGGPPAARVRLAKARLKEKPVELVRQVFARLTACEWEQSTSYDEELPSRTPAQVWXLARSSSYSARMVRKAEAIVCHPKSSLVAVMIQAIAHRVNYLWVIEDDCSLVGIVTFSNMLKVFREHLETI

SEQ ID NO: 178723 - protein, 136 aa, Glycine max
  Clone ID: PAT_MRT3847_132403C.1.pep
MAVSFLARDVSDLCLGKPPLRSLSAAATVADALDALKSSDGEIHVSVWSFENEVGRCVGKLCMVDVICYLCREDNLLSPSKSLKEPLSSILPKDHNLVVHLQPSSSLLEAIDLILQHAQNSLGKILISKMPKVSSC

SEQ ID NO: 178724 - protein, 60 aa, Glycine max
  Clone ID: PAT_MRT3847_132404C.1.pep
NRKPTFEKSLSVSLGLWQLGWCNYCRPMQFFYINKKNASKNSFCQTEFFIDIENFVLQNQ

SEQ ID NO: 178725 - protein, 65 aa, Glycine max
  Clone ID: PAT_MRT3847_132405C.1.pep
WPSFLKAPHTLYALRFTQCTGIFFIPEAGKFTDTPDAQKVRDNAIYNLKPTLCGTAGKGYDQVYL

SEQ ID NO: 178726 - protein, 48 aa, Glycine max
  Clone ID: PAT_MRT3847_132406C.1.pep
RITMLKELLRLNYFRQAPVIEFDYCPSSWMALFVYGKVGSIENEVCIK

SEQ ID NO: 178727 - protein, 56 aa, Glycine max
  Clone ID: PAT_MRT3847_132407C.1.pep
HVYVTMSEKDFNRLGVVVLRVNDFRFYLCHIDYQEYQYVPPLCSNHQKNSSTSLFK

SEQ ID NO: 178728 - protein, 69 aa, Glycine max
  Clone ID: PAT_MRT3847_132408C.1.pep
HEREVSQSSFIDMIYDYYRLPSLGYAGSQDLPRAEFRGNQIIFLVVTLQGGNLLRAKVRGGQRGIWVGI

SEQ ID NO: 178729 - protein, 154 aa, Glycine max
  Clone ID: PAT_MRT3847_132409C.1.pep
MHENMLKVELIENKLSDVQKLREDTTSSYPPVSWEDWLGSTNTDNIQGNELNLELLNVPKEVVLQDLNSTLPTQLQCVELTNMNSNLLELVPKIKEDQPNVTPDSSMTVNSKSDLDNSLILYQEMIMELFTSRDKMEQQLLQIANTVYGMLTMK

SEQ ID NO: 178730 - protein, 77 aa, Glycine max
  Clone ID: PAT_MRT3847_13240C.1.pep
YLMKTQYGYHMGRGEGGLLDLQKSNSITYERSFNAIDMNTLQICNCSVCCHYLAHIPYHIHYDECEHVTMQSYLFWH

SEQ ID NO: 178731 - protein, 50 aa, Glycine max
  Clone ID: PAT_MRT3847_132410C.1.pep
HVVLLSQWTSLWKKRMMSFLLPCKTGQQGSENDPVGFYEGLTPQIHISRS

SEQ ID NO: 178732 - protein, 240 aa, Glycine max
  Clone ID: PAT_MRT3847_132411C.1.pep
MASDETMNFHSCSLHEDDFDDDDDDHPHNLSRLSVCTGSTFGVDDDVDNLASMCVSHLSIESFDADGELSSDSENELGSCYSLPSTPPRMRKQLKDYASDNGNEITNKSDPRRRRRSFRRERWGFEKTKIRKEEGLSGDSDQSGVMLITRPKGGIRSLCMDLEEVKACRDLGFELEHERMLEIPSRLSFSNSTLDTSSGSNSPIANWRISAPGDDPRDVKARLKVWAQAVALASASKYGT

SEQ ID NO: 178733 - protein, 143 aa, Glycine max
  Clone ID: PAT_MRT3847_132412C.1.pep
ATQAFEDAVSLASCLQIGGKKNIAEAVNVHKTLRFTRTACAQKIGFANAELLQKTDWAQVKIDPRKSSPRLPKWIWEHDAERYAHDNYQKCVENLQNGVRMEDDELIPPNYPKGYKFEPWSIDEIMGDLKEGREVDLGAGEWL

SEQ ID NO: 178734 - protein, 105 aa, Glycine max
  Clone ID: PAT_MRT3847_132413C.1.pep
KITPEKFSKGDRGKPVWKVAPWKKPPLRLLWGGIHALEWGGFPKKLGPLTPLKPYARKGTNPGKREWVVPKKNVKRGVEKFIGQNLYGKTLFPNQEGAHKFLKGG

SEQ ID NO: 178735 - protein, 67 aa, Glycine max
  Clone ID: PAT_MRT3847_132414C.1.pep
HTHLLLMTSIHDHDILSSIICSRYCIKRIFTISSKTRSRRHVQVHAGSTTSQSQFEDLTGVCLYPIA

SEQ ID NO: 178736 - protein, 71 aa, Glycine max
  Clone ID: PAT_MRT3847_132415C.1.pep
MASLLCQGKSSWPEVVGTNGVVAVEKIERENDNVRARLVGEGSMVTMDFWCNRVWVWVDKIGVVTRVPKIG

SEQ ID NO: 178737 - protein, 110 aa, Glycine max
  Clone ID: PAT_MRT3847_132416C.1.pep
MSASIQLLRLVSRPRGSKPDTVTVHLNIYDLTRINGYAYWLGLGVYHSGVQVHGLEYGSRAHEHDTTGIFGVQPIHCPGFTFRKSMFIVTTYLCPKDVRAFMDKLAHDYF

SEQ ID NO: 178738 - protein, 244 aa, Glycine max
  unsure (1)..(244): unsure at all Xaa locations
  Clone ID: PAT_MRT3847_132417C.1.pep
MSSVYVLEPPTKGKVVVNTTRGPLDIELWPKEAPKAARNFVQLCLENYYDNTIFHRIIKDFLVQSGDPTGTGTGGESIYGGVFADEFHSRLKFKHRGIVAMANAGTLNSNGSQFFITLDRCDWLDRKHTIFGKVTGDTMYNLLRLGELETDKNDRPLDPPKILSVEVLWNPFEDIVPRTLQKLQIEAKADTKNXXSXEKKXXXKLNLLSFGEKXXEEEXELLGEPNIRTXXVLEQPRLLRKLMN

SEQ ID NO: 178739 - protein, 313 aa, Glycine max
  unsure (1)..(313): unsure at all Xaa locations
  Clone ID: PAT_MRT3847_132418C.1.pep
MAASSACLVGNGLSTRGNRITLKKDFNGRRYLYSSWRFSLLNNNKASKAFSIKASLEQRQEEGRRGFLKLLLGNLGVGLPALLGSGKAYADEQGVSSSRMSYSRFLEYLDKDRVKKVDLYDNGNTAVVEAVSPELGNRSQYVRVQLPGLNQELLQKFREKNIDFAAHSPQEESGSLLANLIGNLAFPLLLIGGLFLLSRRSGGMGGPGGWXPLAFGQSKAKFQMEPNTGVTFDDVAGVDEAKQDFMEVVEFLKKPERFTAVGARIPKGXVIVDGPPGTGKTLLSKAIACEAGVPFFSISGSEFGEMFVGVVLL

SEQ ID NO: 178740 - protein, 60 aa, Glycine max
  Clone ID: PAT_MRT3847_132419C.1.pep
KITLSIYINNRGYVTYFWCLCTFFVEIFVASKDSKDSLLITINNKLVWVVLSSNPLEYMS

SEQ ID NO: 178741 - protein, 66 aa, Glycine max
  Clone ID: PAT_MRT3847_13241C.1.pep
LGSKSPFLFYHWFSWDTYFNPQFSSSARTRWSTDTVKTSREISPMAQRHIERPYFTLCCAVTAAAA

SEQ ID NO: 178742 - protein, 195 aa, Glycine max
  Clone ID: PAT_MRT3847_132420C.1.pep
RGLPLQQNTINGLNSKNRNSHSSFAFGKKAEDSFFSDVNGDTDEMYDELINNYGKVVFSRKDKKPASAEIDDDAESLSFAVELATVASEVKAGDIKVLFVKPLVYWTRFFIIATAFSRPQIDAIGSRIRDRAEKKYGKIPTGDTKPNSWTLLDFGDVVVHIFLPSQRAFYNLEEFYGNATPVELPFENQPPPFRI

SEQ ID NO: 178743 - protein, 70 aa, Glycine max
  Clone ID: PAT_MRT3847_132421C.1.pep
NFWGRPAHFKNFGRSFQTLHFFFSPKKFENLKMLPPISIKTFSPWVITTPLSNKNFYLPHFVFLQIKNGK

SEQ ID NO: 178744 - protein, 105 aa, Glycine max
  unsure (1)..(105): unsure at all Xaa locations
  Clone ID: PAT_MRT3847_132422C.1.pep
XKXFXXXXAXKXGXXXXLWXRPXXXFRXYGXXRXXCXXXIGPXXKGXXXXVLAKXXXXXSXXXVXXXXGXPLGXXXNIPXAHXXYPXXLYKHLSNSVLXGSXXEX

SEQ ID NO: 178745 - protein, 58 aa, Glycine max
  Clone ID: PAT_MRT3847_132423C.1.pep
KNIINPTSENNFPQIKPLKGKKKFFSKKNIIGIKFNFLPGEKKKSPPKRKSFKKNPLF

SEQ ID NO: 178746 - protein, 61 aa, Glycine max
  Clone ID: PAT_MRT3847_132424C.1.pep
IPPKINGCTSLRFNKFTHFTPQKFKKPYFLAPKDVLQPIQMANNKMKKEQYFCDHTPASPD

SEQ ID NO: 178747 - protein, 233 aa, Glycine max
  unsure (1)..(233): unsure at all Xaa locations
  Clone ID: PAT_MRT3847_132425C.1.pep
MERKIIDFDQGWDYMQKGITKLKKILEGAPETPFSSEEYMMLYTTIYNMCTQKPPNDFSQQLYGXLGAVGLTCFRDSFYMEVRVNARKAVIALIDKEREGEQIDRSLLKNVLDIFVEIGMGEMDQYEQDFEVHMLEDTADYYKSKAANWIEIDSCPDYMLKAEDCLRRERDRVSHYLHSSTEQKLVEKVQQEVLVIHANQLLEKENSGCHALLRDDKXVEDLSRMYRLYHKIP

SEQ ID NO: 178748 - protein, 390 aa, Glycine max
  unsure (1)..(390): unsure at all Xaa locations
  Clone ID: PAT_MRT3847_132426C.1.pep
MERKIIDFDQGWDYMQKGITKLKRILEGAPETPFSSEEYMMLYTTIYNMCTQKPPNDFSQQLYDKYKDAFDEYINTTVLPSLREKHDEFMLRELVQRWLNHKVMVRWLSRFFHYLDRYFISRRSLAGLGAVGLTCFRDSVYMEVRVNASKAVIALIDKEREGEQIDRSLLKNVLDIFVEIGMGEMGQYEQDFEVHMLEDTADYYKSKAANWIEIDSCPDYMLKAADCLRRERDRVSHYLHCSTEQKLVEKVQQELLVTHANQLLEKENSGCHALLRDDKVEDLSRMYRLYHKIPKGLDPVANVFKQHITGEGTSLVQQAEEATSNQTTNGSGFQEQVLVRKFLEXHDKYMVYVNDCFMNHTLFHKALKEAFEIFCNKTVAGSSSAELLST

SEQ ID NO: 178749 - protein, 63 aa, Glycine max
  Clone ID: PAT_MRT3847_132427C.1.pep
NRHVRGRKCTLERWGKRSQRRTDFRQPHGGGERSSWGHAGPRICEFNIDGPCQLNLEKGEKQA

SEQ ID NO: 178750 - protein, 48 aa, Glycine max
  unsure (1)..(48): unsure at all Xaa locations
  Clone ID: PAT_MRT3847_132428C.1.pep
SKERAWPFFLQDLHRTRRFNXPYRQHSLGXXXHXSIXXXXXXXIXRIX

SEQ ID NO: 178751 - protein, 82 aa, Glycine max
  unsure (1)..(82): unsure at all Xaa locations
  Clone ID: PAT_MRT3847_132429C.1.pep
IFLLFLFSFGSSTTPTTSWRKKVREPCQKXVFYFHDIIYNGHNSENATAAIVGAPTWANRTILAGQNHFGDSPQVGRAQGFY

SEQ ID NO: 178752 - protein, 82 aa, Glycine max
  Clone ID: PAT_MRT3847_13242C.1.pep
SEPVQFVVGHLREQIVQVLGGPQDALWKSYWKDASSMIKFFWNDVATSISRANALDSTLLNDAYKAEGQSYADIISFTLRQA

SEQ ID NO: 178753 - protein, 159 aa, Glycine max
  Clone ID: PAT_MRT3847_132430C.1.pep
YGCEKTTEGIPVNDVITAGPRPSSFVQHVTIMAHFSLSPLSCAPSPLPPRRRIFLSPPRAAASSATDVVSTSTSTSSSASNFAPKVVVTRERGKNAKLIAALVRASVHSLHISHLRFVFLQLHCNVLNLSHSNSNQLVVPFFFFRVSFSFFCYFFLQYE

SEQ ID NO: 178754 - protein, 139 aa, Glycine max
  Clone ID: PAT_MRT3847_132431C.1.pep
VDLALSSEGVGGTIIHSGPTLANFAERAYEIIKEAFVRKIKGYQLVEGLPPLKPCCNVSGIEKTELPDFGILFADEAVWNFPVENYFIWIDPEVVCLAILGNPRSALSIIGNYQQQNFHILYDMKKSRLVYAPMKCADV

SEQ ID NO: 178755 - protein, 74 aa, Glycine max
  Clone ID: PAT_MRT3847_132432C.1.pep
AGGISWAAHCRCINVKNSVGYGIFLGYASALYVPFAVGQYSFLVCPCCAHCSSVGCTTNANTKSRGFTYYHVGR

SEQ ID NO: 178756 - protein, 66 aa, Glycine max
  Clone ID: PAT_MRT3847_132433C.1.pep
KHGNRDSSLVERVSQRMPCASRQAIVVVHLLFNARIAVFLFAVKLISYYLVSHLCVPCRVFADAWS

SEQ ID NO: 178757 - protein, 115 aa, Glycine max
  unsure (1)..(115): unsure at all Xaa locations
  Clone ID: PAT_MRT3847_132434C.1.pep
TTCLMKNTKKRGHVSAGHGRIGKHRKHLGGRRNAXCMHHHLILVYMNNPWFFGGVRMRYSHMLRLTFYSMMLNICKLWILFTLDVKDDASNENKAPVICVTQILFFKGVGKGVMT

SEQ ID NO: 178758 - protein, 55 aa, Glycine max
  Clone ID: PAT_MRT3847_132435C.1.pep
MDRRQELMGDYSDETLVDDAIATSRNGRHKRQAWSEWNGVLGENNDSFVCWLWEH

SEQ ID NO: 178759 - protein, 63 aa, Glycine max
  Clone ID: PAT_MRT3847_132436C.1.pep
YNKSQLLYSCEDQLQNSLFMGKQRLHYILTLEDLKSHTGLSTIVGGGTSYNVFAKNNYNYNSG

SEQ ID NO: 178760 - protein, 39 aa, Glycine max
  Clone ID: PAT_MRT3847_132437C.1.pep
AKYDLRVNIPPARVLAGEFSTRAVAPQVLEKEKYQKFTL

SEQ ID NO: 178761 - protein, 72 aa, Glycine max
  Clone ID: PAT_MRT3847_132438C.1.pep
FSGCMSCEMTPGLCYIELSPVQQRKGTSLYCLACGESPERNCFLLPERLPDFDLPKRILFFLVGVRKTRNIL

SEQ ID NO: 178762 - protein, 112 aa, Glycine max
  unsure (1)..(112): unsure at all Xaa locations
  Clone ID: PAT_MRT3847_132439C.1.pep
RVEGSEALAAYRADHTDREIDVXRKRARLXIEALTYRGGHHSTSDDPTKYRGTDEIEYWQTAGNPANTSKEWXHRTGXGNDKDELELRGDATKQITHATRAAQIAQKPPLQD

SEQ ID NO: 178763 - protein, 78 aa, Glycine max
  Clone ID: PAT_MRT3847_13243C.1.pep
ISNCTYLPFSRFLLITPSPYIYYYLCHHTIHFPIQLLRLNNYYNLSSFLYVPNIIPYFYTHTKHLSFQILNQNYHCQH

SEQ ID NO: 178764 - protein, 167 aa, Glycine max
  Clone ID: PAT_MRT3847_132440C.1.pep
QKDSFGFSLIQNTLKMNGESLEESANGLSRKGLKQLNEIFGLSQLSAEKQNVKAQNHAESERSQKAENEVQTLKKVLEDIQSDKDSIFLQHQKSLEKLSEMERELNKAQKDAGGLDERASKAEIEITVLKEALAELKYEKDAGLVQYKQCVERIASLETMLSLAQMD

SEQ ID NO: 178765 - protein, 64 aa, Glycine max
  Clone ID: PAT_MRT3847_132441C.1.pep
QKIAVNTVSVGQSIISPKCLTVIRRSQLLSICSSQALCSPEDREYLNHLCSTHASDAWATGSAA

SEQ ID NO: 178766 - protein, 120 aa, Glycine max
  Clone ID: PAT_MRT3847_132442C.1.pep
FCFVYLFFLVGFFFVLWGKTKNVIFDREETTLYNPYFSYLTKTGNYFFRMATSIFFGGEIFLTYTGVLLGENFCFGGKTAIPIFSELPKLRKNLLPVLSDGTLGKILNLPFPESIHECRQ

SEQ ID NO: 178767 - protein, 127 aa, Glycine max
  Clone ID: PAT_MRT3847_132443C.1.pep
ARGLSLHFLFSMFCHCSTVKRLTLDLVGRTEQVDVAEFGITLLDCFPNITYLNLGPGAWHVMENSFSWGGLKDGIGMKMIKELIAHLVVHEMGLPLHLFPLFWIKALNYLMFHCSSTVMLIHILLAA

SEQ ID NO: 178768 - protein, 230 aa, Glycine max
  Clone ID: PAT_MRT3847_132444C.1.pep
MKLKAVPWWHNWLVVKAGSSHSSLMVRKKQTQDSESTPPRITSNVKQNLRFLKLWKSFQNRNSSTPRPSTSYRKKKVEKEDDVVDTDLYRDPTTSLYYTNQQGILDNAVPVLLVDGYNVCGYWMKLKKHFVKGRLDIARQKLIDELLTFSMLREVKIVVVFDAMMSGLPTHKEDFAGLDIIFSGETCADTWIEKEVAALKEDGCPKVWVVTSDHCHQQAAHGAVCFLPIN

SEQ ID NO: 178769 - protein, 56 aa, Glycine max
  Clone ID: PAT_MRT3847_132445C.1.pep
HNGGAPLLITPSWWCAAMIMPLHVFLSPLCNSCCFSHSPIPPNLQVSFLCCSSLRQ

SEQ ID NO: 178770 - protein, 55 aa, Glycine max
  Clone ID: PAT_MRT3847_132446C.1.pep
FIGMAVGGQDVICVKQKHSSKVPPGDLRRHLEDLGDILFSDLRSPSQQQRNTPEG

SEQ ID NO: 178771 - protein, 128 aa, Glycine max
  Clone ID: PAT_MRT3847_132447C.1.pep
VAKQKLLRGAFLHTNQRRRERERERGDTDTKETEKATHKKKEVQIRSLVLFFHSYLFYFILFFFLSAIASHQARFFLLTIFISALVYSSILFFFFGISSGFPLFLNLDAYFLFYLLNLQAILKIRSNS

SEQ ID NO: 178772 - protein, 47 aa, Glycine max
  Clone ID: PAT_MRT3847_132448C.1.pep
WLKWEESEGDFPALKSLNLITKMRGRGYEISWILPLGKSVQFALSGR

SEQ ID NO: 178773 - protein, 236 aa, Glycine max
  unsure (1)..(236): unsure at all Xaa locations
  Clone ID: PAT_MRT3847_132449C.1.pep
SKRQNLLQHLSEAWRCWKANIPWKVPGLPVPIENMILRYVKSKADWWTNVAHYNRERIRRGATVDKTVCRKNLGRLTRLWLKAEQERQHNYLKDGPYVTPEEAVAIYTTTVHWLESRKFSPIPFPPLSYKHDTKLLILALEKLKESYSVAVRLNQLQREELGLIEQAYDNPHEALSRIKRHLLTQRAFKEVGIEFMDLYSYLIPVYEIEPLEKXTDAYLDQYLWYEXGDKRHLLPN

SEQ ID NO: 178774 - protein, 96 aa, Glycine max
  unsure (1)..(96): unsure at all Xaa locations
  Clone ID: PAT_MRT3847_13244C.1.pep
SPRIKTNGPIWNLDLTKLTTQNQVSSLFHLWRSEHGRVYHNHKEKAKRLEIFKNNLNYIRDMNGNRXSPHSHRLGLNKFADITPQEXQQKYLQAPK

SEQ ID NO: 178775 - protein, 38 aa, Glycine max
  Clone ID: PAT_MRT3847_132450C.1.pep
MEFISWCSHVLHSREKFGEMHARLWWEENRARIHEQYL

SEQ ID NO: 178776 - protein, 52 aa, Glycine max
  Clone ID: PAT_MRT3847_132451C.1.pep
TETKIARTLTRLTLSMTNNKPTYNCMLQPKTHIMKDSVMNLVVRVSKHSCIT

SEQ ID NO: 178777 - protein, 144 aa, Glycine max
  Clone ID: PAT_MRT3847_132452C.1.pep
YGVVPEMEHYACIVDLLGRVGRLDEAVEFINKMPIEPNEMVWQTLLGACRIHGNPTLGETAAQKILSARPQHPSTYVLLSNMYIESGLYKDGVNLIDTMKERGIKKEPGYSWVSVRGEVHKFYAGDQMHPQTDKIYAMLEELTS

SEQ ID NO: 178778 - protein, 367 aa, Glycine max
  unsure (1)..(367): unsure at all Xaa locations
  Clone ID: PAT_MRT3847_132453C.1.pep
LGSVRFISTTLVSLSLGGCRAITALELTCPNLEKVILDGCDHLEKASFCPVGLRSLNLGICPKLNILSIEAMFMVSLELKGXCGVLSEASLNCPLLTSFDASFCSQLTDECLSATTVSCPLIESLILMSCPSIGLDGLRSLRWLPNLTLLDLSYTFLVNLQPVFESCSQLKVLKLQACKYLTDSSLEPLYKGALPVLQELDLSYGTLCQSAIEELLSCCTHLTRVSLNGCANMHDLNWGCSRAHTAELPGVNVLPIASSPENVLELSEQPIRLLQNLNCVGCPNIRKVFIPSTAHCSRLLFLNLSLSANLKESCNINEEAVEAAISKCTMLETLDVRFCPKISSMSMGRLRAACSSLKRIFSSLSAS

SEQ ID NO: 178779 - protein, 176 aa, Glycine max
  Clone ID: PAT_MRT3847_132454C.1.pep
QPTLSLLNSLLFSVTTAFERAAEEKSLLLNKIRDINELSRQEVDEIINMCVRQDSVSSSDNIHKRRYIAMVEMCRVVASRDQLIILLLPLSEHVLNIILIHLQESSVALDSTLSTKTIAYGAKYDAQQDVAMLYGKLVPTLERLELLSEEKVGHNLKVFRRLATSAKDLAIQKLIV

SEQ ID NO: 178780 - protein, 171 aa, Glycine max
  unsure (1)..(171): unsure at all Xaa locations
  Clone ID: PAT_MRT3847_132455C.1.pep
IHDLCAYGLKPGFLGSRILGTIPXSISQQTVWNQMATGRTPWNFDPNKLSYCQFTIDPLGGGILAVKTGDWITLIQNCPISNLLRVAAWKKGCVTAKIVMSGNAAVKRSDWASLVQVCFTNSIITEHFDACKRTKSEPHSWELILPIEECGPNHGFQMWSSERAKKTXWHL

SEQ ID NO: 178781 - protein, 80 aa, Glycine max
  unsure (1)..(80): unsure at all Xaa locations
  Clone ID: PAT_MRT3847_132456C.1.pep
MESDEDDFVFYGTPIEREDDSISRKKKAIAESSGQLRALPAWKQEVRDEEGRRRFHGAFTGGYSAGYYNTVGSKEXWAPQ

SEQ ID NO: 178782 - protein, 84 aa, Glycine max
  Clone ID: PAT_MRT3847_132457C.1.pep
FVFGFFVFTCPKFNLKRGGGYFFNKHENLPKIHPATNQEQQYRQKITVHINKPKRRTTPGRPPNPSPTKKTQNNATNDDEEKPL

SEQ ID NO: 178783 - protein, 106 aa, Glycine max
  Clone ID: PAT_MRT3847_132458C.1.pep
MNILTVRAIEETPKLLHGTIEATIFNATPYSPLFPFNRFSWFQCICANGNPAYVTIKIDRQKFAKTSQESNRVWNQTFQIQCAHPADSCITITLKTSRSSVLGKFH

SEQ ID NO: 178784 - protein, 108 aa, Glycine max
  Clone ID: PAT_MRT3847_132459C.1.pep
NLLRKPLLGKGKKRAFGFGTNYLFLQEGNPSAPMAKDYTTILGPHLPLGGPYWGGGIKNARNAKKKNFFKTSFAQLFGREAISIWHLCLPLGHDQKHIWGSKRKPSSN

SEQ ID NO: 178785 - protein, 90 aa, Glycine max
  Clone ID: PAT_MRT3847_13245C.1.pep
GHVTWLLGQSHARLRPSEAWDKARGPWRSQLSLPSPACCPNEILRCWAVSPFQECWAPSLARQDDCQEGSESVKPSIQFGFFHIDRFYMR

SEQ ID NO: 178786 - protein, 60 aa, Glycine max
  Clone ID: PAT_MRT3847_132460C.1.pep
LPLVRPHTGRGHIGALPVTSEAGQHEGTYPQKQQLGAADLLKYHQHHYEMTSHRGHTVSL

SEQ ID NO: 178787 - protein, 108 aa, Glycine max
  unsure (1)..(108): unsure at all Xaa locations
  Clone ID: PAT_MRT3847_132461C.1.pep
ADQTEKAFLKHLXDALSLKKTDKAKRPAMGGNRSWISIELVIKTSSEVDHRTYIDKKSTYTGNVYIRGSILAGTCYSAMKNRTITAMRNYLHAIKKYHEDETQHSNIS

SEQ ID NO: 178788 - protein, 85 aa, Glycine max
  Clone ID: PAT_MRT3847_132462C.1.pep
VFVGHKGMILSLAMSPGGFYMVSSDEDGIIMMWDLSSSRCLTPLIGHTSCVWSLAFSYEGSIIAFGSADCTVKLWDVNTSTKVSR

SEQ ID NO: 178789 - protein, 203 aa, Glycine max
  Clone ID: PAT_MRT3847_132463C.1.pep
MKASTLPLYPTPLPKTSLSASHFSLHLLPMASIPTLSLSNPNNHCTLPPTSLFGTRITLLRATSSSRSLPNTNCRATSATVSFSLPTPKPLSDTPEKTPKWSARAIKSYAMGELEARKLKYPNTGTEALLMGILVEGTSKAAKFSRANGITLFKVREETVELLGKSDLFFFSPEHPPLTEPAQKALDWAIEEKLKSDLGYSRF

SEQ ID NO: 178790 - protein, 66 aa, Glycine max
  Clone ID: PAT_MRT3847_132464C.1.pep
KGLEMGSPTVQPRAREREHLPKTSPYQPTTLALTTKSYVERPRTSQRNMEITSRTRNCGNHATLLE

SEQ ID NO: 178791 - protein, 137 aa, Glycine max
  Clone ID: PAT_MRT3847_132465C.1.pep
PRFWPRVQDCVGLVWHRHTFIVRTVRTGTSVWCLVVASRQRGTWFANWDKKMNLARYSLAALFAPIRCNVVKSDGRYTFGLSHRNTCIYRLFSTHAHKRQLQEKPEEDAIYYLTAWFSVATMIECTDHHYMTLARLI

SEQ ID NO: 178792 - protein, 111 aa, Glycine max
  Clone ID: PAT_MRT3847_132466C.1.pep
VAPIGRVVTETFPNRFPSGEVKPAHAGCGLFYGSSYVSAPEASCTPSLSCSRSGVLVTSMAFSLCRQVKDKWGSRRTSWCELYTDPLARCVHPPCEPQVTSAPFLIGSPCD

SEQ ID NO: 178793 - protein, 106 aa, Glycine max
  unsure (1)..(106): unsure at all Xaa locations
  Clone ID: PAT_MRT3847_132467C.1.pep
ATLMDTYTVAYGVPRSKWLDLAGHQKDLNAPADEIDKLVIDWLDEHLQNKPLGEYVESDXHFMHVMISAPTSSQVDWSDADTISSATTLKSILSGTDTATAILTRA

SEQ ID NO: 178794 - protein, 86 aa, Glycine max
  unsure (1)..(86): unsure at all Xaa locations
  Clone ID: PAT_MRT3847_132468C.1.pep
WRXRRXKTLYVXPIRGVVVGGATRGECGGGXSGELGRXXAVKXMHXKKYXDKGWEXKGWXFXLXPHYYGLFQXXIXPXXXQGKXXV

SEQ ID NO: 178795 - protein, 289 aa, Glycine max
  Clone ID: PAT_MRT3847_132469C.1.pep
MASVFSACSGSAVLFYSRNSFPSKGSFIHLKRPLSANCVASLGTEVSVSPAVDTFWQWLKEEGVVSAKTPVKPGVVPEGLGLVALKDISRNEVVLQVPKRLWINPDAVAASEIGKVCSGLKPWLAVALFLIRERSRSNSLWKHYFSVLPKETDSTIYWSEEELSELQGTQLLNTTRSVKQYVENEYRRLEEEIILPNKKPFPSPLTLDDFFWAFGILRSRAFSRLRNENLVVIPFADFINHSARVTTEDHAYEIKGAAGLFSWDYLFSLRSPLSLKAGDQVYIQYDLNK

SEQ ID NO: 178796 - protein, 202 aa, Glycine max
  unsure (1)..(202): unsure at all Xaa locations
  Clone ID: PAT_MRT3847_13246C.1.pep
MLSTFGFVSSSDMSDVSRRKMTRTTRIHIMALDGIVNVNSLFTLALFLGITTTSTTNTLIGEDDAACAAGTSMSEGLIAFHVYSFSSFLFSSLIALALKNVINFSKDVHEGDAVLDNNNNNWIHSVAKINTVVLRFGTLVSAFGSVFGCGFLVMALVDLVQIKLGTFTCGSPHTFAAVAPLLVLVPTALXXYVVLVIYAFTR

SEQ ID NO: 178797 - protein, 55 aa, Glycine max
  Clone ID: PAT_MRT3847_132470C.1.pep
HTYTFHIKSYSKITLLYRYFEITIVEYRKSDSGIACLDILNILMTSIINNILKRT

SEQ ID NO: 178798 - protein, 216 aa, Glycine max
  unsure (1)..(216): unsure at all Xaa locations
  Clone ID: PAT_MRT3847_132471C.1.pep
IRYDPVHRTNLDVMDKIGKEEEDRMVEFRKDLFVLLRNVGRVAPDVTQLFIRNSLASAVSRSSDSNVEEVEGALSLLYALGESISEEAIRTGSGLLSELVLMLLSTKFPCHSNRLVALVYLETVTRYIKFIQDNTQYIPMVLAAFLDERGIHHSNINVSRRASYLFMRVVKFLKMKLVPFIETILQSLADTVAQFTIMNYSTEELXGQEDGSHIFE

SEQ ID NO: 178799 - protein, 124 aa, Glycine max
  unsure (1)..(124): unsure at all Xaa locations
  Clone ID: PAT_MRT3847_132472C.1.pep
AREASDKHRSTPDIRTGDSVQPKREVPVNKGRLSIXKGVVIAKLQCWYLLNRWLSNIPHGTRVXIVFPLYSPIIKEIRVVTLLKVSRARLYYVTDKLVRLSAPKLGLNLRCSWRFSLTESCPPG

SEQ ID NO: 178800 - protein, 55 aa, Glycine max
  Clone ID: PAT_MRT3847_132473C.1.pep
KCFKEYISFIHIPLLGKPTCGLMLELGAVGSNPPGTLCQFLNPPGPNTLENYIFM

SEQ ID NO: 178801 - protein, 65 aa, Glycine max
  unsure (1)..(65): unsure at all Xaa locations
  Clone ID: PAT_MRT3847_132474C.1.pep
KLWMSKFPEHFQDICVRLTSLIHPALSCVKFVAINKDPVSVSIVPTQQPTHLVYVCPXLLSSAQL

SEQ ID NO: 178802 - protein, 59 aa, Glycine max
  Clone ID: PAT_MRT3847_132475C.1.pep
LIPNNKEHISSKNLCTHPFISLQGPAYKNDPPYLDRIIGYLVLPLYQERGFSSSLLMNL

SEQ ID NO: 178803 - protein, 154 aa, Glycine max
  Clone ID: PAT_MRT3847_132476C.1.pep
MEGNKQKGTSSPFTSELFGSKESRPSSSSGIFGSIFSPPSSKVLGRESLRSELSGKIANETWSSKICIQDNFSKGNGSEAQNAVNKDMSSIYQDQRVQPCHLSSSIYYGGQDIYSSPQSTQNEGFNSMHCRNVDGEDGSEFASRGDWWLGGLYY

SEQ ID NO: 178804 - protein, 181 aa, Glycine max
  Clone ID: PAT_MRT3847_132477C.1.pep
VIPEFPFQVWSLRPRDRGMLGKGVSVGTFFCTSCWNNGDELSVVCLKNLNPVLPAMPRLHQIHALIEHYGPTVFFHPEEVYLPSSVDWFFNNGALLYRKGVSTGEAIDAAGSNLPGGGRNDGEFWIDLPSDDKRDLVKHGDLKSAKLYVHEKPALGGTFTDIAMWGVCNFKGPCTLKRGIT

SEQ ID NO: 178805 - protein, 153 aa, Glycine max
  Clone ID: PAT_MRT3847_132478C.1.pep
MEGNKQKGASSSFTSELFGSKESRPSSSSGIFGSIFSPPSSKVLGRESLRSEMSSKIANETWSSRIGIQDNFSKGYGSEAPNAVNKDMSSIYQDQRVQPCHLSSSIYYGGQDIYSNPQSTQNEGFNSMHRNDGGEDDSEFASRGDWWQGGLYY

SEQ ID NO: 178806 - protein, 108 aa, Glycine max
  unsure (1)..(108): unsure at all Xaa locations
  Clone ID: PAT_MRT3847_132479C.1.pep
PNGSKRTTKGEPHNSSTGIVRLSFLGVFLHVAIGVTVFMTSGSFRGTTTFRPVDAVYFTMVTLGTIGYGDIVPDSTFTKIFTCGFILEGFXFLGLLLNGLVAYICDTH

SEQ ID NO: 178807 - protein, 95 aa, Glycine max
  unsure (1)..(95): unsure at all Xaa locations
  Clone ID: PAT_MRT3847_13247C.1.pep
VVLPELPTCDPHLSDGGKMGIXIRASFTFLLLIPCSFCWWKRXRQNILRGQQMAARAAPYAKARTHFSRDIQMARHHNNYGKTSTAAENGPILLS

SEQ ID NO: 178808 - protein, 50 aa, Glycine max
  Clone ID: PAT_MRT3847_132480C.1.pep
IFFWLQDKYSTSVFYEQRGSGLTERSDIHFNKNHCMTDSGDRWKYILFFH

SEQ ID NO: 178809 - protein, 132 aa, Glycine max
  Clone ID: PAT_MRT3847_132481C.1.pep
TGFAAPPAKGTKFVKAQGPLGPPTFPNSTSKETAAQAGHHQSAWVAQEAPFFHYHCPFHKPKPNNNNNHSLVHKTCPQTNPLNLNRHNVSFQPKKLLHTLAVPPKQTQTLKCALFKHLPHESRVETEEKNSG

SEQ ID NO: 178810 - protein, 45 aa, Glycine max
  Clone ID: PAT_MRT3847_132482C.1.pep
AESRALKERNDIPRREGLSGKDLPPTNYHALKLEVGHTKEMTGEG

SEQ ID NO: 178811 - protein, 79 aa, Glycine max
  Clone ID: PAT_MRT3847_132483C.1.pep
LLTALICWKIIFNAFSSLRKKKTELHIPVPHRFRYVFVRFMIVKHGLNIDSNVRVSNVVLFLSLSFWADFDSVTSRVWA

SEQ ID NO: 178812 - protein, 90 aa, Glycine max
  Clone ID: PAT_MRT3847_132484C.1.pep
DLVGPACGVLRNLVGVEEIKRFMVDEGAVVTFIRLVRSKEEAIQVNSIGFILSIASGDELVRQMVIKEGGIRALLRVLDPKWSYSCKTRE

SEQ ID NO: 178813 - protein, 377 aa, Glycine max
  Clone ID: PAT_MRT3847_132485C.1.pep
ALSFGLVLSELYLLAVLLSSRLFWVAASSFGIAWLFGGRGCGPVFWGCCPGGWIWAVQFLPPIPARGIPASRLGTGLVSALQHPCLVKLHGCCVEGDQLLLVYEYMENNSLAQALFGNGASQLKLNWPTRHKICIGIARGLAFLHEESTLKIVHRDIKATNVLLDKDLNPKISDFGLAKLDEEDNTHISTRVAGTYGYMAPEYAMHGYLTDKADVYSFGVVVLEIVSGKSNTIHRSKQEALHLLDWAHLLKEKGNLMELVDRRLGSDFNENEVMMMIKVALLCTNTTSNLRPTMSSVLSMLEGKTMIPEFVSDPSEIMDEMKLEAMRQHYFQKENERSETQEQNHSLSIEGPWTASSSSAADLYPVHVDSSYWEKRN

SEQ ID NO: 178814 - protein, 66 aa, Glycine max
  Clone ID: PAT_MRT3847_132486C.1.pep
ILPLWHSSERKETLSCAQAFIHMDQCGDKEDHEGLPLITPNMHGLFPFLLISMYQDVGTLSQDLLQ

SEQ ID NO: 178815 - protein, 63 aa, Glycine max
  Clone ID: PAT_MRT3847_132487C.1.pep
LGQCILTYTSYASICSIQMQTLCQLNSRFIELLKIRKQTLTIPEVHILEHTSISNHIYLLACK

SEQ ID NO: 178816 - protein, 250 aa, Glycine max
  unsure (1)..(250): unsure at all Xaa locations
  Clone ID: PAT_MRT3847_132488C.1.pep
MSIPIPHRQLFIDGDWKVPVLKNRIPIINPSTQHIIGDIPAATKEDVDLAVAAAKAALSRNKGADWASASGSVRARYLRAIAAKITEKKPELAKLEAIDCGKPLDEAAWDIDDVAGCFEFYADLAEKLDAQQKAHVSLPMDTFKSYVLKEPIGVVALITPWNYPLLMATWKVAPALAAGCAAILKPSELASVTCLELAEICKEVGLPPGVLNILTGLGPEAGAPLAAHPDVDKIAFTGSSXTGSKIMTAA

SEQ ID NO: 178817 - protein, 124 aa, Glycine max
  Clone ID: PAT_MRT3847_132489C.1.pep
NWGETRVKMFPGEKFFFSQIPPQYTTGKFKGKTWGGQRGGPPQFFGVGLPARFQGGNPGAPFELKNCPPPGEGGFFFWPPGGFFFLQGKGAHVFGLFPACPEKSEKRGSPFVFPPRGKNLFGGG

SEQ ID NO: 178818 - protein, 216 aa, Glycine max
  Clone ID: PAT_MRT3847_13248C.1.pep
MPPSKRSKHRRMGSNTSTEEKSDFEARMKIPAELVKGPWKKQEDELLASLVEEHGPKDWSKIANKMAQLGHVRMGKQCRERWFNHLSPEVRKESWTAEEDRVIIESHRQLGNKWTAISRLLNGRPANAIKNHWNSTLKRQVQFGAEIGSGSPRPGKRQRATVGHQPRKKRRLDVSSYESDEDFDSTSDEMDDDDSELVTYESRNEDQEDQRTFATS

SEQ ID NO: 178819 - protein, 158 aa, Glycine max
  unsure (1)..(158): unsure at all Xaa locations
  Clone ID: PAT_MRT3847_132490C.1.pep
MSIPIPHRQLFIDGDWKVPVLKNRIPIINPSTQHIIGDIPAATKEDVDLAVAAAKAALSRNKGADWASASGSVRARYLRAIAAKITEKKPELAKLEAIDCGKPLDEAAWDIDDVAGCFEFYADLAEKLDAQXKAHVSLPMDTFKSYVLKEPIXVVALI

SEQ ID NO: 178820 - protein, 79 aa, Glycine max
  Clone ID: PAT_MRT3847_132491C.1.pep
RLFTMATRFLLHFLFTRSTHSDRGLSAVTACFACGSEELCTCSHPDGSNCACPTAQPCPAKLKCTRHHVECESCLNKYL

SEQ ID NO: 178821 - protein, 69 aa, Glycine max
  Clone ID: PAT_MRT3847_132492C.1.pep
GWKGINPPAKSLKFLGAWLKKPVTAGFFATKFNQFCKILEIKKQRSILFPGENKVFDGVAKVAVHCCVC

SEQ ID NO: 178822 - protein, 170 aa, Glycine max
  Clone ID: PAT_MRT3847_132493C.1.pep
MGSKTRSFLALFLTINILFFALASACGTCPSPKPRHNKHKPVKPSPSGGSGGSGGSGGSGGSGGSGGSGGSGGSGGSGGSGGSSTSCPRDALKLGVCANVLNGLLNVTLGQPPVTPCCSLLNGLVDLEAAVCLCTALKANILGINLNLPISLSLLLNVCSRNAPRDFQCA

SEQ ID NO: 178823 - protein, 41 aa, Glycine max
  Clone ID: PAT_MRT3847_132494C.1.pep
TFVVQKTGVGLWFECLFNPPPDFFGLKKIKKGRPGEVELVG

SEQ ID NO: 178824 - protein, 88 aa, Glycine max
  Clone ID: PAT_MRT3847_132495C.1.pep
RLDIFVAPVILSGTKFCIFIFPGCICQRCGKTKSKKKILYDKYVSMLAIRDSHIDNHFRDKFVPLCHVSYYINADEQKLTVRYICPRN

SEQ ID NO: 178825 - protein, 114 aa, Glycine max
  Clone ID: PAT_MRT3847_132496C.1.pep
RVEHITVDRGKLAKIMADFEAWLKELESKLKEFEQRATREREVRQQLEEELLIYKNEVLEQHEKGFKKVVKQAGFFQKDLDLGLFDPFNCFWKVIMTEFDCQCFSKDLVNYPCI

SEQ ID NO: 178826 - protein, 92 aa, Glycine max
  Clone ID: PAT_MRT3847_132497C.1.pep
AHTRWVFSYQHNLFHIQWPTRNRSLDYLVKGHKLLSLVPKISNLSNIIINPNSFSLHIEQVSPPNFQNNHNIILIIREMLITNSLYILFQTN

SEQ ID NO: 178827 - protein, 48 aa, Glycine max
  Clone ID: PAT_MRT3847_132498C.1.pep
ETQSFFPHSYPSVLLATWRRRRRFAFRTSPFQPSLRWNTKFKECRMNN

SEQ ID NO: 178828 - protein, 121 aa, Glycine max
  Clone ID: PAT_MRT3847_132499C.1.pep
MAEGEELRPDLLKNTPSNIARLEDVIEHSKARQKYLAHTSSSSDGGDVRWYFCKISLAPNELAASVPPTEIVGKSDYFRFGMRDSFAIEASFLLREEEMLSSWWREVMPNVEGPQRNDKDS

SEQ ID NO: 178829 - protein, 87 aa, Glycine max
  Clone ID: PAT_MRT3847_13249C.1.pep
TPSSLSNYFPTVLCNARQFNRTVINQNLLYAIHDSHRNDLRPLNSTDFDDMIHSGAYFAQKFQNDDPVLDLIDQKLLGRSPRSIVPG

SEQ ID NO: 178830 - protein, 51 aa, Glycine max
  Clone ID: PAT_MRT3847_1324C.1.pep
HPNSFIAEMWSYDFVQMLTITQKLSFFWLLCNESFCVIVTICNQNLFGPSL

SEQ ID NO: 178831 - protein, 73 aa, Glycine max
  Clone ID: PAT_MRT3847_132500C.1.pep
NRASKPREINPPVQGKRRFFKAFFPAPHMGFFPYFSTHAPPPHKVLGGPPLFYKKKGLGLFPTPLGFLSPPKF

SEQ ID NO: 178832 - protein, 94 aa, Glycine max
  unsure (1)..(94): unsure at all Xaa locations
  Clone ID: PAT_MRT3847_132501C.1.pep
LSLSLSFFDAFLQKHNXLTVIFCFFVCSXFSSPNXXMSSPGXPGGGXASXFFAGAGXFXGRSIPGATMXNPNAAASXTXNNXHXLYXTQQQQNL

SEQ ID NO: 178833 - protein, 126 aa, Glycine max
  unsure (1)..(126): unsure at all Xaa locations
  Clone ID: PAT_MRT3847_132502C.1.pep
LISLVCIKYKGVRFHGPPGCGRLVPIAXECLATSQSEVENASRDSETEANXRKIFCKSRQSAPCVXYFDELXSPPTSATKQCGAPPGGPEEFYSTLITXWMSARKPVLIAGATNTPDIIDPALAWP

SEQ ID NO: 178834 - protein, 132 aa, Glycine max
  unsure (1)..(132): unsure at all Xaa locations
  Clone ID: PAT_MRT3847_132503C.1.pep
VLFRCVSPLVSRSXLAPCPAGVPLRFLVALFLSPVCGPXLPVFFRLCALRALSRWGLISFVLLXXXSLLLEQPASALFFCPAFSPFPCRAPVSSGSACGLGSAARCPVLSGGVFRVVSGLSCXPEESGPVPA

SEQ ID NO: 178835 - protein, 73 aa, Glycine max
  unsure (1)..(73): unsure at all Xaa locations
  Clone ID: PAT_MRT3847_132504C.1.pep
KLSITPTGVETPYSINLLKQHRKEPYKPLYQLLEDKEXKIAPITLLGTTHTYITTTSTHIQLGPNKAQLPRAQ

SEQ ID NO: 178836 - protein, 116 aa, Glycine max
  unsure (1)..(116): unsure at all Xaa locations
  Clone ID: PAT_MRT3847_132505C.1.pep
DEAITGFKMHARGWRSIYCMPKRRAEKGSAPINLSERVNQVLGWGLSXEEILYSPQCPIWHGYRRGLKGHERFAYVNTTIYSDAMMAIVMYCTLPADCVLTNTVIITHNRNIGRIW

SEQ ID NO: 178837 - protein, 63 aa, Glycine max
  Clone ID: PAT_MRT3847_132506C.1.pep
FFFFFFFFFLVFFFVGRGELKLPWPWTRGNSCRVFNINASNVVNQKGKNVHPFALFPLLNNTT

SEQ ID NO: 178838 - protein, 73 aa, Glycine max
  Clone ID: PAT_MRT3847_132507C.1.pep
RYCRTNGPTTSDDYFALVVWSPVTSSLSFLSATFRTSRLTLSLVLGVPKQLILANPAITYLCGPWEVDGSSFS

SEQ ID NO: 178839 - protein, 84 aa, Glycine max
  Clone ID: PAT_MRT3847_132508C.1.pep
DSGTKKDSVEKSYSVMCQSPVSLLGGMTKHDITPDRDIPLLTCATVLILLKTESPSAWDLALKHAWSEVQNTFYHNDGSYHRPL

SEQ ID NO: 178840 - protein, 50 aa, Glycine max
  Clone ID: PAT_MRT3847_132509C.1.pep
VWSQILLINFLRTAFNLPKLGTRQHPLVPQLRVSGPDLFLVQRRQQIEPP

SEQ ID NO: 178841 - protein, 54 aa, Glycine max
  Clone ID: PAT_MRT3847_13250C.1.pep
MDQFQSQLGGGGMYQEFGAKNFMPYYVKTSYPTSFTTGYGYPKIITITDGLTDI

SEQ ID NO: 178842 - protein, 101 aa, Glycine max
  unsure (1)..(101): unsure at all Xaa locations
  Clone ID: PAT_MRT3847_132510C.1.pep
MYKKLLVDVGRRIVGLEMLNFEIDFNEKLREHYNLLRPKKELVDEQELHQEPFXALTSEKEEYAXCAFSYNWKRILVTHENTNIVITGEKFQCLTPTPWVN

SEQ ID NO: 178843 - protein, 180 aa, Glycine max
  Clone ID: PAT_MRT3847_132511C.1.pep
ENASTTDRTSREKGNILHVTPDKVEEGTPANPTSSHKQQKKAKKIIHRGSDRVRSVDTTELIDPSSELSGILAGKLPKSPTTRSSFAYDGSLSSYDGMDEPFPIQHSGSFDNTYTNANGVSEGRTRKGKGLVNSIYGGLETQHQSHMSNAKLHAKKDSRGNQNKVVDSTRNGHQRWMGTK

SEQ ID NO: 178844 - protein, 210 aa, Glycine max
  Clone ID: PAT_MRT3847_132512C.1.pep
SARVVSPLMQPITRWPFYAFLGGAMFCLLASSTCHLLTCHSQRLSYIMLRIDYAGIAALIATSFYPPVYYSFMCNPFFCYLYLGFITLMGIATIVFSLLPFFQKSEFRKYRASLFFLMGFSGVAPIIHKLILHKHQPEALQTTGYEILMGVLYGLGAAIYVTRIPERWMPGKFDIAGHSHQLFHILVVAGAYTHYHDGLIYLRWRDSQGC

SEQ ID NO: 178845 - protein, 49 aa, Glycine max
  Clone ID: PAT_MRT3847_132513C.1.pep
VTKKGLNCSLKMLSGDKAVESIKVLVVDISCFYQCLIWRQSRPLSREDG

SEQ ID NO: 178846 - protein, 125 aa, Glycine max
  Clone ID: PAT_MRT3847_132514C.1.pep
RERNHLPNPGMDDIEKPEKRSRDRHSERHRDSDEHRHHRSDRNHKRDHKSRDTEGSKDKDRAYERESSRSKVKRDEEREYSHSHKRKEREHSEDMDFLDNKIRVSDERRERRKFGDKVKKEEDDA

SEQ ID NO: 178847 - protein, 311 aa, Glycine max
  Clone ID: PAT_MRT3847_132515C.1.pep
MKRNCKNVNLGGGGKLGTACDWSEWFFRHIYNAVSVRASMATKALSFALSLNDLTNNHFSSNTPHTAAKVSVFTVKCSSSGGGERPWKNSDARLVLEDGSIWKAKSFGASGTQVGEVVFNTSLTGYQEILTDPSYAGQFVLMTNPHIGNTGINFDDEESIQCFLAGLVIRSLSISTSNWRCKKPLGDYLAERNIMGIYDVDTRAITRRLRQDGSLIGVLSTDNSKKDEELLHMSKSWNIVGKDLISGVSCKTPHEWVDKTKQQWEFSKVPGETFHVVAYDFGIKHNILRRLASYGCQITGVPCTWSASETL

SEQ ID NO: 178848 - protein, 66 aa, Glycine max
  Clone ID: PAT_MRT3847_132516C.1.pep
QSIDPQSCEVQALMVHNLFKLSLDDVATPKGSVLDLKISLSGGEKPAVPVEETILRSDLLGFSFTS

SEQ ID NO: 178849 - protein, 42 aa, Glycine max
  Clone ID: PAT_MRT3847_132517C.1.pep
RSNHRLLLNSLQWIDNMMYRKTPSLELRVNKQQSVTVQNELN

SEQ ID NO: 178850 - protein, 76 aa, Glycine max
  Clone ID: PAT_MRT3847_132518C.1.pep
RCAICPCQGSIVGSICHTYPCTIPNLTNPFLNLLLFSPGRLIQSIGPFSLLAFINHRLHLKGQPLPPHSKPLNTFP

SEQ ID NO: 178851 - protein, 41 aa, Glycine max
  Clone ID: PAT_MRT3847_132519C.1.pep
KAPNFPGIPHFVMHTHRNQLSHQSHKEGSNISQNQEGNILP

SEQ ID NO: 178852 - protein, 115 aa, Glycine max
  Clone ID: PAT_MRT3847_13251C.1.pep
EDHRRGYPSAASAERLKTHVHFPSRTTPSLLVIFTSGRGHRGKFFKKYKFGKILKIFKIFAAKLLAITFFTNAFFAASLLTAKFLGTSFLTLTTNLLIILGKGGNILRLLLKFLV

SEQ ID NO: 178853 - protein, 104 aa, Glycine max
  Clone ID: PAT_MRT3847_132520C.1.pep
VTRAKDGKQPMVYFRRRRIFKPAPISPHISERNHPSISASGSVAFDHMFGGVENVKNPIDNRVEVGGPLFFTYKAGVSNFFWDMESASFKFGFNFPMRLVSSDS

SEQ ID NO: 178854 - protein, 69 aa, Glycine max
  Clone ID: PAT_MRT3847_132521C.1.pep
CLSLKAQTHQQIMSGVDGLVTTTYSYLIYKILLTTHKLWNHTLLLYETTGFLMTRHINCQRLLKRTTNC

SEQ ID NO: 178855 - protein, 60 aa, Glycine max
  Clone ID: PAT_MRT3847_132522C.1.pep
PPRLTTACRRPQTGILSLDSFFFLVHNRTFSFYYFSTFFFFLQKKQFNSIKFLPNGFLRL

SEQ ID NO: 178856 - protein, 114 aa, Glycine max
  unsure (1)..(114): unsure at all Xaa locations
  Clone ID: PAT_MRT3847_132523C.1.pep
QEEQXLWKCVKYRAELSEQDIFVIPVGYSVVVNATLNLNLFVIGINAENNQRNFLVGSXDNVISQIPSXVQDLAFSGYGQAVEKLLKNQREFYFVDAXSKKKEEGNKGRKGSLF

SEQ ID NO: 178857 - protein, 88 aa, Glycine max
  Clone ID: PAT_MRT3847_132524C.1.pep
LDSLITDDLMQTGNSSHDEVEDVEDKLVPVSEELADQLNGMGHESEVDNNKNKGSLLTCDVSNESQVDASAAVLEDINNNISAMVSMF

SEQ ID NO: 178858 - protein, 46 aa, Glycine max
  Clone ID: PAT_MRT3847_132525C.1.pep
VSKNLKVLVGGEDCKALLVGACCMVYLVEVKYMEFQGDILSSMKPR

SEQ ID NO: 178859 - protein, 247 aa, Glycine max
  Clone ID: PAT_MRT3847_132526C.1.pep
SLIDRVMECYPVGVAARSFIVQVAMKLIIRDSFVCYTKFRREIVTVLDNLLEMPYRNCIAAFNIYKKAAAQTNELYEFYEWCKAKGLCGMYEYPLVEPIPYIQIKALESFLSGMWQLTESSTSPTTSTSPSSSGDSPSNFSQGQIVMRRDVVNIKGEEEKPLIELELEEDNGDVSWETLLETSISFSHAYQRDLGSLFNHRGWEGGFHIEQHGFDANEGHDHERADATWNMAVNKNTTANNPFSEPY

SEQ ID NO: 178860 - protein, 53 aa, Glycine max
  Clone ID: PAT_MRT3847_132527C.1.pep
FNLPSTSQVKPLFLSSDNFTKLPGNFSLNRKYSDTTVQKLVYCFSAAQSPPPS

SEQ ID NO: 178861 - protein, 76 aa, Glycine max
  Clone ID: PAT_MRT3847_132528C.1.pep
LSSRIGSSFMTCAQDNSNINDAEENSCNEIDEWSSSPHMDKLANQVSSTGYSSQMFTPSRGQRVQEQGPDSFDVIW

SEQ ID NO: 178862 - protein, 81 aa, Glycine max
  Clone ID: PAT_MRT3847_132529C.1.pep
TNIRASKRRRWSEEATLRMRLIWGGEKEAKSMPHLSVFLFTQFTHSLPRFVHRRPPRRPPKRVGDLTLRVNLCATTSGSEN

SEQ ID NO: 178863 - protein, 96 aa, Glycine max
  Clone ID: PAT_MRT3847_13252C.1.pep
GGGSNYEGGWTGNYYQTGHRAFTPCSITGRVEAWNNDGHSEHSYGVPFAYNSTQRPSRSHRSYNLRCDMWDLARLDCGYLTGCFSNNTPDSPDGLI

SEQ ID NO: 178864 - protein, 161 aa, Glycine max
  unsure (1)..(161): unsure at all Xaa locations
  Clone ID: PAT_MRT3847_132530C.1.pep
EDMLLGRDGIXXEAQWLLDTXXHPNSXSATKAIGYRQAMEYLQRCREQGGHSSVEEFYKFLFEFQKASRNFAKRQLTWFRNENIYQWLDASKPLETILDFIHGAYHDWNGSILVPEDLRMSRDISNHRQAAQLKAYRTRNRHFVNGEDCTHILNWIRKTQR

SEQ ID NO: 178865 - protein, 67 aa, Glycine max
  Clone ID: PAT_MRT3847_132531C.1.pep
HLTHAPWLNKKSMELGSGQLQYCYCQPRQVTARCLILKYESILHANLTNDEVSYSISGEGMSCVEFK

SEQ ID NO: 178866 - protein, 38 aa, Glycine max
  Clone ID: PAT_MRT3847_132532C.1.pep
PLYIRLCCYCCCRKCCTCVNPLEELCCKRLCFYYRICF

SEQ ID NO: 178867 - protein, 72 aa, Glycine max
  Clone ID: PAT_MRT3847_132533C.1.pep
RQSKLARKINLGGRACTDYNKSDSGIESVSSCRTRQDKQAASFINIWGIYPRNSRNYSCIYYNSESSCMKPN

SEQ ID NO: 178868 - protein, 79 aa, Glycine max
  unsure (1)..(79): unsure at all Xaa locations
  Clone ID: PAT_MRT3847_132534C.1.pep
KAFQXIXXILNTPQIFSNKELQYSNLMLACFFCCFVQIRKKPGILLERIEDFSPQYSAYLVNFEGLHLPMPKGPQFSLK

SEQ ID NO: 178869 - protein, 51 aa, Glycine max
  Clone ID: PAT_MRT3847_132535C.1.pep
TQPIKFALHSPKQFFLTLAKRAQQNLKTTRILLKNELLSPTLPESDNFFFF

SEQ ID NO: 178870 - protein, 74 aa, Glycine max
  Clone ID: PAT_MRT3847_132536C.1.pep
SSFFFFFFFFYYEMVETIPIGYSANNSTFDHFRPCGKKIVTQSSQIALPTPEGGLQGSGGKRVEGGNQRENRGG

SEQ ID NO: 178871 - protein, 155 aa, Glycine max
  Clone ID: PAT_MRT3847_132537C.1.pep
MEDSHSNTAAVQATNDDASASKLSCVKKGYMKDDYIHLFVRRPVRRSPIINRGYFARWAAIRKLLYQFLDVEKKSDEDPPIKKQILSLGAGFDTTYFQLQDEGKAPYLYVEVDFKEVTSKKAALIETCSPLRNKVDETAVISREKGEVFSAHYKL

SEQ ID NO: 178872 - protein, 80 aa, Glycine max
  Clone ID: PAT_MRT3847_132538C.1.pep
MATLGVDNQASSAQDADALLHALQGRAADHTAIIALLRHRDDHQTQEIILAYVAIYPEDLIIRLEFDISSDYYRALYRWM

SEQ ID NO: 178873 - protein, 445 aa, Glycine max
  Clone ID: PAT_MRT3847_132539C.1.pep
MVWGLFPVDPLSGEDKYYIFKTGLYKVGRKGCDVIITKDKGVSRVHAEIVVNTVNPVNPLPNERSHLSSSIHIRDCSKYGTFINKNGGAKKKVHELPNKETALENGDLVSFGTGTATYKFCHVPLVFFICSSNKVDQSLEEKISSIGASITHTLGEGCTHVLVDQLMPLKKDLVDAVVAKKSCVLKNWLEFFAEKNISTEIPSCHSYIPTVSAEGESIKIADPRMREDCLKGYTFLLESEHLYKFGDQLKPLLEVAGAKVVSSEDFSSNSQGSDYGEDNHVVCVIPGGPACKSNLFNKLSSLLRVNEMDVICAAFSGQLDLSILKSPCVLVSSSCSTDETIVADSDIEVETATSVRSNDAFSNDNNVKYEKTKELYVDSDPLDKRKHERIEASSDDVLHDTKRAKTETSLDGASVRSHSTSFRNDNDGIKVKKDKVMMMKVEIQI

SEQ ID NO: 178874 - protein, 53 aa, Glycine max
  Clone ID: PAT_MRT3847_13253C.1.pep
HSNKQSDSRNVHALADPETRLQSSNLQRLIHVKHPRFFFLRVSLLDKDYLCHQ

SEQ ID NO: 178875 - protein, 80 aa, Glycine max
  unsure (1)..(80): unsure at all Xaa locations
  Clone ID: PAT_MRT3847_132540C.1.pep
VVNSVASQGRDRLYRFQVYGKWRAXMSRTGFRXNPLSQRVVNTVKARIGGAGSRVAVKVHNGGICFGCMGRTIPVAIAWC

SEQ ID NO: 178876 - protein, 172 aa, Glycine max
  Clone ID: PAT_MRT3847_132541C.1.pep
MEPHDETGCQAPERPILCINNCGFFGRAATMNMCSKCYKDMLLKQEQDKFAASSVENIVNGSSNGNGKQAVATGAVAVQVEAVEVKIVCAQSSVDSSSGDSLEMKAKTGPSRCATCRKRVGLTGFSCKCGNLFCAMHRYSDKHDCPFDYRTVGQDAIAKANPIIKADKLDKI

SEQ ID NO: 178877 - protein, 143 aa, Glycine max
  unsure (1)..(143): unsure at all Xaa locations
  Clone ID: PAT_MRT3847_132542C.1.pep
SYNYYPGRITIDTDGNTMQAHGGGIIYDEXNTTILLXGEYKYGPTYHDHKKGADKADISGAGCYSTKDXWTRKHQRIGSAXYATDETHDLHTFNVLERPXLIHNDMPGEIDMRMHIDEADYTXASVGAAISDTPRRPLDIWTT

SEQ ID NO: 178878 - protein, 139 aa, Glycine max
  unsure (1)..(139): unsure at all Xaa locations
  Clone ID: PAT_MRT3847_132543C.1.pep
MEPHDETGCQAPERPILCINNCGFFGRAATMNMCSKCYKDMLLKQEQDKFAASSVENIVNGSSNGNGKQAVATGAVAVQVEAVEVKIVCAQSSVDSSSGDXLEMKAKTGPSRCATCRETWLFXTGFSCKCGNLFCXMHR

SEQ ID NO: 178879 - protein, 56 aa, Glycine max
  Clone ID: PAT_MRT3847_132544C.1.pep
KPKREKTQEEKTFKRKAKYFVVAQLVAVVVFLTLMTSFDDAEVELDDDDGSYDYDE

SEQ ID NO: 178880 - protein, 48 aa, Glycine max
  Clone ID: PAT_MRT3847_132545C.1.pep
SDIVHYLKYVTIHKSKNSQKSFWDFDAHFPGTIDGGIGPGVDVTGSAR

SEQ ID NO: 178881 - protein, 98 aa, Glycine max
  Clone ID: PAT_MRT3847_132546C.1.pep
VTLSDNVNGLDVLRTNLAVVAEVMVLSSYRRRKWHSLHLSFVGSPSSYGAMQLPVMESGNKSVLRIQGRDSRWMGLFCDRSMPPMLGVRWSLVKRKIW

SEQ ID NO: 178882 - protein, 78 aa, Glycine max
  Clone ID: PAT_MRT3847_132547C.1.pep
MDPKNVKSDLVLILDYGAQYTHLITRRIRNLSGIYLSIYGTICLSTITDLNPFVSILSGGPHSVHTPDSPPPPMNQFY

SEQ ID NO: 178883 - protein, 58 aa, Glycine max
  Clone ID: PAT_MRT3847_132548C.1.pep
SPTLFPGFSSSDLSLPSKITILDNISFFLPKTDSHVFSQFPSTCSLNHYFTASWALEY

SEQ ID NO: 178884 - protein, 96 aa, Glycine max
  unsure (1)..(96): unsure at all Xaa locations
  Clone ID: PAT_MRT3847_132549C.1.pep
KKKKSGKSSVLLDVKPWDDETALKKLXKSVRSVQMEGLLWGASKLVPVGYGFKKLPIMLSIVEDPVSVETLIEEPFPVEPPNEFVQSCALVAFNKI

SEQ ID NO: 178885 - protein, 38 aa, Glycine max
  Clone ID: PAT_MRT3847_13254C.1.pep
IPCVFFGCKLKLIPFSTHYSTLLSGSSAIPTKAKEGNF

SEQ ID NO: 178886 - protein, 99 aa, Glycine max
  Clone ID: PAT_MRT3847_132550C.1.pep
HVYVCEHVSHHIKPVHVHVIRASSHWRRTRPGRSCGKTAPPTFQKVGHPVGYHGASNNSTIIGTSASKQFLGSVLLVVNKPELSVIRMGRPKHEASLPP

SEQ ID NO: 178887 - protein, 166 aa, Glycine max
  Clone ID: PAT_MRT3847_132551C.1.pep
MKVTNGVSETDKNSCVIDINCDSCDGFSENLEGEMICRICHLASGQRLEAADVGTASSATTNTDLIQLGCACKDELGIVHSHCAEAWFKLKGNRLCEICGETAKNVSDVTDNGFIEEWNDTRFMDSDNTSSRRFGGCLCGQPFCNFLMACLVIAFVLPWFFRVNMF

SEQ ID NO: 178888 - protein, 79 aa, Glycine max
  Clone ID: PAT_MRT3847_132552C.1.pep
MSLANEPTPKDPLWLSDSDLIGNLGHISVIYIYKAKHNTDTIERLRNSLSKILVYFYPVAGRLNLTKSGRIEVDCNAKG

SEQ ID NO: 178889 - protein, 58 aa, Glycine max
  Clone ID: PAT_MRT3847_132553C.1.pep
HNFTTYIKSPFNLSCSIPQADHLQDNPSLKHFCNSHIFVLPTQNSYHIQLSFYSYCLK

SEQ ID NO: 178890 - protein, 92 aa, Glycine max
  unsure (1)..(92): unsure at all Xaa locations
  Clone ID: PAT_MRT3847_132554C.1.pep
GDDVQKCAPRKGKEKKEEQVISLGPQVAEGENVFGVCHIFASFNDTFVHVTDLSGKETICRVTGGMKVKADRDESSPYAAMLAAQDVAQRCX

SEQ ID NO: 178891 - protein, 62 aa, Glycine max
  unsure (1)..(62): unsure at all Xaa locations
  Clone ID: PAT_MRT3847_132555C.1.pep
ATXXXLXVXQRRQXRXRXFQXXXVYPGFIRXNPNPGSKXRXXLAXHXLHWWPITRXTEFEVL

SEQ ID NO: 178892 - protein, 74 aa, Glycine max
  unsure (1)..(74): unsure at all Xaa locations
  Clone ID: PAT_MRT3847_132556C.1.pep
VLYRGHMCCAWCVYNGMSRLRKCQRPVCRNHYYHFPTLCHLHRYVLLKIYTAAYKXRYSQTLEEEWRCCIYSPQ

SEQ ID NO: 178893 - protein, 66 aa, Glycine max
  Clone ID: PAT_MRT3847_132557C.1.pep
VKTGINKDEQNMNMLRTLIQHFLPQWSSITDRVCCQRQDNRMTVIDIKRIDGVGVGVEMLIALNMF

SEQ ID NO: 178894 - protein, 59 aa, Glycine max
  Clone ID: PAT_MRT3847_132558C.1.pep
KDHRRGIKIPTILTLPPHKKGKNLNQKSPNKNFTSTTPNNCNKQINSTIYSIPKRIFRR

SEQ ID NO: 178895 - protein, 109 aa, Glycine max
  Clone ID: PAT_MRT3847_132559C.1.pep
HWGALFQLGGPQQITLPPSKLTFKKKNPFFIPLKGAHGALQIKIPTGPFPFPRGTHAFSQPLRITTTLKEPKGGLLTKPMNNRGPLLTPMFGGDWRICRSDPLGPQNGT

SEQ ID NO: 178896 - protein, 124 aa, Glycine max
  unsure (1)..(124): unsure at all Xaa locations
  Clone ID: PAT_MRT3847_13255C.1.pep
IQGRSRVQVVSNFGKTVFDGVLRPGQLLIIPQHYAVXLKKAEREGCQYIAIKTNANAFVSHLAGKNSVFRALPVDVVANAYRISREQARSLKNNRGEEHGAFTPRFQQQYYPXLSNESESETSE

SEQ ID NO: 178897 - protein, 95 aa, Glycine max
  unsure (1)..(95): unsure at all Xaa locations
  Clone ID: PAT_MRT3847_132560C.1.pep
MHPLPEFLRLHRYKGLTMMLNDIVQSLDSIQHAVRKAPEYLISWATETPYSESENRFREIGLKRGWNDTAXRGLETIQLTTDRLVAPDPCTPKTF

SEQ ID NO: 178898 - protein, 116 aa, Glycine max
  Clone ID: PAT_MRT3847_132561C.1.pep
LILHSFFALMSIEAEGIRSSSLAFGVDQLSKRDKNAGIKESYFSWYYAIVAMSSLIGLTVVVYIQDNMGWAVGFGIPVILMSVRNCIIFTLPLGDRNPFLGGRYHSWSPVVTVRVG

SEQ ID NO: 178899 - protein, 114 aa, Glycine max
  unsure (1)..(114): unsure at all Xaa locations
  Clone ID: PAT_MRT3847_132562C.1.pep
RSRGRTRGRTRGAKAPSMFLQSFKNFVSLCVYGDDNLISVDDYFKSYFGGSEXIRSVDGDMLTITDGVHKTIATLPCKKLAHCDVMTINSMHMSIAVCVDPDVKASLLQQLDFG

SEQ ID NO: 178900 - protein, 110 aa, Glycine max
  unsure (1)..(110): unsure at all Xaa locations
  Clone ID: PAT_MRT3847_132563C.1.pep
MGLGTTARSRRRIEIREAVREERNAQVVLLNYRRDGTPXWMLFPGSPVFSSDGGAVVHFVAVQVPLQKKEGSGVRDFGFGCCRKEVCVDSLAEIDRVCSLEQVLEPDVRE

SEQ ID NO: 178901 - protein, 363 aa, Glycine max
  unsure (1)..(363): unsure at all Xaa locations
  Clone ID: PAT_MRT3847_132564C.1.pep
MPMELELGSTTIQRSFNTRYTRHARDSLDELPDSFTITDPSIPGHPIVFASPGFLKLTGYAAREVLGRPAAIFQGPRTSRKSVIEIREAVREERNAQVVLLNYRKDGTPFWMLFRVCPVFSSDGGAVVHFVAVQVPLQKKEGSGVRDFGFGCCRKEVCADSLAEIGRVCSLEQVLEPDVRALXDAELEREEPCEASDEEKRSAVNAMDNIFSVLTHYSEATGRLVCQKRCSIPDVGLLSTSLIISLGRIKQSFVLTNPRLSDMPIVYASDAFLKLTGYAKNEVLGRNCRFLGGTDTDTSTLHLIRESIKTEQPCTVRILNYRKDKSSFWNFLHISPVRDASGKSIVVPDYNFTCEDSVFCLPI

SEQ ID NO: 178902 - protein, 129 aa, Glycine max
  unsure (1)..(129): unsure at all Xaa locations
  Clone ID: PAT_MRT3847_132565C.1.pep
KKRFRAEKRRHPNRGGKKTRTAGEPNRREKQTQEANXAAHGEQDKRPMNDAGLNEPPEEEDQDRGDHRQERTTRRNNGKDQGDRGEDQQRTPAETAGEDHGQGSGPDQNHEHTAGKRRHKKGTTGQDPK

SEQ ID NO: 178903 - protein, 63 aa, Glycine max
  Clone ID: PAT_MRT3847_132566C.1.pep
MLDDFGCCCMLQTSYSVVLIVAVRNTKSYKAHILYVSSWELSADGLLAITYKIMKISLFSSPT

SEQ ID NO: 178904 - protein, 49 aa, Glycine max
  unsure (1)..(49): unsure at all Xaa locations
  Clone ID: PAT_MRT3847_132567C.1.pep
PLVGFSLRVFPXSLXXAXACGVWPPCWWCRRPSFQMLARVGXRVGERDA

SEQ ID NO: 178905 - protein, 117 aa, Glycine max
  Clone ID: PAT_MRT3847_132568C.1.pep
CLVIWQLRVLDWEWTILLCLSLIAYVQIRESIKTEQPCTVRILNYRKDKSSFWNFLHISPVRDASGKVAYFVGVQIEDNNKNDDSHCLSPEKRQLSVVGVVKVAVRSLSMTAGSSES

SEQ ID NO: 178906 - protein, 395 aa, Glycine max
  Clone ID: PAT_MRT3847_132569C.1.pep
MPMELEQELGSTTIQRSFDARYTRHARDSLGELPDSFTITDPSIPGHPIVFASPGFLKLTGYSLREVLGRPAAIFQGPRTSRKSVIEIREAVREERNAQVVLLNYRRDGTPFWMLFRVSPVFSSDGGAVVHFVAVQVPLQKKEGSGVRDFGFGCCRKEVCVDSLAEIDRVCSLEQVLEPDVRALGDAEVEREEPCEASDDEKRSAVTAMDSIFSVLTHYSEATGRLVCRKRSSIPDVGLLSTSLIISLGRIKQSFVLTNPHLPDMPIVYASDAFLKLTGYAKNEVLGHNCRFLGGTDTDTSTLHLIRESIKTEQPCTVRILNYRKDKSSFWNFLHISPVRDASGKVAYFVGVQIEDNNKNDDSHCLSPEKRQLSVVGVVKVAVRSLSMTAGSSES

SEQ ID NO: 178907 - protein, 292 aa, Glycine max
  Clone ID: PAT_MRT3847_13256C.1.pep
MDQPSRKFLISASEALAMAESAAVTLPELLPTLVPTAQPLARPPISKFSVAAVGLAPSGRILVGVNLEFPGLPLHHSVHAEQFLITNLSLNAEPHLVSLAVSAAPCGHCRQFLQELRAAADVQILVTSEPTAEFGPLSDLLPQRFCPHDLLPLEAPLLLEPHHNTLTLTLHHQHLPNYKLKTAALEAGNNSHAPYSGSPSGVALLDCHSNVFKGSYMESAAFNPSLGPVQAALVAFVSGGGGDYDQIVGAVLVEKEDAVVKQESTARLLINSISPNCQFDTFLCHCNPNHIV

SEQ ID NO: 178908 - protein, 79 aa, Glycine max
  Clone ID: PAT_MRT3847_132570C.1.pep
ARNSARGCEKTTEGVFFKTCEFQCTMKKNFGTWVTIFVMVVGFHQRRKLFRCAFVGFYYCELVECCFAQRETILLMIIS

SEQ ID NO: 178909 - protein, 205 aa, Glycine max
  unsure (1)..(205): unsure at all Xaa locations
  Clone ID: PAT_MRT3847_132571C.1.pep
VREGTEVPLIESTSDNNGRDQNTRSPQAEGWWNKVLDMEEAKHQLLFSLPMILTNLFYHLIILVSVMLVGHLGELQLAGATLANSWFSVTGVAVMVGLSGALETLCGQGXFGAKEYQMLGIYLQASCIISLIFSIIIXIIWFYTEPILSXCFINLPTLQEQLHYYEXFYPGRVFAYSFLQNFLXRFLQTQSXSIHLGLYSLLFNA

SEQ ID NO: 178910 - protein, 52 aa, Glycine max
  Clone ID: PAT_MRT3847_132572C.1.pep
ITEARNLLLGRDGKQGRITHFPPISIKQKKKQKAGNLSNGPLMNLENKRHVV

SEQ ID NO: 178911 - protein, 64 aa, Glycine max
  Clone ID: PAT_MRT3847_132573C.1.pep
PKNGFEGGVLRGEIKLLGGWVSLLTIPTSFQFLDFSWGSFQVLKWRGKFLSPLFLFPRVNARFF

SEQ ID NO: 178912 - protein, 34 aa, Glycine max
  Clone ID: PAT_MRT3847_132574C.1.pep
FLPYDTCIVIHMRGILFIYSFKKYIFYNKLKEGC

SEQ ID NO: 178913 - protein, 38 aa, Glycine max
  unsure (1)..(38): unsure at all Xaa locations
  Clone ID: PAT_MRT3847_132575C.1.pep
KKVTFQDLFXXQXEARHHTRARHNGRRTYVPCTPPGLP

SEQ ID NO: 178914 - protein, 239 aa, Glycine max
  unsure (1)..(239): unsure at all Xaa locations
  Clone ID: PAT_MRT3847_132576C.1.pep
MGNCNVCAKADVVEDSNNNRNKKSNETNRARKKEPKPFTDEPARSTAAPIRVLKDVIPMSHRTRISDKYILGRELGRGEFGITYLCTDRETKEALACKSISKRKLRTAVDIDDVRREVAIMSTLPEHPNVVKLKATYEDNENVHLVMELCEGGELFDRIVARGHYSERAAAXVARTIAEVVRMCHSNGVMHRDLKPENFLFXNKKENSALRPSISXXRLLQPGERFRDCGSPYYMRGVL

SEQ ID NO: 178915 - protein, 174 aa, Glycine max
  Clone ID: PAT_MRT3847_132577C.1.pep
MGNCNACAKADVVEDSTNNRNKKSNETNRGGRKKEQNQKKPNPFSDEPARSAAPIRVLKDVIPMSHRTRISDKYILGRELGRGEFGITYLCTDRETKEALACKSISKRKLRTAVDIEDVRREVAIMSTLPEHPNIVKLKATYEDNENVHLVMELCEGGELFDRIVARGHYSERA

SEQ ID NO: 178916 - protein, 68 aa, Glycine max
  unsure (1)..(68): unsure at all Xaa locations
  Clone ID: PAT_MRT3847_132578C.1.pep
LANLCVPQELRKASMVSKSGKPPGQPKNXVPSPGGTPITGPHQLENGGFREHLMNAVVAADKRSRQLS

SEQ ID NO: 178917 - protein, 701 aa, Glycine max
  unsure (1)..(701): unsure at all Xaa locations
  Clone ID: PAT_MRT3847_132579C.1.pep
MVTSLAIIILVLLFQQTCLAKQHHHHPPCYSSCGEIHNITYPFRLKGDPIGCGDQDYELDCVENVTVMTLFSGKFHVQEINYKRYEIRLTDAGVVEDIACSIPRYFFNLYNFTYIGGLNYSAYGPLSFSGYPQYAVFLNCTTPVTDDPRYVAVKVNGNCDSSSVGHIYAILVTDDDDRFGFTLTDIKVGCRLKVATFANWKYNNREVNVSYSDINKWLHHGIWMSWFFPVICRDRCGKGVSCYIDQTTRETRCADSYCQIFGIQTYKCGIRNQILEYMRQILGYTVGYLKSVIMGNTTYLLICQLISYLNKLIDXTEQNAIAIFLATRLLFGITLLLMLYIYMWRRRHYSMYENIEIFLLDSNLNPIRDEYREIKKMTKDFKVKLGEGGFGSVYKGKLRSGLDVAIKMLTKSQTRGQDFISEVATIGIFYHVNVVRLIGYCAEREKHALVYEFMPNGSLDKYIFSKEESVSLSYDKTYEICLGIARGIAYLHQDCDVQILHFDIKPHNILLDDNFIPKVSDFGLAKLYPIKDKSIILTGLRGTFGYMAPELFYKNIGGVSYKADVYSFGMLLMEMGSRRRNSNPHTEHSSQHFFPFWIYDHFMEEKDIHMEEVSEEDKILVKKMFIVSLWCIQLKPNDRPSMKKVVEMLEGKVENIDMPPKPVFYPHETTIDSDQASWSDSTSSCKNIDKTKSNFSLENNS

SEQ ID NO: 178918 - protein, 123 aa, Glycine max
  Clone ID: PAT_MRT3847_13257C.1.pep
MARIKVYELRQKTKADLLNQLKDLKAELALLRVAKVTGGAPNKLSKIKVVRLNIAQVLTVISQKQKAALRDAYKNKKYLPLDLRPKKTRAIRRRLTKHQASLKTEREKKKELYFPLRKYAIKV

SEQ ID NO: 178919 - protein, 90 aa, Glycine max
  Clone ID: PAT_MRT3847_132580C.1.pep
NVHMNSEKQEENVNKFRGGKTKNASKFLSLSFTSSAFNALEDSMNTNALTFTAKANTKDPSFFFFIKNGVQPQNEGPLFYEFRFIKVKKL

SEQ ID NO: 178920 - protein, 54 aa, Glycine max
  Clone ID: PAT_MRT3847_132581C.1.pep
MGFKGLGEGGIASIVAGCSTHPLDLIKVRMQLHGEASAAAAADAPAQAALRTAL

SEQ ID NO: 178921 - protein, 92 aa, Glycine max
  Clone ID: PAT_MRT3847_132582C.1.pep
CGPIFRPTLRGTNKHSTKQPQHMEINKNLKNEVPKEVDLMESRLNTAIGDCSETKVAREGTKRKKKTQTWIEPLPHKEEKKQSGHEGRVKGS

SEQ ID NO: 178922 - protein, 31 aa, Glycine max
  Clone ID: PAT_MRT3847_132583C.1.pep
LQLNLYSILTNLPEFEWARVQKTASFPSATE

SEQ ID NO: 178923 - protein, 37 aa, Glycine max
  Clone ID: PAT_MRT3847_132584C.1.pep
FPFFTTPTQDVSSHCGPTFPAMMHFPCRVPKLLCSTP

SEQ ID NO: 178924 - protein, 145 aa, Glycine max
  unsure (1)..(145): unsure at all Xaa locations
  Clone ID: PAT_MRT3847_132585C.1.pep
RIVPGSVDGSKVIIREFQEHCRRGLIRNHTGSQRSPYTNYLQTHTLSEDASIHYKSRLKRLIYENSVYEKRTDLRMCXYVHPQVLQSSQXEHLPVPCQWSYVTSVRSVHREDSGSVRYTGPSQGTPMSLKRKXADSMCITQFMKK

SEQ ID NO: 178925 - protein, 75 aa, Glycine max
  unsure (1)..(75): unsure at all Xaa locations
  Clone ID: PAT_MRT3847_132586C.1.pep
PGYTKGDGLGAEIVGTHILANTALISTDAKRSVRDSDVHIASPFTIGIADLLEKSVTMXIVKTGIDAARKYSAIK

SEQ ID NO: 178926 - protein, 145 aa, Glycine max
  unsure (1)..(145): unsure at all Xaa locations
  Clone ID: PAT_MRT3847_132587C.1.pep
ITLTHDDLKRLVDDMAVYSFKTGVVLGLGAGSNADLVVDNVGDLLALRPLCDIFGVATXKRTEEQAXSFRLHLSVLDYNPRLHLASHGCDNVQPDLKLYTRRXRALLREKIVEATYDKFVVIXGDTKLVDGLCGSGLAMPADGVQ

SEQ ID NO: 178927 - protein, 157 aa, Glycine max
  unsure (1)..(157): unsure at all Xaa locations
  Clone ID: PAT_MRT3847_132588C.1.pep
VVSRTGLCPRSRNAAESDIEAGTSARRSDDLDGGDFSDPFDIARTKNASVERLMRWRQAALVLNASRRFRYTLDLRKEEEKKHILXKIRAHAQAIRAAYLFNQLVGGXSEPIKPPPVPTAGEFPIGQEQLAFISMEHDTAALHIWRGVGGLSNLLET

SEQ ID NO: 178928 - protein, 96 aa, Glycine max
  Clone ID: PAT_MRT3847_132589C.1.pep
ARKHASVLIKQSTLSMSMKAQVHLKNYKKRVKPRRNNTRSLRALSYIPKPKNSSLGNSLISLSSFFLFPSSIPSPPPILIPPFQCKVFNDHERLNP

SEQ ID NO: 178929 - protein, 49 aa, Glycine max
  Clone ID: PAT_MRT3847_13258C.1.pep
LKFCGICCDKCNCVPSRTYRIIDHSPCYTDMINTNGNDKCTWTRYKFII

SEQ ID NO: 178930 - protein, 331 aa, Glycine max
  unsure (1)..(331): unsure at all Xaa locations
  Clone ID: PAT_MRT3847_132590C.1.pep
MKATLRYLAGMAGPSGFGSNSTAEQVTEDCSSFLPSALTALITGASSGIGAETARVLAKRGVRVVIAARDLKKAKEVKKNIQKETPKAEVILLEIDLGSFGSVQRFCSEFLALELPLNILINNAGMFSQNLEFSEDKIEMTFATNYLGHFLLTEILLDKMIETAEKTGIQGRIINVSSVIHSWVKKDGFFVSTTYSVXKKYNGTRAYAQSKLANILHAKEIAKQLKARNARVTINAVHPGIVKTGIIRAHKGLITDSLFFIASKLLKTTSQGASTTCYVALSPKTEGISGKYFADCNECKCSSLANDESEAQKLWNNTHALLHKRLRQATI

SEQ ID NO: 178931 - protein, 51 aa, Glycine max
  Clone ID: PAT_MRT3847_132591C.1.pep
CCRDLLCMKPTSRTSIMSVFSSPHLMISYKPPYPVYVTGFSPASYVLETVW

SEQ ID NO: 178932 - protein, 93 aa, Glycine max
  Clone ID: PAT_MRT3847_132592C.1.pep
SGGFRGGTGGYRGPHMHKQGYSLRSLKSVWRVKPGHETSRTRVLRCSTCTPITSLFKISRIMTDSVSNLPSYQHTKVRCERNKLRSCTLTITK

SEQ ID NO: 178933 - protein, 86 aa, Glycine max
  Clone ID: PAT_MRT3847_132593C.1.pep
YYAIKGHKLIFFKKLKIPRLPQVGTQKRKTHSFKKTILNEKGDKDCFAHLMLKMGSKKKRRPPFFYATWGTQGYFHVPKKKIINCA

SEQ ID NO: 178934 - protein, 181 aa, Glycine max
  Clone ID: PAT_MRT3847_132594C.1.pep
MSPKSKAKAMFFILKIIMLNLLPPIYACGPCTPPRHHKHPPHHGGGRPKVSPPLPPIIINPPVVPPPVVIYPPPISPPYPPPHGGSPFPQRTCPIDALKLGLCLDVLGGLVHVGIGNPVENVCCPVIQGLLDLEAAICLCTVIRAKLLNLNIFLPLALQLLVTCGKTAPPGFDCTPILKPI

SEQ ID NO: 178935 - protein, 213 aa, Glycine max
  Clone ID: PAT_MRT3847_132595C.1.pep
VNAIHASETTEGDLGYVYSVSVQEIGGVRVTIVKNEEGGNSVATVVLRGSTDSILDDLERAVDDGVNTYKAMCRDSRFVPGAAATEIELAKRVKDFSFKETGLDQYAIAKFAESFEMIPRTLAENAGLNAMEIISSLYAEHASGNAKVGIDLEEGICKDVSTLSIWDLHVTKLFALKYAADAACTVLRVDQIIMAKPAGGPRREQPAGGMDED

SEQ ID NO: 178936 - protein, 98 aa, Glycine max
  Clone ID: PAT_MRT3847_132596C.1.pep
GYMCVVQVPIPGAESNWYSKRCTSSTQNHPSLSHHLRVTISLIVVCLSTGVSVVRHVQTHGAGCISVVIRSGCFLVRRPFYSAHRSVKSTHEWTLVSG

SEQ ID NO: 178937 - protein, 126 aa, Glycine max
  unsure (1)..(126): unsure at all Xaa locations
  Clone ID: PAT_MRT3847_132597C.1.pep
WERPHIMDVVGILPMMEHRIAWTIDDAKSGNQPMRLYARVWNCCDXPTERGWVITDRTNPRYTAYYLTDRGTELYNXISILSLIAAWNSNELDAYSIRRLRCAHEXFMIYHCLHDLKRFPQGIPAE

SEQ ID NO: 178938 - protein, 59 aa, Glycine max
  Clone ID: PAT_MRT3847_132598C.1.pep
MATIAGGNGILDGILGYLDGENKDQTVSNQSIATGKSVMICGARGGWTPTCSMKYVPGI

SEQ ID NO: 178939 - protein, 61 aa, Glycine max
  Clone ID: PAT_MRT3847_132599C.1.pep
SSVSSLITARPQDMVQINIGHGQENGFFYSRFTTLALFGFIRVHRNSSSAIGRFGQIRTVN

SEQ ID NO: 178940 - protein, 342 aa, Glycine max
  unsure (1)..(342): unsure at all Xaa locations
  Clone ID: PAT_MRT3847_13259C.1.pep
MLSLFPNLFLFLSLLIGLCNCRVQTLNTNPTHFNPQVPPLRTLSSSKRFEGSSEFVKLKYHMGPVLSSPINIYLIWYGKWPQSQKLLIKDFLNSISDHRAAPSPSVSDWWRTVSLYTDQTGANISRSVSIAGEYSDLRYSHGTHLTRLSVQEVIATAVQAKPFPVDHRNGIYLILTAEDVTMEDFCRAVCGFHYFTFPSKVGYTLPYAWVGNSGKQCPEVCAYPFAVPGYMGGGGPXTSRRPNGDVGVDGMVSVIGHELAELSSNPLVNAWYAGEDPPAPTEIGDLCEGLYGTGGGGGYIGSVMKDGEGRTFNLNGRNGRKFLVQWIWSPVLKACAGPNALD

SEQ ID NO: 178941 - protein, 57 aa, Glycine max
  Clone ID: PAT_MRT3847_1325C.1.pep
ALSASTTVSNDPNHSLVALKGCFILSAHYQLWHLSQSVCNLIISSSTTTFTFSLMNS

SEQ ID NO: 178942 - protein, 81 aa, Glycine max
  unsure (1)..(81): unsure at all Xaa locations
  Clone ID: PAT_MRT3847_132600C.1.pep
ITINISLSCILHFKCIXLPQINLYSELAKPYVCGFDPSSSARLPWSIRCVLVAITFLLFALEIVLLVPLAXAIHTTNTTTK

SEQ ID NO: 178943 - protein, 63 aa, Glycine max
  Clone ID: PAT_MRT3847_132601C.1.pep
SPSTDLLMYYRAITDQSLFIVYEYCAFITSYHSVYTSYQMFIFIRVSCMHFRASTISLLLWTR

SEQ ID NO: 178944 - protein, 67 aa, Glycine max
  Clone ID: PAT_MRT3847_132602C.1.pep
ISICISWLLAWRECSSIWMGYHLSMQQEGDQEVNVDGRPPVNVVGYFGSFEMVKGMVDPVMDWTCLY

SEQ ID NO: 178945 - protein, 74 aa, Glycine max
  unsure (1)..(74): unsure at all Xaa locations
  Clone ID: PAT_MRT3847_132603C.1.pep
LACRRSRGLRRWPGSXRXLRXXXXGXXXXDXRXRXXXXEIAXXXXXLCRXVSXRXAXAXLVXRXEFRDYVRVXX

SEQ ID NO: 178946 - protein, 68 aa, Glycine max
  Clone ID: PAT_MRT3847_132604C.1.pep
NHSIMCVHKIKHKFYSGTVCICTTNIEFVVCSYGDYPICKVIILCEVMDLVMQRWKILSRQWQVACNQ

SEQ ID NO: 178947 - protein, 311 aa, Glycine max
  Clone ID: PAT_MRT3847_132605C.1.pep
MANLALTSILEKMTGKDKDYRYMATSDLLNELSKATFKADADLEVKLTNIIIQQLDDAAGDVSGLAVKCLAPLVRKVSEVRVVEMTSKLCDKLLNGKDQHRDIASIALKTVVAEVSTQSLAQSILQTLTPQLIRGITGPGMGSEIKCESLDILCDVLHKFGNLMAADHELLLSSLLSQLSSNQASVRKKTVACIASLSSSLSHDMLANATVEVVTNFKNKVATSEMIRTNIQMIGALSRAVGYRFGPHLGDTVPVLINYCTNASENDEELPEYSMQALESFLLRCPRDISVYCDEILHLTLEYLSYDPDLT

SEQ ID NO: 178948 - protein, 164 aa, Glycine max
  Clone ID: PAT_MRT3847_132606C.1.pep
LSFAFSMFKQRKLVKRHAAEIFTSVIISTLFSLYSTALVGRLVALEPSLTVSILPRCITVALALSIVSFFEGANASVTAAAVVVTGLVGANFVQATLDKLRLRDPIARGIATASSCHGLGTAALSAKEPEALPFCAIAYGLTGIFGSILCSIPVVRQSLLAVIG

SEQ ID NO: 178949 - protein, 73 aa, Glycine max
  Clone ID: PAT_MRT3847_132607C.1.pep
SSLPFPHAKKKHTHKHPTPKTSIFHDSSTSKPCQREPHFPISFIRCKNAIGWVRRTSSDFPPPPLKFGKKKLN

SEQ ID NO: 178950 - protein, 28 aa, Glycine max
  Clone ID: PAT_MRT3847_132608C.1.pep
IFFLKGNLVLFRGRFINFWLGKGGLFKN

SEQ ID NO: 178951 - protein, 36 aa, Glycine max
  Clone ID: PAT_MRT3847_132609C.1.pep
MCDNDRKVQGADQIIPRTNQAWSLALLTTCERNQLH

SEQ ID NO: 178952 - protein, 373 aa, Glycine max
  Clone ID: PAT_MRT3847_13260C.1.pep
MARIKVYEPSAKSMPTLAEIVTTMLSLFTNLLLFLSLLIGLCNCRVTTTNEEVQTLNTNTHFNPQVPPLRTLSSSKRFEGSSEFVKLKYHMGPVLSSPINIYLIWYGKWPQSQKLLIKDFLNSISDDHHRASPSPSVSDWWRTVSLYTDQTGANISRSVSIAGEYSDLRYSHGTHLTRLSVQDVIATAVQAKPFPVDHRNGIYLILTAEDVTMEDFCRAVCGFHYFTFPSKVGYTLPYAWVGNSGKQCPEVCAYPFAVPGYMGGGGPGHLTPPNGDVGVDGMVSVIGHELAELSSNPLVNAWYAGEDPTAPTEIGDLCEGLYGTGGGGGYIGSVMKDGEGRTFNLNGRNGRKFLVQWIWSPVLKACAGPNALD

SEQ ID NO: 178953 - protein, 156 aa, Glycine max
  unsure (1)..(156): unsure at all Xaa locations
  Clone ID: PAT_MRT3847_132610C.1.pep
AASSVVPQLRLWGVSRSPLLCHYVSAFGARFCFLLSSSCLGPAPCGCXCFRRVLXVSPLSGPPSAAVGSAASVVAFRALLPSFLAVVAAAAVGRRGRCGPRARXAFLSWLSLLVSGGRWGLPCPCLPVCGLXCVWVIRRVWSARGFRAGSRRGFRL

SEQ ID NO: 178954 - protein, 46 aa, Glycine max
  unsure (1)..(46): unsure at all Xaa locations
  Clone ID: PAT_MRT3847_132611C.1.pep
TYQSIDLEKKMIDEYAXLNRVEMSIWECCDLLNDVVDDMDPDLDDP

SEQ ID NO: 178955 - protein, 36 aa, Glycine max
  Clone ID: PAT_MRT3847_132612C.1.pep
FFFFSMKSKNYHQITRELSPTNILLILLVRSSIFNP

SEQ ID NO: 178956 - protein, 96 aa, Glycine max
  Clone ID: PAT_MRT3847_132613C.1.pep
SLQSAYVHRSTYIELQAAITNRYWRKEKRLLCQPSANFTQRFILQVPAKMFLSEVFAALDAETFDHLFYKLHYKVKSLLISQEPSISNNHHSSVVN

SEQ ID NO: 178957 - protein, 94 aa, Glycine max
  unsure (1)..(94): unsure at all Xaa locations
  Clone ID: PAT_MRT3847_132614C.1.pep
TRXAXXXCXXXXXXXXXAXXXXXSXXXAVXXPXXNXXKXXXHXXXXXVAPXEEXXLXXVXVSAVLMFFXFXLXXXNXVHGSSXWGXXXXDXXQX

SEQ ID NO: 178958 - protein, 141 aa, Glycine max
  unsure (1)..(141): unsure at all Xaa locations
  Clone ID: PAT_MRT3847_132615C.1.pep
DYQDPAAAPLVDPTELRXWSSYIPRISEFVAAFXLLLYMTVLAAMAVDVSNANWNTAVIQGMACAFGVMIFTLAYCXAGISGGHIEPCLIFDLSLPRKLPVTHRILYVTMLWLYGMRVASHLNCFTLSMQLHATQGRGHCV

SEQ ID NO: 178959 - protein, 75 aa, Glycine max
  unsure (1)..(75): unsure at all Xaa locations
  Clone ID: PAT_MRT3847_132616C.1.pep
NPVIGPXISGVVIGLKTCVMIFTFIXARASFPRIRYDQLMSYCXTVLLPIVIAFIILVPCILYSFEIMPCNIPLL

SEQ ID NO: 178960 - protein, 207 aa, Glycine max
  Clone ID: PAT_MRT3847_132617C.1.pep
RIVHAFISCITTGNVKVQWNVCHALGNLFLNETLRLQDMDWTPVVFGVLLQLLRNSSNFKIRIQAAAALAVPMSMQDYGLSFSEIVQSVEHVMENIDDDQISGPSNFKYRVSLQKQLTLTMLHILRFTSSTNDQNLKDFLVKKASILEDWFKGLCSSGEGMLDVQDKCIADRKRVLISGALQSLIEVYKEKQQDAIAQKFEELKNNM

SEQ ID NO: 178961 - protein, 102 aa, Glycine max
  unsure (1)..(102): unsure at all Xaa locations
  Clone ID: PAT_MRT3847_132618C.1.pep
VRLRRGSLLPVSRFHRRHFCCKDGHVPKTRRTFCKKCGKHQPHKVTQYKKGKDSLYAQGKRRYDRKQSGYGGQTKPIFRKKAKTTKKXVLRLECVEPXCRSK

SEQ ID NO: 178962 - protein, 78 aa, Glycine max
  Clone ID: PAT_MRT3847_132619C.1.pep
ARSHQLPSLVSSKMSEMCGALRSTLLYASTVFSAGPVYTVGCNRGFAMRSRCRTAFLMSFPCCLNGWNPPCMSAERVK

SEQ ID NO: 178963 - protein, 66 aa, Glycine max
  unsure (1)..(66): unsure at all Xaa locations
  Clone ID: PAT_MRT3847_13261C.1.pep
TSVAQDVLPVLTDAFDGNLLSLEFDNFAEVRKLYEGGVTLPTNFLSKNAPXPEDKESFRTYGEQYY

SEQ ID NO: 178964 - protein, 311 aa, Glycine max
  unsure (1)..(311): unsure at all Xaa locations
  Clone ID: PAT_MRT3847_132620C.1.pep
VNYSTKSLKRSVVDLLKSDMENLQEDIKARLVEFEAIKSEYTNAQIPCNAADERAMLLASEVIGLEEKALRLRSSELKLEKQLENAKEEISSYRKKMSSLDKDRHDLQSTIEALQEEKKMLLSKLRKASGIGKSIESQTSKRDVSTSTDDLASEDPASNSSNPEINDNAAEASSLSSVTETRHSSFGVSTVNIPHDQMRMIENINALISELALEKEELIKALTSESSECSRMKEINKELSXKLEVQTQRLELLTAQSMVNENVSAKQPDSRAMYENTPYADEGDEVVERVLGWIMKLFPGGTSRRRTSKLL

SEQ ID NO: 178965 - protein, 75 aa, Glycine max
  Clone ID: PAT_MRT3847_132621C.1.pep
MDLSRKLEVQTQRLELLTAQSMVNENISAKQPDSRAMYENTSYADEGDEVVERVLGWIMKLFPGGPSRRRTSKLL

SEQ ID NO: 178966 - protein, 109 aa, Glycine max
  Clone ID: PAT_MRT3847_132622C.1.pep
STIWFLYLQMVSRKRKSIGSRPTVQYNTRRFSSLDSWTRYTDNVQGRNILLERKVEIYHFELDEFKAELERHNFHKRLTNLVDGSIDLALVKEFYAPSVVFSQPYGRVG

SEQ ID NO: 178967 - protein, 92 aa, Glycine max
  unsure (1)..(92): unsure at all Xaa locations
  Clone ID: PAT_MRT3847_132623C.1.pep
MSLLFDLINLNLSDITDKEIAEYIWSAGSRMDMRSRARTVWXLHNDPYKLFKRNYDGCSSGQASGQDLEGDLCPQSIFRDPFSRGLHCSGYV

SEQ ID NO: 178968 - protein, 147 aa, Glycine max
  unsure (1)..(147): unsure at all Xaa locations
  Clone ID: PAT_MRT3847_132624C.1.pep
FTRSSTRTATRPVQWLGKWNWFIDSESXVGMRGRDAQXNEMMVLRYMXNGDLCVHADLQGASSTFIKNHTPAQPVPPLSLNXQSGCLTXAHRAAWDLKIVTSAWWVYPIRLXTATTGEYLTRGGFMIRERKKXVPPHGIIMGFGLLF

SEQ ID NO: 178969 - protein, 86 aa, Glycine max
  unsure (1)..(86): unsure at all Xaa locations
  Clone ID: PAT_MRT3847_132625C.1.pep
ASKAALLLCFNVLFFTVVSSTYVPCNPPPKTPKHPPVPKPPSPKQASCPKDTIKFGVCADVLSLINGXTLGNPPKPPCWNLIEGCR

SEQ ID NO: 178970 - protein, 107 aa, Glycine max
  Clone ID: PAT_MRT3847_132626C.1.pep
RLKGSIHKIQVLQLSTRFQKQAHNQNLCLFKHVTEIIFPPHHTTDSNQPHKLSQNLRNRHRQWKREKMKKKHEKGMIVMSLFLGATLISWLWLTYNNIDFMYLFGLI

SEQ ID NO: 178971 - protein, 58 aa, Glycine max
  Clone ID: PAT_MRT3847_132627C.1.pep
LTESIMNTSKKIRLKIKREFSPPISLDVDTHLSVLKNCRVGVSLNILLYISTHIQTFI

SEQ ID NO: 178972 - protein, 112 aa, Glycine max
  unsure (1)..(112): unsure at all Xaa locations
  Clone ID: PAT_MRT3847_132628C.1.pep
MASAIEHYGNFLLLSLSRRAQERGGKLHPATLKKGVREPKGRRAGIKKTPTTGVKEMYQPXDPEKEKPGLDEPPPQQGEEKLPGKKMPPKIPNNSLRKKMGGKGHKKRTGLF

SEQ ID NO: 178973 - protein, 48 aa, Glycine max
  Clone ID: PAT_MRT3847_132629C.1.pep
KKKNSCSALGQVLLLARVSWIMDMNMKGLFLFKFQRLNNKKKKKKKGR

SEQ ID NO: 178974 - protein, 644 aa, Glycine max
  Clone ID: PAT_MRT3847_13262C.1.pep
MEPQDEEEIHNCLIKLRSNPERRRDKVYIGCGAGFGGDKPLAALKLLQRVQELNYLVLECLAERTLADRYQIMMSGGDGYDSQISNWMHMLLPLALERGTCIITNMGAMDPLGAQQKVLEIANSLGLNVSVAVAHEVSVTNIIGSGFSPAKSYIMEGGISTYLGAAPIVRCLEKYQPNVIITSRIADAALFLAPMVYELGWNWDELEHLAQGSLAGHLLECGCQLTGGYFMHPGDKYRDMSFQQLLDLSLPYAEICFDGQVCVSKSEGSGGVLNFNTCAEQLLYEVGDPGAYVTPDVVIDFQDVSFLPLSSSRVCCHGAKPSTISVPDKLLQLVPQDCGWKGWGEISYGGYECVKRAKAAEYLVRSWMEEIFPGLNHRILSYIIGFDSLKATSGNGNESSQTTSEDNRLRMDGLFEQKEQAIQFTREFIALYTNGPAGGGGISTGYKKETLLEKHLVKREDVFWRTGIKRSTRSQSNKVVDPDHNLRHILTLPPRLEAETDKSLESVSLGSSCSPAPSGQKIPLYSVAHSRAGDKGNDINFSLIPHFPPDYERLKLIITSQWVKSVVSNLLDLSLSPDLDAKIPRDKRVNENVKVEIYEVKGIQSLNIVVRNILDGGVNCSRRIDRHGKTISDLILCQQVVLPP

SEQ ID NO: 178975 - protein, 44 aa, Glycine max
  Clone ID: PAT_MRT3847_132630C.1.pep
KNSQTFLLYYTLFFSIKQMILEIHIHTFIMWISNIICLIEKNKV

SEQ ID NO: 178976 - protein, 280 aa, Glycine max
  Clone ID: PAT_MRT3847_132631C.1.pep
MALRGLSAVAVTASIRPPGPRFRVDSGTSRIPSSGCRISVRCKAVGESRQGSLEETVVYEGIYGPWTIDDSDVREVILYRSGLVTAAASFVVAGSAAFFPDTLKQNVDLLYVLGSGGLGLSLLLIHIYVSEIKRALQALWGLGVVGSATTYFCLAQPANKNLIQYVVDNPSAVWLVGPLFAALTGLVFKEGLCYAKLEAGLLTFVIPILLLGHLTGLMDDGVKLTLLASWMTLFVIFAGRKFTQPIKDDIGDKSVFMFNSLPGDERKALLEKLEQQKIQN

SEQ ID NO: 178977 - protein, 101 aa, Glycine max
  Clone ID: PAT_MRT3847_132632C.1.pep
EERKDNCWLSVRNFCTWIHHQLVNYAMLWQVILYRSGLVTAAASFVVAGSAAFFPDTLKQNVDLLYVLGSGGLGLSLLLIYIYVSEIKRALQALWGLWCCW

SEQ ID NO: 178978 - protein, 35 aa, Glycine max
  unsure (1)..(35): unsure at all Xaa locations
  Clone ID: PAT_MRT3847_132633C.1.pep
ERXXTQRIXVXWNXIVAISEPHLCPIVPSSFLHRS

SEQ ID NO: 178979 - protein, 71 aa, Glycine max
  Clone ID: PAT_MRT3847_132634C.1.pep
VCEKGALENLEVLESPTPVPPQRVQATEKSLDKILFALNGLLHTFCPTIILCPRNSLNVQKRTQCFLIDSN

SEQ ID NO: 178980 - protein, 87 aa, Glycine max
  Clone ID: PAT_MRT3847_132635C.1.pep
RAQCCFQLFLKEAQGTAFFKPHSPRVFLELPSILNKQKPRFFKPAKKILENKKKEHCLNPLPQGKKIHVGALKVEKLLCLSTNKKVN

SEQ ID NO: 178981 - protein, 75 aa, Glycine max
  Clone ID: PAT_MRT3847_132636C.1.pep
YFLVNIRYYNKLRQVFIGFKHNMYTIRFVGNILYLEIVTASYSIMLCGASITMNPVQVFFTVVETNRTLSFSYAW

SEQ ID NO: 178982 - protein, 78 aa, Glycine max
  Clone ID: PAT_MRT3847_132637C.1.pep
SAIVSILAVVLVQDSQGSSLNAPVSAHFVCTDSSAYSSFVMSVRSCDGFAVSIRDVFPYSVSEVPPYSMEARALVIYL

SEQ ID NO: 178983 - protein, 99 aa, Glycine max
  Clone ID: PAT_MRT3847_132638C.1.pep
GKRPRGPKKKKGPPRDTLGEFLKINNKRNAPMGGSKSPLGPKHVFLQLRACPHGFGLFSQNPPQLVCFGGKIRKSPSLGTPYPLSQPSQKKKFFFLGGK

SEQ ID NO: 178984 - protein, 151 aa, Glycine max
  unsure (1)..(151): unsure at all Xaa locations
  Clone ID: PAT_MRT3847_132639C.1.pep
MQKPFFTLSLSSLCLLLSARACSAITSTKSNECQLNNLNAYKPDHRVECERGLIETCNSQHPELHCSVVTDSKRTLNRIRLQLPSYSPYTQMIMCLQRNGAIVFAFSGXAETFEKPQQQSNATGSRPQGHLLDRHQKIRHFYEXDVLEIPP

SEQ ID NO: 178985 - protein, 413 aa, Glycine max
  unsure (1)..(413): unsure at all Xaa locations
  Clone ID: PAT_MRT3847_13263C.1.pep
SRSSFGADQFDDADEAEKEHKSSFFNWFYLSINXGALIAASVLVWVQTNVSWGWGFGIPAVAMAIAVVSFFSGTRLYRNQKPGGSPLTRMCQVIVASIRKSDVQVPNDKSGLYEIEEDSESAIEGSRKLDHTNGLRFLDKAAVLGDSDNVKDPVNPWRLCTVTQVEELKASIRLLPIWATGIILSTVYSQMGSXFILQGHTMTNRVGNIKLHISPATLSGFDTIRVIFWVPVYDRIIVPVARKFTGRKNGIAQLARMGIGLFISIFAMVYSVILESMRLKMVRRHNYYDREQVPMSLYLQIPPYFIIGCAEVFTFIGQLEFFYEQAPDAMRSTCSALQLLTVSFGSYLSSLLITIVTKVTTRNGGPVWLPDKLNYGHLDYFFLLLTVLSVLNFVAFLQVSKLYSYKNPVGTLH

SEQ ID NO: 178986 - protein, 98 aa, Glycine max
  unsure (1)..(98): unsure at all Xaa locations
  Clone ID: PAT_MRT3847_132640C.1.pep
LARPCSHARRSIPIAQSLCSMVPPLRMVFSKSDAVLSWKPLTEGIGDLSKVAMCSCSESESYSLPCSPRVWSLFSSRLSLXGSGSFLXXASPRSSKIE

SEQ ID NO: 178987 - protein, 82 aa, Glycine max
  unsure (1)..(82): unsure at all Xaa locations
  Clone ID: PAT_MRT3847_132641C.1.pep
AISRVINVQVPESPNLTMGHNLGLSKSWIRLETSWICSGPGITPYGLVLSQQSEFMPNLFLIXWLKVVNGVSTLPKKKKWVV

SEQ ID NO: 178988 - protein, 78 aa, Glycine max
  Clone ID: PAT_MRT3847_132642C.1.pep
IPLSPFHIVSADVAHHSPTTVPENATTEVIKTQETTPEPVPAHEAPATEQEAAEVPAQEAQQATEVPAPESTTKHQRK

SEQ ID NO: 178989 - protein, 58 aa, Glycine max
  unsure (1)..(58): unsure at all Xaa locations
  Clone ID: PAT_MRT3847_132643C.1.pep
ITDCAPDQNEDNAFPGMIKPYKAVIFHKTCARLXIXAHTVRLYDHKLLLLAFSPIDKQ

SEQ ID NO: 178990 - protein, 55 aa, Glycine max
  Clone ID: PAT_MRT3847_132644C.1.pep
LRDILTTFVPHPLENFLTTPVGSLCLASVVIRLIKNRADTNYCLSVQYIGPTFFS

SEQ ID NO: 178991 - protein, 68 aa, Glycine max
  Clone ID: PAT_MRT3847_132645C.1.pep
QQHKPLRNVAIVFQILGEQILKLLQGDMGYVRLMVQTEDVLLGKLKAVNGPYRKNQVNLTLFEVVYWV

SEQ ID NO: 178992 - protein, 79 aa, Glycine max
  Clone ID: PAT_MRT3847_132646C.1.pep
IGNPFSGGAHWDLKTPLHPFFLRKKKKIPVVGPWGGVNNNNNKLGLNNFFFFKFKGNPLFNGFGPRNPEPWGEPWVHPG

SEQ ID NO: 178993 - protein, 68 aa, Glycine max
  Clone ID: PAT_MRT3847_132647C.1.pep
PFFAEQQTKCGLCCKEWGTGLKITDVKRAIISSLVREVDWMVKRVRRSKTKAFQWKGLAKRIAFGPGG

SEQ ID NO: 178994 - protein, 73 aa, Glycine max
  Clone ID: PAT_MRT3847_132648C.1.pep
LVSYINHRSVTKFTIINRFPSTQSSSATTPYWTHRFSGQPCQNHLQAFLPNRSSEQWSYEPQPDLLLHLLHLG

SEQ ID NO: 178995 - protein, 40 aa, Glycine max
  Clone ID: PAT_MRT3847_132649C.1.pep
EFGTSGNKMETDEGDIMAYGQCNTFDSIKVTKLKTPSSPK

SEQ ID NO: 178996 - protein, 55 aa, Glycine max
  Clone ID: PAT_MRT3847_13264C.1.pep
VERLAIVEEEVLKHKCHDRLVKLVLISQFSHVYELFAWSGSVNCPPPFFFFARSG

SEQ ID NO: 178997 - protein, 65 aa, Glycine max
  unsure (1)..(65): unsure at all Xaa locations
  Clone ID: PAT_MRT3847_132650C.1.pep
KFYITNYLFTTSNLTYTYIRPHISFILKPKINYFITFLQRHDXENPDLIQLNHTSAHPHFTSIHN

SEQ ID NO: 178998 - protein, 124 aa, Glycine max
  Clone ID: PAT_MRT3847_132651C.1.pep
HTSGNREVKVNVLASFVAARLVAWHCHAYDMMNIRMNTGYGARTSEVKCASWRLAVEAHNMTSFETIPEECVESTHGYIHGEQYRSDYQTAYLQAYFYARDLEDQSKDTFECSIDGYVLYYIPY

SEQ ID NO: 178999 - protein, 290 aa, Glycine max
  unsure (1)..(290): unsure at all Xaa locations
  Clone ID: PAT_MRT3847_132652C.1.pep
MSLSLAIKLHLASSSPSFSLLTLNNHQHANKLTTSETCSNTKVRPKPIYSTNPLIIPTCKVRPRVQYCGTMIKSSLIEPDGGALVDLVVPEGERGAKITLAESLPKVQLTRIDLEWVHVVGEGWASPLKGFMREDEYLQSLHFNSLRVKDGSVVNMSLPIVLAIDDETKERIGSSSHVGLLGPDGDCVAILRSIEIYKHNKEERIARTWGTTAPGLPYXEEVITPAGNWLIGGDLEVLKPIKYNDGLDNYRLSPKQLREEFDKRQADAVFAFQLRNPVHNGQSLLMNDTP

SEQ ID NO: 179000 - protein, 72 aa, Glycine max
  unsure (1)..(72): unsure at all Xaa locations
  Clone ID: PAT_MRT3847_132653C.1.pep
TSTAFMAXLITGFKATCNEFGSXFKAILAYTVLSKEFKIRSFTRDVSKPSSHALANQELYFAAAYLISNPFS

SEQ ID NO: 179001 - protein, 46 aa, Glycine max
  Clone ID: PAT_MRT3847_132654C.1.pep
LCWVASHHSISYGPHFNSPQCSKRQGPHSRVHHHSLFRFIFLHQQR

SEQ ID NO: 179002 - protein, 306 aa, Glycine max
  Clone ID: PAT_MRT3847_132655C.1.pep
MDAALSSISPKSSSASSLPLLSSSNNYRPAVILPGLGNNSGDYQSLKQTLNDKYGVATVVAKVSRLDWFRNAAGLLDRNYWRGTLLPRPVLDWYLERVHDAVQEAKEGAANGTVSLIGHSAGGWLARVYMEEFGVSNDISLLLTLGTPHLPPPKGVQGVIDQTRGLLDYVEQNCSKPVYTPQAQVKYVCIAGRYIKGARLFGNSNPNPDIEGEAQLVSDAAILTTYPSKSNTTLRARFVGQGYKQVCGQADVWGDGVVPEVSAHLEGALNISFHGVYHSPVGADDATRPWYGSPHVLDQWVQHLLN

SEQ ID NO: 179003 - protein, 103 aa, Glycine max
  Clone ID: PAT_MRT3847_132656C.1.pep
MKGDEKNRMIIESMYFSPGIRNIVAAEGAERRSRSVKIDVWRAFFSRFGMEEKELSTLSLYQAELVAKRFPCGNFCTFERKGHCLLIGWKGTPINSVSVWKFL

SEQ ID NO: 179004 - protein, 106 aa, Glycine max
  Clone ID: PAT_MRT3847_132657C.1.pep
MRHCRPSLQRAQAHHHCHCFHPPTTIALPLFSQLISLSLSMSLDTFAIAFIVFLFLQGLGNNSGDYQSLKQTLNDKYGVATVVAKVSRLDWFRNAAGLLDRNYWRG

SEQ ID NO: 179005 - protein, 49 aa, Glycine max
  Clone ID: PAT_MRT3847_132658C.1.pep
ERKERYKKDKKSSRNKRENTRIKNKIHVTHVNLPEDLKKTPPSRTPQRS

SEQ ID NO: 179006 - protein, 63 aa, Glycine max
  Clone ID: PAT_MRT3847_132659C.1.pep
YRPITIMVISESVAHISTPDRNPTKVTGTSSASSFSLATVALNAANHGYNLVHEIPKKKHKQA

SEQ ID NO: 179007 - protein, 128 aa, Glycine max
  unsure (1)..(128): unsure at all Xaa locations
  Clone ID: PAT_MRT3847_13265C.1.pep
GTNLVFEDEITALQPEVDKLKTLNVNKIIALGHSGFEMDKLIAQKVRGVDVVVGGHSNTFLYTGNPPSKEXVPAGKYPFIVTSDDGRKVPVVQAYAFGKYLCYLKIEFDERGXNVISSXGNPILLNST

SEQ ID NO: 179008 - protein, 192 aa, Glycine max
  Clone ID: PAT_MRT3847_132660C.1.pep
MTVMMPAPIDQQEDEDVLVPDADLPENNHQPMEVVAQPENANTVESQPVEDPPSSRFTWRIDNFSRLNTKKLYSEIFVVGGYKWRVLIFPKGNNVDYLSMYLDVADSASLPYGWSRYAQFSLAVVNQMHNKYSVRKDTQHQFNARESDWGFTSFMPLGELYDPSRGYLVHDTLIVEAEVLGRRNGDYWTYDS

SEQ ID NO: 179009 - protein, 70 aa, Glycine max
  Clone ID: PAT_MRT3847_132661C.1.pep
THMFPHAGKIFGEMTPISCNYKNQSKMWPNSEQTKLKYPNKKPRINQQKNKSPNNYSTKKERASNNRKPK

SEQ ID NO: 179010 - protein, 82 aa, Glycine max
  Clone ID: PAT_MRT3847_132662C.1.pep
ILLINYPSFHIAKNLFFEMLTAFTQSRILPKFDFVPTTNLPYHILLDTVEIRLIIKSSKVLPPMGMPSFISATLQFLFNVKL

SEQ ID NO: 179011 - protein, 89 aa, Glycine max
  Clone ID: PAT_MRT3847_132663C.1.pep
ITLENRFGCFGTNFECELEVSFSAFIFQNEDHERVCPCPAIVSPQEDAVDGHVSQDSDTAMEVDINNSSNYSNSGRCGNQMLALSTTNV

SEQ ID NO: 179012 - protein, 44 aa, Glycine max
  unsure (1)..(44): unsure at all Xaa locations
  Clone ID: PAT_MRT3847_132664C.1.pep
PSLHYSXLTLVTVQLCTVHAIPXRLGCCXKXYPTKSHAYDIHVH

SEQ ID NO: 179013 - protein, 58 aa, Glycine max
  Clone ID: PAT_MRT3847_132665C.1.pep
FYSMTNNLKYISSFTLFTQVTHSHEISKEASGSRLIFNSYQFNFQNPYLKKRASKTRV

SEQ ID NO: 179014 - protein, 93 aa, Glycine max
  unsure (1)..(93): unsure at all Xaa locations
  Clone ID: PAT_MRT3847_132666C.1.pep
LNTEXLEAXLFPHQKLLRDXTVVKDKGSXVDEEKVLSPVDDNLVAVEFLALIDKEKKVNAGEDVKEGGGGNVKNNGIDVLLGADEKLEDFMMI

SEQ ID NO: 179015 - protein, 56 aa, Glycine max
  Clone ID: PAT_MRT3847_132667C.1.pep
QTFSVFRYTEKVNLLNLLMGPNCNKFGGHYLATQIFLKALTKKIPLVFFIKKFRPQ

SEQ ID NO: 179016 - protein, 37 aa, Glycine max
  Clone ID: PAT_MRT3847_132668C.1.pep
KSLLFYHLFRVETLQLIYFITSAICGAIIMCIRVSMG

SEQ ID NO: 179017 - protein, 91 aa, Glycine max
  Clone ID: PAT_MRT3847_132669C.1.pep
LQRANQPKGYPGTQRASTMKGPTRKKVISSNLEQDSLLALPTKGEGRKPPPAPTGNQKLMGTVATHSTKKKRTIPLIHKQNNRVKRQPMGP

SEQ ID NO: 179018 - protein, 81 aa, Glycine max
  Clone ID: PAT_MRT3847_13266C.1.pep
FSILHHPFPSKVLSKLLHVFSPFDCHSPQYPGSYLRFLCHLLIHQCPFSILQVYSPCQVMMCLCSQNEPDFLNRPCPSLLL

SEQ ID NO: 179019 - protein, 69 aa, Glycine max
  unsure (1)..(69): unsure at all Xaa locations
  Clone ID: PAT_MRT3847_132670C.1.pep
SPSRQGRTGQHKXKQKQAXRHQNSHKQNANSPQKTTHPRRPXEETPSTRXPTQRPXKRPTKAKGQHEPP

SEQ ID NO: 179020 - protein, 71 aa, Glycine max
  unsure (1)..(71): unsure at all Xaa locations
  Clone ID: PAT_MRT3847_132671C.1.pep
MGRMHSRGKGISSSALPYKRTPPSWPQXSLRKMSXENICXKFARKGLTPSXQXGVILRDSXGIXXVXRWEQ

SEQ ID NO: 179021 - protein, 478 aa, Glycine max
  Clone ID: PAT_MRT3847_132672C.1.pep
LRKTVDGTDRVGFAQFLGVMGVACKIPMREAMTLAVLMNTKGLVELIVLNIGKEKKVLNDEMFAILVLMALFTTFITTPIVLSIYKNTNDISFHQTLRKLGDLDTNDKATNEFRVLACVHGPNNAPSIINLIESIRSIQKSSIKLFIMHLVELTERSSSIILAQNTDNKSGSSHVEWLEQLYRAFQAHSQLGQVSVQSKTTISSLSTMHDDICHVADEKMVTMIILPFHKRWKKVEMENEEENSEVSQHQMEENIGHGWRGVNQSVLRNAPCTVAVLVDRGYGHGPQNLGLYTTVTQHVCVLFFGGPDDREALELGDRISNHPAVKVTVVRFIHKDVLEGNDMSHSSPSKTNGKSYNLAISKVYPPKEKELDDATMARFQRKWNGMVECFEKVASNIMEEVLALGRSKDYDLIIVGKGQFSLSLVADLVDRQHEELGPIGDILASSTHDVVSSVLVIQQHNALLNGETPLSMRNDNVI

SEQ ID NO: 179022 - protein, 71 aa, Glycine max
  Clone ID: PAT_MRT3847_132673C.1.pep
NVKGVVFFFFIRPLFFRIFLSLKSPFPSHFPVLKTSFFPLPPACGFFFQGPSFFLPPIVGVRLIFRGPFKK

SEQ ID NO: 179023 - protein, 135 aa, Glycine max
  Clone ID: PAT_MRT3847_132674C.1.pep
VRTIISFNRFLNIVPPYGIVMAAYKLQSVAFALCTTAKPGAIRRNKLWDPGITFGNHVLNPQHLEDKVFLQGPRNDREARVQQATSKKPEGLCDMIVIELAIEGFAEYCCRPAGGSNNQFWFWFRIFPSIESQFC

SEQ ID NO: 179024 - protein, 251 aa, Glycine max
  unsure (1)..(251): unsure at all Xaa locations
  Clone ID: PAT_MRT3847_132675C.1.pep
KHSAAFSXMGISPVRGILLHGPPGCSKTTLAKAAAHAAQASFFSLSGAELYSMYVGDREALLRKTFQRARLAAPSIIFFDEADVVAAKRGDSSSNSATVGERLLSTLLTEIDGLEEAKGILVLAATNRPYAIDAALMRPGRFDLVLYVTPPDMEARHEILCYTWQKFKKENDIDLSEIAXDTELSTGAELEGLCKEAGIVALREDISAAVXCDPXHFXIAKSSLKPALTKSEIGSYSSFMKTLSRTLPGHF

SEQ ID NO: 179025 - protein, 138 aa, Glycine max
  Clone ID: PAT_MRT3847_132676C.1.pep
EIEEMCKTHYEEFILAVDELRGVLVDAEELKSELQSDNFKLQQVGSALLAKLEELLESYSVRKNMTEAIEMLKNCIQVLELCVKCNDHISEGQFYSALKTLDLVEESCTQNIPAKAIKMVIESRIPVIKLHVEKKVCS

SEQ ID NO: 179026 - protein, 162 aa, Glycine max
  unsure (1)..(162): unsure at all Xaa locations
  Clone ID: PAT_MRT3847_132677C.1.pep
VLISKFKKKETGSQKDRGTNEEFFARIFYVVHKINSXHEKGLLEGNFYFEIKSCFILXKVPCQLAQYASVETHSXDINXAGSHSSQDCPEKENQEKPKXLLPRLRQITESQFGEVHVQMQTNLCIWSFDEVEPPKGPIVXLKIFHSKYXLSKNTFGGSILRI

SEQ ID NO: 179027 - protein, 125 aa, Glycine max
  unsure (1)..(125): unsure at all Xaa locations
  Clone ID: PAT_MRT3847_132678C.1.pep
XXXFPXXXEFGPKFFXGLPVVSLVVGPMSXXGKFPKGNLPQFINFIFTNRLTLVVMGYLFSPRFVMLALNPFLWYEYQGVSILVEEPATGVFPIPIFSVLAFFKKNKSSVFGAKKNQVSKFFLRN

SEQ ID NO: 179028 - protein, 136 aa, Glycine max
  Clone ID: PAT_MRT3847_132679C.1.pep
PRESLIFLKRTVWEAKKIKNWFLVGGLNKVGGRQNCFFFSGAAQDCTIVAQIFFPPNKKGIRVLKRKLGSGKMFHPKNIVRSREKVDFPPEVFFGIFAGGPQRNDNFWSGQKKKTLLFGKKKKKKKKKKKKKKKTP

SEQ ID NO: 179029 - protein, 119 aa, Glycine max
  Clone ID: PAT_MRT3847_13267C.1.pep
HASERAASTFCIPVINAGHLHFQNGTVTLIDLYTIERDIRKLDRIKVGLGGDLAYVRTVLSLAYLLAKYQDVKIYFVSSNADKMNDDIKYYLTSNGVQWEESVDLLERAYKCDVVYQTR

SEQ ID NO: 179030 - protein, 89 aa, Glycine max
  Clone ID: PAT_MRT3847_132680C.1.pep
MSAASRAWIVASSIGAVEALKDQLGVCRWNHALRSLQQHAKSNIRSYTQAKTLSSATSAAVSNKVKRTKEESMRKVMDLSCWGPNTSRF

SEQ ID NO: 179031 - protein, 76 aa, Glycine max
  Clone ID: PAT_MRT3847_132681C.1.pep
YGFWVFVFYSFNQGHTNTPENNAAKKSGPQNGKDTIKEGQALKRSRITTRKPRNETASTTKAERAPRTPAPLQAMP

SEQ ID NO: 179032 - protein, 93 aa, Glycine max
  Clone ID: PAT_MRT3847_132682C.1.pep
HSQILHLTSLIITMDTTDYHTQHITGPNNVTKPPRYWWSYTTTWMTVGSDRHIWVQHILIPKLLTPKSIVSELVRSSKVRLMSSPHQMSRTRG

SEQ ID NO: 179033 - protein, 38 aa, Glycine max
  Clone ID: PAT_MRT3847_132683C.1.pep
PRVRPRVRPGVRLHSWIFICNLYFGNDLIASNWKNLGR

SEQ ID NO: 179034 - protein, 60 aa, Glycine max
  Clone ID: PAT_MRT3847_132684C.1.pep
MNHPGNPLPWTGTPIKYGSCMAGDRDGNPNVTANVTKYVSLLSRRLAIDLYIGEVHSLII

SEQ ID NO: 179035 - protein, 118 aa, Glycine max
  unsure (1)..(118): unsure at all Xaa locations
  Clone ID: PAT_MRT3847_132685C.1.pep
ITXPQTLXKVSSICLIHXWFYXFCISLVXTXIYXXLLLXSAXVYEXIIXXXXLPXXXXLSESXYXXFXXVXIXXXYMNXXXXTXNAXXXIXXXXXIKCKKPXRYTHYXCLSSGXVXHX

SEQ ID NO: 179036 - protein, 58 aa, Glycine max
  Clone ID: PAT_MRT3847_132686C.1.pep
LGARYRKRFGAFEDLTVRLSKNFALQQVFPQDEKEAAILLMALSYGLLHGFPTDRYIT

SEQ ID NO: 179037 - protein, 86 aa, Glycine max
  Clone ID: PAT_MRT3847_132687C.1.pep
ICLQINMELLKVYLLLLFLVLGTGGRVEPSFFKSDEITTYHENQYSQPCCDLYRSLPSIPLQSICVYIRQSSYHSEFTSSMFTRSQ

SEQ ID NO: 179038 - protein, 145 aa, Glycine max
  unsure (1)..(145): unsure at all Xaa locations
  Clone ID: PAT_MRT3847_132688C.1.pep
RFKLCLRIDIFQRVIXAMMARGFKPYAIGPNPKPYATKSLTGLDFFGKXGKKIEXDQSLEKRVGFRAIVSLLPREXNSMVNKLPFYVLRATIFLSHIACKLDLXKMGMQLRQAVLXELLIPSLTLSXGDTLFDVNTVQKKMSNYL

SEQ ID NO: 179039 - protein, 198 aa, Glycine max
  Clone ID: PAT_MRT3847_132689C.1.pep
MLIMVRFFFFCFFISTLLIQGTLAIITPNESIQGNRTLVSSAGTFEAGFFNFGNSQGQYFGIWYKNISPKTIVWVANKDAPVKDSTAFLTLTHQGDPVILDGSRSTTVWFSNSSRIAEKPIMQLLDSGNLVVKDGNSKKENFLWESFDYPGNTFLAGMKLRTNLVSGPYRSLTSWKNAEDPGSGEFSYHIDAHGFPQL

SEQ ID NO: 179040 - protein, 82 aa, Glycine max
  Clone ID: PAT_MRT3847_13268C.1.pep
GGGGFFFFFFPNQFPFSSIPNIFLFFKSQILLGEKPLLFFLGGCFLPTRGTNPFPNMAFFIPKVGNKFLINMPKGLKAGPFY

SEQ ID NO: 179041 - protein, 50 aa, Glycine max
  unsure (1)..(50): unsure at all Xaa locations
  Clone ID: PAT_MRT3847_132690C.1.pep
GMLILIINHFYFFFXRSISQANILIFIVKQIHTHCNYSYTSHHRNSPQFT

SEQ ID NO: 179042 - protein, 162 aa, Glycine max
  Clone ID: PAT_MRT3847_132691C.1.pep
MNNSCSRAAAKAVKRNPNQRMKFVASDKDIVKNPSLGMGNIVVEDTSSTSSNQKIQSCGNTTSPTQTEEGMKKGTARSTLYEICAVNCWKPPIFECCKEEGPGHKRMFTFKVIIEIEASRNIIECYGAPHGKKKAAADHAAEGALLYLKVYKMYDEKPINKK

SEQ ID NO: 179043 - protein, 80 aa, Glycine max
  Clone ID: PAT_MRT3847_132692C.1.pep
RSPRSSRAAECAKGQSASLSASLTSNSPILGSSSLSSSREQQSRPRRSLHRAPSALTQASLPLLPITKHAHHTRARSFQS

SEQ ID NO: 179044 - protein, 71 aa, Glycine max
  Clone ID: PAT_MRT3847_132693C.1.pep
SSHPTNLRSTISGVTISSNAHPIAVTHIRHSPPTTCSTGSQPTSNSEGVPIPDTHTMNKGISELVVWAGDK

SEQ ID NO: 179045 - protein, 49 aa, Glycine max
  Clone ID: PAT_MRT3847_132694C.1.pep
DRLIHTIHPQNFQETDYMKDANILCRLHTSRLIINQVKHKLLARKSIKD

SEQ ID NO: 179046 - protein, 67 aa, Glycine max
  Clone ID: PAT_MRT3847_132695C.1.pep
KHFYVLKVHKLNNLGLSSTNIFIEKSLNIINRYYISLFCLFIFFSCLLLFILPPPLLSSSRSSRIPS

SEQ ID NO: 179047 - protein, 162 aa, Glycine max
  unsure (1)..(162): unsure at all Xaa locations
  Clone ID: PAT_MRT3847_132696C.1.pep
YRVAELWDAYLFNIAADPDMGPKRFMELIERVPPSYRQNHYPLYKTINSFLKTHSGISQDDKGAVCXYLDCQRLSQEACIEAVQDELMPLRLIVQALFVQQLNTHKAFKECSDSFRYAHCGDMSGSLSSSRYPYSASQNLGESPYTDGPELSSRPLSFLLQK

SEQ ID NO: 179048 - protein, 54 aa, Glycine max
  Clone ID: PAT_MRT3847_132697C.1.pep
KHHLLKAPMSSTPIPTSGLTLFLKNPKFVCFFRQSKFFSEQAKKHCPADHFLIF

SEQ ID NO: 179049 - protein, 159 aa, Glycine max
  Clone ID: PAT_MRT3847_132698C.1.pep
VMNCVSFQNDIIEWSRDHRCHHKWTDTDADPHNINRGFFFAHMGWLLVKKHPLVKEKGASLDMSDLTSDPLLMFQRKYYLPLVGIFCSLLPTAIPVYLWSESVWVSFCTSALFRYCLNLHATWFINSAAHTFGYKPYDVTVIATESLLTTLTAWGGGGH

SEQ ID NO: 179050 - protein, 56 aa, Glycine max
  Clone ID: PAT_MRT3847_132699C.1.pep
MGYEGSRRRHWSGSVKGKGWMKSVGLLKLHWMFDKVEWVNGLKCTDGRVINIRKIS

SEQ ID NO: 179051 - protein, 148 aa, Glycine max
  Clone ID: PAT_MRT3847_13269C.1.pep
MRRFTWFTPYRRHLLSFLTLESLVDKGESTFSKVSSSRQSFLLARALVNCGFVTKTQESLIPRVPLRYRYFHATAFSSSADRDYYRTLGVPENASQDEIKKAFHSLAKKYHPDANKNNPSAKRKFQDIREAYETLRDSKKRAEYDQMR

SEQ ID NO: 179052 - protein, 57 aa, Glycine max
  Clone ID: PAT_MRT3847_1326C.1.pep
CKKNQFHSIPSKLGISPNSSYTKICLKRTHVSKGINDLNKVKSQQLGGSLTIFLTLA

SEQ ID NO: 179053 - protein, 52 aa, Glycine max
  Clone ID: PAT_MRT3847_132700C.1.pep
CKTCVVYSKLFFFTYSNFQAIHPFLTLIRDTNSFFPTASSLKVPTTDTKAPH

SEQ ID NO: 179054 - protein, 60 aa, Glycine max
  unsure (1)..(60): unsure at all Xaa locations
  Clone ID: PAT_MRT3847_132701C.1.pep
HAGRLCFHXHPSGGGGGGSXXYTGGRAGASSTKGGGLXGAXVKGXNIEKKFXKVTGNMCL

SEQ ID NO: 179055 - protein, 67 aa, Glycine max
  Clone ID: PAT_MRT3847_132702C.1.pep
SFLFFFFFLRRLKFKISLKINLLIFYTLRFENNYLIVQFILLFEVQFYTGFKSTLLLKNRVTYLYMD

SEQ ID NO: 179056 - protein, 81 aa, Glycine max
  Clone ID: PAT_MRT3847_132703C.1.pep
MAYSAEPSSSLSFTSSSHLSNGSVSHNICPSYGSDPGPNLEAISLSKLSSNLEQLLIEPDCDYSDADLVVEDTVAVAEEEG

SEQ ID NO: 179057 - protein, 154 aa, Glycine max
  Clone ID: PAT_MRT3847_132704C.1.pep
NFIHSRNAYQPIMCGGEPRAGLRKYRGKADAPIYSIQICIPKHALNLIFSFTNGVDWDGPYRLQFQVPKALQNKPIDFFNKGLAEELSKEGACEQAIFPDTNKVITKCAMIGNLSKEGGDRCDLNFVVGCTDPSSHLYNPLANVDDGTCTIELD

SEQ ID NO: 179058 - protein, 175 aa, Glycine max
  Clone ID: PAT_MRT3847_132705C.1.pep
MAPPLFNWGVKDTHRGTPVVVKMENPNWSMVELEGPEEEDLMLTNSPSSGVSRDKGRGKNAKQLTWVLLLKAHRAAGCLTSIAPALLGFVAAVKRRVAAGKTDADTDTDGGRENENPAVKTRFYSCIKLFLCLSVFLLVFEIVAYFKGWYFSAARFQLEHFMWTPSFGVKGFFDW

SEQ ID NO: 179059 - protein, 73 aa, Glycine max
  Clone ID: PAT_MRT3847_132706C.1.pep
MAPPLFNWGVKDTHRGTPVVVKMENPNWSMVELEGPEEEDLMLTNSPSSGVSRDKGRGKNAKQLTWVLLLKAH

SEQ ID NO: 179060 - protein, 45 aa, Glycine max
  Clone ID: PAT_MRT3847_132707C.1.pep
PSIYICVQFKYFFIHVDFNKISLFSIFISNYLFTLLTIHNVKNCR

SEQ ID NO: 179061 - protein, 81 aa, Glycine max
  Clone ID: PAT_MRT3847_132708C.1.pep
FKYFIFYILSFLLNFYFIFYLSASFILNFLSIAFNLGLYQSKSKQILCGFNTQTFKYFTTYDKFDALDNELTFVTISTSHI

SEQ ID NO: 179062 - protein, 54 aa, Glycine max
  unsure (1)..(54): unsure at all Xaa locations
  Clone ID: PAT_MRT3847_132709C.1.pep
NDLGRTGYRGQVTQARVKFLDDQNCHIMRNVKXPVRDGDILTLLESEWEDRRLR

SEQ ID NO: 179063 - protein, 73 aa, Glycine max
  Clone ID: PAT_MRT3847_13270C.1.pep
GMEYQKRPALCFGPKMGGALPNNFPFKPFRGKGEPSVGGYIKGLLNLTTFDHPSLILPALKGNRASNSFPWVQ

SEQ ID NO: 179064 - protein, 85 aa, Glycine max
  unsure (1)..(85): unsure at all Xaa locations
  Clone ID: PAT_MRT3847_132710C.1.pep
NHDLKDGWGLATDGTLLLGSEGHTTLNTISPLCHHVSVXHRYRHCAGELNLFPWKWAYIKGEVGANSFMTDCFVRISPLDGHVLG

SEQ ID NO: 179065 - protein, 36 aa, Glycine max
  Clone ID: PAT_MRT3847_132711C.1.pep
DTTERDQLSIAARRVSSTLFALFARCVPSARSVPSA

SEQ ID NO: 179066 - protein, 237 aa, Glycine max
  Clone ID: PAT_MRT3847_132712C.1.pep
MDSSRNFLLSSHVAPSPPVKVKAQEIRVCTNRTCRRQGSFQTLETLSGLAPPNVAVKSCGCLGRCGGGPNLVVLPDGLIVGHCGTAARAAEVIATLFAGAGGHDPKTCLDALALRKRAEIEFAKRNFTEAELLLSQAIDLKPFGGIHITFKCRSFVRLELGNYSGALEDAEEALALAPGYSEAYICQGDAFLALNKFDLAEQSYSASLVIDPSIRHSKSFKARIAKLQEKLAAVKTL

SEQ ID NO: 179067 - protein, 27 aa, Glycine max
  Clone ID: PAT_MRT3847_132713C.1.pep
FSMSLSLNIISMINSSNSVINRRRPYC

SEQ ID NO: 179068 - protein, 46 aa, Glycine max
  Clone ID: PAT_MRT3847_132714C.1.pep
SPRGQLASSRLQGCNTYLVQSIHTVMPRLTSALDQGITCDAEVDKV

SEQ ID NO: 179069 - protein, 48 aa, Glycine max
  Clone ID: PAT_MRT3847_132715C.1.pep
ESVRRGERRGEPELCLNLLFFFLSVTLQIYSLSLYTHLVSLKASDHDR

SEQ ID NO: 179070 - protein, 82 aa, Glycine max
  Clone ID: PAT_MRT3847_132716C.1.pep
QANTISSWLKAPFDPDSHLPISRACSHKCWFLERYASQCTYNNLLIKTSTLLYWCCTETSLFTSSTGVTELEKHYTFLYPSF

SEQ ID NO: 179071 - protein, 28 aa, Glycine max
  Clone ID: PAT_MRT3847_132717C.1.pep
NQTSPFSTSLSASVVSFKSRIAHKSTAN

SEQ ID NO: 179072 - protein, 79 aa, Glycine max
  Clone ID: PAT_MRT3847_132718C.1.pep
KSQKQKFHSKFKEMERQPVPASKNPQSFCLSTRYNFPFIPISFRASLTGTKPPFASAMQQLGKKQSKKKFKNHPFCRLI

SEQ ID NO: 179073 - protein, 63 aa, Glycine max
  Clone ID: PAT_MRT3847_132719C.1.pep
FSSCRPCPQKKKKISNIFFLKAESGSPPRSQLPAPLSHLEAARTQIPALADPKAAEGPRYVLP

SEQ ID NO: 179074 - protein, 76 aa, Glycine max
  Clone ID: PAT_MRT3847_13271C.1.pep
NRKQKQSLLDFKNLSISCYFFVFDFLRDRISLSELATESVNHFLSPLLVDLLNTLLFDIGLRVRFKLLVSLSQFSV

SEQ ID NO: 179075 - protein, 50 aa, Glycine max
  unsure (1)..(50): unsure at all Xaa locations
  Clone ID: PAT_MRT3847_132720C.1.pep
DXLQXKPYXXFLXXLLXXIXXXKSXNXIXXLHXFKVPLPXSPXXLELXXL

SEQ ID NO: 179076 - protein, 168 aa, Glycine max
  Clone ID: PAT_MRT3847_132721C.1.pep
VQVSIGLADCQDKIQMALQNGKENVIKMEEKLTNAEKEIVKLKENAPHKKLGVVQDLVDRLAILDEMEQCLNTLWLMPTDSKTEFDPLATTRTILRLTELCAALESESSNYLESINERILPLLFAEIETRKGELCQQLSDFYASFFRFTEDDRVSPPLYSMSINCPSI

SEQ ID NO: 179077 - protein, 182 aa, Glycine max
  unsure (1)..(182): unsure at all Xaa locations
  Clone ID: PAT_MRT3847_132722C.1.pep
PLQLHHGIGCGSSLDKASKSSVVTSPRLTGITVDKSXEFPYEELXKATDGFSAANIIGQGGFGSVYYAXLQNEKATIKKMDIQASNEFLTELNVLTHIHHLNLIRLIGYYIKDSLFLIYKYIKNNNLSQHLRSSRKDPLTXTAQVQITLNTXKKLXYMHKHTIPIYMHXDIKSANILIDKNF

SEQ ID NO: 179078 - protein, 53 aa, Glycine max
  Clone ID: PAT_MRT3847_132723C.1.pep
LFDKEETPLVACLARDQNVIIWVYNSDITAGYCVGAYLFLSVRQDLIMIECRC

SEQ ID NO: 179079 - protein, 42 aa, Glycine max
  Clone ID: PAT_MRT3847_132724C.1.pep
FLILRLLLLSSLLLYYSFFCEGSLVQRISQNPNNNNFKTNIT

SEQ ID NO: 179080 - protein, 89 aa, Glycine max
  unsure (1)..(89): unsure at all Xaa locations
  Clone ID: PAT_MRT3847_132725C.1.pep
MASLMEYGCQYWITHCTNSQLACSGSFSIHEGIPCSSALPSIWQKRAPLMSKYKXIHPKNNTPASEEKIIFRQELYQFGAYLPVKNSLI

SEQ ID NO: 179081 - protein, 74 aa, Glycine max
  Clone ID: PAT_MRT3847_132726C.1.pep
ANQAHISNNTNYNCDANVEKKSLVLHVLGIENKEVNARMLFNVFSNFGNVVKLIFIKTRAVALVEFDNIVSSIN

SEQ ID NO: 179082 - protein, 33 aa, Glycine max
  Clone ID: PAT_MRT3847_132727C.1.pep
PFFFFFFFFFFFFFFFFFFFFFFFFHINLLFYF

SEQ ID NO: 179083 - protein, 51 aa, Glycine max
  Clone ID: PAT_MRT3847_132728C.1.pep
KGKGFWAPWVCPFFFYQKLKTFYIVFVFQKSFCNYFWKKGVFPNNFIFFKK

SEQ ID NO: 179084 - protein, 82 aa, Glycine max
  unsure (1)..(82): unsure at all Xaa locations
  Clone ID: PAT_MRT3847_132729C.1.pep
XTTLKXTIXXKKENRGPANXRNAFVHSQFLKINQQILYLTTYEPPSAFKQAYSPSIWXXTPIRYIRISKYLXCNAFCEILHA

SEQ ID NO: 179085 - protein, 106 aa, Glycine max
  unsure (1)..(106): unsure at all Xaa locations
  Clone ID: PAT_MRT3847_13272C.1.pep
MANAMGRAIPITTDNTPPCWITLKFTGPKFIRVYHTSKTNNYITSIASNGGRVQGIQVCSPVATKKAXTFTYLSXLVDAQLGKQVTYTTRNTSITTLQSALEHGTL

SEQ ID NO: 179086 - protein, 231 aa, Glycine max
  Clone ID: PAT_MRT3847_132730C.1.pep
MAEVPGDGGATLSVSGSFKEGRGSARRRGGGGGVRPPSMDADEFMNLLHGSDPVKVELNRLENEVRDKDRELSEAQAEIKALRLSERLREKAVEELTEELSKVDGKLKLTESLLESKNLEIKKINDEKKASMAAQFAAEATLRRVHAAQKDDDMPPIEAILAPLEAELKLARHSSAKLQDDNKALDRLTKSKEAALIEAEKTVQIALAKATFSLCILSKILFFLANLNVGN

SEQ ID NO: 179087 - protein, 61 aa, Glycine max
  Clone ID: PAT_MRT3847_132731C.1.pep
SKLGVIKFSPQILDQFVFFKGAFCPGHKRLHVPLFFWKKFFWEGLFLTFGIANPVQAFFNF

SEQ ID NO: 179088 - protein, 79 aa, Glycine max
  Clone ID: PAT_MRT3847_132732C.1.pep
PSLSRTRGLLHPPPRVPSFLFSFLLLPLSICQFCSHLSLFFFSSSSVKRGIINKSNKKKEKKHPQQNMGWGAFFAYSLS

SEQ ID NO: 179089 - protein, 71 aa, Glycine max
  Clone ID: PAT_MRT3847_132733C.1.pep
GSRQARCGNALTRGRMVHGDLNAQSWGFLQPEGAIFTRDEEVPTYAHPGGCYRTGTCQHGGYLDCGAWGGT

SEQ ID NO: 179090 - protein, 146 aa, Glycine max
  Clone ID: PAT_MRT3847_132734C.1.pep
TRTGTSLSSTLVPEKPKTQNRFIFEPHHQYKNRKKESFQNAKNSQETKTRKENAIFFLLAPNNNSTPFVSFHQEPILPPTHSSKCFSSVKAPSFPPSFSASSSHHCSASESALSQPPQTTARSSTTPRRRSIETGRVAPFRQPEIF

SEQ ID NO: 179091 - protein, 85 aa, Glycine max
  unsure (1)..(85): unsure at all Xaa locations
  Clone ID: PAT_MRT3847_132735C.1.pep
AMPSFLQFVLPSKASKVVNQVAKVPTVSNCLNLWEASGFSTVPGXGMVHTKGLYLERPTISPHEADAPLLMESYKVYTDEFVALY

SEQ ID NO: 179092 - protein, 263 aa, Glycine max
  unsure (1)..(263): unsure at all Xaa locations
  Clone ID: PAT_MRT3847_132736C.1.pep
MAISSNASPFDSIIFDLDDTLYPSSTGIDKCVKKNIQLFLIQKCGFSESKALTQRVELFKTYGSTLAGLRALGHDITAEEYHGFVHGRLPYDSINPDHYLRNLVCTIKQRKICFTNSDRIHAMRALDRLGVKDCFEQIICFETINPXNLPYSTRPDEFXILLKPSXLSASKIALDAANVDPRRTLFLDDSVRNIAAGKEMGLHTVLVGKTMKSKGADYAVESVHNLAQVIPEIWANEMDGGDPTMTRSKSELEAVLACALVGA

SEQ ID NO: 179093 - protein, 58 aa, Glycine max
  Clone ID: PAT_MRT3847_132737C.1.pep
YNIPRIVFWLFWFPIILAATPTPFCLGYAGCVKVEKINCNRARTTLPKIENQDLAAFL

SEQ ID NO: 179094 - protein, 59 aa, Glycine max
  Clone ID: PAT_MRT3847_132738C.1.pep
DPNTPTITLLSFSLSLLIAYIYSQAGASTLTPILFFRDRLPILIIYLSETKEPNKENTL

SEQ ID NO: 179095 - protein, 299 aa, Glycine max
  unsure (1)..(299): unsure at all Xaa locations
  Clone ID: PAT_MRT3847_132739C.1.pep
MTKVYGTGLYDFRRHRVAEYPVAAPPSESKAEVPKAGGGGGFPSSITLSEIQRDRLTKIAEANWLKSGDAARPKKDFDPELVRKIYETELLVKEGSKPVPLQRVMILEVSQYLENYLWPHFDPLAATFEHVMSIIIIVREKFRENVAAWTCFHERKDAFKGFLESVLRLKEGRELSIAEKTNYLVFMINAFQSLEDEVVSRTILRLANLKSWYSLSYGRFQMELCLNPGLIKKWKRMIKKEPVKGDGSXFKIPQLPVEVXVVRNLIEEFLEILDSQVFPLKNYLVRTMNLLMLLGLGCL

SEQ ID NO: 179096 - protein, 101 aa, Glycine max
  unsure (1)..(101): unsure at all Xaa locations
  Clone ID: PAT_MRT3847_13273C.1.pep
WVQTFLQDLIKVFVHYITFLSYLMHFTLFKFHFYILKXFYYVFYLLIYKHYLLFFFSLIFIFFIFYFILYFHIFXYYFSYFYLIFFILIFFSIIFYFHIYL

SEQ ID NO: 179097 - protein, 54 aa, Glycine max
  unsure (1)..(54): unsure at all Xaa locations
  Clone ID: PAT_MRT3847_132740C.1.pep
GVSSPGCRTLRXPIVVVHASSGIDVLGSGYMWSGYRQNVVNGNPSPGLQSLALF

SEQ ID NO: 179098 - protein, 82 aa, Glycine max
  unsure (1)..(82): unsure at all Xaa locations
  Clone ID: PAT_MRT3847_132741C.1.pep
XXXXXXXPXXKSRXHXSXXRXPPXFSFXKVRILLHNEKARVKLMVXFLSTXLKXKCXXXSVXCLLLLLPLXTLVXSXFSVQV

SEQ ID NO: 179099 - protein, 52 aa, Glycine max
  Clone ID: PAT_MRT3847_132742C.1.pep
KSCHFVDKCLNLYSLACPMWHLVQTGGGINEMFYVKSELHGSISPKSRKFEL

SEQ ID NO: 179100 - protein, 136 aa, Glycine max
  Clone ID: PAT_MRT3847_132743C.1.pep
MKVFGFLAAALVIAGAAGQSTTTPPTTTGSPSTPTNSPSSTPSTSGTPPTTGNPNSATPSTPSTPSSPSSSTNSPNSTPNPSSTPTGTTPSTPFSGSNGSNNGLNGAALETTDTKEPTDTNSPDTPTTLSTTESSH

SEQ ID NO: 179101 - protein, 71 aa, Glycine max
  Clone ID: PAT_MRT3847_132744C.1.pep
KTLYYRKILLLYENENGFKVYKSLSIKMLSLSIHMCFPYNFKNIFSHLHPCPRTWPLLFYFCERLWGSGQA

SEQ ID NO: 179102 - protein, 38 aa, Glycine max
  Clone ID: PAT_MRT3847_132745C.1.pep
PGPNQVQVHPPPPQVQGPGLPWPFTFLSIVYIKKNHSS

SEQ ID NO: 179103 - protein, 160 aa, Glycine max
  unsure (1)..(160): unsure at all Xaa locations
  Clone ID: PAT_MRT3847_132746C.1.pep
GSSNDPSLNEFSYGRNPRFTAEEVEQLDKNKPWSRALDGSSYLPGMVGLNNIKETDFVNVTIHSLMRVTPLRNFFFIPENYKHCKSPLVHRLGELPRKIGHARNFKGQVIPHQFLQLXMKAIKKSVRFVAHSDPKEFMXWLLNTLHADFKTSKKNSSLIF

SEQ ID NO: 179104 - protein, 50 aa, Glycine max
  Clone ID: PAT_MRT3847_132747C.1.pep
FTYRVTSLGKLKNCLTTYLNDENSALKPDPKMFNMMIYIHKKAGSYEKAR

SEQ ID NO: 179105 - protein, 139 aa, Glycine max
  Clone ID: PAT_MRT3847_132748C.1.pep
MMPLSSLFPVLVIALVSSFTSSAVNTNYENFIQCLYSYSHNSSSISKVVYTKTNASYSSILHFSIQNLRFSSNTTPKPLVIVTPTEVSHIQAAIICSQRHGLQIRTRSGGHDFEGLSYVAEAPFVVIDLINYRRIDVDV

SEQ ID NO: 179106 - protein, 58 aa, Glycine max
  Clone ID: PAT_MRT3847_132749C.1.pep
APFEVLRQSACCLRCTFLVSARLLSVISPTFSYRFSLVVISITPFGMSIRPCESVRFT

SEQ ID NO: 179107 - protein, 83 aa, Glycine max
  unsure (1)..(83): unsure at all Xaa locations
  Clone ID: PAT_MRT3847_13274C.1.pep
EKRKEKKADLLEGVSVVRSEKDKNXFILDGTDNELVGRACALISQAFYVKRKXVSYFLEGMYVRKKQTRLRKCMLQPARTLIG

SEQ ID NO: 179108 - protein, 656 aa, Glycine max
  unsure (1)..(656): unsure at all Xaa locations
  Clone ID: PAT_MRT3847_132750C.1.pep
MFRHRFLIGMYPAQGHINPAFHFAKRLVSLGAHVTVSTTVHMHRGITNKPTLPHLSFLPFSDGYDDGYTSTDYALQASEFKRRGSXFVTNLIASKAQEGHPFTCLVHTVLLPWAARAARGFHXPTAMLWTQPATILDIFYYYFHEHGEYIKDKIKDPSCFIELPALPLLLAPRDLPSFLLGSNPTIDSFIVPMFEKMFYDLDVETKPRILVNTFEALEAEALRAVDKFNMIPIGPLIPSAFLDGKDPNDTSFGGDIFRLSNGCSEWLDSKPEMSVVYVSFGSLCVLPKTQMEELARALLDCGSPFLWVIKEKENKSQVEGKEELSCIEELEQKGKIVNWCSQVEVLSHGSVGCFVTHCGWNSTMESLASGVPMVAFPQWVEQKTNAKLIEDVWKTGVRVDKQVNEDGIVENEEIRRCLEEVMGSGEKGQELRNNAEKWRGLAREAVKEGGSSDKNLRAFLDDVEDPEDTSLGGDLLPVSNGYVEWLDSKEDKSVVYISFGSYFVLSKRQTEEIASALLDSGFPFLWVIRVKEEEEGEEVCLRGVGREGEVGEVLFSGGELGFGGAHGGVSSVEKEINKCSEEVMGSGELRMNVKKWKGLAREAAKEGGPSDFLMMLKFDHMAVTSAFPFLNFPVRFIFLFYYCICMTENQVKFLLY

SEQ ID NO: 179109 - protein, 61 aa, Glycine max
  Clone ID: PAT_MRT3847_132751C.1.pep
SAAFSLLATISLNLIGYASLATLPPPRGPPPSSCFSIPHPWSCNHIFIFMLCFCLIAGPCF

SEQ ID NO: 179110 - protein, 177 aa, Glycine max
  Clone ID: PAT_MRT3847_132752C.1.pep
FYEVGIYVPVDIKEAKSWYAKAAASGNKDATGRIDSISRSKTLSRRDHENVAIARIKSTRYGNHQRGASNTSAMQPVTENLEMPDPSRMSLSDPSTAPAAPYPDRQGPHGHPGYPSDARPSSAFGINPNIRPNVAQYNRAASYGPGPMGYRPPGYTTPPGGSAPPKSTAPKLDISYS

SEQ ID NO: 179111 - protein, 172 aa, Glycine max
  Clone ID: PAT_MRT3847_132753C.1.pep
PQKKGGKRNKKKGGGFRGGDPPPPGRGTLRGKPGPLTLKKTPPPPGGGQVSKNRGPFSKTGKQGGGGTPRALFPKQFGPQGEKPPRGPPQPGSPPKGGGGAPPPPTFGPGRFKSPKGGPLLPPPPPRGGGGGDPRGRGPAKGPGGKPASGGRGPPPPPEGPPTGAKKRAGGV

SEQ ID NO: 179112 - protein, 265 aa, Glycine max
  Clone ID: PAT_MRT3847_132754C.1.pep
MLSHLYLFLPNFLLHFDKQLLSRKMALLGFLLGLFLMVTHVKGYGFGGWTNAHATFYGGGDASGTMGGACGYGNLYSQGYGTDTTALSTALFNNGLSCGACYQIKCVNDPQWCLPGSIIVTATNFCPPGGWCDPPNHHFDLSQPVFQHIAQYRAGIVPVVYRRVRCRRKGGIRFTINGHSYFNLVLVTNVGGAGDVHSVSIKGSRTRWQAMSRNWGQNWQSNSYLNGQSLSFVVTTSNGHSVVSYNVAPAGWSFGQTYTGRQFNY

SEQ ID NO: 179113 - protein, 45 aa, Glycine max
  Clone ID: PAT_MRT3847_132755C.1.pep
SRWCYQQQCLSIHQQHLGLRTPSHGDPNSYKLSLQYLGILDPSHW

SEQ ID NO: 179114 - protein, 47 aa, Glycine max
  Clone ID: PAT_MRT3847_132756C.1.pep
FRKYWLNRLKFGQGPCQMKPRENLRLPFFRIKWKSHWSLPWQLAKTG

SEQ ID NO: 179115 - protein, 245 aa, Glycine max
  Clone ID: PAT_MRT3847_132757C.1.pep
KQGKPRLKPPFPANAGLYGCPTTVTNVETVAVSPTILRRGPEWFASFGRKNNAGTKLFCVSGHVNKPCTVEEEMSIPLKELIERHCGGIRGGWDNLLAVIPGGSSVPLIPKHVCDDILMDYDALKAVGTGLGTAAVIVMDKSTDVVDAIARLSYFYKHESCGQCTPCREGTGWLWTIMERMKVGNAKLEEIDMLQELTKQIEGHTICALGDAAAWPVQGLIKHFRPELERRIREHAERELLQATG

SEQ ID NO: 179116 - protein, 494 aa, Glycine max
  Clone ID: PAT_MRT3847_132758C.1.pep
SIQFAFITGKANMRGILSVRTALVQHHSEKLGLGFRLFSTQGASTASTPQPPPPPPPPEKTHFGGLKDEDRIFTNLYGLHDPFLKGAMKRGDWHRTKDLVLKGTDWIVSEMKKSGLRGRGGAGFPSGLKWSFMPKVSDGRPSYLVVNADESEPGTCKDREIMRHDPHKLLEGCLIAGVGMRASAAYIYIRGEYVNERKNLEKARQEAYAAGLLGKNACGSGYDFDVHIHYGAGAYICGEETALLESLEGKQGKPRLKPPFPANAGLYGCPTTVTNVETVAVSPTILRRGPEWFASFGRKNNAGTKLFCVSGHVNKPCTVEEEMSIPLKELIERHCGGIRGGWDNLLAVIPGGSSVPLIPKLVCDDIFMDYDALKAVGTGLGTAAVIVMDKSTDVVDAIARLSYFYKHESCGQCTPCREGTGWLWTIMERMKVGNAKLEEIDMLQELTKQIEGHTICALGDAAAWPVQGLIKHFRPELERRIREHAERELLQATG

SEQ ID NO: 179117 - protein, 117 aa, Glycine max
  unsure (1)..(117): unsure at all Xaa locations
  Clone ID: PAT_MRT3847_132759C.1.pep
AFLVDFLASTVVSVLVISIMLIVLNCNCSIVFHMLLSKDEGHYFYDANSLTTHTANMAIXTGXDGKDAIQSLTECAXEKLTEGLGFKHDQQSITKKVSDYSGDASQKSHDYSCDTAH

SEQ ID NO: 179118 - protein, 72 aa, Glycine max
  Clone ID: PAT_MRT3847_13275C.1.pep
RIIIPLHYDILPTFNIRIMAYTCGPIHFSYLLLININCLRNKFIVVLYNHPIINLPSYKLIKLYIPLNALYY

SEQ ID NO: 179119 - protein, 59 aa, Glycine max
  Clone ID: PAT_MRT3847_132760C.1.pep
PSWKRRETTRYGSYTVSLQQQLRNTEKLHKKNTHEMNKKNVEKPNEEHKQEYNNKVLFH

SEQ ID NO: 179120 - protein, 95 aa, Glycine max
  unsure (1)..(95): unsure at all Xaa locations
  Clone ID: PAT_MRT3847_132761C.1.pep
GRVVSKRFLPPRPSDGKRKASKXCVHFVSNLIRKVAGFAPYEKCIIXFMKVGKDKRAIKVAKSKLGTHKRAKKKREEMSSVFREIRAGGVVDNKQ

SEQ ID NO: 179121 - protein, 53 aa, Glycine max
  Clone ID: PAT_MRT3847_132762C.1.pep
SIDWLDPRLIRRHFSVKHVLGCPVCIFFFFVISLGLLTELSFFITNNKIIAYE

SEQ ID NO: 179122 - protein, 86 aa, Glycine max
  Clone ID: PAT_MRT3847_132763C.1.pep
ILSCNLWKAWIKYMQLLLLIVAPYTHESYSSAETAKFHLNKAIVQLLCPLTLSRHLLIISPKIFLSYINLPKFRSPGEQIFNYGQN

SEQ ID NO: 179123 - protein, 51 aa, Glycine max
  Clone ID: PAT_MRT3847_132764C.1.pep
LMSLSNTPNKWQSQSMILVNHPRTIIKDDKSKFIASKVYSSTVKSMMLKDV

SEQ ID NO: 179124 - protein, 490 aa, Glycine max
  Clone ID: PAT_MRT3847_132765C.1.pep
VDPRVRIHNGSLSTKPVPLFHAIPPDQFTLLSKVLSKLSILLWPCTFLIEAFLLVQNWDLLFHFVLPCFLLLCFLVKHFLSKPSPIYLVDFSCLKPPSHCRVPFTTFLENASMLEVFDSESIAFMAKVLHSSGQSEEACLPPSLHYIPPNTHHTESIKEVQMVLFPIVEDLLAKTNLSPLDIDILIINCSGFCSSPSLTSIVINKYSMRNDIKSYNISGMGCSASALCIDLAQNLLSVHNNSNAVVLSTEILSTGWYSGNEKSKLLINCLFRMGSAAILLSNKKEAKKTAKYRLVRTLRTQRAFDDKSYFSAIREEDSDGKLGVTLKRDLLQVAGETLRTNISILGSEILHLSEKFSYGVSVIKKRFIKSEGIYVPNFKTVIQHFCLPCSGRPVIREIGKGLKLSERDIEPALMTLHRFGNQSSSSLWYELAYLEAKERVHKGDKVWQLGMGSGPKCNSVVLKCIRPIVGEYEKGPWADCINQYPILALD

SEQ ID NO: 179125 - protein, 364 aa, Glycine max
  Clone ID: PAT_MRT3847_132767C.1.pep
MEARVSSSLGLPSPKPHQFSVSNLTDFPSLFTHTPTLPFASTSKWARPTPKPNPKPLLKTLSVLDRALIGAAAGGLAGAFTYVCLLPLDAIKTKMQTKGAAQIYKNTLDAIVKTFQSEGILGFYSGVSAVVVGSTASSAVYFGTCEFGKSFLSKLEAFPAVLIPPTAGAMGNIMSSAIMVPKELITQRMQAGAKGRSWQVFAEIIQNDGVMGLYAGYSATLLRNLPAGVLSYSSFEYLKAAVLQKTKQSYMEPVQSVLCGALAGAISASLTTPLDVVKTRLMTQVRGEGVSKVAAVMYDGVSATVKQILKEEGWVGLTRGMGPRVLHSACFSALGYFAFETARLSILREYLRSKELREVSVSSG

SEQ ID NO: 179126 - protein, 44 aa, Glycine max
  Clone ID: PAT_MRT3847_132768C.1.pep
VTIRPTKVMTNMLISRKQMDVDVLHSWRANVFHAVLKEKLGQMY

SEQ ID NO: 179127 - protein, 66 aa, Glycine max
  Clone ID: PAT_MRT3847_132769C.1.pep
HQFHALIQGLSNVQCMLVLACSRSCGLTDSRVSIFLHFKLKFFCSSLLRSPVLRHFKRNVLISIFS

SEQ ID NO: 179128 - protein, 55 aa, Glycine max
  unsure (1)..(55): unsure at all Xaa locations
  Clone ID: PAT_MRT3847_13276C.1.pep
RXGEPGATHASIHLLKDYLMNIQDINSKGAYWIFLWLSKKLNXHRKSKSYFIKLI

SEQ ID NO: 179129 - protein, 247 aa, Glycine max
  unsure (1)..(247): unsure at all Xaa locations
  Clone ID: PAT_MRT3847_132770C.1.pep
MDAEAVLNLFDSCWFEVNILRRNSSPHTSITSYTENLDHVLKEEKEPKLPLIRTSHTRSMSDQLSMTTTSFNQDSLSPDSVLLLHPKLQTILSGKEATDSEPDENPRTQVRPHPEVLCPKKNKKXSSSRTRKRRESKSLSDLEFEELKGFMDLGFVFSEEDKDSSLASIIPGLQRLRKKEEEEEENEDCDEISVPRPYLSEAWEVQEYDRRKKENSLVNWKMPAINNETDMKESLRWWAHTVASTVR

SEQ ID NO: 179130 - protein, 221 aa, Glycine max
  Clone ID: PAT_MRT3847_132771C.1.pep
MESEAVLNLFDSCWFEVNILKTNSSPHISITSYNESLDYEIKEEEEEEEEPKLPLIRTSHTRSMSDQLSMITTSFNHDSLSPDSVLLLHPKLQIILSGKEATDSESDEVLCPKKNKKISSNGTRKRRESKSLSDLEFEELKGFMDLGFVFSEEDKDSSLASIIPGLQRLGKKEEEKEEDDDCDEISVPRPYLSEHGRRNVIGEKKRPLELEMPCYQHETDM

SEQ ID NO: 179131 - protein, 210 aa, Glycine max
  Clone ID: PAT_MRT3847_132772C.1.pep
MGTWFTNARPYLLLVAVQFGSAGMFIFAMDAIKKGMSHYVFIVYRNAIASVSLAPFAFVLERKVRPKMTFRVFSEIMALAFFEIILDQCFALLGMKFTSASFLSAVMNSAPSVTFVMAVILRMEHMKIKEVACQAKVIGTVITFGGTLLMALYKGPVLSFMRSSTSHPSQPENVATETGNHWVIGTLFLLIGCAGFFLFYIIITISFFEY

SEQ ID NO: 179132 - protein, 82 aa, Glycine max
  Clone ID: PAT_MRT3847_132773C.1.pep
PEHGSPVPMLCPAQDRSRSKRLPCCLLGYQARPVPGFRLTMMFCHDRLDQLAVGEHRRLCPQRLPCPAGTVRMSGGIRVLSS

SEQ ID NO: 179133 - protein, 82 aa, Glycine max
  Clone ID: PAT_MRT3847_132774C.1.pep
PIHQFEVRCCPCGTQTKCLLHCWQSVHHKRWACAIEYCRAPPQPVDRDKLKPSIDRSDRLDNRLWMECKTTLFFADICQMFV

SEQ ID NO: 179134 - protein, 69 aa, Glycine max
  Clone ID: PAT_MRT3847_132775C.1.pep
PRVRPRVRGGEAFQVSLPLLWEFLKIVGVRQGLSCNPSSCIGFHGSFKVFSIWMVYEDFKHPNNGKEIH

SEQ ID NO: 179135 - protein, 54 aa, Glycine max
  Clone ID: PAT_MRT3847_132776C.1.pep
GRLAEPGFQNARWVDGELVILDGKHLKAGPVVGFVYWAPGYHFLVFFNRLRLQQ

SEQ ID NO: 179136 - protein, 335 aa, Glycine max
  Clone ID: PAT_MRT3847_132777C.1.pep
ILSHEPPKDASSMNLVCGKNVLIDMSIHTAYVKAIRAAQHYIYIENQYFIGSSYNWSQHKDLGANNLIPMEIALKIAAKIRANERFAVYIVIPMWPEGVPTGAATQRILFWQHKTMQTMYETIYKALVEVGLETAFSPQDYLNFFCLGNREAIDMYENITVSGTPPPANSPQAFSRNNRRFMIYVHSKGMIVDDEYVILGSANINQRSMEGTRDTEIAMGAYQPHHTWARSQYHPRGQIHGYRMSLWAEHTGTIEDCFLQPESLECVSRIRTMGELNWKQFASNDVTEMTGHLLKYPVEVDRKGKVRSLPGHEEFPDVGGKIVGSFIAIQENLTI

SEQ ID NO: 179137 - protein, 105 aa, Glycine max
  unsure (1)..(105): unsure at all Xaa locations
  Clone ID: PAT_MRT3847_132778C.1.pep
AEIVAAXDXXESXNTSAPXSRASPRVAXXLCXEXAGXDQHELTAXXTFRTXRDRXCGQRXFXXEXKLXXIXIXXXXDXAXTMIXFLXXRXIXXXLXPNSELTXCD

SEQ ID NO: 179138 - protein, 137 aa, Glycine max
  Clone ID: PAT_MRT3847_132779C.1.pep
MEEPKPILQKPPGYRDPDSKPPPPPPRKPMLPPSFQPKPKRRSCCRICCCTFCLTILILILVVVIAAALFYLIYDPSLPEFHLDSFRVPKLNVTEAADGAYLDADTSARVEVKNRSGRMTWHFSQSQFTVSAENGDL

SEQ ID NO: 179139 - protein, 30 aa, Glycine max
  Clone ID: PAT_MRT3847_13277C.1.pep
TCYTRFGLRHEIVVVITKYIMLASKKNFFH

SEQ ID NO: 179140 - protein, 113 aa, Glycine max
  Clone ID: PAT_MRT3847_132780C.1.pep
MAVTMTSFSYNGAQTIPITNLPSGVAFNTQTSIKLTNANFPAWRVQFNALLVGYEFIDELVVISSPLDDFDLVIPTLNGLGVEYREVFVALCTQGYSINFEELHDFLAHFENY

SEQ ID NO: 179141 - protein, 47 aa, Glycine max
  Clone ID: PAT_MRT3847_132781C.1.pep
LGIGFTCTSGNPRFDSPPHSNTGSLCQPLTIVAIGMHLAPGRFSSVW

SEQ ID NO: 179142 - protein, 63 aa, Glycine max
  Clone ID: PAT_MRT3847_132782C.1.pep
YLWQPLPFSITTLIWIKALIIGLIEFQRNSDLDPKKRLYPGGSYFDQQDLASYPEKIATIEFS

SEQ ID NO: 179143 - protein, 52 aa, Glycine max
  Clone ID: PAT_MRT3847_132783C.1.pep
TSVVHAEKVTYMPSLSTVYSRKNKVDLSPIYHVNGFKMSIYALSIVFFKEKK

SEQ ID NO: 179144 - protein, 64 aa, Glycine max
  Clone ID: PAT_MRT3847_132784C.1.pep
SCVRSQTLLTYINRFTLDMLHANHQEHQYPIVAHLSNTDNPGQADSITLFLLAENIMLVVIDYN

SEQ ID NO: 179145 - protein, 45 aa, Glycine max
  Clone ID: PAT_MRT3847_132785C.1.pep
RAPLQSNYALHCIIYMFILTVLNLLYMYFITPFFFFFFFFFFFKN

SEQ ID NO: 179146 - protein, 110 aa, Glycine max
  Clone ID: PAT_MRT3847_132786C.1.pep
TRPKSKLMRSVEAHFGEALNPLAYCIMTRSLWYARSYDYFDQWCFRLDVPNPREHCTIEDMHRTLAFIFFHCLHMMPDTLLTTTVYSCLIHGCSCTLRPMNIGHYCFVAT

SEQ ID NO: 179147 - protein, 141 aa, Glycine max
  Clone ID: PAT_MRT3847_132787C.1.pep
IFVVVDVGEIIMFWRTNRQSIATSEWKLDRTNLNGPRGSTMGTIRRRCSVEANDNNITELCNVWIMICLWCNTRKILSNGPIKRASGGRLGNSACTKASCIEKKWETSRMGAKANLNSKHKKGKPSEKGGGNGRVVEARAE

SEQ ID NO: 179148 - protein, 136 aa, Glycine max
  unsure (1)..(136): unsure at all Xaa locations
  Clone ID: PAT_MRT3847_132788C.1.pep
RNFRVDPRLRTEEWVRRREKKGSPADILVTLGDFTSXKRTVTSFFTLRGXSFEWNSEWPNLRDPLLSPPQNRSSXFQLLVPACCISRLSEHLYYAGHTAITIIYYYKVVIYNMLQPNALDRTLMRWRMMDIPAIAS

SEQ ID NO: 179149 - protein, 317 aa, Glycine max
  Clone ID: PAT_MRT3847_132789C.1.pep
MENSDTTLTSSSLPPPPPVSAEEPEPKKLKMSTTTSDDEETGTKKRYKRRKVAIFFAYCGVGYQGMQKNPGAKTIEGDLEEALYVSGAVPEQDRGVPKRYDWARSARTDKGVSAVGQVVSGRFYIDPPGLVDRLNSNLPSQIRIFGYKRVTASFNAKKFCDRRRYVYLIPVFALDPSCHRDRETVMASLGSGNELVKCLECSERGRKVVGLVGNRKQNLELEAVDVEAGISSNRDSGVTENVEVSLSKGDDNHLNEESGNDNKGGMNCKTGLETVIPVQEEGTPLNGESVNNSDILEEEKLMERISQPMEGSVMVRR

SEQ ID NO: 179150 - protein, 70 aa, Glycine max
  unsure (1)..(70): unsure at all Xaa locations
  Clone ID: PAT_MRT3847_13278C.1.pep
FMAGSSLFGSSLDSIKSDLEPIARPSKTMYFSTSGTQFHIYKYLSLLXKKKKKKKKSAGSLEDTILHTRA

SEQ ID NO: 179151 - protein, 47 aa, Glycine max
  Clone ID: PAT_MRT3847_132790C.1.pep
VKFESYFIFCGFMSCLIDIYICFNIIQYGLLQLATYFFLEHDSFLCP

SEQ ID NO: 179152 - protein, 55 aa, Glycine max
  Clone ID: PAT_MRT3847_132791C.1.pep
GVRVCLGKDLALMKIKSVEDALVRRLKFGSPNRIRSSGWRRYNRYIRRGVSGWGL

SEQ ID NO: 179153 - protein, 50 aa, Glycine max
  unsure (1)..(50): unsure at all Xaa locations
  Clone ID: PAT_MRT3847_132792C.1.pep
NXAXTVEHFLMQTTSSXHCLMLALTLSSLXFXIIXXSSLKCTWPTLHXRA

SEQ ID NO: 179154 - protein, 123 aa, Glycine max
  Clone ID: PAT_MRT3847_132793C.1.pep
LAEMKKQLASRRLLMWVMVHLSISGVLSKSNHTTTSVVCDGSVEDCLNVHHLDSQLPTISSTHFRRILAGVINPVTALTNNPATSAGCPSSHGYVKCGAATGSGQDSRCADKNAYYKPCHYIQ

SEQ ID NO: 179155 - protein, 59 aa, Glycine max
  Clone ID: PAT_MRT3847_132794C.1.pep
ELTSALVHSAKLRKSALYATHISTALAIFINPALAIHARRQISIYVHTINWRAPYRAIT

SEQ ID NO: 179156 - protein, 92 aa, Glycine max
  Clone ID: PAT_MRT3847_132795C.1.pep
TNSFPPSPAPTSAESSLEDHAPKINLRLDVHLMPLLPPALWVSPVVMLLMGSDLIRVHPADVLIHIPRSSPGIALILIKISYDRHKLFMYYF

SEQ ID NO: 179157 - protein, 188 aa, Glycine max
  Clone ID: PAT_MRT3847_132796C.1.pep
MRVSTETEPETKKIKRIRGGGDSSKHPLYRGVRMRNWGKWVSEIREPRKKSRIWLGTFPTPEMAARAHDVAALSIKGPAAILNFPHLANSLPRPASLAPRDVQAAAAKAAHMDPSSLSSLVSAMDLSSASDELSQIIELPSLESTDDGSVDLKKEFVFVDSLDAWMYQPPFGFDTEQDTGFEGLMWNY

SEQ ID NO: 179158 - protein, 155 aa, Glycine max
  Clone ID: PAT_MRT3847_132797C.1.pep
LCVRRRASDRRGGCNCVRKYLSRVCIRREADMKKQLASRRLLMWVMVHLSISGVLSKSNHTTTTTSLLCDGSVEDCLNVHHLDSQLPTISSTHFRRILAGEKCCRGNTQTAGTGDPNNPNFCSTATGYRKCGAATDPGQPNRCADPNAFHRGCHI

SEQ ID NO: 179159 - protein, 188 aa, Glycine max; identical to SEQ ID NO: 179157
  Clone ID: PAT_MRT3847_132798C.1.pep

SEQ ID NO: 179160 - protein, 127 aa, Glycine max
  Clone ID: PAT_MRT3847_132799C.1.pep
MELTAADAPPQDSTKSGSLFGLEKVPLSKEPGTDAPFVNSGFNKNVGNVSQVPVTFSSSVGESAVFKFGSSSDSRFFKDRCHDSYSYPQDDPTSTFTCPAGSNYKVVFCPLGEPHVTLHMPASTAHQ

SEQ ID NO: 179161 - protein, 64 aa, Glycine max
  Clone ID: PAT_MRT3847_13279C.1.pep
LGSEARRYLQRRDFKKKKKQKKKKKKKKKKKKKKKKKKKKKKKKKKKGGGGGGDKNFNNAKLKK

SEQ ID NO: 179162 - protein, 90 aa, Glycine max
  Clone ID: PAT_MRT3847_1327C.1.pep
MDFLCALLWVTGYTVQLSNKPLLDVRLSNEHTKAWVRASTWIPIFDVHNKLDFGTIPRKVRSFVMGGWWSGKPTLSYDKFHKLLGKTLQH

SEQ ID NO: 179163 - protein, 232 aa, Glycine max
  Clone ID: PAT_MRT3847_132800C.1.pep
MYSLISQMVYLALCSLLTLALPLATIHAANFEIVNNCPYTVWAAASPGGGRRLDRGQTWNLWVNPGTAMARIWGRTGCNFDGSGRGRCQTGDCTGGLNCQGWGVPPNTLAEFALNQFGNQDFYDISLVDGFNIPMDFYPLNGGCHKISCSADINGQCPGPLRAPGGCNNPCTVFKTNEYCCTNGQGSCGPTNYSRFFKDRCHDSYSYPQDDPTSTSSCYSFQALHFPLHSPL

SEQ ID NO: 179164 - protein, 53 aa, Glycine max
  Clone ID: PAT_MRT3847_132801C.1.pep
RLKPPPLQLLDEQGGVKKVTSRGLFRVPSSMHKKQRRTRDFQNPTCRPATCDY

SEQ ID NO: 179165 - protein, 63 aa, Glycine max
  Clone ID: PAT_MRT3847_132802C.1.pep
RYGCRRPPKGSIVSDSSSGPSYYDNEYYSENHSPCLWGTTKNSHNIIKKVKEYGRTQHPSPLV

SEQ ID NO: 179166 - protein, 163 aa, Glycine max
  Clone ID: PAT_MRT3847_132803C.1.pep
LHLVVRLRGGMQIFVKTLTGKTITLEVESSDTIDNVKAKIQDKEGIPPDQQRLIFAGKQLEDGRTLADYNIQKESTLHLVLRLRGGMQIFVKTLTGKTVTLEVESSDTIDNVKAKIQDKEGIPPDQQRLIFAGKQLEDGRTLADYNIQKESTLHLVLRLRGGF

SEQ ID NO: 179167 - protein, 83 aa, Glycine max
  Clone ID: PAT_MRT3847_132804C.1.pep
DRHNMAPKSLQLRYEHYFLFIYKSCGNGLHVGIPMSLLWLQDRQNNISNNFYSYMNTFVSLIICRCETDKLIGTPMSFPLESG

SEQ ID NO: 179168 - protein, 54 aa, Glycine max
  Clone ID: PAT_MRT3847_132805C.1.pep
NYDLLRSIIRGPLSPLPHIFHTEGQKLSSFYISSASDTLIQTIARETLNGEASS

SEQ ID NO: 179169 - protein, 340 aa, Glycine max
  Clone ID: PAT_MRT3847_132806C.1.pep
MSSVKELVESKCLSSVPSNYICLENPEDSILNYETDNIPTIDFSQLTSSNPSVRSKAIKQLGDACRDWGFFMLINHGVSEILRDEVIRTSQGFFDLTEKEKMEHAGRNLFDPIRYGTSFNVTVDKTLFWRDYLKCHVHPHFNAPSKPPGFSQTLEEYITKGRELVEELLEGISLSLGLEENFIHKRMNLDLGSQLLVINCYPPCPNPELVMGLPAHTDHGLLTLLMQNELGGLQIQHNGKWIPVHPLPNSFLINTGDHMEILTNGKYKSVVHRAVANTKATRISVGTAHGPKLDTIVGPAPELVGDDNTASYRAIKYSDYIELQQNHELDGKSCLDRIRI

SEQ ID NO: 179170 - protein, 67 aa, Glycine max
  Clone ID: PAT_MRT3847_132807C.1.pep
KRKRCSKAHIEGPPPRATFRLVGPKIPWVVDYFMPKLVPWSQLVPRNGCWIGCRKLNLFQPLWFHEE

SEQ ID NO: 179171 - protein, 46 aa, Glycine max
  Clone ID: PAT_MRT3847_132808C.1.pep
TVLGKLTKAYALQANGGTAQISVYLPYYLSPVLTQPITDEPYCYGR

SEQ ID NO: 179172 - protein, 119 aa, Glycine max
  Clone ID: PAT_MRT3847_132809C.1.pep
PVNSICQGSAAHIIKIAMLTIHSAIVTGFDTPHSSSSLPTKSHMLKDRCRILLQGHDELMLEVDPSVIKEAALLLQTSMENAVSLLVPLHVKLKVGRTWGSLEPYTSDKFNNATLVAES

SEQ ID NO: 179173 - protein, 96 aa, Glycine max
  Clone ID: PAT_MRT3847_13280C.1.pep
TIKIPTGLDTSADVTAEDAWAEAEEHEHIRAPLPPDRESLTTGQAMTQEYGCNKILTDVKTELCRHRPPGLVPLTYDRSTHPPPRPPEPNPSTLFP

SEQ ID NO: 179174 - protein, 71 aa, Glycine max
  Clone ID: PAT_MRT3847_132810C.1.pep
CSGTLISRLLGYTIHACLANQQATGMALIQHCSHGIACSHDAPSHCCHHCRIHLQWLIHDGSSPGCSHACQ

SEQ ID NO: 179175 - protein, 40 aa, Glycine max
  unsure (1)..(40): unsure at all Xaa locations
  Clone ID: PAT_MRT3847_132811C.1.pep
XDXXMHGYXXFXXPXTVNCXPAAGFDLXSCFXPGEHVGEA

SEQ ID NO: 179176 - protein, 249 aa, Glycine max
  Clone ID: PAT_MRT3847_132812C.1.pep
IVHFLQRSLVEMMCSFFVASWTGVVKYHGPRPSRRPKQVFVANHTSMIDFIILEQMTAFAVIMQKHPGWVGLLQSTILESLGCIWFNRTEAKDREIVARKLRDHVQGADNNPLLIFPEGTCVNNHYTVMFKKGAFELGCTVCPVAIKYNKIFVDAFWNSRKQSFTMHLLQLMTSWAVVCDVWYLEPQNLKPGETPIEFAERVRDIISVRAGLKKVPWDGYLKYSRPSPKHRERKQQNFAESVLRRWEEK

SEQ ID NO: 179177 - protein, 106 aa, Glycine max
  Clone ID: PAT_MRT3847_132813C.1.pep
ERVREGPVLPYVWGGAQRAVRRRCPLRVTLLMGLNVGGLLTARYAGSFEMDANITMLDVLIRLLLTGNTLDISMENPSIFLKRGLILISLTTAALNDVTNPFFPLI

SEQ ID NO: 179178 - protein, 63 aa, Glycine max
  unsure (1)..(63): unsure at all Xaa locations
  Clone ID: PAT_MRT3847_132814C.1.pep
MSAPARNRMIRDFNRLQQDTFAGISGAPHHKHIMYXSAGIFGADENPWDGGXFILIAQFTEDY

SEQ ID NO: 179179 - protein, 69 aa, Glycine max
  Clone ID: PAT_MRT3847_132815C.1.pep
DNQGISYMAYLVHYMFDSNLGGMVSKVHKYASGGFKEMGGVGSFCQHMYADLANIWYPIQFGPIMEASI

SEQ ID NO: 179180 - protein, 187 aa, Glycine max
  Clone ID: PAT_MRT3847_132816C.1.pep
MSLRAQSSALVTLVLVLLLIKIEGNPTPKEVHENGTDASSSSTSLMEKDENQIIGCRGRPLICSRGEFPPRSICCGDRCVDVTRDRENCGVCGVRCTFNRQCCNRLCLNTNVNIFNCGRCGRVCPLGRLCVFGLCAFEQAVPTPTPVSPLPPSPPVSPSPPVSVSPLFPPVPPAKSPQPLDYQPEMG

SEQ ID NO: 179181 - protein, 39 aa, Glycine max
  Clone ID: PAT_MRT3847_132817C.1.pep
LDARDTHVTHHIINTSTISTLTIWKRERGIQLKLKVKGW

SEQ ID NO: 179182 - protein, 82 aa, Glycine max
  Clone ID: PAT_MRT3847_132818C.1.pep
RASLWRPNRRYLLVRASLHSLYKTHYTLYLCLSRFWRGLTGVAVSGGGVGPAKGGSRRGGRGAGAGLERAIELGASPLDAVT

SEQ ID NO: 179183 - protein, 64 aa, Glycine max
  Clone ID: PAT_MRT3847_132819C.1.pep
LLQINCENQTSICPGNSITSLPHSFLDVSESTLETSALIKALIPFRLHCNHVGERYRSIFLVYF

SEQ ID NO: 179184 - protein, 32 aa, Glycine max
  Clone ID: PAT_MRT3847_13281C.1.pep
VEVANISLYYISIAVFLGAVIIVSSVTADAYV

SEQ ID NO: 179185 - protein, 133 aa, Glycine max
  Clone ID: PAT_MRT3847_132820C.1.pep
RPLFFSFANKTLDLTTNRTVTDEPWDLPKDPKICAIWPQITWQKVYNGDRKLGNCFWTHPVFSPNHCNPPTSTKSRKNFAGKNFPLTSLCLHEALNLNLQILKKRPLAVQKNDYTAKNCKKDGRGECIHDTDE

SEQ ID NO: 179186 - protein, 371 aa, Glycine max
  unsure (1)..(371): unsure at all Xaa locations
  Clone ID: PAT_MRT3847_132821C.1.pep
MKSEEGEAEKEEKLGEKLRRGVLVGKSRGPFTPVPSWSWAHNNHSSSVLSLSARKLAAALWEFNHSFPLFQMHHHRSANNAAACGGVGADPRLRRHHHYILHKHRAPDISNFLADASPSSPDQPASASSLRRHVAAPLMQHHRAIERNNHALQPLSPASYGSSMEMTPYNPGATPTSSLEFKGRIGEPHYSLKTSTELLKVLNRIWSLEEQHASNISLIKALKSELDHARIRIKELLRDRQAGRHEIDDLMKQIAEDKLVRKRKEQDQLHAAIQSVRDELEDERKLRKRSESIHRKLARDLSEVKSSLTSAIKELNQERTRRKLLEDLCDEFARGINEYEQEVHTVKHKSDKEWVQGADHDRLILHIXGRV

SEQ ID NO: 179187 - protein, 197 aa, Glycine max
  unsure (1)..(197): unsure at all Xaa locations
  Clone ID: PAT_MRT3847_132822C.1.pep
MNLDFPSSDLFSKPLARNQELRVRVPMGSKVSDHHLSTVRSIVGSEFSDMDIIRALHMAKNDVTAAINIIFDTHTAPKFKPTRPTNPPPVSPPKSTPPTPTVNANSNYSVGERHSDDNRDDWWLVCCGEMTCLSTCKGRTISSGETVVFKVPAKKLSGSPSPXRGFGRAATCSEIVPISTEQAGEIGRIPNEWGSSF

SEQ ID NO: 179188 - protein, 137 aa, Glycine max
  unsure (1)..(137): unsure at all Xaa locations
  Clone ID: PAT_MRT3847_132823C.1.pep
MVLGMRGKNRRGVTVQIDFLIHIQEIKPWPPSQSLRSLRSVLIEWKNGECASGSTNLVAPSLGSVIGEGRIEFNESFRLHVTXLRDMSVRGGDADVFQKNCLEFNLYEPRRDKTVKGQLLATAVWDLAEYVALKECL

SEQ ID NO: 179189 - protein, 46 aa, Glycine max
  unsure (1)..(46): unsure at all Xaa locations
  Clone ID: PAT_MRT3847_132824C.1.pep
XXRXCARKRXXGXQXPXRGXSXAXXXXRRTXXXXXRXFVXXXWPXS

SEQ ID NO: 179190 - protein, 395 aa, Glycine max
  unsure (1)..(395): unsure at all Xaa locations
  Clone ID: PAT_MRT3847_132825C.1.pep
MAVEYTCCSTAFFVHILVIVLLVLFAGLMSGLTLGLMSLSLVDLEVLAKSGTPQDRKHAEKILPVVKNQHLLLCTLLICNAAAMETLPIFLDGLVTAWGAILISVTLILLFGEIIPQSVCSQYGLXIFASGAPFVALFGRAXLXKTLVNLHGNEAGKGGELTHDETTIIAGALELSEKTASDAMTPISETFILDINSKRDRXLMNEILEKGHCQVLISNEQTSYIIDRVLVXSLLIVNLEDEARVKRVTIFRILKVAENIPIFXMMXKFQKGHSHMAVVVRRCDKXNPKSSQNNANDSVRDVKVDIDGEEKALKPKMPLHKWKSFPNTNKSSNRGPRSRKWSKNMYSDILEIDGSPLPKLPEEEEAVGIITMEDVIEELLQEEIFDETDHHFEDS

SEQ ID NO: 179191 - protein, 422 aa, Glycine max
  unsure (1)..(422): unsure at all Xaa locations
  Clone ID: PAT_MRT3847_132826C.1.pep
MAVEYTCCSTAFFVHIVVIVLLVLFAGLMSGLTLGLMSLSLVDLEVLAKSGTPQDRKHAEKILPVVKNQHLLLCTLLICNAAAMETLPIFLDGLVTAWGAILISVTLILLFGEIIPQSVCSRYGLAIGASVAPFVRVLVCICFPVAFPISKLLDFLLGHRHEALFRRAELKTLVNLHGNEAGKGGELTHDETTIIAGALELSEKTASDAMTPISETFTVDINSKLDRELMNLILEKGHSRVPVYYEQPTNIIGLVLVKNLLTIDPEEEIPVKNVTIRRIPRVPETLPLYDILNEFQKGHSHMAVVVRHCEKTGQQSSNNNADVRDVKVDIDGEKNPQENMLKPKMSLQKWKSFPNSXSSNRGSRSRKWSKNMYSDILEIDGSPLPKLPEEEEAVGIITMEDVIEELLQEEIFDETDHHFEDS

SEQ ID NO: 179192 - protein, 128 aa, Glycine max
  unsure (1)..(128): unsure at all Xaa locations
  Clone ID: PAT_MRT3847_132827C.1.pep
MASHDLSHCTTVTVPGRHGCSIHRLIHGGSPEDCCMTGLASNXGRVQCMQVXGQPIGKKKFETLSYLPDLDDAQLAKEVEYLLRKGWIPCLEFELEHGFVYREHNRSPGYYDGRYWTMWKLPMFGCTD

SEQ ID NO: 179193 - protein, 41 aa, Glycine max
  Clone ID: PAT_MRT3847_132828C.1.pep
HHSKIFYNLIPQTLFFITYSLSNYILVDLGPNLFFLKPSKF

SEQ ID NO: 179194 - protein, 164 aa, Glycine max
  Clone ID: PAT_MRT3847_132829C.1.pep
MEDNDFSETAKFISQILMEENVELEQSPFYDSLTLQVTEKSFYDALAGNLLLSPQASNTNFSVENSRELNLPSPDSLSVSALQFNPHALSQPPPLVNVSEGVSDLDSSIARLLAHNIFNDVDSVSHFRRGFEEASRFLPPGPNLVTALHSNAQEPINSAREFLW

SEQ ID NO: 179195 - protein, 54 aa, Glycine max
  Clone ID: PAT_MRT3847_13282C.1.pep
CLYSSLSSMSSSYYVSAVSVAILKQRMLVYLLSCCKLALSICQCMLELCSRDDL

SEQ ID NO: 179196 - protein, 79 aa, Glycine max
  Clone ID: PAT_MRT3847_132830C.1.pep
MSRSGQPPDLKKYMDKKLQIKLNANRMVVGTLRGFDQFMNLVVDNTVEVNGNEKNDIGMVVIRGNSVVTVEALEPVNRT

SEQ ID NO: 179197 - protein, 52 aa, Glycine max
  Clone ID: PAT_MRT3847_132831C.1.pep
ARRRQMGQCVTAARRRQKGFLSYVCVCVCVCFMTNFSYWQFSGSVLLRLPSK

SEQ ID NO: 179198 - protein, 64 aa, Glycine max
  unsure (1)..(64): unsure at all Xaa locations
  Clone ID: PAT_MRT3847_132832C.1.pep
TMKVGEVAKLTCKLXYAYGIAXPPPDSATDAXTLVYQVELVARRPRKDSSLGSVSQDRVWLDEL

SEQ ID NO: 179199 - protein, 54 aa, Glycine max
  unsure (1)..(54): unsure at all Xaa locations
  Clone ID: PAT_MRT3847_132833C.1.pep
MTTKFKKNKEKRRHLNAGHGRIGKHRKHPGRSXNARGMQQHRNLIHKYQPGFLR

SEQ ID NO: 179200 - protein, 105 aa, Glycine max
  Clone ID: PAT_MRT3847_132834C.1.pep
MYKNQLQELAQRSCFNLPSYACIREGPDHAPRFKATVNFNGEIFESPHYCSTLRQAEHSAAEVALNSLSHRGPSHSLAAKILVSHCGFSTSRVFASLLPLLNPKI

SEQ ID NO: 179201 - protein, 61 aa, Glycine max
  unsure (1)..(61): unsure at all Xaa locations
  Clone ID: PAT_MRT3847_132835C.1.pep
MLRSEQTNQGGWNLRVLIDNHKQSTDYDIVSGTCHDXQIAGNTQIPNFFVPQATARSSEND

SEQ ID NO: 179202 - protein, 87 aa, Glycine max
  Clone ID: PAT_MRT3847_132836C.1.pep
RNDKINQSKEAKKSEWICVEKVLRMNSTQIRFATDPFPPIWEGPECLRSLFRGESLTLKLGIAHLLSAPRGRRIMATPLLLAMKNGP

SEQ ID NO: 179203 - protein, 28 aa, Glycine max
  unsure (1)..(28): unsure at all Xaa locations
  Clone ID: PAT_MRT3847_132837C.1.pep
NTAXEEPXKLXIDAIAGXILFDPSLXXX

SEQ ID NO: 179204 - protein, 55 aa, Glycine max
  Clone ID: PAT_MRT3847_132838C.1.pep
IYHSQAVQYVELVFARISFSSRKGRLTSLVRSHHPLVPSASCLPPLYVIINLIIS

SEQ ID NO: 179205 - protein, 83 aa, Glycine max
  Clone ID: PAT_MRT3847_132839C.1.pep
VHSISILKLNSFQGSACQRVTQEDLGLKHTDVMPHFLKDINVRLSDKQNKRGITLYPRQLVLEMLLYLQVQIGPELFPGPYFF

SEQ ID NO: 179206 - protein, 245 aa, Glycine max
  Clone ID: PAT_MRT3847_13283C.1.pep
AVNKEGLYTFSEINVSRLGAIVKILKDTSHYHSSKFADSDIALLLNLLRSWPIAMIFPVIDIVRMLVLHPDGAVLLHKHFEAENDILMEVIKKVTVNPTIPANLLTSIRVVTNLFRNLCYYNWLQKHRSEILDAFSSCSSSPNKNLQLSYSTLLLNYAVLLIETKDQEGQSQVLSAALEIAEDENVEVDPKFRALVAVGSLMLEGLVRKTALDFDVVNIAKAAKGSKEAKIAEVGSDIELLTKQS

SEQ ID NO: 179207 - protein, 417 aa, Glycine max
  Clone ID: PAT_MRT3847_132840C.1.pep
VTADFNGVEGCTIAGKKNDRVINEDLLKDEIVSEQLTRNVQFFGFESQQKVTASYVVVIGLGGVGSHAASMLLRSWIGKLLLVDFDQVSVSSLNRHAVATRADVGISKAQCLKEHFLSIFPECQIDAKVMLYDSSTEEEILSGHPDFVLDCIDNIDTKVALLAACVRRGLKVLSATGAGARADPTRIRIADLRESTNDPLSRAVRHRLRKDYGIEGGIPVVFSLEKPKAKLLPFKGPSGEEENPSDYQIVPGFRVRIIPVLGTIPAIFGQFMASYVVTELAGVHVQTEPVVNFNMDHYHILHQRLIEHEESLYGTYMEVQVDVEEVMYIVKELWHGRSAREQHVKDVGRGMWRSVNELMLVRWDRTKPASISNLILLKFKEVDEHESRTLDDIKKNEPEFYSRVIAVLKRAELDFGL

SEQ ID NO: 179208 - protein, 68 aa, Glycine max
  Clone ID: PAT_MRT3847_132841C.1.pep
LAPILATILLSGIRTIFITIFTLSLQRIWQGIKKVNAKLCAKERANYRSHLTHTPTHYLLYYRLYSRI

SEQ ID NO: 179209 - protein, 183 aa, Glycine max
  unsure (1)..(183): unsure at all Xaa locations
  Clone ID: PAT_MRT3847_132842C.1.pep
PRVRSDFNHKRVMSSMVYEQQGSLDDKSLMKLVSIPDGLGPDDDRMDPGALYDAVVRTMPTTLEKLLENTHEDGDNRIGFIVADLAMLWALEVGRKFGIKGAIFCXIAATMFALLCNSPKLIDDGIINSDGSLLTTKKTIRLSPNMPXEMNPGTFFWLNMPGTKDGMNMMHITRTLNLTEWWL

SEQ ID NO: 179210 - protein, 376 aa, Glycine max
  Clone ID: PAT_MRT3847_132843C.1.pep
MANGSPTGSLKEASSAIVDSKERLGSSSCYAARVVSEIDQCCRLEGAIVTLEWSSPKEWLFTVKKDGLTRCTFRAEKVMRPFSTNRFTHAVVYSLDNGWKLEFTNRQDWNVFKDLYKKCSDRNIPATVAKVIPVPGVREVSSYAESNCFPYHRPDTYISDSGDELTRVMTRATANYDMDSEDEKWLKKFNEFQEHVSEDNFELIIDAMEKVYYYNPDETFDEKSAANGCQDLGSKEVVEAVYNYWMRKRKQKRSFLLRVFQGHQSKRAPLIPKPLLRKRRSFKRQPSQFSRGNQPSVLKAFAAEQDAMEENAMLKIEEAKANANMSMELAINKRKRAQSLAQNADLATYKATMLIRIAEAALAAESVDEAAAYFLD

SEQ ID NO: 179211 - protein, 50 aa, Glycine max
  Clone ID: PAT_MRT3847_132844C.1.pep
IYKGMEHIDAFPPPSRKEKENSDLSITATSRGVPLAQIFCSCSDPNLCNP

SEQ ID NO: 179212 - protein, 109 aa, Glycine max
  Clone ID: PAT_MRT3847_132845C.1.pep
AGTYRARIPDCRHAPRVRHRVLSRARPRIRTPHYYTRTHRFFFLSITGLANPCTHSLFWLTFFVNLTHVTDYVSTTVASMVAPTCITIATHATMSISTEGADINVSRPQ

SEQ ID NO: 179213 - protein, 89 aa, Glycine max
  Clone ID: PAT_MRT3847_132846C.1.pep
FLILILVQIKLYIHRSKRVIQCKTKEINEFLHQKSVGNIFKDMKPKKTVQSLMFPLLVCSNFKFILWDMLLSQGFVDFIHLLGMVSISI

SEQ ID NO: 179214 - protein, 73 aa, Glycine max
  Clone ID: PAT_MRT3847_132847C.1.pep
VVPLIVLAISKSSDRHKYDLSSIRVLSSWGSPLGKELEDGVTAKFPNVKLCHGYGMTEAEPLLTISLAFAKES

SEQ ID NO: 179215 - protein, 76 aa, Glycine max
  unsure (1)..(76): unsure at all Xaa locations
  Clone ID: PAT_MRT3847_132848C.1.pep
FMMFLALFGLPLAGLFLQILFSCFPSTFPERFCCQVSSLXXLAAHFKCXAFAHEFLAPLFHWPXXGXXQSFHSQSI

SEQ ID NO: 179216 - protein, 173 aa, Glycine max
  unsure (1)..(173): unsure at all Xaa locations
  Clone ID: PAT_MRT3847_132849C.1.pep
SYDFRCNPDWDNVARLKVWQKLEEENEEFFKAYYARLVLKQQIMQFNKLLDQQVQLMQLHSSAVASLPMSNGSHIPAVTSLPNSNGSHIPAXINGPASVLSAQSANMGLIQGMNGGGMIKSEPGYSGCSPYMFSTEGNVLETRPTIGGASVTSFTIVESNSHSLNEAGLDPDT

SEQ ID NO: 179217 - protein, 67 aa, Glycine max
  Clone ID: PAT_MRT3847_13284C.1.pep
WLYIVLGVDRDKHSLHPCLLSLRSHHHPLIGVHDQLSAQKCECPPERPGQRSLDSWSSSSGFSPRVT

SEQ ID NO: 179218 - protein, 315 aa, Glycine max
  Clone ID: PAT_MRT3847_132850C.1.pep
MTGKAMNLSHSKTVVLIWLISAFCFFTLFQMALYNSSQTPSSTSLDSPNSNTGQRSKLYDKMGRDLDEHGAAFLKHGETSQSLSLSDIFTLKDGSVTPVLKPANPPVRANVLYLSTEFSVPIAEAVKNVFNPYFDKAIWFQNSSLYHFSMFHASHHIVPVPATKEEIEAEASSVEAVVATLCPLKIVLDRVVLTSTGVLLGCWQVTSGTDPITIRAKLKNALPHAPEKQLYDAAILHTSFARLLGPPKALSPSEQLRMSDDVQFFHDLVDRLNSQIHGFKAVVSELWYVEEYDVLALALNGRMNTRKFRLRCSKE

SEQ ID NO: 179219 - protein, 335 aa, Glycine max
  unsure (1)..(335): unsure at all Xaa locations
  Clone ID: PAT_MRT3847_132851C.1.pep
MSSGSVRRVSRQDIQLVQNLIERCLQLYMSQKEVVETLLAQAKIEPGFTELVWQKLEEENEEFFKAYYARLVLKQQIMQFNKLLDQQVQLMQLHSSTVASLPTSNGSHIPAVSSLPSSNGSHIPAIPENPACYTADRTQTSLKPENMQHHVDSRLSNVFNNGGSSLHTSMHAAVEIYAHGNRINGPSSMLSAQSANMGLIQGINGGGMIKSEPGYSGCSPYMFGTDGNVLETRPTIGGASVTSFTNVESNSHSLNEVVLDPDTSSFGFLGQIPRNFSLSDLTADFSQSSXDILETYSRSPFLATDNENFLDRGEQDNNRLDSISEGLSYEDFGSE

SEQ ID NO: 179220 - protein, 101 aa, Glycine max
  unsure (1)..(101): unsure at all Xaa locations
  Clone ID: PAT_MRT3847_132852C.1.pep
XLXXCVVXESXCVYLSHRRAICLCLRXARVNLPLERAHYISLPARGXXLYRERLPERERERERERERERERERERARAEFGTSLYHVGRYFKLRCRNNYRN

SEQ ID NO: 179221 - protein, 85 aa, Glycine max
  Clone ID: PAT_MRT3847_132853C.1.pep
DHGGLYPVALGDHTTLSRIISSLPRLPDPSLIQTESDSLAQEKIADQISLVLDRRDVPYGETPLHLAVRLNDLFFGRALATAGAD

SEQ ID NO: 179222 - protein, 66 aa, Glycine max
  unsure (1)..(66): unsure at all Xaa locations
  Clone ID: PAT_MRT3847_132854C.1.pep
PYRYPHDQKVAVEKFVRHMLAACMTRPTVSPYSSPXLLVXKKNGSWHFCTDYKTLNTITIANKDAI

SEQ ID NO: 179223 - protein, 157 aa, Glycine max
  Clone ID: PAT_MRT3847_132855C.1.pep
MGNFFGIRTKANRSSPAVTDHDRTTLSLKMQRDKLRQAYQRYERNIAKDAERARALLRDGRKDRALLLLKRKRFQETMINRIGGFMEQVERTITDMEMAQINREVFDNLRLGTEALKALNETISLDEVERLMEESKEAQEFQEELYTMLGQHMSEED

SEQ ID NO: 179224 - protein, 116 aa, Glycine max
  Clone ID: PAT_MRT3847_132856C.1.pep
PGPVGLGKNPLAREPATPPAPPGGCVVYPRGRPGFLFRMGAGRAAPLISCWSAPAVPRPCFSPWVSDPLLLVLGSDFYSAQGFCPALFPPCCNSPRYKAGCPAGRVRSSRPGPTHG

SEQ ID NO: 179225 - protein, 40 aa, Glycine max
  unsure (1)..(40): unsure at all Xaa locations
  Clone ID: PAT_MRT3847_132857C.1.pep
MMISAPRISXXFWCHFFCQLRLIFWXLNVFAIRGADFISR

SEQ ID NO: 179226 - protein, 72 aa, Glycine max
  Clone ID: PAT_MRT3847_132858C.1.pep
YLFCQRKGMMHLHQHAHVCYLIYSVKMKVISINGNFTTNQKLGCLSLVSESTRDVKSDRSFLTCQLSLLSVL

SEQ ID NO: 179227 - protein, 59 aa, Glycine max
  Clone ID: PAT_MRT3847_132859C.1.pep
MGQALGCYQVDQSNVAIKEHCGKFDEGLQRWSHRLAWCHGYQIAGSLSLRVQQLDDRCE

SEQ ID NO: 179228 - protein, 103 aa, Glycine max
  Clone ID: PAT_MRT3847_13285C.1.pep
GQGQGKISSGGKAKGQGFGPVLPVTLVAVDFEISVKAAILQEGLARLEKRNRWARKESHQALDNLDPFQGEAWANRCGICQYGNTQFDHGDPAPPPKKAGGKK

SEQ ID NO: 179229 - protein, 121 aa, Glycine max
  Clone ID: PAT_MRT3847_132860C.1.pep
AGQPKPENPPQEYEEEEENDVVKQQQQQQQDEDDIPISKLLEPLGKDQLLNLLCDAAAKHRDVEERIRKAADGDPVHRKIFVHGLGWDTTAGTLISAFRQYGEIEDCKAVTDKVSGKSKGY

SEQ ID NO: 179230 - protein, 47 aa, Glycine max
  Clone ID: PAT_MRT3847_132861C.1.pep
MPHSSVLTVSYKIVQGMSASDNPVLVYLCDRGRGNNGLIVSSVPPLF

SEQ ID NO: 179231 - protein, 497 aa, Glycine max
  Clone ID: PAT_MRT3847_132862C.1.pep
MHKKKTLVMPPMGRKRKVAPKSSLSTEPPLKQQQPKPENPPQEYEEVEEEVEEEEVEEEVEEEEEEEEEDEEEEEEEEEEEEENDVVKQQQQQQQDEDDIPISKLLEPLGKDQLLNLLCDAAAKHRDVEERIRKAADGDPVHRKIFVHGLGWDTTAGTLISAFRQYGEIEDCKAVTDKVSGKSKGYGFILFKTRRGAQNALKEPQKKIGNRMTACQLASIGPVSNPPPTPMAPSAAPSSSVSEYTQKKIYVSNVGADLDPQKLLAFFSRFGEIEEGPLGLDKATGKPKGFCLFVYRNPESARRALEEPHKDFEGHILHCQKAIDGPKAGKFQQQQQHGNVNAHAQRAQFQRNSNVGANAAAGYGGGGSAVQPGHLMAPAGPGIGFNPSAAAAAQAALNPAMAQALTALLASQGTLGLTNLLGSIGTSAAVNPGVPAAGSAVQGGGYSAQPNISPGVVGGYGNQVGLQAAYPNQNQQIGQGGSGRGQYGGGAAPYMGH

SEQ ID NO: 179232 - protein, 76 aa, Glycine max
  Clone ID: PAT_MRT3847_132863C.1.pep
FVYHFCFFALYFLSYFFFFLGRGAGLNKNLGKQKLQGLSTWPFKKIFCFGKTKFFQICLTHSNFCSFAPFFQAALT

SEQ ID NO: 179233 - protein, 292 aa, Glycine max
  unsure (1)..(292): unsure at all Xaa locations
  Clone ID: PAT_MRT3847_132864C.1.pep
MGRKRKVAPKSSVSAEPPLKQHQPKQQQDEDDDPPENAAQEYEEEVEEEVEEEEVEEEVEEEEEEEEDEEDEEEEEEDQKDQYQHQQQQQDEDDDPISKLLEPLSKDQLLILLCEAAAKHQDVAESIRTXSDEDPVHRKIFVHXGGWDTNAGTLLKSVRQYGEIEXCKAVNDKAXPSRQSTYGFLLFXTTRGARHALHXPSVGIGIRVKACQLVSXINAVADLDPQKLLAFFSRFVVIEEGPLGLDKATGKPKGFCLFVYRNPESARRALEEPHKDFEGHILHCQKAIDGPK

SEQ ID NO: 179234 - protein, 79 aa, Glycine max
  Clone ID: PAT_MRT3847_132865C.1.pep
ECLSPRVGLFINSRWQSRFPFWIPDSENERILIVTLVSSHLARCQKFTMYAYGLYVVCKCDLDSNFRSETTYSHVYFDL

SEQ ID NO: 179235 - protein, 144 aa, Glycine max
  unsure (1)..(144): unsure at all Xaa locations
  Clone ID: PAT_MRT3847_132866C.1.pep
PFPPPCIXGFNESNLVPPLKWVENDPNVPIRRKDCFYGYLGPNQKKGSNVFVNWGKKNKIPPFLVVGGGPKICVLNFVCSPMSVKNRGFLGPLKNGGGFSRARPPLNVPLGGARNPQGALAPPPGFLPPVGLFLAKKRGAQIPN

SEQ ID NO: 179236 - protein, 109 aa, Glycine max
  unsure (1)..(109): unsure at all Xaa locations
  Clone ID: PAT_MRT3847_132867C.1.pep
MALHHRLLLVDTNSSSPAPSSMNKTRETFTGDANFDTNMVIILAALLCALICALGLNSIVRCALRCSRRFAFETPEETAARLVAKGLKKSALXXXPIXXXXXDNLSIQL

SEQ ID NO: 179237 - protein, 68 aa, Glycine max
  Clone ID: PAT_MRT3847_132868C.1.pep
GERPTINNLIASKKHFFITLCGGCLFFKGMNPIFGHFQVYIIAAKKTYPKQFKVVRVNPGTKPFPLNN

SEQ ID NO: 179238 - protein, 206 aa, Glycine max
  unsure (1)..(206): unsure at all Xaa locations
  Clone ID: PAT_MRT3847_132869C.1.pep
MSDVEEYRCFIGGLAWSTSDRKLKDTFEKFGKLIEAKVVVDKFSGRSRGFGFVTFDDKKAMDEAIDAMNGMDLDGRTITVDRAQPQQGSTRGDGDRYRDRGRDRDRDHGGGGGRGSNGGECFKCGKPGHFARECPSEGSRGGKYGGRESTYGGSSGGGYGPDRADRSSGGRSXGDGGSHGDSGSDRFYRDRSGPYERERRGSGGFR

SEQ ID NO: 179239 - protein, 37 aa, Glycine max
  Clone ID: PAT_MRT3847_13286C.1.pep
RPCLPCDNVCCCSCLILSTILRISQCFINTVRCIRCF

SEQ ID NO: 179240 - protein, 121 aa, Glycine max
  Clone ID: PAT_MRT3847_132870C.1.pep
FLGALFFFFSSFFFFFFFGKEKKTFSLCRKTNHNIRMKNPETFPKPGPAKTPLPKYIRVKPLGAPRPQGTQHSRGPNPAPASNQEAKILPRKTATKNTPPHNKWMRGVKRGKPSALKKFPN

SEQ ID NO: 179241 - protein, 82 aa, Glycine max
  Clone ID: PAT_MRT3847_132871C.1.pep
RPPSFQPPLRVTSHSTYTTAHDLPTRRALKIPAALLRLGTSVNGLRGRSCRLLAHLLPTAVTLCTELQENLALYTKASSGIR

SEQ ID NO: 179242 - protein, 386 aa, Glycine max
  Clone ID: PAT_MRT3847_132872C.1.pep
ATSNLSHQTARPFPTACVSSRPPSAAVNLRRHLPPPPKPRKLTLKTNNRSKWAIQLSLVEQSPPKSTFNMQQLVGFLYDDLTHLFDDQGIDQTAYDERVFFRDPITKHDTLSGYLFNIALLKNLFRPQFQLHWVKPTGPYEITTRWTMVMKLVLLPWKPELIFTGTSVMGINPENGKFCSHVDFWDSIEKNEYFSFEGLLDVIKQLRIYKTPELESPKYQILKRTENYEVRQYNPFIVVETNGDKLSGSTGFNDVAGYIFGKNSTTEKIPMTTPVFTETNDADLSKVSIQIVLPLDKETESLPNPNQETVRLRKVEGGIAAVMKFSGKPTEDTVREKEKTLRANIIKDGLKPQSGCLLARYNDPGRTWTFIMRNEVLIWLDDFSLD

SEQ ID NO: 179243 - protein, 31 aa, Glycine max
  Clone ID: PAT_MRT3847_132873C.1.pep
RIALSIRTGREKVLQCLFILLTSYEASQSSS

SEQ ID NO: 179244 - protein, 58 aa, Glycine max
  Clone ID: PAT_MRT3847_132874C.1.pep
VVGINNVYLQIERSDSNIYFITLFIIVYSFLFVEFLKIYKIMSHLDFLKIRSEIHKIL

SEQ ID NO: 179245 - protein, 88 aa, Glycine max
  Clone ID: PAT_MRT3847_132875C.1.pep
NINELKHQMAKDMEANSKQTSVDNQQAIQEQPVELIDSGGAHQAEPGNSINWNYPKEASVDYQQTMQEQSVELFDGGGAVQSEPQNSI

SEQ ID NO: 179246 - protein, 53 aa, Glycine max
  Clone ID: PAT_MRT3847_132876C.1.pep
STQRMRVYIGQLHKFHINRGYSVSSKCAYKPLLLIESEPNILIFNTHPHAEAY

SEQ ID NO: 179247 - protein, 100 aa, Glycine max
  unsure (1)..(100): unsure at all Xaa locations
  Clone ID: PAT_MRT3847_132877C.1.pep
TTSSILRKQTTYTATIYVDHTSSISDXDVIMGTLYTVNIKPPITDIALAVTLLFAXILSIVISSLMVYNHVIGDTVHSIFYAILGLILFIPVLYYTQIAY

SEQ ID NO: 179248 - protein, 231 aa, Glycine max
  Clone ID: PAT_MRT3847_132878C.1.pep
MAQKKASHVLVCKELKPHLLMVLVQVGYTFLYFITEASFNHGMSPYVYVTYRHIVAAVVMFPFAYFLERNARPKLTFALFMEIFVLSLLGVSVTLNMYFASLKYTNPTFVASMINTIASLTFIIAVALRFEVLDLRNPRGIAKVIGTIISLAGVLIMTLYKGPVMRNLWHPLIHIPGKSAAINEDWLKGSILTVSSCVTWSLWYIMQASTLKRYPAQLSLTTWMSFVGAAQ

SEQ ID NO: 179249 - protein, 76 aa, Glycine max
  Clone ID: PAT_MRT3847_132879C.1.pep
IRHQEKSNNGLRKGAILFLAISTFIELVCIILYAICFTKLPIVKYYRSKAALEGSKTVAADLAAAGIQTKTNDQVI

SEQ ID NO: 179250 - protein, 75 aa, Glycine max
  unsure (1)..(75): unsure at all Xaa locations
  Clone ID: PAT_MRT3847_13287C.1.pep
STSSINEWCLSSISPARTCLKKATLGPSVFXSVGAASSPSSASSAASFPCLIEDRAVFAAPAPIVTGTVKKDMSK

SEQ ID NO: 179251 - protein, 31 aa, Glycine max
  Clone ID: PAT_MRT3847_132880C.1.pep
TYNGHRDIVGASVFKGGDDHYSIANRATLHD

SEQ ID NO: 179252 - protein, 49 aa, Glycine max
  Clone ID: PAT_MRT3847_132881C.1.pep
GVKFPFLRTLPLYCAIVRCFPFSLACSCGVNRSKIPLFSLTAPKRNYKK

SEQ ID NO: 179253 - protein, 53 aa, Glycine max
  Clone ID: PAT_MRT3847_132882C.1.pep
VRFFRRDWVEVVSRPLLLVVVLGEPGSFMSTPSLPAAISVGPFLSLTAADKNR

SEQ ID NO: 179254 - protein, 68 aa, Glycine max
  Clone ID: PAT_MRT3847_132883C.1.pep
SLSRRLHNAPVTLSGAEEDASKLHPAAKGCSHGGTKARSQDCDTGSPATWGEDSPRVRTCHRLNHKLA

SEQ ID NO: 179255 - protein, 199 aa, Glycine max
  Clone ID: PAT_MRT3847_132884C.1.pep
MKMTLVTLVLIVALSTKALLGAAGPAPEQVLDTSGKIVRARSSYYIVPASPDLGGLDMASTGADCPLDVVAVDGYQGQPLIFTPVNFNKGVIRVSTDLNIYFPVATSCPQTTVWKLKDYDYSTSQWFVTTGGDFGNPGSQTVANWFKIEKYEDAYKLVYCPSVCNDCSYPCSDIGIYQDEYGKRLALSSEPYKVKFQRA

SEQ ID NO: 179256 - protein, 107 aa, Glycine max
  Clone ID: PAT_MRT3847_132885C.1.pep
GSSSSAGLEPLTGYFTTPKLPGGPIGLLENHPIQGNPAHYIIGIIRDRTHHGTSFFKCPGHEQPEMSGLEPDYDRAGTEGMQGTVRVELNAVTTVYTDGSNQTKLLV

SEQ ID NO: 179257 - protein, 248 aa, Glycine max
  Clone ID: PAT_MRT3847_132886C.1.pep
DQTYLKADGKNFAVLGSVSTPDVMYGTTFRVEVLYVITPGPELPSGEQCSRLVISWRMNFLQSTMMKGMIESGARQGMKDSFDQYATLLCQTVKPVVSKDLGSSKEQALATLRPEPQSILKLAMQYLANFTVFTTFLMVSYVLVHIYLAAPRTIQGLEFVGFDLPDSIGEFVVCIVLVLQGERVLGLISRFMQARARARKGNPLVAFIFSMILQFENSLYFKHSSDWGVYLRANENSFVFSIGQRIMP

SEQ ID NO: 179258 - protein, 141 aa, Glycine max
  Clone ID: PAT_MRT3847_132887C.1.pep
MLIIHSGDCSKRRMVYQWFFIIKFMCLLCFVAGQNSSNTQPLDYRYACLDQTSVPPSTTYQTNLDDLISSLSSDSATSNGFGNGTSGIDENMVYGLYLCRGDVNTSLCHSCVQNSSILLKQHCPNTASAILWYPLCLLRTQ

SEQ ID NO: 179259 - protein, 141 aa, Glycine max
  unsure (1)..(141): unsure at all Xaa locations
  Clone ID: PAT_MRT3847_132888C.1.pep
DAWAGQYYPEGAPSNCRVHRQPMHMTEGKYVRQQEASIEYDACTIPHDCGXLDDAKVGNHKQIRGVHGAGSNGRLGYASLLPYVVPVVHAQSAEGYFDSLPAEDDSHEGVAHIGEIESGVYDALATKTNMVGTARAWRLDL

SEQ ID NO: 179260 - protein, 68 aa, Glycine max
  Clone ID: PAT_MRT3847_132889C.1.pep
PTIDPPPSYLSPSLHLFCFLLATTSIHYSQHHLPSAYQNSNFDLKSNLSPFLTSPSFFFFFLLFPLPP

SEQ ID NO: 179261 - protein, 43 aa, Glycine max
  Clone ID: PAT_MRT3847_13288C.1.pep
CIPFFSLPYKDMERHEPYRTSFSKFVEILKVMVSHSIYNRSSL

SEQ ID NO: 179262 - protein, 134 aa, Glycine max
  Clone ID: PAT_MRT3847_132890C.1.pep
MGGCCSHDVSVRGKVESEMDDREYEYDYENDVSYQQGGALVRLRGSSRFASMYSQQGQKGVNQDAMTVWEDYTGEKDVIFCGVFDGHGPLRHKVSQFIRDNLPSKLSAAIEISQQKTIKYYDANDAETGSFDDA

SEQ ID NO: 179263 - protein, 52 aa, Glycine max
  Clone ID: PAT_MRT3847_132891C.1.pep
RLTGITGRCTLKPEAKAVVTGSQESPSYWLLLGVRFLKGKKITLCAGHRLGE

SEQ ID NO: 179264 - protein, 75 aa, Glycine max
  unsure (1)..(75): unsure at all Xaa locations
  Clone ID: PAT_MRT3847_132892C.1.pep
LLHDHPLTIYDVELDVDXCMVLVIIEHLMSNIAHDIHCCLIIVPEEIDAGYHSNMFGYATDETAELKSVSCVLAT

SEQ ID NO: 179265 - protein, 43 aa, Glycine max
  Clone ID: PAT_MRT3847_132893C.1.pep
EWLKGEGKEARQGRRGDRFLSSTRHLYKLYPVHQIAHTLTIFC

SEQ ID NO: 179266 - protein, 124 aa, Glycine max
  unsure (1)..(124): unsure at all Xaa locations
  Clone ID: PAT_MRT3847_132894C.1.pep
AIRERLGPLXEQGRQRTAXLCAGAAQPLGERAQALSDRIPWRVEEVGNQARDLLYEVREQMEEVRSKMEEQTHQILLXAEMFQVRFKGWFKTPVEDIHRQWGNLMEKIQASVGTNSIGCTTMPL

SEQ ID NO: 179267 - protein, 56 aa, Glycine max
  Clone ID: PAT_MRT3847_132895C.1.pep
YVPSSSLSSASGEASTLSRIFNEEACCCYHTLATASSSQGSHTPVLVSQPAVPSIL

SEQ ID NO: 179268 - protein, 74 aa, Glycine max
  unsure (1)..(74): unsure at all Xaa locations
  Clone ID: PAT_MRT3847_132896C.1.pep
XDXNXRLSMHXXXXXXEHYIFIXLHLPPGYSXSFVSCXXXXXXDXEKLXLLXLGXHPXXTLDVMXXXXYXIXCR

SEQ ID NO: 179269 - protein, 70 aa, Glycine max
  Clone ID: PAT_MRT3847_132897C.1.pep
HDIKAVVNLSGRYDLKAGLEERLGKDYLERIKKDGFIDVMQSGDLSFIHTKVPCLLEHVVRYSLYNVSVH

SEQ ID NO: 179270 - protein, 77 aa, Glycine max
  Clone ID: PAT_MRT3847_132898C.1.pep
LVHQIGLPSPPTTISASQQYHQQVEEITWKKQIENPFVISSEPFASNFTHGSQYREGEVEEDIGAWRCSDINGKKIA

SEQ ID NO: 179271 - protein, 167 aa, Glycine max
  unsure (1)..(167): unsure at all Xaa locations
  Clone ID: PAT_MRT3847_132899C.1.pep
PIPDDDYRDEETDVYHLKRRMWRETLRLKRETEQSNPTEGLDAVKQRQARDQAXRGKRCHRALYGILNYMLXLMDACKAQGPAYGIIANKGEAATGXASDILQEWCNDKYRPDQTGPAAITNTHADIAIPXGRMMEAIRSVPTPHTLLELQDTTLRALLTALMQDCD

SEQ ID NO: 179272 - protein, 186 aa, Glycine max
  unsure (1)..(186): unsure at all Xaa locations
  Clone ID: PAT_MRT3847_13289C.1.pep
MLTDFIVAIDSGVPRRPPAGKRADDQVNYPKLVELLLNSSEFSSNLLHDITGGRLGFPHPEDTNTIIDVHTTDVTSVVHAFRSGFRAALRDLQGFHIFLLTLHQKLDNLLRSFMNTIGKISSGESEKEDAVVPDSPSPTVVGSCPSPSSKERLXNDVHQDCSDSESQRTAPRTSSSSGNRDCCDLL

SEQ ID NO: 179273 - protein, 82 aa, Glycine max
  Clone ID: PAT_MRT3847_1328C.1.pep
SELRLKTTHGLPMLASNIMTYGSNPGVVEFRFKSYGDRRMQIDAYSADQYAISPAVHRLQRLYSAPNNGTANPHGKLRPLAL

SEQ ID NO: 179274 - protein, 80 aa, Glycine max
  unsure (1)..(80): unsure at all Xaa locations
  Clone ID: PAT_MRT3847_132900C.1.pep
MHKRRKDSEMKARLEAKKKGPALSSLAHNDNRYRKYTIVEIEATTKKFYPLNKIGESGYGPLYXGHLDHTPVAIKILRPD

SEQ ID NO: 179275 - protein, 99 aa, Glycine max
  unsure (1)..(99): unsure at all Xaa locations
  Clone ID: PAT_MRT3847_132901C.1.pep
GSRHNPFYFFRKRNSSSRRNGTRFWIDTIAKXKEYNEHLYSGQDDPTAAPKAPDXGTKKGCLNRTGGPANSXCNYGRVTHSTWGRWVHEIRGPRYMKPA

SEQ ID NO: 179276 - protein, 112 aa, Glycine max
  Clone ID: PAT_MRT3847_132902C.1.pep
IGPPRVAPPFFFFFFFTHVITHVTINFKLIFKFLSHIPPPLSMVSIKVCPKGSFEGSIPYTRPIQRQICTLYSPLYIQKLFQDRFRAPPPPPPARARTRGRTRGSTREFRDR

SEQ ID NO: 179277 - protein, 56 aa, Glycine max
  unsure (1)..(56): unsure at all Xaa locations
  Clone ID: PAT_MRT3847_132903C.1.pep
RFFSWNVTYGDIXPLGVHQTGILINGQILYPDIHSVTNDILIINVFNSLAEPFLLS

SEQ ID NO: 179278 - protein, 60 aa, Glycine max
  unsure (1)..(60): unsure at all Xaa locations
  Clone ID: PAT_MRT3847_132904C.1.pep
TLLWKSTGLGFNTSREAIQXTYIDXMCHLSVYDTIRGRILAITFHSAKMNMTIIGRKNYL

SEQ ID NO: 179279 - protein, 42 aa, Glycine max
  Clone ID: PAT_MRT3847_132905C.1.pep
PRVRPRVRTFARRGQQGTSNMNHQFMAAIKVFWGIYISSMNL

SEQ ID NO: 179280 - protein, 58 aa, Glycine max
  Clone ID: PAT_MRT3847_132906C.1.pep
LISRHESFVYDIGFKVILAHIDSGSQTVICLKSPGSHIDSADECRDMHFQHTMCRCFD

SEQ ID NO: 179281 - protein, 160 aa, Glycine max
  Clone ID: PAT_MRT3847_132907C.1.pep
RAANGLISFYSRFDEILAALSLFFDRSEKPLITWNSMISGCVQAGKSSDAMELFCQMNMCGQKPDAITIASLLSGCCQLGYLRIGETLHGYILRNNVKVEDFTGTALIDMYTKCGRLDYAEKIFYSINDPCLVTWNSIISGYSLYGLEHKAFGCFSKLQE

SEQ ID NO: 179282 - protein, 104 aa, Glycine max
  unsure (1)..(104): unsure at all Xaa locations
  Clone ID: PAT_MRT3847_132908C.1.pep
ERKRVGKEADVFLGANKFSXGNTIGTAGHSQDRWKWSTHIHTRAPLLEPYQLTFWSLYRDIIVXFVATFVYVYITILKLMGVNXFRLKRATVCIQGIAWALGGM

SEQ ID NO: 179283 - protein, 66 aa, Glycine max
  Clone ID: PAT_MRT3847_132909C.1.pep
HISIPLTNSHNNMNLASFGYIIIITQDQTIKWIIHAHSRIIGISEQFHACALKNNVIRSLIYTLKF

SEQ ID NO: 179284 - protein, 54 aa, Glycine max
  Clone ID: PAT_MRT3847_13290C.1.pep
FHIAFPVPVYSVVRYIFPCVWLSSYPQCYSAVFDPVHCGLLLPLNVIFSSVPDN

SEQ ID NO: 179285 - protein, 103 aa, Glycine max
  Clone ID: PAT_MRT3847_132910C.1.pep
NAALSVVHKSHSGSCSFPVSGPQGTGVLQQREVRNGDDPWSSFFLPRDWDILIMDALLHVPGNEEKHQTLRINLADKPLSCTTCTECTPHPSENSKAKLSSKQ

SEQ ID NO: 179286 - protein, 42 aa, Glycine max
  Clone ID: PAT_MRT3847_132911C.1.pep
LLAYVVPLSVGDACTRTSTSMLLSSDSSIWVANDSLNISTFQ

SEQ ID NO: 179287 - protein, 70 aa, Glycine max
  unsure (1)..(70): unsure at all Xaa locations
  Clone ID: PAT_MRT3847_132912C.1.pep
LPYLQTYFGFLXLMFIINLQTYFQCLFPYGFILLALNMEERKNGNALDSAYVGNNAWEHRLCGEASSSRS

SEQ ID NO: 179288 - protein, 59 aa, Glycine max
  Clone ID: PAT_MRT3847_132913C.1.pep
NSGWIAQEKIKSGEEIIHGAIPPELYRFFHTKKQEQHNSTHEEGAAKLITLLKKKAGYS

SEQ ID NO: 179289 - protein, 74 aa, Glycine max
  Clone ID: PAT_MRT3847_132914C.1.pep
PFVALGGILHQRVSYSLSASQWSLQNLMCWRHALSSSGAVPPLSPFFYDALFQVSRFQAVLACVQFPHTPCAPS

SEQ ID NO: 179290 - protein, 66 aa, Glycine max
  unsure (1)..(66): unsure at all Xaa locations
  Clone ID: PAT_MRT3847_132915C.1.pep
LVXPXXXSSXQTPTSSLPCRLXLXAXPAXSLXSCYXXLXXLVPLXFLXAXXXFGPXXPXPPLLLXA

SEQ ID NO: 179291 - protein, 55 aa, Glycine max
  Clone ID: PAT_MRT3847_132916C.1.pep
QIPETNLWSTELSKLAASAFMAQRITSVNDMSALCETIDADVSQVLHSIGTDSRV

SEQ ID NO: 179292 - protein, 89 aa, Glycine max
  unsure (1)..(89): unsure at all Xaa locations
  Clone ID: PAT_MRT3847_132917C.1.pep
XXXSSXTRXYXPXXSXXMXXXSXXXXXXTXMHXXPXXXSXFQPXNXXLXXTXXVQXXXFXXSXXTYTXNXTXLXXSLWAXXPXLXXXXX

SEQ ID NO: 179293 - protein, 198 aa, Glycine max
  Clone ID: PAT_MRT3847_132918C.1.pep
MGGTKRNCFAAELSPCMGSRVALISMTVYDHTIEEHDQIRARSDPGTPLEWTDYKSMAFTQCVVNETLRVANIIGGIFRRARTDIDIKGYTIPKGWKVFASFRAVHLNPDHYKDARSFNPWRWQSNSSEATNPGNVYTPFGGGPRLCPGYKLARVVLSVFLHRIVTRFSWVPAEEDKLVFFPTTRTQKRYPIIVQRRD

SEQ ID NO: 179294 - protein, 97 aa, Glycine max
  Clone ID: PAT_MRT3847_132919C.1.pep
NSIPFEFGNEHGIRELAASVSIKNSQIFSDYVPGRLKIGDAFTQFRQRITVLTGSNFTSKFSTTYQRKLSRLIFIGRNSSAPKSPITERSFRDFTES

SEQ ID NO: 179295 - protein, 52 aa, Glycine max
  Clone ID: PAT_MRT3847_13291C.1.pep
TYSLSLWLRLATDCGRFSSIPPHVFFTTYETDEMEIIVVSIGGANFFFIIKL

SEQ ID NO: 179296 - protein, 42 aa, Glycine max
  unsure (1)..(42): unsure at all Xaa locations
  Clone ID: PAT_MRT3847_132920C.1.pep
VFTRSVMRREPQFISSHHFHQTQQPELMGCHRVQRLSXPLLI

SEQ ID NO: 179297 - protein, 160 aa, Glycine max
  unsure (1)..(160): unsure at all Xaa locations
  Clone ID: PAT_MRT3847_132921C.1.pep
ACVSLLRCLHRCLGNPVPQVLGFVMEILMTLQVMVENMEPEKVILYPQLFWGCVAMMHTDFVHVYRQVLELFSHVIDRLSFRDRTTENVLLSSMPRDELTTSDLGEFQRTESKSSYEPLQEGXLPTYEGVQPLVLKGLMSSVSHSVSIDVLSRITVHSCD

SEQ ID NO: 179298 - protein, 49 aa, Glycine max
  Clone ID: PAT_MRT3847_132922C.1.pep
FGSREIRGGTQLPESDIVKSCRRVSHYLFIYSFSHGNWVITGSWFEAEH

SEQ ID NO: 179299 - protein, 90 aa, Glycine max
  unsure (1)..(90): unsure at all Xaa locations
  Clone ID: PAT_MRT3847_132923C.1.pep
QVLFKTIREGKTDYRARIRLINHDMNKYNTPKYRFVVRFNNNDIVAQIISAIIASYLLLATSYSHELSRYGLELXLTNYASSYCTCLLMA

SEQ ID NO: 179300 - protein, 38 aa, Glycine max
  Clone ID: PAT_MRT3847_132924C.1.pep
NGLKPFSCLWNSKYLRVFLPSKQGTVLIKIIKGEPRDL

SEQ ID NO: 179301 - protein, 64 aa, Glycine max
  Clone ID: PAT_MRT3847_132925C.1.pep
RLPTHHQHLILSGKHFHYVRSLDDYFIHNECALHLILRLRGLAGNLTSTTYTTPNNIKHNHKKV

SEQ ID NO: 179302 - protein, 208 aa, Glycine max
  Clone ID: PAT_MRT3847_132926C.1.pep
EESYVLWLMYINSRGKLADRLVAYDTALSVLCQHAAASPKDIIHESPCILDLFLQMMHCLCMSGNVEKAIERSYGIFPTTTKSNEPHHLSLSEILNCLTVSDKCVFWVCCVYLVIYRRLPDAVVQKFESEKSLLDIEWPVVSLSEDDKEMAIKLVETAVESIDSFVYSESVKSEVNLRSAQLFALNHIRCMAALDNKECFRDLLDKYG

SEQ ID NO: 179303 - protein, 85 aa, Glycine max
  Clone ID: PAT_MRT3847_132927C.1.pep
SLKRLSNVLDSPASDSNFILSHLCPCIVNTPAGIIYELVIQKLSSEIGGRAMPQSSSAMHKAGQSSNNFVFHAHGRWLHLLGFRP

SEQ ID NO: 179304 - protein, 58 aa, Glycine max
  Clone ID: PAT_MRT3847_132928C.1.pep
LLYPRACTAARRLQKGGSVMINKHPLQSPHHSHLLHTSTYSRWIKRHRQAADIFYFTS

SEQ ID NO: 179305 - protein, 77 aa, Glycine max
  unsure (1)..(77): unsure at all Xaa locations
  Clone ID: PAT_MRT3847_132929C.1.pep
ISSLLGSLFIGPTHIWGPVLHTLKARTSPFVELNITHPFIQPLYIQHHKECVHTQLACIGYHQHRTLILACXRRTHA

SEQ ID NO: 179306 - protein, 289 aa, Glycine max
  unsure (1)..(289): unsure at all Xaa locations
  Clone ID: PAT_MRT3847_13292C.1.pep
MACSRIHFNLNLPFPSDAAPIPYTCHSPSRLSLSPLFTFTTPKIAYSSAPRRTCGAVCCQMTMEEKPLSENQMLVYVPPHPLIKHWVSVLRNEQTPCPIFRNAMAELGRLLMYEASRDWLPTVSGEIQSPMGCXSSVELIDPREPVAVIPILRAGLALAEHASSILPAIKTYHLGISRDEETXLQPTIYLXNKLPEKFPEXSXVFVFDPMLATGGTIVAAVSILKERGVGTKQIKVISAVSAPPAHQKLSEQFPGLHVYTGIIDPEVNEKGFIIPGLGDAGDRSFGTDT

SEQ ID NO: 179307 - protein, 85 aa, Glycine max
  Clone ID: PAT_MRT3847_132930C.1.pep
LATSTFIVFAPSLFWALTKAHSPIPFLPSTSSTINQTLCSKRAVLSWVYNYQSGARRATWDLGVPYAANQIGQRNRQVASGLHLN

SEQ ID NO: 179308 - protein, 57 aa, Glycine max
  Clone ID: PAT_MRT3847_132931C.1.pep
YNTTWLWLWGCHGICLVFKDLSWVGESGGPVTVHLVFIFNVKPFLLFPYKFGKLNVN

SEQ ID NO: 179309 - protein, 70 aa, Glycine max
  Clone ID: PAT_MRT3847_132932C.1.pep
YTTLKNEADMHHTQLDLQTTHLHNTLENHAATPWYIGHPFYTHQTYAMPSHLTLQGTDHVTEGDIGSHTI

SEQ ID NO: 179310 - protein, 198 aa, Glycine max
  unsure (1)..(198): unsure at all Xaa locations
  Clone ID: PAT_MRT3847_132933C.1.pep
QFPLPSLDKEHLPEGAEATVDIXXEKIEYLKLAYDKLQHAVKQFVANQLPNWIICDFSPHWIVDIVHEFQVKLIFYNVLSAPALTVWGPPGTRKTPLSPESLTAPPEWVTFPSSVAYRIHEAIALCAGANPVNASGVSDFERLHKVFNASEAVIFRNCYEIEGEYLNAYQKLVGKPVIPIGLLPADSEERGREILMGR

SEQ ID NO: 179311 - protein, 45 aa, Glycine max
  Clone ID: PAT_MRT3847_132934C.1.pep
EISCLKQFSRSSTSHCVRCFLPATQYVNSPPSAFVLSTIKKILVP

SEQ ID NO: 179312 - protein, 50 aa, Glycine max
  Clone ID: PAT_MRT3847_132935C.1.pep
DISFKMSVINTLRLPYKEPPASIALRHITLICVALTLTSYPYWLKRYINL

SEQ ID NO: 179313 - protein, 67 aa, Glycine max
  unsure (1)..(67): unsure at all Xaa locations
  Clone ID: PAT_MRT3847_132936C.1.pep
QIFVQTLTGGTITLXVESYDAVDDVEAKIQDKEGIPPDQQRIIFTGKQLEDGTTLDDCNMQEGMNHL

SEQ ID NO: 179314 - protein, 217 aa, Glycine max
  Clone ID: PAT_MRT3847_132937C.1.pep
MADAFDEECDYLFKAVLIGDSGVGKSNMLSRFAKDEFRLDSKPTIGVEFAYRNIRVGDKLIKAQIWDTAGQERFRAITSSYYRGALGAMLVYDISMRSSYENVSKWLLELREFGGEDMVVVLVGNKCDLDESREVEKEEGKGFAETEGLCFMETSALKNLNVEEVFLQMITRIYDMTSQKNLAAKMEEQPINLLNGKEIHIADEVTATKQTSTCCSR

SEQ ID NO: 179315 - protein, 95 aa, Glycine max
  unsure (1)..(95): unsure at all Xaa locations
  Clone ID: PAT_MRT3847_132938C.1.pep
MEKVEEKKKIKGNIKDNMPTVWFSLKKSLHCKSEPSDVHDPKTRKQLSTILTKRAGRAGCSRSIANLKDXIHGSKRHLDKPPSCSPRSIRSSEFL

SEQ ID NO: 179316 - protein, 73 aa, Glycine max
  Clone ID: PAT_MRT3847_132939C.1.pep
CLHVDSRNSNGHNFSPRGLIQADNISRRMKLNNGGSREIQMVITFHSLVRFRRIIYRDARNRTTEALVKFKWS

SEQ ID NO: 179317 - protein, 296 aa, Glycine max
  Clone ID: PAT_MRT3847_13293C.1.pep
MLKSISYHLPHKSHTKNSSNPRTKITSYIDTPFIIHTWLVPAFTSTLISVSPLMRHQLLPHVTLPLASLFPSRTPLSSQQHQRQIIPLILKTVNWIFLISHLFHASFIILIIFLILGLFAFLCFAPIYYVGFDSHACLFIYPLFIRCVVFWCFLSPLSSLQAVLRGARVMRCALLALAEHASSILPATKTYHLGISRDGETLQPTIYLNKLPGKFPEGSKVFVVDPMLATGGTIVAAVSLLKERGVGNKQIKVISAVSAPPALQKLSEQFPGLHVYTGIIDPEVNEKGLVSHDIKI

SEQ ID NO: 179318 - protein, 75 aa, Glycine max
  Clone ID: PAT_MRT3847_132940C.1.pep
MEKEEKKKIKGNVQDNMPTVWFSLKKSLHCTSEPSDVHDPRTRKQLSTILTKRARRSGCLRSIANLKDVIHGSKR

SEQ ID NO: 179319 - protein, 81 aa, Glycine max
  Clone ID: PAT_MRT3847_132941C.1.pep
GALKAFFDANGKVKIKFSKKGLKKLLGGKKNYCYYPGVLGPAFSEQVLARFIPAKDPASNETPDVLHRSWGPGLQSNPGVY

SEQ ID NO: 179320 - protein, 50 aa, Glycine max
  Clone ID: PAT_MRT3847_132942C.1.pep
GKIIMKLADISQSYNPTKCAALTRARLPIVKLMDPVTGISCDICITSLIA

SEQ ID NO: 179321 - protein, 101 aa, Glycine max
  Clone ID: PAT_MRT3847_132943C.1.pep
SSISLLLAPFTSTTRLSYVPVLFNLTLSQSLFSKGSISMFPFSTFSLMKAERMKKTQKDNNFPFFFFPQIPFTFSTEINSAMHQMSLTAKHVSQEGSKGEK

SEQ ID NO: 179322 - protein, 83 aa, Glycine max
  Clone ID: PAT_MRT3847_132944C.1.pep
IQRARTNMLSSSFKLRTHFIYGNHFTQPLTTKSLTTSALPHEYQRFPSQQNQHQPPSDPTLFQGQQQWQQQHQHQTQPQQINP

SEQ ID NO: 179323 - protein, 43 aa, Glycine max
  Clone ID: PAT_MRT3847_132945C.1.pep
SESFQTAASVSGLFKAYMCFRFLLGSCVFLETAVCVKCVYGVL

SEQ ID NO: 179324 - protein, 83 aa, Glycine max
  unsure (1)..(83): unsure at all Xaa locations
  Clone ID: PAT_MRT3847_132946C.1.pep
ETMSNAMESTIHQHTVDHCLHLWNYHFQPITDLNPATSKPTWTIKSELYHFSSXSGYNTATVNPNVSYSQIWVGNCFVCTSRT

SEQ ID NO: 179325 - protein, 110 aa, Glycine max
  unsure (1)..(110): unsure at all Xaa locations
  Clone ID: PAT_MRT3847_132947C.1.pep
CMHSXXXXSXXLXXSXXLXXXHSPYXXTXLPPXXXXXXXXXLXXRXXXXXXLLXXSXPSIXXXXXXPXXLXXXLXXRSXCXHXLXRXFXXLXLXSXXDLHXXLXYACXXX

SEQ ID NO: 179326 - protein, 79 aa, Glycine max
  unsure (1)..(79): unsure at all Xaa locations
  Clone ID: PAT_MRT3847_132948C.1.pep
SHERTPGTPTREILGTHTTLQQPQAEKIXHXEDXXRSQAKPXDEEPNEXKTXAXGTAKGKGPGQPRXRGGGSKTTNTKG

SEQ ID NO: 179327 - protein, 67 aa, Glycine max
  Clone ID: PAT_MRT3847_132949C.1.pep
ITRINFAGFKKIQTFTGKKVPPTKVFCPILSKGETKRQTFNRGGKGNKGPKLKTWCQKKKFGQKDSF

SEQ ID NO: 179328 - protein, 133 aa, Glycine max
  Clone ID: PAT_MRT3847_13294C.1.pep
RLALAEHASSILPATKTYHLGISRDGETLQPTIYLNKLPGKFPEGSKVFVVDPMLATGGTIVAAVSLLKERGVGNKQIKVISAVSAPPALQKLSEQFPGLHVYTGIIDPEVNEKGFIIPGLGDAGDRSFGTDT

SEQ ID NO: 179329 - protein, 137 aa, Glycine max
  Clone ID: PAT_MRT3847_132950C.1.pep
MSPKFSYLNSLVERKKPQETTDELAIVKAAAWAWYQHGSGSEGKAKSEFDVTRTQRMARPSRYKLEAMRMAKEAPSNSIHTNYKPLLDTYEVQCISRQLDRLIVESGHNKLGNSINANNDGKDNANRRMKNKKGMSK

SEQ ID NO: 179330 - protein, 165 aa, Glycine max
  unsure (1)..(165): unsure at all Xaa locations
  Clone ID: PAT_MRT3847_132951C.1.pep
ARIADFGLAKMMFQKNETVSMIAGSYGYIAPEYGYSLKVDEKIDIYSYGVVXLELLTGKRPLNSEFGESIDLVGWIRRKIDNKSPEEALDPSVGNCKHVQEEMLLVLRIALLCTAKFPKDRPSMRDVMMMLGEAKPRRKSGRSSETFSANKEMPAISSSPVNGLL

SEQ ID NO: 179331 - protein, 88 aa, Glycine max
  Clone ID: PAT_MRT3847_132952C.1.pep
KKQCIEKENEEESPVTTSLSLFPPGEKSEEEEEEEEKEEFANQKVSDQNYFMQMMQRLIAEEVRNYMETLRNCSLEPGLDLLSPTLPK

SEQ ID NO: 179332 - protein, 168 aa, Glycine max
  Clone ID: PAT_MRT3847_132953C.1.pep
MAETPSPSESPTASFGPIISNGQVGGFDWIVLVAAILCAFVCALGLNTMLQCVFQCACRVLTEPRQWIASRRLNSGLKKKEMVALPTSTYTTTHSAAASSSSSPNSSSCVICLAEFSDGDPIRFLPKCNHYFHVVCIDKWLLSHSSCPTCRHLLKSNDSLHSLHIVIA

SEQ ID NO: 179333 - protein, 90 aa, Glycine max
  unsure (1)..(90): unsure at all Xaa locations
  Clone ID: PAT_MRT3847_132954C.1.pep
GPICCVMAYEIFPLRLRAQASALVAAGSRVSSGAISMXFLSVSRAITEAGTFFVFGAVSCCAVAFDHYCVPETRGKTVEEIEVLFRDEDD

SEQ ID NO: 179334 - protein, 126 aa, Glycine max
  Clone ID: PAT_MRT3847_132955C.1.pep
FQPIATQYLLLCLWILMKIKTTSSSVQLTTLPLRFLLYLHILFSSTRQIKIKKLDHTTGKQQSTYQVMKKRLRRLSLLVDHGVTPVEESEHKVTVWRKEERNENLAEDGSVKWMPSKMRIMRKMLV

SEQ ID NO: 179335 - protein, 49 aa, Glycine max
  unsure (1)..(49): unsure at all Xaa locations
  Clone ID: PAT_MRT3847_132956C.1.pep
SSPNSHXMASLSCXANELTPLFXXTXXXNYXCXQFDSXXXQLXVXTYAV

SEQ ID NO: 179336 - protein, 48 aa, Glycine max
  unsure (1)..(48): unsure at all Xaa locations
  Clone ID: PAT_MRT3847_132957C.1.pep
MALSSRRSCISILIYGCQILLXKAHATPVRLFARESAPPALTGDQMLK

SEQ ID NO: 179337 - protein, 134 aa, Glycine max
  unsure (1)..(134): unsure at all Xaa locations
  Clone ID: PAT_MRT3847_132958C.1.pep
NINQRSLAGTKYTETPMGAYQPHYRXPTHMRHPQVQMHGSRMSLWGAPLGMVDVXYQEPGRLECVEXVNESSANNWILFVYEDSSPLQGHLIKYPVQVDTQGKNTSLPGCEYLPDEVGKIAQLTRTANPDIFTA

SEQ ID NO: 179338 - protein, 31 aa, Glycine max
  Clone ID: PAT_MRT3847_132959C.1.pep
CHNKVNVPFCGSLIPRLFWFVSINTINYHLK

SEQ ID NO: 179339 - protein, 82 aa, Glycine max
  Clone ID: PAT_MRT3847_13295C.1.pep
YFVRIAGGTIVAAVSLLKERGVGNKQIKVISAVSAPPALQKLSEQFPGLHVYTGIIDPEVNEKGFIIPGLGDAGDRSFGTDT

SEQ ID NO: 179340 - protein, 100 aa, Glycine max
  Clone ID: PAT_MRT3847_132960C.1.pep
FLGPPPQGRISPTGFFSRPGVIRTAPQSFLTPGGPGRFQGGRLIFSGFFALKAGCFFSTTVIIFPVGQEKDFFVPLVSGFIKMAVSSQWAAVVPFGHTPV

SEQ ID NO: 179341 - protein, 234 aa, Glycine max
  unsure (1)..(234): unsure at all Xaa locations
  Clone ID: PAT_MRT3847_132961C.1.pep
VPLPSLSQFGLPFFPGHCFDQFDVYGNLXGLLAAHPVTPLVSLHHLDVVEPIFPNVSRVQALKRLNGPMKLDPAGLIQQSICYDKARTWTISVSWGYAVQIFRGTFSAREMEMPARTFLNWYKRADYTAYPFNTRPVSRHVCQKPFVYYLSRAVYDEGANETASQYVRVQQNPDCNWKMEDPTQIKVVQVYKKPDPHLWDKAPRRNCCRVRRTKKKGTMVIDVGECREDEVVEL

SEQ ID NO: 179342 - protein, 74 aa, Glycine max
  Clone ID: PAT_MRT3847_132962C.1.pep
NKTPEENRQSSSKGMLFPQTHKAKTLMGVMDLTVSPLQSASKAQIPRTQNHAHQLMSSQPSTMLEKIPNSSQMQ

SEQ ID NO: 179343 - protein, 49 aa, Glycine max
  Clone ID: PAT_MRT3847_132963C.1.pep
RPKYVIYVTETKPRGRRLRRTLCAELKDPSHLLLCPECNEAGPNTRYGS

SEQ ID NO: 179344 - protein, 92 aa, Glycine max
  Clone ID: PAT_MRT3847_132964C.1.pep
LQELIENSGQSSSETFQTMFVKDKSGRVRCHGRTTTPTLLKRNKEISEIEKRHAEEVKELNDKIQEIEEKCNREMAAAEEKCCQEMAAMEHK

SEQ ID NO: 179345 - protein, 137 aa, Glycine max
  Clone ID: PAT_MRT3847_132965C.1.pep
MSSEQALKAKQLGNEAYKRKEFATAHKYYDEAIKYEPTNIVFYSNKAAVFFEEGKYDECIEMCGKAVEVGRENRADYALVAKAYARMANSYKMKDDPKKALHFYEKALSEHFDPDIVKKHKELAKEVKEMEQKHTLT

SEQ ID NO: 179346 - protein, 84 aa, Glycine max
  unsure (1)..(84): unsure at all Xaa locations
  Clone ID: PAT_MRT3847_132966C.1.pep
LYLHTSHLPEMVFFXNSFVLKHFIIFTNIHFNXFYSLPFFKQXTFPPFLIPSSSKLKFKNKPSXQIILYYHYSFTTPYFLNFTF

SEQ ID NO: 179347 - protein, 67 aa, Glycine max
  Clone ID: PAT_MRT3847_132967C.1.pep
SNFVLTFIVLPQFVVFDFNSRAFYFHKIGISWPEPLFIMIRSRQHTECFFVHNFRQIARRNWHNTGI

SEQ ID NO: 179348 - protein, 330 aa, Glycine max
  Clone ID: PAT_MRT3847_132968C.1.pep
LFLETFVGSMSAGVGVGFISALLFKYAGLDIDNLQNLESCLFDLFPYFSYMLAEGLGLSGIVSILFTGIVMKHYTYSNLSQSSQRFASAFFELISSLAETFVFIYMGFDIAMEQHSWSHVGFIFFSIIFIGIARATNVFSCAYLVNLVRPTQNVFSCAYLVNLVRPTHRKIPSKHQKALWYSGLRGAMAFALALQSIHDLPEGHGQTIFTATTAIVVLTVLLIGGSTGSMLEALDVVGGDNDSPLASVGTITNFDGNNGYIAPHYNEESSSGNKIKMKLKEFHKTAASFTALDKNYLTPFFTSQNGDEDDEAEPFTSTRSGFHGQNHYSS

SEQ ID NO: 179349 - protein, 52 aa, Glycine max
  unsure (1)..(52): unsure at all Xaa locations
  Clone ID: PAT_MRT3847_132969C.1.pep
HPHQTQQSHTTAHXXKNKYISKRENKIIYLSMSYGAASAIKVKNVHQSSKFF

SEQ ID NO: 179350 - protein, 52 aa, Glycine max
  Clone ID: PAT_MRT3847_13296C.1.pep
LIQGRRCLTLGHPAELLNEPPSYLGHSPSNNKNAMGCNWQVYFHAFDVSYGT

SEQ ID NO: 179351 - protein, 91 aa, Glycine max
  unsure (1)..(91): unsure at all Xaa locations
  Clone ID: PAT_MRT3847_132970C.1.pep
RVDLQPFELLGNSINGAIPWDLRHCQKLILLNLNRNSLTGIIPREIXALPSITDVDLSYNSLTRTIPLNLNNCSKLENFNRSLKFLTGPIT

SEQ ID NO: 179352 - protein, 57 aa, Glycine max
  Clone ID: PAT_MRT3847_132971C.1.pep
LGDQILRRKPPCLNENVAAASPASPQPSVTLLAVLGRVKPSRTPLSGLHSDQMNLIN

SEQ ID NO: 179353 - protein, 94 aa, Glycine max
  unsure (1)..(94): unsure at all Xaa locations
  Clone ID: PAT_MRT3847_132972C.1.pep
RDIYIQPASQRIKQDSSLMKIFPLDLMSAIFKGXLTPSTYATSPTAPXRLLLENRELLMLLTTCVAELIGCVVVFIWRRSSFPKAKPLEPPKRV

SEQ ID NO: 179354 - protein, 80 aa, Glycine max
  Clone ID: PAT_MRT3847_132973C.1.pep
SGSPSFFLLGPVFTHPILHCLLCVCDLVSPKPQNSREFRNLVVPSLFILDVSKTTTASTLCFWLIGFEVTLYWELFVFGK

SEQ ID NO: 179355 - protein, 61 aa, Glycine max
  Clone ID: PAT_MRT3847_132974C.1.pep
KKWESIGTPILWVPNFRALACDSIFLLSGRLFLFYCPLLDSSVACKSLPFPSIMSLQLIPL

SEQ ID NO: 179356 - protein, 87 aa, Glycine max
  Clone ID: PAT_MRT3847_132975C.1.pep
MARPAHQEHTYPFKAVLRGLYGGGNPTLPCLFIRTEVRLESKFTLGVECAARTLHGEGRTGKAQIWDSVGQERSRSFTSAYYRWALG

SEQ ID NO: 179357 - protein, 68 aa, Glycine max
  unsure (1)..(68): unsure at all Xaa locations
  Clone ID: PAT_MRT3847_132976C.1.pep
PAFALGGGGGFFFFFFFFFFNSWKKTWPYKPHTLLIPHNPDTPPKKRNKKTKLPNPRGGAKICMPIXA

SEQ ID NO: 179358 - protein, 116 aa, Glycine max
  unsure (1)..(116): unsure at all Xaa locations
  Clone ID: PAT_MRT3847_132977C.1.pep
RVRXRLVAARGQHVTIITTPANAELFEQNIDKDTASGHHIRVHIIKFPNAHVGLPEGIEHLSAGTNNEXSPPDVFIPDILFTWTKDFSQKLXISRLVFNPISIFDVCMIHALKTHP

SEQ ID NO: 179359 - protein, 107 aa, Glycine max
  unsure (1)..(107): unsure at all Xaa locations
  Clone ID: PAT_MRT3847_132978C.1.pep
NGNAAFKKALXGPLKGVLDGCDVPLGFIDFPGFEVSSTNDPPLPMVMGKKMVKGGAWYAKKRGSNQKGGDLGHLKTNKGPGGPKRGGGGPLGGFLETNPFFGECKVF

SEQ ID NO: 179360 - protein, 233 aa, Glycine max
  unsure (1)..(233): unsure at all Xaa locations
  Clone ID: PAT_MRT3847_132979C.1.pep
MERVASVSRPLKIYFLPFFSPGHLIPLVQLARLVAARGQHVTIITTPANAQLFDQNIDKDTASGHHIRVHIIKFPNAHVGLPEGIEHLSAATNNETAYKIHMAAHLIMPQLESLVKHSPPDVFIPDILFTWTKDFSQKLSISRLVFNPISIFDVCMIHAIKTHPEAFASDSGPFLNPDLPHPLTLPVKPSXPGFAALTESLLDGEQDSHGVIVNSFADLDAEYTQHYQKLTGR

SEQ ID NO: 179361 - protein, 177 aa, Glycine max
  unsure (1)..(177): unsure at all Xaa locations
  Clone ID: PAT_MRT3847_13297C.1.pep
MTMEEKPLSENQMLVYVPPHPLIKHWVSVLRNEQTPXPFFRNAMAELGRLLMYEASRXDWLPTVSGEXIQSPMGVASVELIDPREPVAVIPILRAGLALAEHAXXSILPAIKTYHLRVRRDEETLQPTIYLNKLPEKFPEGSKVFVVDPMLATGMYSLLMFELLFSSHDHHHYTGVF

SEQ ID NO: 179362 - protein, 58 aa, Glycine max
  Clone ID: PAT_MRT3847_132980C.1.pep
QRASDHQLIHRHTLTRANTNRATIHIMQLLRMTIKPYFQVNKPIIVHLHCAHSETALR

SEQ ID NO: 179363 - protein, 77 aa, Glycine max
  Clone ID: PAT_MRT3847_132981C.1.pep
GITTVAFFNASICEPIYQYANNEARAIINSYTAALTYCRHTRYISRDPHSCSRQRSPDEDHILAISYAYTDTCLLQH

SEQ ID NO: 179364 - protein, 80 aa, Glycine max
  Clone ID: PAT_MRT3847_132982C.1.pep
CLIVDIVDEGDSSKLQKTLSMPSTPTTPMTPTTPTTPGSARKADNVWRSVFHPGSNSATKTIGAQMFDKPLPNTPTVYDW

SEQ ID NO: 179365 - protein, 91 aa, Glycine max
  Clone ID: PAT_MRT3847_132983C.1.pep
CLILHVVDEGESSKLQKTLSMPSTPTTPMTPTTPTTPGSARKADNVWRSVFHPGSNSATKTIGAQMFDKPLPNTPTVYDWLYSGETRSRHR

SEQ ID NO: 179366 - protein, 95 aa, Glycine max
  unsure (1)..(95): unsure at all Xaa locations
  Clone ID: PAT_MRT3847_132984C.1.pep
CLILHVVDEGESSKLQKTLSMPSTPTTPMTPTTPTTPGSGXRKADNVWRSVFHPGSNSATKTIGAQMFDKPLPNTPTVYDWYIIVCCYVLFPMYN

SEQ ID NO: 179367 - protein, 253 aa, Glycine max
  Clone ID: PAT_MRT3847_132985C.1.pep
GSRKSVSGPPQKKRAFHMSAHEDCLDLDDDAYPNGAVASFSPVQKEMTNSTAVMEKTTSGTEAIAEENPSALSVTMPPKSSTIDGEAHVGTADESRVGEKVDAYISTTSSILDPIFKPFTSATQTSFGFIKPASPNGSIVKPSFTFGNKVVSSTEFMAPGAPSMEITKSGPIFGLEKVVSLREPVADGPLVDFGSNKNVNKVPSMPFTAASSGGGESPFLKFGVSSDSHLGSAIGSTIVTGVTDSIPKVRESD

SEQ ID NO: 179368 - protein, 160 aa, Glycine max
  Clone ID: PAT_MRT3847_132986C.1.pep
KKGSRCRWSRGSHRDCRCRRHRQRILQLATVSFINSFEGGEFSELAKAKLWDDVVAGPQPERGLGKLRKLTTLKTIDEGDSSKLQKTLSMPSTPTTPMTPTTPTTPGSARKADNVWRSVFHPGSNSATKTIGAQMFDKPLPNTPTVYDWLYSGETRSRHR

SEQ ID NO: 179369 - protein, 117 aa, Glycine max
  Clone ID: PAT_MRT3847_132987C.1.pep
MVLLEKLWDDVVAGPQPERGLGKLRKLTTLKTIDEGESSKLQKTLSMPSTPTTPMTPTTPTTPGSARKADNVWRSVFHPGSNSATKTIGAQMFDKPLPNTPTVYDWLYSGETRSRHR

SEQ ID NO: 179370 - protein, 61 aa, Glycine max
  Clone ID: PAT_MRT3847_132988C.1.pep
NKKINRTFSSLGFFLFLIELTNKLKVKLKAKNQLHKRSKLLSVKKIHLKKTQFFKGSKRPL

SEQ ID NO: 179371 - protein, 51 aa, Glycine max
  unsure (1)..(51): unsure at all Xaa locations
  Clone ID: PAT_MRT3847_132989C.1.pep
XPXLXTXGVIXHIXPFXHXXXXXSRXXGVGXCPTFXXLGARXTELSVRVXA

SEQ ID NO: 179372 - protein, 150 aa, Glycine max
  Clone ID: PAT_MRT3847_13298C.1.pep
CSDSAGYTCQNSSMLLPSLSVCKNVPGNDISGQHCAPSEPSILQQLEEVVVIPNYHRLFPGGARKLFNIFGSSYCDETAKRLACWVCCLFKLYLFFSFSCFVIVAWLFLVILKILFCNLISDGFHSFTFFPSWFIHYLSLPHVTLITIKP

SEQ ID NO: 179373 - protein, 104 aa, Glycine max
  Clone ID: PAT_MRT3847_132990C.1.pep
MDRILKAARASGSLNLSNRSLTEIPDEVYRNLEGLGGDDKWWEAAELQKLILAHNSIASLKEDLRNLPFLSVLNLSHNSLSQLPAAIGELAQLKMLDVSFNSIV

SEQ ID NO: 179374 - protein, 258 aa, Glycine max
  unsure (1)..(258): unsure at all Xaa locations
  Clone ID: PAT_MRT3847_132991C.1.pep
IKRLKRGSQQGVHSFLKEIEXMLSQLGHRHLVSLIGYCNDNKEMILVYDFMTRGNLRDHLYNTXNPTLPWKQRLQICIGAARGLHYLHTGAKHMIIHRDVKTTNILLDDKWVAKVSDFGLSRIGPTDTSKSHVSTNVKGSFGYLDPEYYKRYRLTEKSDVYSFGVVLFEILCARPPLIRNAETEQVSLANWARRCYQNGTMAQIVDPSLKGTIAPECFEKFCEIGMSCLLEDGMHRPSINDIVWLHEFALQVDSRGSP

SEQ ID NO: 179375 - protein, 110 aa, Glycine max
  unsure (1)..(110): unsure at all Xaa locations
  Clone ID: PAT_MRT3847_132992C.1.pep
QPLYEGIFYEETGEWNGSLNAWLRPREKVQALNTRTFTEAPMDTXLVARTRVDEINNQLYSLNLTCPWTVGMTKFYRGWDKLMKSXPTGGLACQTNGLHFDSSLTPLLLN

SEQ ID NO: 179376 - protein, 57 aa, Glycine max
  unsure (1)..(57): unsure at all Xaa locations
  Clone ID: PAT_MRT3847_132993C.1.pep
EAASSMALSSPSLAGKVVNLGPSVPXCERXSMRKTVDKHVSSRIPXNGPERLMYLGP

SEQ ID NO: 179377 - protein, 86 aa, Glycine max
  Clone ID: PAT_MRT3847_132994C.1.pep
GTFRFGAFVLLAFQNGFCRFVPDSAGECPTILPLLQPHQHLRHAFRSQPSSSSSSHHHRRRRQVLRSRRAFLKGLLKNNPIPPLWG

SEQ ID NO: 179378 - protein, 80 aa, Glycine max
  unsure (1)..(80): unsure at all Xaa locations
  Clone ID: PAT_MRT3847_132995C.1.pep
MSCCGGNCGCXSSCTRSNGCXCCNMYPDXLSYTWLTTTDTSDMGVAPEKAEFDGAEMGVPAKNDGCECGPNWFCNPCTCT

SEQ ID NO: 179379 - protein, 93 aa, Glycine max
  Clone ID: PAT_MRT3847_132996C.1.pep
GRDSPVAGRESTAEAPAIAVGGSSTTIGFDCGSSLGAFVFPQTDVSVASGPAIHCGGAIRRSRSCRSRVSPFRHLGIGFIGPSGSARREKNTV

SEQ ID NO: 179380 - protein, 91 aa, Glycine max
  Clone ID: PAT_MRT3847_132997C.1.pep
WRQILRSNCHLLFFITFRLFHLKVGPWCIGYSLLWRWIIVNTLNSKYFIMRFSSYLPYCNSLSVIKISMGAMIDKWRPSNKAFGKNVSHTS

SEQ ID NO: 179381 - protein, 72 aa, Glycine max
  Clone ID: PAT_MRT3847_132998C.1.pep
VGQLLIVALSLQQNFVSLLRERSPSYHGYSKTHLYSYSPLFLALYIYIYILIYPLSINKTEIYYETNSIYIT

SEQ ID NO: 179382 - protein, 107 aa, Glycine max
  unsure (1)..(107): unsure at all Xaa locations
  Clone ID: PAT_MRT3847_132999C.1.pep
VHHPTVGVGPICHLHMISYHVQELIHRLWTAIPRTGTDYMVAXNPYGYXNTXTSVIPSKYDSVNRLKCPSKPYYKDVIAYRGLASYCLGRECVITLDVSATGCTKSE

SEQ ID NO: 179383 - protein, 71 aa, Glycine max
  Clone ID: PAT_MRT3847_13299C.1.pep
GVLELFLCKDDNMLWTYNNPCWTYNTAILFWMTWASNNLQLGLTQGHVYRKGEFLWLATTVLFIILSYTWV

SEQ ID NO: 179384 - protein, 41 aa, Glycine max
  Clone ID: PAT_MRT3847_1329C.1.pep
LSQKPYALWPFSFTHKHTSAILKLLIYFIQHILLILLLISL

SEQ ID NO: 179385 - protein, 249 aa, Glycine max
  Clone ID: PAT_MRT3847_132C.1.pep
VIWKDRIPYAFWKGNPKVSIIRRELGKCNVTEKQDWNARIYDIQWLQERASNFENSKLENQCTFRYKIYAEGATWSVSEKYIIACDSMTMFIEPKYYDFFTRNMLPLRHYWPISTKNMCEEIKYAVDWGNAHLDHAQAIGDGGTNYILENLKMKFVYDYMFHLLNNYSKLLKFKPTIPIGAVEICSESMACSLHGQRKHFMVESMVISPSDTPPCILPPPYTPETLKEFLQEKENIIKQVKTRVINTKQ

SEQ ID NO: 179386 - protein, 79 aa, Glycine max
  Clone ID: PAT_MRT3847_133000C.1.pep
PIVPSIPIPMSTRHRLQLSAIVWREPQETATISSSSRPSTSLGKLEADTSSIASVFRRFAPVPNCPSSLHPKATTAHSA

SEQ ID NO: 179387 - protein, 229 aa, Glycine max
  Clone ID: PAT_MRT3847_133001C.1.pep
MDVDPCQYEQIAINEKDVNNIILSYLIHNCYKESSESFISCTGMKQPADHLENMEKRKSSKASLMDKFHSSLGIFHHALEGNVLKAIELTGQLAQDILENNNDLLFDLLSLHFVDLVCSKEWAEALEFAQTKLSPFSVKEQKYMEKIEGFMSLLAYENPVECPMFHLIGLDYRQQVVDSLNQTILAHFNLPIHTAMERLIQQTSVVRQCLSLEDGGPPPFSLKDILKSQ

SEQ ID NO: 179388 - protein, 106 aa, Glycine max
  Clone ID: PAT_MRT3847_133002C.1.pep
KPDSIWPEKLGFTKIKFSRLPIFKITPPQIWAFKGPNMFFKRGPQCGVPIFQALKICFLKNPLLKGKPLVFLWVKCPFGAPFWAFFTFFPWGFNDLINFWGLIFSP

SEQ ID NO: 179389 - protein, 85 aa, Glycine max
  unsure (1)..(85): unsure at all Xaa locations
  Clone ID: PAT_MRT3847_133003C.1.pep
DFGFFLEIITRQTAHVLATTQKKGLLYQPLQQSCRLCKSKVETNIFFYHVLLLPYMECSYQLAKYKLCNSRRHQFAIHRVDPNIX

SEQ ID NO: 179390 - protein, 297 aa, Glycine max
  unsure (1)..(297): unsure at all Xaa locations
  Clone ID: PAT_MRT3847_133004C.1.pep
MQSKEAVVEDGEIKSVTAVGSEIDGWTNFGDDDIMQQQYTIQAEEAKKVPFVGDKEPLSSLAAEYKLGSPILLEKIKVLDEQYAAIRRTRGDGNCFFRSFMFSYLEHIMECQDQAEIDRLEADVEKSRKALQXDLTFEDFFALFLEQLESVIQGKETSISHEELVLRSRDQSVSDYVVMFFRFVTSAEIQKRTEFFEPFILGLTNTTVEQFCKSSVEPMGEESDHMHITALSDALGIPIRVVYLDRSSCDTGGVSVNHHDFMPVAGDLPNASCSSEKNIPFITLLYRPGHYDILYTK

SEQ ID NO: 179391 - protein, 241 aa, Glycine max
  unsure (1)..(241): unsure at all Xaa locations
  Clone ID: PAT_MRT3847_133005C.1.pep
MRIEADFTVVFYSLFICSCCSEKGFPNTAHAINFRKMQSKEAVVEDGEIKSVTAVGSEIDGWTNFGDDDIMQQQYTIQSEEAKKVPFVGDKEPLSSLAAEYKSGSPILLEKIKVLDEQYAAIRRTRGDGNCFFRSFMFSYLEHVMKCQDQAEVDRIQANVEKSRKALQTLGYADLTFEDFFALFLEQLESVIQGKETSISHEELVLRSRDQSVSDYVVMFFXRFVTSAAIQKRTEFFEPFI

SEQ ID NO: 179392 - protein, 30 aa, Glycine max
  Clone ID: PAT_MRT3847_133006C.1.pep
FGPGQGHTTFIYIKLMGPQIGLNKIWEISL

SEQ ID NO: 179393 - protein, 150 aa, Glycine max
  unsure (1)..(150): unsure at all Xaa locations
  Clone ID: PAT_MRT3847_133007C.1.pep
MKCLKPPFENNYPLLGYNXSAEILNIAGGRLKTYYTLHQQMRFILIFSILSIYTAIFFSYWDQILYRNLLQXHYKLPCLRDTLIFPQKSEYSATLLLXVLTPNAWIQTIXNLNFSSLHKQTMLSIAANLQIIRRSIWNFFTIENEHSNNV

SEQ ID NO: 179394 - protein, 66 aa, Glycine max
  Clone ID: PAT_MRT3847_133008C.1.pep
MAHETQNKYESSEVEVQDRGVFDFLGKKKDEEYKPHPQEEVMATEFQEVTVSYQGDFTRSLLEKLH

SEQ ID NO: 179395 - protein, 57 aa, Glycine max
  Clone ID: PAT_MRT3847_133009C.1.pep
TLWPPGIYPGFSPPPPQLSFFVAPPPPPPPPPPPPPPPPPPPPPPPPPPKKAALLTM

SEQ ID NO: 179396 - protein, 62 aa, Glycine max
  unsure (1)..(62): unsure at all Xaa locations
  Clone ID: PAT_MRT3847_13300C.1.pep
MARSKHTACKSTGGNAPRXQLATWAERXSARTTAGVKKPHRYRPITVALREITKYQNSTELL

SEQ ID NO: 179397 - protein, 55 aa, Glycine max
  unsure (1)..(55): unsure at all Xaa locations
  Clone ID: PAT_MRT3847_133010C.1.pep
QRHVEIGRVAPINYGKEYGRLAILVAVIDQNRALGDAPDMXRHPVNFKRLSITDI

SEQ ID NO: 179398 - protein, 118 aa, Glycine max
  unsure (1)..(118): unsure at all Xaa locations
  Clone ID: PAT_MRT3847_133011C.1.pep
MGCDCGGKLNVRKPHFYEVYSSAFSSHRLRLPDGFVCYMEGRAYGSVSLTGPSGNIWTVQLIKQDNDLFFHHGWSTFVVDHRLECGELLVFRYEGHLHXTVXIFDKDACEKEAAFHSE

SEQ ID NO: 179399 - protein, 199 aa, Glycine max
  unsure (1)..(199): unsure at all Xaa locations
  Clone ID: PAT_MRT3847_133012C.1.pep
MALTATTSINISHHSTLIFPPKQHKQHLRIHRFRCSGTNPNKESESQNNAILKLAWYSSELLGIAASVFRSPSNEEVPPQRLLQTIDRAAVVDTIKQDFERSYFVTDPAGSFKGLQRFKRNCTNFGSLLEKSNMKLMKWEDFEXKELDIGDSTVSCPFLGGPFFLQLDTQNTILMHDREKYAGMWSTGMFPKRHCSSKF

SEQ ID NO: 179400 - protein, 214 aa, Glycine max
  unsure (1)..(214): unsure at all Xaa locations
  Clone ID: PAT_MRT3847_133013C.1.pep
MALTATTSINISHHSTLIFPPKQHKQHLRIHRFRCSGTNPNKESESQNNAILKLAWYSSELLGIAASVFRSPSNEEVPPQRLLQTIDRAAVVDTIKQDFERSYFVTGDLTLNAYEEDCEFADPAGSFKGLQRFKRNCTNFGSLLEKSNMKLMKWEDFEXKELDIGDSTVSCPFLGGPFFLQLDTQNTILMHDREKYAGMWSTGMFPKRHCSSKF

SEQ ID NO: 179401 - protein, 72 aa, Glycine max
  Clone ID: PAT_MRT3847_133014C.1.pep
LFPKLLSHIYNVRMDMLASNDWDLESIDSLEVLDIIKQHVSTETGMRSNTTVRESYQTTPIRQFWVARVYVN

SEQ ID NO: 179402 - protein, 177 aa, Glycine max
  Clone ID: PAT_MRT3847_133015C.1.pep
RVFFRVRLPIHFRQFDGIPDSWQLLVPNSAASFLWEDLGRRRLLELLVDGTDPMKSLKFDIDEIFDHQSIHGNDGPTRALRVTIVKEEKTNVVKISDWMPENEPTGVPRRHLSSTNDSQKQQLTSITDCEFHINSDLAELGISIIDHTPEEILYLSVQNLVLAYSTGLGSGISRFKI

SEQ ID NO: 179403 - protein, 173 aa, Glycine max
  Clone ID: PAT_MRT3847_133016C.1.pep
MSCLLPHFNCHLDTFRTHPYALPTHPSKTRLNLCFQPQCVLSATSPSTLLSLEKKLALDAPSDPNTSWPYIAAVAPPSPHLKANFKSTLSAESLLTNEEAVIAAAASEALALAKAAVKVAKDAVLLVKKKPPAEAEYKSHVSSKSDDLLLKWFHQMEAEEWCSRRVPWVLEQK

SEQ ID NO: 179404 - protein, 54 aa, Glycine max
  Clone ID: PAT_MRT3847_133017C.1.pep
LGRESLPEVVEQILQQSFIINKVCNKKRSYLRDMRVRGNFLVANHLHVKEEPSE

SEQ ID NO: 179405 - protein, 162 aa, Glycine max
  unsure (1)..(162): unsure at all Xaa locations
  Clone ID: PAT_MRT3847_133018C.1.pep
FSPFCFPVCFFVGIFFPVFYFSFXVTFFAPLFPPFFLFLSFLGILAALPGPVLFFPVPPPGSRGFWGYCFNNKWGLFLFSPPPPPFQFFLPFLGGGNNNLPVFSFIEIKSGFFHPSLVLLTNYFLFPPFPTFSTLLNLFVFPLTLFVFPFXNQCVXPFFWSL

SEQ ID NO: 179406 - protein, 36 aa, Glycine max
  Clone ID: PAT_MRT3847_133019C.1.pep
LLHSHSPFFFMCFIWGITYLRAVNGMAIFMNFPTNL

SEQ ID NO: 179407 - protein, 39 aa, Glycine max
  Clone ID: PAT_MRT3847_13301C.1.pep
RAHWVGGKVGTKSHSYFWVGEVLKKNDFGRYRENEWMSG

SEQ ID NO: 179408 - protein, 46 aa, Glycine max
  Clone ID: PAT_MRT3847_133020C.1.pep
PRVREYQCRLSRQEKGYLIAKFQQTIDSYKKPMIKGRFFNDMNNFP

SEQ ID NO: 179409 - protein, 44 aa, Glycine max
  Clone ID: PAT_MRT3847_133021C.1.pep
NAMRLSSDLDMKDSMLCSHSHLDRLLRQHKACCLVRRSLNGEQA

SEQ ID NO: 179410 - protein, 95 aa, Glycine max
  Clone ID: PAT_MRT3847_133022C.1.pep
NVLSQRKTIFLLSVRHQRKGLKWLKKPRLLPVTTRLSTITGEDSWIRIKGKLHEDTPFLEEHTGGDYRLLARTNNDAPTENERFGHTRFRFRRRW

SEQ ID NO: 179411 - protein, 154 aa, Glycine max
  unsure (1)..(154): unsure at all Xaa locations
  Clone ID: PAT_MRT3847_133023C.1.pep
LIAEYFGRMPYVAHNDDQPQEKDASEGKYDCGIKARXRLEKVTSTKAQHGSGKTSKYDIIGAGXHSTEDFPEKEDQXNPKKIDARLRQRIDPQYNEVQAQMENKLSKKTTEDGETPKGSMLELKNTQTKIALPKKTVGGTILRSEXIGNFMTEA

SEQ ID NO: 179412 - protein, 66 aa, Glycine max
  Clone ID: PAT_MRT3847_133024C.1.pep
IRLTDSLSRVASLSLPRNLSGLPLSSPAHSTYYTTSTKLNSYTITVHTHHNYIQTLSIDPPAHQHD

SEQ ID NO: 179413 - protein, 99 aa, Glycine max
  unsure (1)..(99): unsure at all Xaa locations
  Clone ID: PAT_MRT3847_133025C.1.pep
RLMKSTRLFEHLVSXGSEELMQNHYSLLEDAHLIXRRRSALAAIDDMRADGYEPSKEMLKKVRQPCTREMDNERDAREHSVNNSLNYQQGADNRRDISV

SEQ ID NO: 179414 - protein, 74 aa, Glycine max
  Clone ID: PAT_MRT3847_133026C.1.pep
PKIRLSNPRFFPTWAIQNLPYTQITFFLLAQSLNPIRHELSLPIIKIILRQIDSCHPCNQLNLSFLINQLLNGV

SEQ ID NO: 179415 - protein, 86 aa, Glycine max
  Clone ID: PAT_MRT3847_133027C.1.pep
KNNCLIGADDFKSGQTKMKSVLVDFLVGAGIKRTSIVSYNHLGNNAGMNLSAPQTFRSKEISKINVVDDMVSSNAILYEPGEHPDH

SEQ ID NO: 179416 - protein, 106 aa, Glycine max
  Clone ID: PAT_MRT3847_133028C.1.pep
AAKRILMELKDLLKDPPTSCRAGPLADDMLHWLATIMGPADSPYAGGVFLVTIHFPPDYSFNPATVAYMTKVFNPNIISNGIMCFCFLKVVWSLALPYTMCMLLIC

SEQ ID NO: 179417 - protein, 195 aa, Glycine max
  Clone ID: PAT_MRT3847_133029C.1.pep
MARPQQRYRGVRQRHWGSWVSEICHPLLKTRIWLGTFETAEDAARAYDEAARLMCGSKARTNFPYNPNEPHSSSSKLLSATLTAKLHKCHMASLSLQMAKQKPPQSKEPQPSHGSSNPFAFANVIAGSSADTGFRWPDNRHEEFRWLEGNWVGVEGQVEVSHQQFQPVLEDDHIEQMIQELLDYGSIELCSVGLT

SEQ ID NO: 179418 - protein, 80 aa, Glycine max
  Clone ID: PAT_MRT3847_13302C.1.pep
FSFCFEQRTTPITTGRGGRREKKKAANKALAVCVTVKPPSIGTRFLSAVFRHVRPPLVPSSSSHHMITRKSEKNERIFYR

SEQ ID NO: 179419 - protein, 52 aa, Glycine max
  Clone ID: PAT_MRT3847_133030C.1.pep
LIKQFICFDEMEMSSFSIALRSKFSCRIIIAISYINNPYSGNIIRQQYFNQQ

SEQ ID NO: 179420 - protein, 112 aa, Glycine max
  Clone ID: PAT_MRT3847_133031C.1.pep
PCFLFCRERVSTVSHACKTICTGNSLLYYKNKQSGRVKHEFCGNQRAAKLAGLTEQPHVSGSANCKDARTVGTIELVNRAEWLKGERRVSNAFKRGLCGGWYAMQLLHLSSC

SEQ ID NO: 179421 - protein, 68 aa, Glycine max
  Clone ID: PAT_MRT3847_133032C.1.pep
THACVRIKTHIISIGINTRAEYSQVDETRTLARTLIYWTLAFSLYMAICYIWPFRMNHVTDAEHINRA

SEQ ID NO: 179422 - protein, 61 aa, Glycine max
  Clone ID: PAT_MRT3847_133033C.1.pep
VICKDRLDSFTEGQTANIKDPYSGEIGALSTCTGGSITGYGKQTDSLCWAQTIEQRLIVYY

SEQ ID NO: 179423 - protein, 84 aa, Glycine max
  Clone ID: PAT_MRT3847_133034C.1.pep
RNSHNRFVSILIQKEYSNNRSCYACMSMREYTPQAGFGADSINPVFQFCLLDVIIKVCWLHHSSLGLFFSLHLCCWCFLCFLGL

SEQ ID NO: 179424 - protein, 83 aa, Glycine max
  unsure (1)..(83): unsure at all Xaa locations
  Clone ID: PAT_MRT3847_133035C.1.pep
FVDNVIAGVMDHLNMQIHPXVRIDLFHIILLHALIIDERYVNCTLHVARCHGQKAALPFIESVEISYLDMEDNKASNLDHHPL

SEQ ID NO: 179425 - protein, 100 aa, Glycine max
  Clone ID: PAT_MRT3847_133036C.1.pep
LHPRDHHHHEGDIEFGDKGMPPPIIRTQQEHGHGHGHEGDIEFEGDIRMPPPIIRTKERGHGHHGHGAAGTGGPQLLHVNDTMKDFNLRPGHGEVLRAGA

SEQ ID NO: 179426 - protein, 350 aa, Glycine max
  Clone ID: PAT_MRT3847_133037C.1.pep
MVSSSQHILVTGGAGFIGTHTVVQLLKAGFSVSIIDNFDNSVMEAVDRVRQVVGPLLSQNLQFTQGDLRNRDDLEKLFSKTTFDAVIHFAGLKAVAESVAKPRRYFDFNLVGTINLYEFMAKYNCKKMVFSSSATVYGQPEKIPCEEDFKLQAMNPYGRTKLFLEEIARDIQKAEPEWKIILLRYFNPVGAHESGKLGEDPKGIPNNLMPYIQQVAVGRLTELNVYGHDYPTRDGSAIRDYIHVMDLADGHIAALRKLFTTENIGCTAYNLGTGRGTSVLEMVAAFEKASGKKIPVKLCPRRPGDATEVYASTERAEKELGWKANYGVEEMCRDQWNWAKNNPWGYAGKP

SEQ ID NO: 179427 - protein, 195 aa, Glycine max
  unsure (1)..(195): unsure at all Xaa locations
  Clone ID: PAT_MRT3847_133038C.1.pep
MQAWFSLHSLSPAELVPALVDNSYFHFVLASDNVLAASVVATSLVRSSLRPQRVVLHIITDRKTYYPMQAWFSLHPLSPAIIEVKALHHFDWFTKGKVPVLEAMEKDQNVRSQFRGGSSAIVANTTEKPKVIAAKLQALSPKYNSVMNHIRIHLPELFSSLNKGVFLDEDHXDQPNLXLLWDIDLNGKVNGAVKT

SEQ ID NO: 179428 - protein, 33 aa, Glycine max
  Clone ID: PAT_MRT3847_133039C.1.pep
IYCSTSRSSSIEYTTKANDVAFIDSDSRRSSTY

SEQ ID NO: 179429 - protein, 86 aa, Glycine max
  Clone ID: PAT_MRT3847_13303C.1.pep
SMLVCFVLRESALRRKRVCEWHRVLATNTAYLRGVCVGLEAMVNDSARLYCADADGTGWRILLDAALLLEPHMIRWSSCTLGTAAT

SEQ ID NO: 179430 - protein, 544 aa, Glycine max
  unsure (1)..(544): unsure at all Xaa locations
  Clone ID: PAT_MRT3847_133040C.1.pep
MVVSGPITPGQVSFLLGVIPVFVSWIYSEYLEYKKLSSPPKVHSDASLEELGKDAIKEDDRAILLESGLTRSASAKFHPPSVKLNLIRFLTMDDSFLLENRATLRAMAEFGLILFYFYICDRTNILGDSTKGYRRDLFIFCNVLLIIVSALSSLKKHNDXKQNFLLKSNLTFLSGKQTSRXWCKLFLFLILDSTYETCIYNGRRLYPASWLRINGFGNFSYYYVRKDFSLPRFAQMMWRLNFFVAFCCIVLNNDYMLYYICPMHTLFTLMVYGALGIYNKYNEIPSVMAAKILACFLVVILVWEIPGFFDIFWSPFALFLGYTDPAKPDLPRMHEWHFRSGLDRYIWIIGMIYAYFHPNVEKWMEKLEESDTKRRVTIKTGIVSVALFVGYLWYEYIYKLDKVSYNKLHPYTSWIPITVYICLRNFSQRLRNFSLTLFAWLGKITLETYISQFHIWLRSNMPNGQPKWLLSLIPEYPMLNFMLTTAIYVFVSHRLFELTNTLKTVFIPTKDNRRLLHNFITGVTLCISLYCIALILLLIPHSTV

SEQ ID NO: 179431 - protein, 179 aa, Glycine max
  Clone ID: PAT_MRT3847_133041C.1.pep
KLEESDTKRRVTIKTGIVSVALFVGYLWYEYIYKLDKVSYNKLHPYTSWIPITVYICLRNFSQRLRNFSLTLFAWLGKITLETYISQFHIWLRSNMPNGQPKWLLSLIPEYPMLNFMLTTAIYVFVSHRLFELTNTLKTVFIPTKDNRRLLHNFITGVTLCISLYCIALILLLIPHSTV

SEQ ID NO: 179432 - protein, 72 aa, Glycine max
  unsure (1)..(72): unsure at all Xaa locations
  Clone ID: PAT_MRT3847_133043C.1.pep
CNGSCRYIPPTDHLTGFFNFHTFLMGFFIDCRDSTMLYQVHXSQQKGLWLHVPLQLINLFAVSCVXDSTMLY

SEQ ID NO: 179433 - protein, 155 aa, Glycine max
  Clone ID: PAT_MRT3847_133044C.1.pep
LCGSDSVGDTEISCIAAKCVALKKLCIKSCPVSDQGMEALANGCPNLVKVKVKKCKGVTPEGGDWLRRTRGSVAVNLDTGEAELQEASASDGGAQDNVVEFPQMPAQIVAAAAFASSSTTRSSSFKLRLGLLSGRSLVASTFKRWSGGSTSARHG

SEQ ID NO: 179434 - protein, 349 aa, Glycine max
  Clone ID: PAT_MRT3847_133045C.1.pep
DDMGLIEIARGCSRLVRFELQGCRLVTERGLRTMACLLARTLIDVKVSCCVNLDTAATLRALEPIRERIERLHVDCVWNGLKESDGLGHGFLNFDLNGLDEPGDGGELMDYFGGGECENATKRKRQRCEYEMGVHDSFLQSNGNGFCGKSWDKLQYLSLWIKVGDLLTPLPVAGLEDCPVLEEIRIKVEGDSRGQPKPAESEFGLSILACYPQLLKMQLDCGDTKGYALTAPSGQMDLSLWERFLLNGIGSLSLGELHYWPPQDEDVNQRSVSLPAAGLLQECYTLRKLFIHGTAHEHFMNFFLKIPNLRDVQLREDYYPAPENDMSTEMRVGSCSRFEDALNRRRICD

SEQ ID NO: 179435 - protein, 114 aa, Glycine max
  Clone ID: PAT_MRT3847_133046C.1.pep
PPNCRQEIGKLAESRFFANGKEFDSGVSPNLNVAAEATNLALPRRIQITTQLYPAPPDRVNDVFWEQFFSERPGCFDNEKAMSNFRANPHDEQDEGRSAHGISRNIKNMDPLPL

SEQ ID NO: 179436 - protein, 72 aa, Glycine max
  unsure (1)..(72): unsure at all Xaa locations
  Clone ID: PAT_MRT3847_133047C.1.pep
NFVRVIMKKRDKLKCQGGINPYSIEWTGLAHXISEXGHGFLGCEYSXFDGLITQPGFNQIGEIINQLWGGDK

SEQ ID NO: 179437 - protein, 47 aa, Glycine max
  Clone ID: PAT_MRT3847_133048C.1.pep
LCLRKLVGTPVGDFRLCASKMSANICWPINREFCNCYAKLMKCRLLS

SEQ ID NO: 179438 - protein, 132 aa, Glycine max
  Clone ID: PAT_MRT3847_133049C.1.pep
CQLKEGDVVAKMPKEACLTTKTSGARKIIEEAGLDGHLGLAFAIMYERSLDGDSPFAGYLQLLPHQECVPIVWTLDEVNELLCGTELHQTVQEDKALIYDDWKENILPLLDLAPLKLNSKFFGVKQYFAAKS

SEQ ID NO: 179439 - protein, 56 aa, Glycine max
  unsure (1)..(56): unsure at all Xaa locations
  Clone ID: PAT_MRT3847_13304C.1.pep
EIIWWFRVEQSGRQTIAGVYPXCFQMATEWPLIRKLDSGXHGPAESGFNTDNDWGE

SEQ ID NO: 179440 - protein, 71 aa, Glycine max
  Clone ID: PAT_MRT3847_133050C.1.pep
HRALVNCEKERMSIPTFYCPSPDALIKPAPKPGDNEHPAQYTNFTYREYYDKFWNRGLSKETCVDMFKAQD

SEQ ID NO: 179441 - protein, 423 aa, Glycine max
  Clone ID: PAT_MRT3847_133051C.1.pep
LRVGGRVGGRVGFNPKSKSFMSDSVGRASAETTSEFYFAIISNAATVTSHAASKLMGTTDTTLETWSNFITLSPYRPFGTYYFCTGNGKSGKKIVITNSNAVLQVLFFSAQLSTEAEAAQVPYRSLRDHTIYGTELQQMGPQNVVHLDQHQLQNLPLSEDGAGGSNATINTALNDLGLIPRARLCLRAAAEWEARRTDNENKIKEKKDFVAKKLDVLREYRKMYKDKRVGFYDGFREHKQGEDDFKANVTRLELAGVWEQMGEKVRSYELPDEFEGNKDYIDLGTELRKLMEPLDIANYYRHGRNYEDSSSSYMVKGRPKRYRYPQRWLEHAERKSHESLSASCFWAEVEELHYKTSRSSNIVSLDQQFKERIEKLEIQIKAWSDRKELDEDVFLEGSTLVKWWKALPQQHKQHSCIKTLIRE

SEQ ID NO: 179442 - protein, 46 aa, Glycine max
  Clone ID: PAT_MRT3847_133052C.1.pep
TLRLLNHHTKHCTICDITYIISQHIDEAGDLCMPTLSDAYATFASF

SEQ ID NO: 179443 - protein, 35 aa, Glycine max
  Clone ID: PAT_MRT3847_133053C.1.pep
LKGPQLKKLKINYILQVLRCSTRSSKLKSIDALNY

SEQ ID NO: 179444 - protein, 45 aa, Glycine max
  Clone ID: PAT_MRT3847_133054C.1.pep
SPVRRFSFLFYTNNNSHKIVMEYGMPFSLLSLSILVCSHIPDLHL

SEQ ID NO: 179445 - protein, 58 aa, Glycine max
  Clone ID: PAT_MRT3847_133055C.1.pep
ANLPGAGMVALLIGLKGLAGFSTRKTSNDISSVANTGGRLQCLHGWPPVSRKKCDTYL

SEQ ID NO: 179446 - protein, 67 aa, Glycine max
  Clone ID: PAT_MRT3847_133056C.1.pep
WSHMLTVECTSCGYRHPIRQTFVYKILFVSTITSARSVLNGLSLTSNKLVRSNFSSQMIQLVINTIT

SEQ ID NO: 179447 - protein, 76 aa, Glycine max
  Clone ID: PAT_MRT3847_133057C.1.pep
PPQSTYVVLIMVSKCEGPQWLDEPLSPLIILIQKTLEATTLDIVWRISPWGEIGDKRLMPALVVPPHNRTAYDPAA

SEQ ID NO: 179448 - protein, 48 aa, Glycine max
  Clone ID: PAT_MRT3847_133058C.1.pep
SSRIGSRGCVMQFDTYSLKHRRFALGTNRKNTAGVKKILILLGSLCLK

SEQ ID NO: 179449 - protein, 62 aa, Glycine max
  Clone ID: PAT_MRT3847_133059C.1.pep
LTSRPSSFHYSPFYFFFFFFFYTKVMGLFFFFFSSFFFFKKKGPQLNIRGPLKQKISRVKLP

SEQ ID NO: 179450 - protein, 79 aa, Glycine max
  unsure (1)..(79): unsure at all Xaa locations
  Clone ID: PAT_MRT3847_13305C.1.pep
MAVMHYVIERYEDSRNWSDSAVXTMTSVERKRAFFGVVLNHIGLASAQMCKIDEAAELLEEARXILEHECVPCNQNTLG

SEQ ID NO: 179451 - protein, 52 aa, Glycine max
  unsure (1)..(52): unsure at all Xaa locations
  Clone ID: PAT_MRT3847_133060C.1.pep
PIIVVCSSHQACPPPGQKLMCHPSSFLLKFGLSPRVSPLHLFXVILTHNSRN

SEQ ID NO: 179452 - protein, 276 aa, Glycine max
  Clone ID: PAT_MRT3847_133061C.1.pep
TRPEVVYSNPASLGRNFWKHLSVTFSSRTSKEIVSYYFNVFILRRRAAQNRSRFLDIDSDDDECQTRNSRIFGFENSDDSAIESLGDEDVRVENHDNYSDEDDDDGNTDDGTEDNVHGVTGCDIGNTTEIEGEIDQNPSNSKVNSQIEPWSNPDEHVNGTPGILNYNISVGDDSCMSFECDANMHVSCHSHGLRGASSALQARGYNCNQSPHTQGKLDLSSNEMDHVYLMEPCVSKDWYPGYSTCPTPSTDLDFLPTSNLIEEFFGYGTLDKKDLK

SEQ ID NO: 179453 - protein, 51 aa, Glycine max
  Clone ID: PAT_MRT3847_133062C.1.pep
PRYRLSPWPIHERFSTTPTHQPIIPQPPPPHTPTRLIHTITVTGPWTVRSR

SEQ ID NO: 179454 - protein, 363 aa, Glycine max
  unsure (1)..(363): unsure at all Xaa locations
  Clone ID: PAT_MRT3847_133063C.1.pep
MATAVTAAVSFPATKSTSLSSRTSITAPDRIVFKKVSLQYRDVSTSGRVVSIRAQVTTEAPAKVEKESKKQEEGVIVNKFKPKNPYIGRCLLNTKITGDDAPGETWHMVFSTEGEVPYREGQSIGVIPDGVDKNGKPHKLRLYSIASSALGDXGDSKTVSLCVKRLVYTNENGELVKGVCSXFLCDLKARAEVKITGPVGKEMLMPKDPKCTIIMFGXTGTGNAPFRSFLWKMXFEKHEDXKFNGLAWLFLGVPTSSSLLYKEEFEKMQEKSPENFRLDFAVSREQTNEKGEKMYIQTRMAQYAEELWELLKKDNTFVYMCGLKGMEKGIDDIMVSLAAKDGIDWTEYKRQLKKAEQWNVEVY

SEQ ID NO: 179455 - protein, 70 aa, Glycine max
  Clone ID: PAT_MRT3847_133064C.1.pep
MFLKELVSKFIPEMIGKEIEKSTCSVYPGQNVFIGKVKILKAPKFDLGKLMEVQGDYSKNVGAKVVSPAH

SEQ ID NO: 179456 - protein, 91 aa, Glycine max
  Clone ID: PAT_MRT3847_133065C.1.pep
GSREFEKLPEKYPDNFRLDFAVSREQTNENGEKMYIQTRMAQYAEELWELLKKDNTFVYMCGLKGMEKGIDDIMVSLAAKDGKTFSFFLHT

SEQ ID NO: 179457 - protein, 362 aa, Glycine max
  Clone ID: PAT_MRT3847_133066C.1.pep
MAAAVSAAVSFPSTKSTSLPSRTSLIAPERVVFKKASLQNRDVSSSGRVVSIRAQVTTEAPAKVEKESKKQDEGVVVNKFKPKTPYIGRCLLNTKITGDDAPGETWHMVFSTEGEIPYREGQSIGVIPDGIDKNGKPHKLRLYSIASSAIGDFGDSKTVSLCVKRLVYTNENGEIVKGVCSNFLCDLKPGAEVTITGPVGKEMLMPKDPNATIIMLGTGTGIAPFRSFLWKMFFEKHEDYKFNGLAWLFLGVPTSSSLLYKEEFEKMQEKSPDNFRLDFAVSREQTNEKGEKMYIQTRMAQYAEELWELLKKDNTFVYMCGLKGMEKGIDDIMVSLAAKDGIDWTEYKRQLKKAEQWNVEVY

SEQ ID NO: 179458 - protein, 99 aa, Glycine max
  Clone ID: PAT_MRT3847_133067C.1.pep
VPIPYPPNFILFLYRKKFKKLSSTCFSSLAQIGVFNYFSKLTVNPVLTLIHQEPIKFVKQGRYFDLGGTLARFCFFCSLNSKIEEKRDRVVYAARGSWF

SEQ ID NO: 179459 - protein, 61 aa, Glycine max
  Clone ID: PAT_MRT3847_133068C.1.pep
RELQCNYIVSHATAELFINHNPTYHPVTELNAHLFHLYIQLLGISRAFHPAEPCSDLHCES

SEQ ID NO: 179460 - protein, 67 aa, Glycine max
  Clone ID: PAT_MRT3847_133069C.1.pep
PAGHGLRSRTRDSFSRTFRKKGTISLATYLKTYYVGDYVDVKVSGAVHNGMPGKFYHGRTGRFWYVT

SEQ ID NO: 179461 - protein, 115 aa, Glycine max
  Clone ID: PAT_MRT3847_13306C.1.pep
GLPKSLKSNEKYRSKEAVTKLSERIEACFWCFRGINLKIGTCKFVITSGKIMLGCLILFIYYVFRKKQATLERIVRRQAMAVKRALVDLWQLAFSYQVNPLAAVQPLSATTRQGQ

SEQ ID NO: 179462 - protein, 139 aa, Glycine max
  Clone ID: PAT_MRT3847_133070C.1.pep
ATAVTLCLVLPERGSIDALDGGMIEMVLDPDLNKTGDIWHICIEDLPRSNVLYGYRIDGPRDWGKGHRFDSSIVLVDPYAKLVEGRRYFGDISMKLSKFLGTYDFDSLPFDWGENYKLPNISEKDLVIYEMNVRAFTSD

SEQ ID NO: 179463 - protein, 57 aa, Glycine max
  Clone ID: PAT_MRT3847_133071C.1.pep
IICIAVWANNRDRHSINMPVWVAALMSCRVSSNIEALIYTSQFLLLGLQLHTLNSVH

SEQ ID NO: 179464 - protein, 87 aa, Glycine max
  Clone ID: PAT_MRT3847_133072C.1.pep
LLAPLHVLNHSHISVRSVSELTGIRLPTSIYPYPYGYILRPRPSGPLHILLLDSTPRHNNIRILSWCLHTTTHHHHHTHSTTTRTPP

SEQ ID NO: 179465 - protein, 85 aa, Glycine max
  Clone ID: PAT_MRT3847_133073C.1.pep
TGRLSDHTTINVTRRENDASHQVRVQRITRSSQPRTTKASCLVVHTLWPGKGNNLQVPATIMQTPARGPGPPNKQQPRQKKRGAT

SEQ ID NO: 179466 - protein, 160 aa, Glycine max
  Clone ID: PAT_MRT3847_133074C.1.pep
RRGYTREAYLDLVQKIRSIIPDVALSSDFICGFCGETEEEHSETLTLVKAVGYDMAFMFAYSMREKTHAHRNYVDDVPEEIKQRRLAELIETFRGSTGQCFDSQIGTTQLVLVEGPNKRAPDTELMGKSDKGHRVLFVNMPIPDREDINTKRNPVVGDYV

SEQ ID NO: 179467 - protein, 95 aa, Glycine max
  unsure (1)..(95): unsure at all Xaa locations
  Clone ID: PAT_MRT3847_133075C.1.pep
EQKKASIFFRKTGCGLDISNFNAKIRLWVQRNIQVTQPFIVFQKLKLYSFHLSQSELHKQLMSTSNIFRLMYXAYALVDTKHCLLVHTSSCCSAR

SEQ ID NO: 179468 - protein, 163 aa, Glycine max
  Clone ID: PAT_MRT3847_133076C.1.pep
MVLKTELCRFSGAKIYPGKGIRFVRGDSQVFLFANSKCKRYFHNRLKPSKLTWTAMYRKQHKKDIAQEAVKKRRRAAKKPYSRSIVGATLEVIQKKRAEKPEVRDANREAALREIKERNKKTKDEKKAKKAEFAKSQKSQGKGNVSKGAMPKGPKLGGGGGKR

SEQ ID NO: 179469 - protein, 49 aa, Glycine max
  Clone ID: PAT_MRT3847_133077C.1.pep
RLSDFDYVSDACKKDSQGFCCSCHPVRTHIREIFTLLMANLVLNFIKSN

SEQ ID NO: 179470 - protein, 100 aa, Glycine max
  Clone ID: PAT_MRT3847_133078C.1.pep
FAFGPCLADLKHLNYLDLSGNYFLGEGMSIPSFLGTMTSLTHLNLSYTGFYGKIPPQIGNLSKLRYLDLSGNYLLGGGMSIPCFLGTLTSLTHLDLSGTW

SEQ ID NO: 179471 - protein, 174 aa, Glycine max
  Clone ID: PAT_MRT3847_133079C.1.pep
MEDRDHCCSNNSTMITTTKKRTGRRSPTSDKLKNQHREKQSMKPYRGIRMRKWGKWVAEIREPNKRSRIWLGSYTTPVAAARAYDTAVFYLRGPTARLNFPELLFQDDDQEGSDSVQHGAAGNMSADSIRRKATQVGARVDALQTALHHHAPSTNSLNLKPDLNEFPKLEELQD

SEQ ID NO: 179472 - protein, 93 aa, Glycine max
  Clone ID: PAT_MRT3847_13307C.1.pep
WILASHRTNCSDFLFLDPAAPQEALTFPFGCSDWGFSSRSGGFVSLPSCGWFGGLKFRLSFATPCGLCLSCACGLFISAYSCSRSPVFLPGGG

SEQ ID NO: 179473 - protein, 90 aa, Glycine max
  unsure (1)..(90): unsure at all Xaa locations
  Clone ID: PAT_MRT3847_133080C.1.pep
VIVSKSLDSDAGTQILKLFVSNCFKFMAVAPDFGYIFKNTHAETWFRLKEGNVDPGEVSRGQSLSNXFRQSLLYKVGGTLESLEPLERSR

SEQ ID NO: 179474 - protein, 88 aa, Glycine max
  Clone ID: PAT_MRT3847_133081C.1.pep
ACITAFSDQRTFKALLKRCWAPRSLQSTGLSRWRALPGAKVVEYAPRRRASRYVRARGGHAIGRATGSPRFRLRLPVMAMYACALTVS

SEQ ID NO: 179475 - protein, 65 aa, Glycine max
  Clone ID: PAT_MRT3847_133082C.1.pep
LQLLDELAPISHDFCFGSPSSPSPPPPYHYTSPPPPSPAPAPKYIYKSPPPPVYIYASPPPPIYK

SEQ ID NO: 179476 - protein, 112 aa, Glycine max
  Clone ID: PAT_MRT3847_133083C.1.pep
AVSKHTLLSLKITSLTVAFNKKKKSWGQGVFFIWQLSPVFSIKMGLMMTHVLETNYWSHINFGSIRLINNIIAKKLKLGGIKNQFPYKKKCAHYSNTREDPIIGGVNPISEG

SEQ ID NO: 179477 - protein, 79 aa, Glycine max
  Clone ID: PAT_MRT3847_133084C.1.pep
PIYPGGSLDPLGLADDPKAFAELKVKELKNGRLAMFSMIGFFDQAIVTGKGPLENLADHLADPFFFNDWAYTTNFFPGK

SEQ ID NO: 179478 - protein, 103 aa, Glycine max
  Clone ID: PAT_MRT3847_133085C.1.pep
APLSPTRWKNSLSFLSGVSHKNSPSTLCYIGQPLLEEPLILTLVGPFGAPDRPKNPRNLKGLSWGEKGTTKGGWDPFTFKNPMALWGIFWLLAFTLKMPRKLE

SEQ ID NO: 179479 - protein, 93 aa, Glycine max
  Clone ID: PAT_MRT3847_133086C.1.pep
VHPPVLGAGGYEFIGHLGRPVGPVPGIRSGPGLVAASGPWFDAHGVLPLRTRTLLILFMIRWGVGCVRLLQAPRFGFFPSFVPSSLWCTALGS

SEQ ID NO: 179480 - protein, 51 aa, Glycine max
  Clone ID: PAT_MRT3847_133087C.1.pep
GAVHALYMPCAQQSGRMSVLAPELFLHTMVDIVLSMVVSPVDGVSQSPSLP

SEQ ID NO: 179481 - protein, 171 aa, Glycine max
  Clone ID: PAT_MRT3847_133088C.1.pep
MVMITAWITDLFACMGGCFGCCVKPTPIIAVDEPAKGLRIQGQTVRKPHISDGFWSSSTCDLDNSNIQSQRSISSVSTSNQILYHSGGTSTPGANPEFVNPGLLLWNESRLQWVGSGKSRKHGQQKREPRLNWNATYESLLGTRQPFPKPIPLSEMVEFLVDVWEREGMYG

SEQ ID NO: 179482 - protein, 37 aa, Glycine max
  Clone ID: PAT_MRT3847_133089C.1.pep
TLMPVIHTDTPARRCFIKCGGALPLTLLYTIISPTTF

SEQ ID NO: 179483 - protein, 56 aa, Glycine max
  Clone ID: PAT_MRT3847_13308C.1.pep
WKLSLSSTSCTPPMPRVQRYSSTLRCSACKGMYQSYRHEFTLRLSLLQLAHGIRPV

SEQ ID NO: 179484 - protein, 161 aa, Glycine max
  Clone ID: PAT_MRT3847_133090C.1.pep
GRVKPMDQEKIGGEKKIPNLKQKGKKNPPKFFPKIKLGPANLKKGVLKKKKKNWPRVDPGQRDKFFLGGKKNWGETLLEPPFRKHFPQQGPKKKKTGGKFRGGKPNPWIHLKKPQKGAQRDFSQKFPRGLKKFSPFFSRESLINFFWEKQPHFGKMGPPPP

SEQ ID NO: 179485 - protein, 81 aa, Glycine max
  unsure (1)..(81): unsure at all Xaa locations
  Clone ID: PAT_MRT3847_133091C.1.pep
LLFIKKKKKKKKKKKKKEKKKKKKKNKKKKKKKKKKKKKKKKKIKXNWNKKKQKKKLRKTLKWPPLIKLKNIPLWAEGIIF

SEQ ID NO: 179486 - protein, 86 aa, Glycine max
  Clone ID: PAT_MRT3847_133092C.1.pep
PESRTIANTPKIVHITQFHLNSSSMQSNSFVWCAITLKQISEGVNMPNLMKICFFVYQWLVQSRASPGARASPGAAVKLCLGDLLL

SEQ ID NO: 179487 - protein, 143 aa, Glycine max
  unsure (1)..(143): unsure at all Xaa locations
  Clone ID: PAT_MRT3847_133093C.1.pep
HAVPVFPTHVAHESLKEQTKDEDMGNATKDNNAGTDVNTXRSAVGDLKRLTQGKIFEAELMRVSSITANEKHVLTKPLRTXEILSSNARDFRTATASKNRKPQATAMHVGALQMINDSVARSDCNIHCCSAPWLILYHTNPEN

SEQ ID NO: 179488 - protein, 173 aa, Glycine max
  Clone ID: PAT_MRT3847_133094C.1.pep
MGGCLSSKPKAVDNGSASGNTNCFMLYARALSITWGETPEYWIWVQQKEASGTIIELAKLKKVCWLEVRGKFDIRKLLPGILYQVSFLIMLEDSSEGWEVPINVRLVLPGGKRQQHKVNLNEKLRENWMEILVGEFVASEKDGGEMDISMYEYEGGMWKSGLVIQGVVIKPKN

SEQ ID NO: 179489 - protein, 80 aa, Glycine max
  Clone ID: PAT_MRT3847_133095C.1.pep
ILIKKTQGGRLIILSNHNIDVFSSGYFATSIHSQWLTRKSWVAEALMRKATIKGGGHVLIATTLKHSLLGLPYHWKKTGP

SEQ ID NO: 179490 - protein, 74 aa, Glycine max
  unsure (1)..(74): unsure at all Xaa locations
  Clone ID: PAT_MRT3847_133096C.1.pep
HHNNPLYIHIFTDSDYALKLHHIFHYSLYFLYHRFNNPKKSFPILNHTFFXLLYPIENYKIYSYLTNTNVKSIF

SEQ ID NO: 179491 - protein, 125 aa, Glycine max
  Clone ID: PAT_MRT3847_133097C.1.pep
RCFFFKDLGVRPKIGFFPIVNPALPSQGCNAPSVLKLPGRFHSNPIYSLLGGGLGFFSSPRGSKNHVFQPPPVCFLRLKTQPGSFHGYLGEKIFLGPLGPPPHGFWVSKGGIFWGKWIFLNPVFL

SEQ ID NO: 179492 - protein, 106 aa, Glycine max
  Clone ID: PAT_MRT3847_133098C.1.pep
FRYHYNVADARLAQHVERGIADGLLISCVASCSNLWALIMDAGTGFSSQVYKLSPFFLHKEWIMEQWEKNYYITSIAGANNGSSLVVMSKGLFFKNELVLDFGLYC

SEQ ID NO: 179493 - protein, 363 aa, Glycine max
  Clone ID: PAT_MRT3847_133099C.1.pep
IVQWCTAHGVPLEPPEVTDAMGEAFPSACPSKAALEANRATATLLIQQLAGGSQAGKTVAAREISSRAKTGKENRAFIAEAGAIPYLRNLLSSPNAVAQENSVTALLNLSIFDKNKSRIMDEEGCLGSIVDVLRFGHTTEAKENAAATLFSLSAVHDYKKIIADEIRAVEALAGLLQEGTPRGKKDAVTALFNLSTHTENCVRMIEAGAVTALVSALGNEGVSEEAAGALALIVRQPIGAKAVVNEESAVAGLIGMMRCGTPRGKENAVAAMLELCRSGGAAATERVVKAPALAGLLQTLLFTGTKRARRKAASLARVFQRCEHASLHYGGLGVGYAFASNSTTTRDTSFAGDVSVPMSISVL

SEQ ID NO: 179494 - protein, 115 aa, Glycine max
  Clone ID: PAT_MRT3847_13309C.1.pep
KLLILQVDLAHLLAARDQELRTLSAEMNQVQSELRLARSLIAERDSEIQHVRMTNNQYVEENERLRAILGEWSTRAAKLERALEAERMSTLELQRKLSTPRSQPYTSTEANQHGA

SEQ ID NO: 179495 - protein, 143 aa, Glycine max
  Clone ID: PAT_MRT3847_1330C.1.pep
KKKKKKTRPPTKATKGTQKGKGGGNPSESHSLQTKRKQKNPRGSKKKKRGGKRPKKSPPPQKKGKKRGGGFQTPKRPLKDRHQKASKNHHFSAQGRTHQTPTRPKRAPRKRQRGPPPCRGQGEKTPGGGAKKMHKMEETRGPP

SEQ ID NO: 179496 - protein, 37 aa, Glycine max
  Clone ID: PAT_MRT3847_133100C.1.pep
FSLDNSDYNLFPNYKIISLNYTLFPFFNQFIVFFPTL

SEQ ID NO: 179497 - protein, 86 aa, Glycine max
  Clone ID: PAT_MRT3847_133101C.1.pep
GGFDPTAVNPTNFLDLAPPVIDESPKDFLSVSTRTGDVDEGVKPPIFRAIVKDASLFFFTVQTGYKGWFKVARCFAECPGSSFSGV

SEQ ID NO: 179498 - protein, 39 aa, Glycine max
  Clone ID: PAT_MRT3847_133102C.1.pep
MYFSLYNSDYNLLPNYKIISLNYTLFPFFNQYIVFFPTL

SEQ ID NO: 179499 - protein, 35 aa, Glycine max
  Clone ID: PAT_MRT3847_133103C.1.pep
VMFKSLNLGLCKYRWICSSRSDALIMESYAYSVHR

SEQ ID NO: 179500 - protein, 80 aa, Glycine max
  Clone ID: PAT_MRT3847_133104C.1.pep
TYNSTCEPHSSVNPPHVSASQQNIRTSHGEAEALVPADVPCAASFATIDAFDLSDCRSDRTEGDALNHAYIRAHSYLHGL

SEQ ID NO: 179501 - protein, 85 aa, Glycine max
  unsure (1)..(85): unsure at all Xaa locations
  Clone ID: PAT_MRT3847_133105C.1.pep
FHXXXIYXFXGSRXXNXXXXLRXXETMIXATRHXRXXXRXXLIIALIYXTHSRXXIXXXYFEYSXXXXKAVXRTNSECIXXXXXX

SEQ ID NO: 179502 - protein, 98 aa, Glycine max
  Clone ID: PAT_MRT3847_133106C.1.pep
FQKQIQNKIQGLFLKKPHKTPTPQRPGLPLNVLKNIISLLNTGGPKPTQFGGFERKKHSKGAFAFQVLKNGPFFSKPLPPRGSKPPQKIIPWSFLKNP

SEQ ID NO: 179503 - protein, 35 aa, Glycine max
  Clone ID: PAT_MRT3847_133107C.1.pep
GILQHHQVIAEFEEIPVENQQNLTDSALGEALRST

SEQ ID NO: 179504 - protein, 49 aa, Glycine max
  Clone ID: PAT_MRT3847_133108C.1.pep
ASDNAKSSADSYINDRSVDYLIDYEHNLVSSNTFKNYTRHGCDKVRSVI

SEQ ID NO: 179505 - protein, 89 aa, Glycine max
  Clone ID: PAT_MRT3847_133109C.1.pep
KLTWIAINMLKPSCSNDTILSCYSKVYKEKGFTLYTLYTKGIPSESQGVGKGEGDLTSRVLLRNMTGQPACPNFEALLGSCGYKYTVYF

SEQ ID NO: 179506 - protein, 52 aa, Glycine max
  Clone ID: PAT_MRT3847_13310C.1.pep
LSRSNCPRSCHTTTTKQQQHSLTILSVCRGLLCGCGVVRYVGDCLPRLLSQG

SEQ ID NO: 179507 - protein, 72 aa, Glycine max
  Clone ID: PAT_MRT3847_133110C.1.pep
LCLCHCQCKFSYSPTKSLSSYYHSLVITSLASCGSPFEDPGEKHVRDVASGEKVKGSFLGESKERKRRCFIA

SEQ ID NO: 179508 - protein, 67 aa, Glycine max
  unsure (1)..(67): unsure at all Xaa locations
  Clone ID: PAT_MRT3847_133111C.1.pep
XRXVRKXXTSVLWSXAMSTLGNPLPLXTDYKLRXIDKRXXERXDXEAAEMXXGLSXXLGXGXTXAXL

SEQ ID NO: 179509 - protein, 120 aa, Glycine max
  Clone ID: PAT_MRT3847_133112C.1.pep
QVSPPEPLRVDVETTPGWETSVAHGQISENVTARDPNEHTPPSETPVERHSPQLPDSSTAQGTTFTSPVESLTTTRARSSQLFQSSPSAGSVLDTPLKQADTPTGPQSLASSPPTAPRSV

SEQ ID NO: 179510 - protein, 54 aa, Glycine max
  Clone ID: PAT_MRT3847_133113C.1.pep
LVTICIISDRYLKISLRGWLIHIGRSKALGFIISPCFLKGSWEVFNPVLLKGGD

SEQ ID NO: 179511 - protein, 43 aa, Glycine max
  Clone ID: PAT_MRT3847_133114C.1.pep
KKHLFKLSEDSKDFFPFGSNSSHVFQEGDLFFFKLFSLFFYLK

SEQ ID NO: 179512 - protein, 45 aa, Glycine max
  Clone ID: PAT_MRT3847_133115C.1.pep
LKKTAKKRLRVPILLCHSKGQENDSFLMPKETPLIGWSGRTPPPL

SEQ ID NO: 179513 - protein, 142 aa, Glycine max
  unsure (1)..(142): unsure at all Xaa locations
  Clone ID: PAT_MRT3847_133116C.1.pep
MDPHTEELPQYIHINQNEFCIRRHKKQKEEDIAICECKYDADDPDNACGDSCLNVLTSTECTPGYCHCDILCKNQKFQKCEYAKTKLFKTEGRGWGLLADEDIKAGQFVIEYCGQGIXWKEAKRGCQAYENEGLKDAFIIFL

SEQ ID NO: 179514 - protein, 102 aa, Glycine max
  Clone ID: PAT_MRT3847_133117C.1.pep
PVSSISMKVPASRRDDARPSANVIWALSRSPKSSSSSSSLYIYAVRKSTVLAPRLTPPIGACTARVFEPNSPNYARAEQHFKTRSRAVLISMRRTNVASSSH

SEQ ID NO: 179515 - protein, 45 aa, Glycine max
  Clone ID: PAT_MRT3847_133118C.1.pep
IRNGAEENTRITKSYENTVWFLYIDHHNLKVGCTSLSDSSISLAS

SEQ ID NO: 179516 - protein, 86 aa, Glycine max
  Clone ID: PAT_MRT3847_133119C.1.pep
LHFFITLVTTNHLLHFLSYSSPLRICHLDMELSFKHQLGLACVVLLLPALCSSQDSFTDSRATYYGSPDCYGNPSMSLFLTNYGMC

SEQ ID NO: 179517 - protein, 39 aa, Glycine max
  Clone ID: PAT_MRT3847_13311C.1.pep
AVASRRYFGFKVTLLCLFNDSPCQGYVELMLIVQFVNQK

SEQ ID NO: 179518 - protein, 76 aa, Glycine max
  Clone ID: PAT_MRT3847_133120C.1.pep
LTPLSECELYKQELMLTTQATRRPALLLEKQLEIMGKRTLWHECRPQSRGSVYCHPVKRQGQLIGSQWRKSIPRSH

SEQ ID NO: 179519 - protein, 84 aa, Glycine max
  Clone ID: PAT_MRT3847_133121C.1.pep
QQIMFVLILSWLDGSICHKCLHVWCIGGGLIGAVVLTSRDDIVIRLQIRLHKERQPQVVGKRRASSCNFFFFLNNFCLDLFLGS

SEQ ID NO: 179520 - protein, 505 aa, Glycine max
  Clone ID: PAT_MRT3847_133122C.1.pep
MAGGSFTTGTVSKERAEQYKGRVTAYVIISCIVAATGGALFGYDIGISGGVTSMDDFLIEFFPSVYRQKKHAHENNYCKYDNQGLAAFTSSLYIAGLVASLMASPVTRKYGRRVSIIGGGISFLIGSALNASAVNLIMLILGRVMLGVGIGFGNQAIQFGSSEMAPTHLRGGLNMMFQVATTFGIFTANMINFGTQKIKPWGWRLSLGLAAVPALLMTVGGIFLPDTPNSLIERGLAEKGRKLLEKIRGTKEVDAEFQDMVDASELAKSIKHPFRNILERRYRPELVMAIFMPTFQILTGINSILFYAPVLFQSMGFGGDASLISSALTGGVLASSTFISIATVDRLGRRVLLVSGGLQMITCQIIVAIILGVKFGADQELSKGFSILVVVVICLFVVAFGWSWGPLGWTVPSEIFPLEIRSAGQGITVAVNLLFTFIIAQAFLALLCSFKFGIFLFFAGWITIMTIFVYLFLPETKGIPIEEMSFMWRRHWFWKRICLPTDGSI

SEQ ID NO: 179521 - protein, 75 aa, Glycine max
  Clone ID: PAT_MRT3847_133123C.1.pep
VREMGEKMSCFWSHELRSEKDYGTVDVARIPYCEKLILSFLWCADKEGRLEEMAKRNSILRRMGSFEWDRCEDPT

SEQ ID NO: 179522 - protein, 157 aa, Glycine max
  Clone ID: PAT_MRT3847_133124C.1.pep
NFARHLIRKQDWKALQEFDQLQKELEEGGVFEGWKEGDIEFAPTYKYSSSTTNRYCGSLPSRSGEKQRTPAWCDRILWYGKGVEQLHYFRSESKFSDHRPVSALFSTQIEIKSSNRGLMGLHNIPPTMLNPKNGMNRGDEDGKSSLLSSLTKNVQGC

SEQ ID NO: 179523 - protein, 562 aa, Glycine max
  unsure (1)..(562): unsure at all Xaa locations
  Clone ID: PAT_MRT3847_133125C.1.pep
MGCALGKPADAGDRRRHSTATTSGGHNPAKVREKQKPLHAGELSGVIPAPERRRPRLDSFTASHQGWPPWLMAVAGDAIRDWTPRRANTFEKLAKIGQGTYSNVYKAKDLVSGKIVALKKVRFDNVEAESVKFMAREILVLRRLXYPNVVKLRGLVTSRISSSLYLDXEYMEHDRSGLSARPTRPVKFSEPQYILXQVKCFMKQLLSGLEHCHSRGVLHRDIKGSNLLIDNEGILKIADFGLATFYDPKIKQAMTSRVVTLWYRPPELLLGATVYGVGIDLWSAGCILAELLAGKPIMPGRTEVEQLHKIFKLCGSPSEEYWRKYRLPNATIFKPQQPYKRCILETYKDFPPSSLPLIETLLAIDPEDRGTASATLNSEFFTTEPYACEPSSLPKYPPSKELDVKLRDEEARRQKALNGKASAVDGAKKVRVRERERGRAVPAPEANAEIQTNLDRWRVVTHANAKSKSEKFPPPHQDGAVGYPQDASNKGPVSFGAPDTSFSSGIFNSKPSGHVRNHAAAGLHRGRKTKKDESQMASSWKFMRPFKPSTAGLSMDLLFRSK

SEQ ID NO: 179524 - protein, 633 aa, Glycine max
  Clone ID: PAT_MRT3847_133126C.1.pep
LLGSPLGKPADAVHRRRHSTATTSGGHNPAKVREKQKPLPAGDLAGVIPAPERRRPRLGSFTATPPGGTPWIRAIAGALVRPSGAGHAPPRRRHNCRVDFATWGFNNALTVEIDRKPKVPGEITGTLPAAERRKPRLDPCAVTQQGWPSWLMAVAGEAIGDWTPRRANTFEKLAKIGQGTYSNVYKARDLVTGKIVALKKVRFDNLEPESVKFMAREILVLRRLDHPNVVKLEGLVTSRMSCSLYLVFEYMEHDLAGLAAGQGVKFTEPQVKCFMKQLLSGLEHCHSRGVLHRDIKGSNLLIDNEGILKIADFGLATFYDPKIKQAMTSRVVTLWYRPPELLLGATVYGVGIDLWSAGCILAELLAGKPIMPGRTEVEQLHKIFKLCGSPSEEYWRKYRLPNATIFKPQQPYKRCILETYKDFPPSSLPLIETLLAIDPDDRCTASAALNSEFFTTEPYACEPSSLPKYPPSKELDVKLRDEEARRQKALNGKASAVDGAKKVRVRERGRAVPAPEANAEIQTNLDRWRVVTHANAKSKSEKFPPPHQDGAVGYPQDASNKGPVSFGAPDTSFSSGIFNSKPSGTVRNHGAAGLHRGRKTKKDESQMASSWKFMRPFKPSTVGLSMDLLFRSK

SEQ ID NO: 179525 - protein, 43 aa, Glycine max
  unsure (1)..(43): unsure at all Xaa locations
  Clone ID: PAT_MRT3847_133127C.1.pep
AFXTSLXHXXXXFPYIXTXPKRRWCIPXGNXXSGFFXRRRSLL

SEQ ID NO: 179526 - protein, 52 aa, Glycine max
  Clone ID: PAT_MRT3847_133128C.1.pep
NSLIYQTWISHDSFCGKTFGPCSFILFGILCVGSLLIFVDLSIMILTGFIGI

SEQ ID NO: 179527 - protein, 59 aa, Glycine max
  Clone ID: PAT_MRT3847_133129C.1.pep
GIIRAVLLDKSRQEPTDYNVRRRLLTAEQKNNMTHGTEEKQPGANTQEERGSAGPKQQR

SEQ ID NO: 179528 - protein, 313 aa, Glycine max
  unsure (1)..(313): unsure at all Xaa locations
  Clone ID: PAT_MRT3847_13312C.1.pep
SVAVGTLAFLGAFFPYYTVNEEGVSIILKVIASLLSPTAFALGSINFADYERAHVGLRWSNIWRESSGVNFLACLLMMILDTLLYCATGLYFDKVLPREYGLRYPWSFIFQKDFWRKKKILKHCSSGFKVEISDKNSESEGNLSGEYTSKSGIEAISLEMKQQELDGRCIQIRNLHKVYATKKGDCCAVNSLQLTLYENQILALLXDEIRKVLGVCPQHDILFPELTXEHLELFATLKGVEEHSLDNAVINMADEVSLVGLADKINSIVRTLSGGMKRKLSLGIALIGSSKVIVLDEPTSGMDPYSMRLTWQL

SEQ ID NO: 179529 - protein, 81 aa, Glycine max
  Clone ID: PAT_MRT3847_133130C.1.pep
MSRRSYKTEWGCIACDELGELGAGKPHWLVETPQLLCAIDTHSLLLANRSTILLLSWSSDSSAAAPSPLKIRPDFSPIDAE

SEQ ID NO: 179530 - protein, 170 aa, Glycine max
  unsure (1)..(170): unsure at all Xaa locations
  Clone ID: PAT_MRT3847_133131C.1.pep
MGRSLSPLVRQELANLEKDEDSRKSAMKALKSYVKDLDYKAIPFFLAKVSESKENCSGEFTISIYEVLARVHGVKIVPLIDSIMRTIVKTLASSAGSFPLQQACSKVVPAIARYGIDPSTPEDKKRHIIQSLCTPLSDSLSSSQESLTSGAALCLKXLVDSENWKVASEE

SEQ ID NO: 179531 - protein, 42 aa, Glycine max
  Clone ID: PAT_MRT3847_133132C.1.pep
PIKSDNLTQDDGIQALLLLLSYPIPLSSFLTLGKACYHELLS

SEQ ID NO: 179532 - protein, 31 aa, Glycine max
  unsure (1)..(31): unsure at all Xaa locations
  Clone ID: PAT_MRT3847_133133C.1.pep
FXFFFFFFFFFFFFFFFFFFFFFLTPNFIFI

SEQ ID NO: 179533 - protein, 46 aa, Glycine max
  Clone ID: PAT_MRT3847_133134C.1.pep
LYHAKYCSWEWESLRTNFLYFIPEFLCSCPSHINGICLIDQLITKR

SEQ ID NO: 179534 - protein, 113 aa, Glycine max
  Clone ID: PAT_MRT3847_133135C.1.pep
ENPKKRETTIVGSVNTSVIQIDSSASFFRNDNLCIALGVKKKPKTLSVSLSGLLSATFFFLLSPIGSEKKKCETRDLNPIARKAHRDRRLFEIPPTRGFSWGGEPYQTLTRFG

SEQ ID NO: 179535 - protein, 195 aa, Glycine max
  Clone ID: PAT_MRT3847_133136C.1.pep
MTTAPSLTGPLSNAVGFSDWKKHAPLSASLCKLSSSSNIVDMKISRCGCRKVGHGQRCFRLYALFGGKKDNNGKSDDVPSKAGILGNMQNLYETVKKAQMVVQVEAVRVQKELAAAEFDGYCEGELVKVTLSGNQQPVRTEITEAAMELGSEKLSLLITEAYKDAHQKSVQAMKERMNDLAQSLGMPPGLSEGLK

SEQ ID NO: 179536 - protein, 91 aa, Glycine max
  Clone ID: PAT_MRT3847_133137C.1.pep
SLNVALPRIPSLLLFLNLKPKARSTLKLPVFWTIGWQSRTASSVSPIINISLSVVPYANGDVYEGELNGGKCCGRRWAYYSMRWEEWKGNW

SEQ ID NO: 179537 - protein, 32 aa, Glycine max
  Clone ID: PAT_MRT3847_133138C.1.pep
FRVQVGSKVSNRVKVKKVEHHISEEKIHKSKI

SEQ ID NO: 179538 - protein, 53 aa, Glycine max
  Clone ID: PAT_MRT3847_133139C.1.pep
HRQVNESWFSFLFYSLFASHGAQHKNYVVCCLISTQKNMVPFCRLLAAVLEAE

SEQ ID NO: 179539 - protein, 202 aa, Glycine max
  unsure (1)..(202): unsure at all Xaa locations
  Clone ID: PAT_MRT3847_13313C.1.pep
NNTSKSGIEAISLEMNQQXELDGRCIQIRNLHKVYATKKGDCCAVNSLQLTLYENQILALIGHNGAGKSTPISMLVGLLPPTSGDALVFGKTFVSDIDEIRKVLGVCPHHDILFPELPVREHLDLFAPLKGVEEHSLDNAVINMADEVGLADKITSIVRTLFGGMKRKLSLGIALIGSSKVIVLDEPTSGMDPYSMRLTWQL

SEQ ID NO: 179540 - protein, 171 aa, Glycine max
  unsure (1)..(171): unsure at all Xaa locations
  Clone ID: PAT_MRT3847_133140C.1.pep
LDLPLCQGPLLKKVLDSSKDLVNNPNYYCSSTGFSLKALNSTLCALVPLLLRPEGFNPYRWNPITSWGLTLNTWARILRSPGKNNFLPYKAVTGANPLLSWFKGLPHIRIPDLRINLMAFTGNHLGIPKENFMPLVXMPSSLFVRTRRCLIVFVALVVISLPREVLRCSPT

SEQ ID NO: 179541 - protein, 135 aa, Glycine max
  Clone ID: PAT_MRT3847_133141C.1.pep
GEGKNLFVPRALPLSFVPVPLRETPPAAGFKTPDQGGFPEAALVARFFGGAPPAGLLVFPQVALGERPPFDLAGLRQGFSRAKHFSTSACFFYKGNTKKKKKKNKKAQKNKKKKKKKKKKKKKKKKKGRPPRHVS

SEQ ID NO: 179542 - protein, 61 aa, Glycine max
  Clone ID: PAT_MRT3847_133142C.1.pep
GNSDLSLRLGICLKRNIASSAYGSEDIGLRVSEEGRKFGHSSRQKKEGYCFYPRGTGYGSI

SEQ ID NO: 179543 - protein, 117 aa, Glycine max
  unsure (1)..(117): unsure at all Xaa locations
  Clone ID: PAT_MRT3847_133143C.1.pep
AFNPCIEGFKYCKPLVQVDGTFLTGKYNDTLLTAIGQDGSRDNFPLAFAIVESETKEAWIWFLHYLXRYVTPQPNLCIISDRGTGLLATLQSKHVGWNGPDVSSVYCIRHIASNFNK

SEQ ID NO: 179544 - protein, 55 aa, Glycine max
  Clone ID: PAT_MRT3847_133144C.1.pep
GSFSPLTYFEHVTFRKCVTQYMMHTNALLQTLQFLASCVTDRPTKLMKFQLKLLS

SEQ ID NO: 179545 - protein, 135 aa, Glycine max
  Clone ID: PAT_MRT3847_133145C.1.pep
NYVVSKRPMKGHGREMIQLGVPIADAPPDVDNVTGISKDKKVESIPSLFQDIIERLAASQVMTVKPDACIVDFFNEGEHSHPNNWPPWFGRPVYTLFLTECDMTFGRIIVSDHPGEFRGAVRLSIVPAFLFCDAR

SEQ ID NO: 179546 - protein, 49 aa, Glycine max
  Clone ID: PAT_MRT3847_133146C.1.pep
CVSFLTPLVVGHPKLVSDMFIGVIKKSASSVGLYKDLLIKNSFHFLSSS

SEQ ID NO: 179547 - protein, 205 aa, Glycine max
  unsure (1)..(205): unsure at all Xaa locations
  Clone ID: PAT_MRT3847_133147C.1.pep
LRLISLPLPTNRPNSIDPALKRSGRFDSEIDIGVPDEVGRLESFGTYQKHEAFRCXSTLQCIREKMDVIDLEDESIDAEVLNSMAVSNEHFHTALGTSNPFALRETVVEVPKVSGEDIGGLENVKRELQXGCGKTLLAKAIANECQANFISXGPELLTMWFGESEANVREIFDKARQSAPCVLFDELDSIATQVYFCTSHPCRPG

SEQ ID NO: 179548 - protein, 32 aa, Glycine max
  unsure (1)..(32): unsure at all Xaa locations
  Clone ID: PAT_MRT3847_133148C.1.pep
LILLWLAYIGKGPFHTXSHLDLSSVKXLSVYL

SEQ ID NO: 179549 - protein, 247 aa, Glycine max
  Clone ID: PAT_MRT3847_133149C.1.pep
LRLISLPLPTNRPNSIDPALKRSGRFDSEIDIGVPDEVGRLEVLRVHTKNMKLSDAVNSACLTSISVATLQCIREKMDVIDLEDESIDAEVLNSMAVSNEHFHTALGTSNPSALREIVVEVPNVSWEDIGGLENVKRELQETVQYPVEHLEKFEKFGMSPLKGVLFYGPPGCGKTLLAKAIANECQANFISVRGPELLTMWFGESEANVREIFDKAKQSAPRVLFFDELDSIATQVYFCTSHPCRPG

SEQ ID NO: 179550 - protein, 107 aa, Glycine max
  Clone ID: PAT_MRT3847_13314C.1.pep
EIEREHHLIERILLQRHGLVWPLKIGLPLTCAMILHHLMMCQKIDSRATASRRKTIGLERQSSSCLDEIDGEATDTLTTYARVVNIPWNAVDEVALTDDFNGEIYVT

SEQ ID NO: 179551 - protein, 60 aa, Glycine max
  Clone ID: PAT_MRT3847_133150C.1.pep
YKVLQELIYITHHYIKKKKKPCCPIDEQNPNNGLGQVKIMYDLKDKKSLLDNHNLDSLTY

SEQ ID NO: 179552 - protein, 31 aa, Glycine max
  Clone ID: PAT_MRT3847_133151C.1.pep
YNRTFLITKHNSIRRSSISIHCVQINTLTIY

SEQ ID NO: 179553 - protein, 72 aa, Glycine max
  unsure (1)..(72): unsure at all Xaa locations
  Clone ID: PAT_MRT3847_133152C.1.pep
MGNXKTHIXIVVIGTFRXWGSQXXXXXFDLXXLGGXEQSVXFXRFXKXAAEMIKRSFKYAWVLDKLKAERKX

SEQ ID NO: 179554 - protein, 205 aa, Glycine max
  Clone ID: PAT_MRT3847_133153C.1.pep
KKRRVGRAKIVRLYAANNDINSAHHLFDKTPNRSVYLWNSMIRAFAQSQRFFNAISLFRTMLGADISPDGHTYACVIRACANNFDFGMLRRVHGGAVAAGLGRDPVCCSALVAAYSKLGLVHEARRVFDGIAEPDLVLWNSLISGYGGFGLWDVGMQMFSMMRLFGMKPDGYTLAGLLVGIADSGMLSIGQGLHCLSQKSGLDSD

SEQ ID NO: 179555 - protein, 52 aa, Glycine max
  Clone ID: PAT_MRT3847_133154C.1.pep
SSFTYWLLPRIIIFPILGLKPENRPNQAQKCFLFFNHIVVRLNTRSLLQCNR

SEQ ID NO: 179556 - protein, 184 aa, Glycine max
  Clone ID: PAT_MRT3847_133155C.1.pep
EPGSAILLGVEVLVTVSRKHTLFPMDVWHVGHLLHIPAALFQNFYQLRVTKASGPSETLMISDEHICDQVKRVDFCHVDHQFLVNLFEVCCELLYTTIMHRPSECKQCVAHLEASVAVLLNCLEKVLDDESMMNKVFFSSEDGVACASSLRRIYEEINKQKHIFGRQCSLFLSNYIWVYSGYGD

SEQ ID NO: 179557 - protein, 76 aa, Glycine max
  Clone ID: PAT_MRT3847_133156C.1.pep
PSIWRYHNTQRLRHHFLVFVLLLTVRSIFCRSQLDYCKIAPYRSLLGVLIFKWRHLPAPPPPQRRRTSYSDDGKPS

SEQ ID NO: 179558 - protein, 39 aa, Glycine max
  Clone ID: PAT_MRT3847_133157C.1.pep
DAPCTVTKSPTRVERTLTYTAPLGSSLAPVTWAIFHCSL

SEQ ID NO: 179559 - protein, 137 aa, Glycine max
  Clone ID: PAT_MRT3847_133158C.1.pep
DNGSIVEEAVEDEFAAGSLGSNRSWGARSSRRGSGGEMGSHRARFGEIESRGAALTRKGHELYLSLLAQVPSIPNETNESHQSALKAVFHQFPDDWPTIREQGLAYFRYFVKIDMEASVTTIKPGQATMTTADVSEL

SEQ ID NO: 179560 - protein, 97 aa, Glycine max
  Clone ID: PAT_MRT3847_133159C.1.pep
GTWPGGLILSRAFYWGPCPNVFWFVFSLLGTKLLPGGPYYLPNPYSALYPNSSQGHLFLKGPPPPPPPPPPPPPPPPPPPPPQRRRTSYSDDGKPSL

SEQ ID NO: 179561 - protein, 123 aa, Glycine max
  unsure (1)..(123): unsure at all Xaa locations
  Clone ID: PAT_MRT3847_13315C.1.pep
PSHNFLALPTHAFFLAADAGGDKEGSISSVQCDSKDDPVSVPLMVVENGCGSTCIDLXRLVRSELAAAAKDADLLILQGNGXTLHTNLNARLXDAMNLXMGKNQRLAENXINGNIYDCILQIL

SEQ ID NO: 179562 - protein, 54 aa, Glycine max
  Clone ID: PAT_MRT3847_133160C.1.pep
KKNQEKKKNRQNSHLKTSIYQNVYLLTSFRRLSSGSCRTCLKCNIMVLHLDNTH

SEQ ID NO: 179563 - protein, 514 aa, Glycine max
  Clone ID: PAT_MRT3847_133161C.1.pep
QQIKLKGDPSSSAALSESEESGVADVKPKEKGRKAEEIDQKSGQNVQKVSNMVLPTRKNKLVSGEEHGDGVRRQGRTGRNLAATRSMIPMTSEKLGNIGTAKQLRSARLGSDKNESKAGRPPSRKLSDRKAYARQKPAINAAADFFVESEDGHEELLAAVKGVINSAHAFSSPFWRQMEPFFSLITEEDIAYWKQKVNLESSTLTPTPVPSNIDGVETIVNGYGLMGCERDAGFDAQWNAGIVAEQLQLSKGDHNGIPFCQRLISALISEECSSESEHIKFDACDTESEPDREPELNGLDHHSGTDFQFACHSAYNGFRILDKPEQDETERDIVGIPPTGLNSSFDKSVNGFLHDKAMSSFTCSELQYDSLDINDKLLLELKSIGISPAPVPDMLQTDDEGISEDIIRLEELYLGQISKKKNLLYGLFESASVDKELQEKDFEQRALDKLVVMAYEKYMACWGPSPSGGKNTSNKMAKQAALGFVKRTLERCHQFKDTGKSCFSDPLFKDMFLG

SEQ ID NO: 179564 - protein, 68 aa, Glycine max
  Clone ID: PAT_MRT3847_133162C.1.pep
EVVEVIIKRRGMLCLALRDHSRSVGQPVIDRLFKGLTVRGLKGLLSGKRGNNGGIVLIYFSPNFFLNF

SEQ ID NO: 179565 - protein, 63 aa, Glycine max
  unsure (1)..(63): unsure at all Xaa locations
  Clone ID: PAT_MRT3847_133163C.1.pep
AASACIAIYPXLHXLSLALAAXSIIFFISIWLWHVGXXCSFWGTRLFPGLGXXYXXFFFXGGR

SEQ ID NO: 179566 - protein, 57 aa, Glycine max
  Clone ID: PAT_MRT3847_133164C.1.pep
GGGMGAGGGDHSNKKKEVVIYLKRKTTGKLYGYNEINHSDNYKCKSRDLTNQYKMKK

SEQ ID NO: 179567 - protein, 40 aa, Glycine max
  Clone ID: PAT_MRT3847_133165C.1.pep
CNPGPTLIHFFWNGEGSKPVISLKGYILKSRLNLGTLMRT

SEQ ID NO: 179568 - protein, 70 aa, Glycine max
  Clone ID: PAT_MRT3847_133166C.1.pep
GFMENKRRACLHIHRACLTDLLPCNHHSLTRKLKISTAKNIIKNLTCLFRLFPTTLTREMKRKVQGSFQY

SEQ ID NO: 179569 - protein, 125 aa, Glycine max
  unsure (1)..(125): unsure at all Xaa locations
  Clone ID: PAT_MRT3847_133167C.1.pep
LSFITITDGIDKTXATLQLRKLADCDFLKRNCKQMSNALGGAPEDKATLWSHLHYGSRHNLEMQEAHVGNLGNVLPEWHSLSPDAARQLRRKAFSRIEWLQKAEVPTIPHIEEFHSTQRMMNAPD

SEQ ID NO: 179570 - protein, 191 aa, Glycine max
  Clone ID: PAT_MRT3847_133168C.1.pep
MEGTNSSGDNVSAGVVQSRMRMKVMVAIDESEGSFYALKWALDNLFTTMATVGEASSPENDGMVFLVHVEPKVHNYVYPIGPGGAAFYPATVVVDSVKKAQQERSAAILSRALKMCHDKLVKGESIILHGDAREMICEAAEQMQINLLVLGSRGLGTLKRTFLGSVSDYCAHHAKTPILIVKPPSEHSKMQ

SEQ ID NO: 179571 - protein, 255 aa, Glycine max
  Clone ID: PAT_MRT3847_133169C.1.pep
TNSSSVPGDPLESTCSELENLYLHQNSISGSIPSQIGELGKLKSLLLWQNNIVGTIPEELGSCTEIEVIDLSENLLTGSIPRSFGNLSNLQELQLSVNQLSGIIPPEISNCTSLNQLELDNNALSGEIPDLIGNLKDLTLFFAWKNKLTGNIPDSLSECQELEAIDLSYNNLIGPIPKQLFGLRNLTKLLLLFNDLSGFIPPDIGNCTSLYRLRLNHNRLAGSIPPEIGNLKSLNFMDMSSNHLSGEIPPRYMDA

SEQ ID NO: 179572 - protein, 74 aa, Glycine max
  Clone ID: PAT_MRT3847_13316C.1.pep
SPSGLVGPVFFPSWGSGLGFRGLFLPFWPFFPFFFYQDPGILWWMVFIKKKTNISRLLSLKPAENRKKSFFSFG

SEQ ID NO: 179573 - protein, 380 aa, Glycine max
  unsure (1)..(380): unsure at all Xaa locations
  Clone ID: PAT_MRT3847_133170C.1.pep
MLFSPFLTLTFFLLFSSSVAAIYSAATCSNIVPLRYRSDRISITDFGGVGDGRTLNTKAFRAAVYRIQHLRRRGGTVLXDGLSDVVITGENGTIDGQGDVWWNMWRQRTLQFTRPNLVEFVNSQDIIISNVIFKNSPFWNIHPVYCSNVVVRYVTILAPRDSPNTDGIDPDSSSNVCIEDSYISTGDDLVAVKSGWDEYGIAYGRPSYGITIRRVTGSSPFAGIAIGSETSGGVENVLAEHINLFNMGVGIHIKTNSGRGGLIKNITVAHVYVENARQGIKIAGDVGGHPDEKFNPNALPVVKGITIKNVWGVKVNQAGLIHGLRNSPFTDVCLSDINFHGMEGPRSPSWKCSDVFGFAHQVSPWPCSQLSSQEPGSCAI

SEQ ID NO: 179574 - protein, 159 aa, Glycine max
  Clone ID: PAT_MRT3847_133171C.1.pep
MLLPPFLTLTFLLLFFNASVAAIYSTTTCSNIVSLRYRSDRISVTDFGGVGDGRTLNTKAFRAAVYRIQHLRRRGGTVLYVPPGVYLTESFNLTSHMTLYLAAGAVIKATQELGNWPLIAPLPSYGRGWELPGGRDMSSIHVVVCLDLLIRLALGHVLS

SEQ ID NO: 179575 - protein, 83 aa, Glycine max
  unsure (1)..(83): unsure at all Xaa locations
  Clone ID: PAT_MRT3847_133172C.1.pep
FQNMPPVQAAFAVVTKNVCPIIPNDCLAVFRAIMPKGWGPPPDVRPPXCLNCGNAXENPKNGFFPPVWKARFRCCMTPPKTAG

SEQ ID NO: 179576 - protein, 57 aa, Glycine max
  unsure (1)..(57): unsure at all Xaa locations
  Clone ID: PAT_MRT3847_133173C.1.pep
GRPTRTLILSFXDFIIISQNNNNNCNLFNYKITCPTFINYTLQLLNLNFHILNPTCS

SEQ ID NO: 179577 - protein, 50 aa, Glycine max
  Clone ID: PAT_MRT3847_133174C.1.pep
KNIVLVSTFHIKRISVFINISCYRAMYMSTFITSEPVSKSCLCVQHSIVP

SEQ ID NO: 179578 - protein, 82 aa, Glycine max
  Clone ID: PAT_MRT3847_133175C.1.pep
RMHACFYFIVFLISHFPAIFCDLLLIKLLANGVITMVEAFFLFNGFCVGFVISIAFLCCWQYVKWTVVLIFTVCVSGSLVCL

SEQ ID NO: 179579 - protein, 38 aa, Glycine max
  unsure (1)..(38): unsure at all Xaa locations
  Clone ID: PAT_MRT3847_133176C.1.pep
XDEHTIVQMXPXXXXXIPDCLRTPPITXSTPETXXKPT

SEQ ID NO: 179580 - protein, 86 aa, Glycine max
  unsure (1)..(86): unsure at all Xaa locations
  Clone ID: PAT_MRT3847_133177C.1.pep
STMRTMESFXFLXASXSTHAVCFAGKFTKLSPRNQTIHLLLFRLFSILKLFSLRNHIHPTKPQIIQLHLELTHSQQKVQNTSHIEA

SEQ ID NO: 179581 - protein, 78 aa, Glycine max
  unsure (1)..(78): unsure at all Xaa locations
  Clone ID: PAT_MRT3847_133178C.1.pep
HALRGGYWLLIDISISVLGXRTVAVRTSDNANGSYKNVMVGSVKGMICGQETQSVSCHQSXLPYMLDYMHIRPKDRVY

SEQ ID NO: 179582 - protein, 73 aa, Glycine max
  Clone ID: PAT_MRT3847_133179C.1.pep
GCVQNPSPIPLDKEKPLGKGVQSFLINYKLGFNYKNWLFGQLLDYRNLPEIKNKLSPGDSITDGKFGVPTTQQ

SEQ ID NO: 179583 - protein, 40 aa, Glycine max
  unsure (1)..(40): unsure at all Xaa locations
  Clone ID: PAT_MRT3847_13317C.1.pep
YKHTMLSMFINKVNLASHSSTHNYAIKHEGNCELEXKNKT

SEQ ID NO: 179584 - protein, 53 aa, Glycine max
  Clone ID: PAT_MRT3847_133180C.1.pep
WYCKSRLNAFNGFYSTSIFLQGVIPLEFKSVQPQKKEEKGPLVRTRCLLYKRM

SEQ ID NO: 179585 - protein, 252 aa, Glycine max
  unsure (1)..(252): unsure at all Xaa locations
  Clone ID: PAT_MRT3847_133181C.1.pep
GGERKRGARLCCVCKKSRASVKRPKTLEQICRECFYDAFESEIHQVILENQLFSPGERVAIGASGGKDSTVLAYVLSKLNRLHNYGLHLFLLSVDEGITGYRDDSLETVHRNQIQYGLPLKVVSYKDLYGWTMDEIVRVIGLKNNCTFCGVFRRQALDRGASLLKVDKVVTGHNADDIAETVLLNLLRGDVARLSRCTSITTGIYSPNAYRGFAREFIXDLERIRPRAILDIIKSGENFRISTSTKMPEQGT

SEQ ID NO: 179586 - protein, 353 aa, Glycine max
  Clone ID: PAT_MRT3847_133182C.1.pep
MEGEGGERKRGARLCCVCKKSRASVKRPKTLEQICRECFYDAFESEIHQVILENQLFSPGERVAIGASGGKDSTVLAYVLSKLNRLHNYGLHLFLLSVDEGITGYRDDSLETVHRNQIQYGLPLKVVSYKDLYGWTMDEIVRVIGLKNNCTFCGVFRRQALDRGASLLKVDKVVTGHNADDIAETVLLNLLRGDVARLSRCTSITTGEDGPIPRCKPFKYTYEKEIVMYAYFKKLDYFSTECIYSPNAYRGFAREFIKDLERIRPRAILDIIKSGENFRISTSTKMPEQGTCERCGYISSQKWCKACVLLDGLNRGLPKLGIGRSRGSVASDNGNESKVEKSIQGKQCTTLDF

SEQ ID NO: 179587 - protein, 59 aa, Glycine max
  Clone ID: PAT_MRT3847_133183C.1.pep
RPAWKLSLGFWLKTKFGALHRKIYPFQSKFFCLPLPILSLNRLGSFSLKFLISLSIHVN

SEQ ID NO: 179588 - protein, 151 aa, Glycine max
  Clone ID: PAT_MRT3847_133184C.1.pep
MVQQYKLYYFDLRGLGEPIRLLLHYVGQPFEDIRFKDMEEWEKTYKPKFFYGKAPVLEVDGKPLAQSSAILRYLAEKFDLAGKDEWEKAKANEIIDFLKDATTDLLPYLMVKMGRQEGDLDKLRGEVFEPGVKRIFPLFEKLLKEYRSGYM

SEQ ID NO: 179589 - protein, 56 aa, Glycine max
  Clone ID: PAT_MRT3847_133185C.1.pep
ADSSHLCCIHASLTKLVHQLTKFAKASLKLYEDIRQKSETAQTAYHNCMTIRTGKI

SEQ ID NO: 179590 - protein, 77 aa, Glycine max
  Clone ID: PAT_MRT3847_133186C.1.pep
HHVGFIGSQCRIRLCRLLGNTVLVGCCRATKFWYHDVLISNLVPATARRTSVPHAEYNTSTLRPHATSLVAACDASY

SEQ ID NO: 179591 - protein, 65 aa, Glycine max
  Clone ID: PAT_MRT3847_133187C.1.pep
LIVAQWSLFFLFFLGCRKIESAGILKIFLGGHNHPQVSLKHLFIITAFCYTETKAVCIVKSCIEV

SEQ ID NO: 179592 - protein, 73 aa, Glycine max
  Clone ID: PAT_MRT3847_133188C.1.pep
LHIASQSHRINGIIAKRLLGSLRHSRQADEYVIPHGDWFEIVSSPHYLSEIGIYASFAVATGGSNLTISLLSG

SEQ ID NO: 179593 - protein, 34 aa, Glycine max
  Clone ID: PAT_MRT3847_133189C.1.pep
IGLYYEAHLYSKMLLLLKGNGKTNLNPSLPLIWA

SEQ ID NO: 179594 - protein, 53 aa, Glycine max
  Clone ID: PAT_MRT3847_13318C.1.pep
CNIEPRSNKNCVTDSCQLSLTHLMSRVKSPVAAQTPPLFWFYMLCESGVLHYL

SEQ ID NO: 179595 - protein, 90 aa, Glycine max
  unsure (1)..(90): unsure at all Xaa locations
  Clone ID: PAT_MRT3847_133190C.1.pep
ANLNYAESNRVSILTVDKFSRRMVLQFMGINHMLCYASPALAAPIMPDMKEPEVIRMXTLKLPSGVRVQDIVEGEGPEAHDGDLVTFNCV

SEQ ID NO: 179596 - protein, 48 aa, Glycine max
  Clone ID: PAT_MRT3847_133191C.1.pep
TIEINLSFFIKHFGGGFGLKSNKEGAWFQAKKIDLGIFTTFIKGLIKL

SEQ ID NO: 179597 - protein, 70 aa, Glycine max
  Clone ID: PAT_MRT3847_133192C.1.pep
TRLFLAGPIGTSASSAPSLVRRRSLLIYGSPEMEKIPVTTKLDGPSGNHIDDTKRITAEHGPRTPKEKTA

SEQ ID NO: 179598 - protein, 74 aa, Glycine max
  Clone ID: PAT_MRT3847_133193C.1.pep
FMIHGHCYLPYISFFNIDYILLCLSHLYFCHFLSLDVNIEWSIVHATFFLIVFFFNFRKWLLNIFFYLKYFLST

SEQ ID NO: 179599 - protein, 114 aa, Glycine max
  unsure (1)..(114): unsure at all Xaa locations
  Clone ID: PAT_MRT3847_133194C.1.pep
MDDHDDWSLQWLIHGGGGRTFFFSXDXLIYFANACGAVRLREACINFKELWKKKHADDLWIKEGAAMQASLPPALSLAGSSGDILANDVTTHICCKDSIACGDGNGCVGTWGFY

SEQ ID NO: 179600 - protein, 438 aa, Glycine max
  unsure (1)..(438): unsure at all Xaa locations
  Clone ID: PAT_MRT3847_133195C.1.pep
MADSDLSSPLLSSPDHIVVTVHPSAAPSATGNPFIALGCDDDDFSVPPPSTLDPFRNRTPAIEGLYEWAKTALCLPLAALRLAIFGLCLAVGYVATKVALAGWKDKENPMPKWRCRVMWITRLCARCILFSFGYQWIKRKGKPAPREIAPIIGSNHVSYIEPIFYFYELFPTIVASAHASGFQVIYVNRFLPSSRKQAVREIKKSAFKELNNXRRASCDKFPRVLLFPEGTTTNGRNLISFQLGAFIPGYPIQPVIIRYPHVHFDQSWGNVSLGKLMFRMFTQFHNFFEVEYLPVIYPLDDKETAVHFRERTSRAIATALNAVQTGHSYGDIMLHMKAQEAKQENPSSFMVEMTKVESLFHISSTEAVDFLDKFLAMNPDPSGRVQYHDFLRVLRLKACPLSAKIFSFIDVEKSGTITFRQFLYGSAHVMSQPEFDQS

SEQ ID NO: 179601 - protein, 90 aa, Glycine max
  Clone ID: PAT_MRT3847_133196C.1.pep
NPTCRYLSTSSLSRDILHVTDPRSYRNRKEAIHGSIRACEDKKKQRGVKNFPGDTRNAPRQEQQSAGLGNLPHIMKHAVSLVLGHVLRPK

SEQ ID NO: 179602 - protein, 588 aa, Glycine max
  Clone ID: PAT_MRT3847_133197C.1.pep
MMISLTLLLHGANVLQGSRLDLLDGKNVCEALVAESPSNQATNGSHGVDFQCADEVVKTADIVKQTDLDFETMEVSANADDAAKDVNNGGNPGRIIVLSRATSSSSPGKTRPISGRSLSSRAGRDVLSDSLDGDKLHRGRDEVFIDGPHKFSRERHQDISPRNSRFNFVRGRGRLNSRLDSVRSEWESDREFSGEFYNGPSQFRGPRPKYAPAFADTDMEYNNVAPDGSYVGNGRLGRKPLNDGSYIAPRRRSPGGRDGIQIGHRNPRNISPNRCIGDGSDLVGVRHNDKFMRGLPEDNMDAMFTRSQTFEGMDGRFTRGSRNFSSMQRRGPPRIRSKSPIRSRSRSPGPWSSPRRRSPRRRSPDGFGGHPELSHRRSPFYRVDRMRSPDRPVFPAERVVRRHGSPSFMSRPSNDMRDIDSARDHGHPRSGRILIRNRRFDVVDPRDRAENDDEYFGGPMHSGRLLELSGEGNGEDRRRFGERRGPVRSFRPPYNNNVGENFHLNAEDGPRHYRFCSDDSDFHERGGNNIRERDFDRRIKGRPANVPPRRTRNMDEQEENFRHGGGGGGQVWSDDSFDDISRVKRKRF

SEQ ID NO: 179603 - protein, 240 aa, Glycine max
  Clone ID: PAT_MRT3847_133198C.1.pep
NCDSCLLANLTCHTQIFIRLEGKVALISGGASGIGEATARLFSKHGAHVVIADIQDDLGLSLCKHLESASYVHCDVTNENDVQNAVNTAISKYGNLDIMFNNAGIIDEIKTSILDNSKFDFERVISVNLVGPFLGTKHAARVMIPAKRGSIINTASVAGTFSGGASHAYTSSKHALIGLMKNTAVELGQFGIRVNCLSPYVVATPLTKKCFNLDEDRNGEIYSNLKGVHLVPNDVAEAAL

SEQ ID NO: 179604 - protein, 38 aa, Glycine max
  Clone ID: PAT_MRT3847_133199C.1.pep
APFFFFFFFFFFFFFPPKKIKGQCITQKIVTLLIQISS

SEQ ID NO: 179605 - protein, 56 aa, Glycine max
  Clone ID: PAT_MRT3847_13319C.1.pep
PAITSGAKPSNACCTKLKQQKPCLCGYLKNASLKQYVNSPNARKTVASCGIPFPTC

SEQ ID NO: 179606 - protein, 114 aa, Glycine max
  Clone ID: PAT_MRT3847_1331C.1.pep
MACSSFTFANPSSIPRPRNSLLSSSLSPRAMAKELYFNHDGSAMKKLLAGVDMVAELLGVTLGPKGRNVVLPNKYGPPKIVNDGETVLKEVFFFLLFIHHQPFASSLLLMFFFL

SEQ ID NO: 179607 - protein, 81 aa, Glycine max
  Clone ID: PAT_MRT3847_133200C.1.pep
ERVVPRRERRERERVRDRKDPCLNIVGQRIGDQQRYMRANWRDHRNISSFYFTRFSEDTTEEELWQHFKKAGNVREIFISK

SEQ ID NO: 179608 - protein, 66 aa, Glycine max
  Clone ID: PAT_MRT3847_133201C.1.pep
QPLKISIVGGFNAIPCSSFLLHKKKGTFDQTKFLVTEKNIFYFPNRDYGKQGKATNLFTETLSCTK

SEQ ID NO: 179609 - protein, 51 aa, Glycine max
  Clone ID: PAT_MRT3847_133202C.1.pep
RNLLMARLSRMAMCKKDVWRVECGIPSGFPLTVMCNSIVNEMLIRYSSEKL

SEQ ID NO: 179610 - protein, 153 aa, Glycine max
  Clone ID: PAT_MRT3847_133203C.1.pep
MHLIEWTLSMLREVWYGHGVLKFDVFVFNALVLINCMCSKYSFHFIHRLIAHVPHPRLLLRGALLLRHPTHPGKDLSVILIHCNVFLESQQKLKICLKPVYAFCWQIVGTNLEFIRKEDKDEIHVCNLSLKLHLFVLNLFGACFNGFQHCLVL

SEQ ID NO: 179611 - protein, 72 aa, Glycine max
  unsure (1)..(72): unsure at all Xaa locations
  Clone ID: PAT_MRT3847_133204C.1.pep
EHQRAYCSXGKNRRARTARFTQGANQSERISISWSPHEVYPVSVSRHQHKQWCTKGQVKQGPLVSGSPLFLV

SEQ ID NO: 179612 - protein, 81 aa, Glycine max
  unsure (1)..(81): unsure at all Xaa locations
  Clone ID: PAT_MRT3847_133205C.1.pep
RLLLHQCMNPDGIWIPCVPKRQEALQTSLXELAAKGLAHMILTAHIQRTEFAIVLTGRWPTVSXADLDVHERFTKEFGEEG

SEQ ID NO: 179613 - protein, 145 aa, Glycine max
  Clone ID: PAT_MRT3847_133206C.1.pep
MIKPFQMHFSQMNKQSNSENFHHAVDCALDEVSRRVEFGLSCPCMPGDVISKIKTQVISNAGINNQLCRRNGGDRIMNPMSFEPMKLVNFVKSLAQSPLVESDRLDFVIARSQLSAFYCSKGYSQLPEFPVLGGLFENDMETLFL

SEQ ID NO: 179614 - protein, 235 aa, Glycine max
  Clone ID: PAT_MRT3847_133207C.1.pep
KKNEGNIMQWDVEQDDPLCTLQEAFVKVEPTLGFNIELKFDDHFVYEQDYLVHVLQTILKVVFDYAKDRPIIFSTFQPEAAMLIRKLQTNYPVFFLTNGGCEIYEDVRRNSLEEAMKLCLENGLEGIVSEIKGIFRNPGAVTKIKESKLSLLSYGKLNNVPEAVYMQHLMGIDGVIVDLVQEITEAVADMIKPTKGGEGEGLVEGCGKVQGNSKPQFSQQELSFLLKLIPQLIQI

SEQ ID NO: 179615 - protein, 262 aa, Glycine max
  Clone ID: PAT_MRT3847_133208C.1.pep
MALKAVHVTDVPSLDLVTENASLSLCSSRFPNGVEMSRSDFKMPKFVVIGHRGNGMNVLQSSDRRMRAIKENTILSFNKAATFPLDFIEFDVQVTRDDCPVIFHDDFIFTEENGSVFGKRLTELNLSEFLSYGPQREAEKEGKVLLRKKEGKIMQWDVEQDDPLCTLQEAFVKVEPTLGFNIELKFDDHFVYEQDYLVHVLQTILKVVFDYAKDRPIIFSTFQPEAAMLIRKLQTNYPVFFLTNGGCEIYEDVRRNSLEEAM

SEQ ID NO: 179616 - protein, 137 aa, Glycine max
  unsure (1)..(137): unsure at all Xaa locations
  Clone ID: PAT_MRT3847_133209C.1.pep
MALKAVHVTDVPSLDLVTENASLSLCSSRFPNGVEMSRSGFKMPKFVVIGHRGNGMNVLQSSDRRMRAIKENTILSFNKAATFPLDFIEFDVQKKETEKKKLKQKCTCGFLXVTRDDCPVIFHDDFIFTEENVSSFW

SEQ ID NO: 179617 - protein, 95 aa, Glycine max
  Clone ID: PAT_MRT3847_13320C.1.pep
MMMKSAMCAVVVVALLLLAEVGPMAEAVTCTPTELSPCLPAITSGAKPSNACCTKLKQQKPCLCGYLKNASLKQYVNSPNARKTVASCGIPFPTC

SEQ ID NO: 179618 - protein, 71 aa, Glycine max
  Clone ID: PAT_MRT3847_133210C.1.pep
KPWGLPFSSPNPHFKTLKRPPGPPCFPPTPKPTLQTPACPRFNFPSGPPNQKNCPPLYKGANGKTPGFPPL

SEQ ID NO: 179619 - protein, 79 aa, Glycine max
  unsure (1)..(79): unsure at all Xaa locations
  Clone ID: PAT_MRT3847_133211C.1.pep
MDVGKNKRISKGNKGXNKKAAGPFAKKDWYDIKAPSLFQVKNVGKTLVCSTQGTKIASEGLKHRVSDVSLADLQRDEDH

SEQ ID NO: 179620 - protein, 88 aa, Glycine max
  unsure (1)..(88): unsure at all Xaa locations
  Clone ID: PAT_MRT3847_133212C.1.pep
MSLRICWLGSRAILTVHGIPFDRHDAKIALFRTSIRRLNGRLPRLSLSAMWTTAHCLAPAKDVXQDSALELERXRRTPVRYDRNLAEN

SEQ ID NO: 179621 - protein, 84 aa, Glycine max
  Clone ID: PAT_MRT3847_133213C.1.pep
SNRIRGFAATGAAPLVSAIINPPSLQVSCCCLCTTVWGACNRLVAPWQAITFTTLTTPPFGPIATLTFITYLFTTKTLFSLGGP

SEQ ID NO: 179622 - protein, 58 aa, Glycine max
  Clone ID: PAT_MRT3847_133214C.1.pep
GAFHKKKKKKENRLRVIKIFKFQNPKLKKASLGFFYKQMQSCLEQTENKGYILSPLLF

SEQ ID NO: 179623 - protein, 75 aa, Glycine max
  Clone ID: PAT_MRT3847_133215C.1.pep
GCVSKVNTLAVASTTLSGKGRHKDRSCKYCCRNYGPLCVTMPDASGYRGFHTASHESCRNLLVLVNNNKNLKKRT

SEQ ID NO: 179624 - protein, 72 aa, Glycine max
  Clone ID: PAT_MRT3847_133216C.1.pep
SASPCIFFLILEQIKDSLIALKNEWITYCEESKKLEDYASQADQMQVNTTARFYSKHMRSTQNLVQRNSLPI

SEQ ID NO: 179625 - protein, 120 aa, Glycine max
  Clone ID: PAT_MRT3847_133217C.1.pep
MVIATRNSFVSLILISSLFCTTLLAKSSHPISDAQVRKNKLQCYADIDSGLWGWSCKSTMIARENCALRCLSPACYELIYESDPLEEGEKDFIRSQEYKYCMHKLSMGESLEGVKGAFSN

SEQ ID NO: 179626 - protein, 72 aa, Glycine max
  Clone ID: PAT_MRT3847_133218C.1.pep
GVCSLCKFREWTMFARSRRIVVRRGCQTARQKSFSAVMPCAQSLIWFQGVSWGRVGSHLPCIEQVVISYVIN

SEQ ID NO: 179627 - protein, 94 aa, Glycine max
  Clone ID: PAT_MRT3847_133219C.1.pep
DEQNIQDNQEGSYEEKYNKHEDSSRQILILKQQNIVETQNRTIQVDMANIQKKKEEAKVRYCIALKELKAKAQQKGSFEVLGSRKVERNKGSLS

SEQ ID NO: 179628 - protein, 126 aa, Glycine max
  unsure (1)..(126): unsure at all Xaa locations
  Clone ID: PAT_MRT3847_13321C.1.pep
QTLAGHLVTAKVKAATLGEDAPRGVLXIIVGGSRHTGAMVAMGQKEAYVGDECLPKRGIHTLKTTMEREILSLRHDMHASRHHTSYNEPRAVPEEHPALLTEDSIRPQAIREXMTLIMIETLIVPD

SEQ ID NO: 179629 - protein, 90 aa, Glycine max
  Clone ID: PAT_MRT3847_133220C.1.pep
PFSFHASAFSPAHPYTDPWAPLPPNVHIHSQRTRRATYTPPGLSYSSWPLENAPWTLNLGPYPSPLPPFTTLTHTRSHHLIDPRLDPSSP

SEQ ID NO: 179630 - protein, 99 aa, Glycine max
  Clone ID: PAT_MRT3847_133221C.1.pep
VSNSLPLPLSLSLSRGPKLPFLSFSALSKNLLHRTTSTLQRGAPDAVTVSVTHQMSLSFSISCWGVNGGHGVSPSREIRLLSAVSADVPAQEERRGRQA

SEQ ID NO: 179631 - protein, 451 aa, Glycine max
  Clone ID: PAT_MRT3847_133222C.1.pep
MEVVEKEKKKYITSEELKGHNKEGDLWISIQGKVYNVSDWVKEHPGGDVPISNLAGQDVTDAFIAYHPGTAWSHLDKFFTGYHLSDFKVSEVSKDYRKLASEFSKLGLFDTKGHVTSCTLASVAVMFLIVMYGVLRCTSVWAHLGSGMLLGLLWMQSAYVGHDSGHYVVMTSNGFNKVAQILSGNCLTGISIAWWKWTHNAHHIACNSLDHDPDLQHMPVFAVSSRFFNSITSHFYGRKLEFDFIARFLICYQHFTFYPVMCVARVNLYLQTILLLFSRRKVQDRALNIMGILVFWTWFPLLVSFLPNWPERVMFVLASFAVCSIQHIQFCLNHFAANVYVGLPSGNDWFEKQTSGTLDISCSSSMDWFFGGLQFQLEHHLFPRLPRCQLRNISPLVSDLCKKHNLPYRSLSFWEANQWTIRTLRTAALQARDLTNPAPKNLLWEAVNTHG

SEQ ID NO: 179632 - protein, 185 aa, Glycine max
  unsure (1)..(185): unsure at all Xaa locations
  Clone ID: PAT_MRT3847_133223C.1.pep
MEVVEKEKKYITSEELKGHNKEGDLWISIQGKVYNVSDWVKEHPGGDVPISNLAGQDVTDAFIAYHPGTAWSHLEKFFTGYHLSDFKVSEVSKDYRKLASEFSKLGLFDTKGHVTSCTLASVAVMFLIVLYGVLRCTSVWAHLGSGMLLGLLLMQSAYVGHDSXHYVVMTTNXFNKVAQILSGNC

SEQ ID NO: 179633 - protein, 79 aa, Glycine max
  unsure (1)..(79): unsure at all Xaa locations
  Clone ID: PAT_MRT3847_133224C.1.pep
LKSMAGFCTMQNMNDIISIASNGGRVQCLXVWPPVGKKKFETLSYLLDLDDAQFANXVEYLLRNGWILVRYHWSTFVYV

SEQ ID NO: 179634 - protein, 90 aa, Glycine max
  unsure (1)..(90): unsure at all Xaa locations
  Clone ID: PAT_MRT3847_133225C.1.pep
MASIAALLLAMCVLPAMVVAIRPAKNPFCVKGRVYCDPCRXGYETAPTTYIGGGEIMLQCKSRVSNDVAYTKKVYTDSSXHYTMYVDDDH

SEQ ID NO: 179635 - protein, 49 aa, Glycine max
  Clone ID: PAT_MRT3847_133226C.1.pep
QSCHVCERMVMQMQPNNLNYFCGSLVSEFYSKFNTPLRIFIFVIITKAD

SEQ ID NO: 179636 - protein, 46 aa, Glycine max
  Clone ID: PAT_MRT3847_133227C.1.pep
VFIVRTKLREGPTWLDTKFHILGLELYAYFDFFKKIKLILKSLWNI

SEQ ID NO: 179637 - protein, 118 aa, Glycine max
  unsure (1)..(118): unsure at all Xaa locations
  Clone ID: PAT_MRT3847_133228C.1.pep
PVFRPFPSSFFCLPRASCLLSACSFFSPLLFCRXLLWLRLFLLASPWAFGGLGSFLPSFCGLGRFFSFXCVLPFPVFSSWFAAARCLFLGPCSSCLLAACYKRRGWVPPGSFRXACRR

SEQ ID NO: 179638 - protein, 63 aa, Glycine max
  Clone ID: PAT_MRT3847_133229C.1.pep
VACGIPSRFPLRVICDSIVNGMRIRYSYDTLLRQAKAPSICVQSFKNFMSMCVYGDDNLISIH

SEQ ID NO: 179639 - protein, 57 aa, Glycine max
  Clone ID: PAT_MRT3847_13322C.1.pep
IGQTEESLSLSLSWTDSLHTHLLSTSPLSTITTLNAKLVYRKDDDRGSWRLLSERTR

SEQ ID NO: 179640 - protein, 43 aa, Glycine max
  Clone ID: PAT_MRT3847_133230C.1.pep
TCKPLNLSLILGSSPSSQHRQFLKINYLVILCKYNAMNKKGSD

SEQ ID NO: 179641 - protein, 63 aa, Glycine max
  Clone ID: PAT_MRT3847_133231C.1.pep
KRGNRLSLGLKKKQIRLSHLIFCNESLTLYRDSRSEYSLKKEGLHAGLYSENTNPTCTEPHTR

SEQ ID NO: 179642 - protein, 35 aa, Glycine max
  Clone ID: PAT_MRT3847_133232C.1.pep
EAKKKPSANILNHMQGRKWNHASSLACDLNHLLIF

SEQ ID NO: 179643 - protein, 247 aa, Glycine max
  Clone ID: PAT_MRT3847_133233C.1.pep
MTATDIARTAVGIIGNIISGALFLSPAPTFVEICKKGSVEQYSAAPYLATLVNCMVWTLYGLPMVHPNSILVVTINGSGCIIELIFVTLFLIYSGGKKRLKVLLWLLLELIFISVLTFITLTKVHTFKKRSAIVGTTCILFNIMMYASPLAIMKLVIKTKSVEYMPFYISLASFGNGVAWTTYSLIRFDKFITIPNGLGTLFAVAQLILYATYYKSTQRQIAARNGNGGVNLSQVVVGRDDQSKPDN

SEQ ID NO: 179644 - protein, 77 aa, Glycine max
  Clone ID: PAT_MRT3847_133234C.1.pep
CRCRGNCGRGSSCKCGNGCLRCTMYPHLTYTVSTTTTTSAMAVSPLKAHFESANMGVPADNYGCKCVAHCTCNPCTC

SEQ ID NO: 179645 - protein, 47 aa, Glycine max
  Clone ID: PAT_MRT3847_133235C.1.pep
VGVFTRPNSQINHPFTNPNKTYKQRLIILILGPKDPTSTLNTKTTTP

SEQ ID NO: 179646 - protein, 94 aa, Glycine max
  Clone ID: PAT_MRT3847_133236C.1.pep
ARCYSRHVWSLRYHYPMVRVMLPPVRNPGASAASDCLFLFGGCLASVSSTNAFPHLQLLALLVRSMHLLLVLCQWMHAPISSILKNGVSSTCLI

SEQ ID NO: 179647 - protein, 72 aa, Glycine max
  Clone ID: PAT_MRT3847_133237C.1.pep
SIRKSSLAHHRNDVFGKMSMLGVSEQRYGRWLDSNFQTLMTEIFGQSSALNCRVTSNISFTRLPHWFMSVGA

SEQ ID NO: 179648 - protein, 52 aa, Glycine max
  Clone ID: PAT_MRT3847_133238C.1.pep
DQKLVRFLQFLISGHFKNTFIFAFATRVTKNNVPPLNENGRRGEKKTLFYLN

SEQ ID NO: 179649 - protein, 63 aa, Glycine max
  Clone ID: PAT_MRT3847_133239C.1.pep
HSFPSNEIYSICFCNLNCVITSHPSKRVYFYSLAFYIFRTSSITYISCIWPSLSSIHTQLFLD

SEQ ID NO: 179650 - protein, 70 aa, Glycine max
  Clone ID: PAT_MRT3847_13323C.1.pep
KKKINIKGVSHRKRKNKNLNKKTHPVKQLKITSGGAKKPWKIIIRKQDNSFFANKTPSNIAKGKVWPKKK

SEQ ID NO: 179651 - protein, 86 aa, Glycine max
  Clone ID: PAT_MRT3847_133240C.1.pep
ISLLITGTLALMFYVPPQEVYSTSHPSVSVSSGSASPSRPHPRKSFVASSSFSSRSSSILNRISHGIGPDPQLNGVTYPIRIPFLG

SEQ ID NO: 179652 - protein, 69 aa, Glycine max
  Clone ID: PAT_MRT3847_133241C.1.pep
LDFKAPKKTPFTGNYSLTLTHQLDMKQAKQKLKPLAKIRSLFFFFTIKGGRGMIWAPFGVFSQPYGPVG

SEQ ID NO: 179653 - protein, 76 aa, Glycine max
  Clone ID: PAT_MRT3847_133242C.1.pep
KKKKIKIYLKKKKNKGNTPKKKPPIGGGRKNKKNIGKTTQIKGSPPKRSWVHSHKKTPKFIYWGKTPPTGKINNRT

SEQ ID NO: 179654 - protein, 77 aa, Glycine max
  Clone ID: PAT_MRT3847_133243C.1.pep
LPNSIFQFNTLTPVEAPNRDGTKGRVATISGEACGGEDYRRWETRLRRIWCQKPERSLRRIDSPSLSVRSRRVTRRS

SEQ ID NO: 179655 - protein, 86 aa, Glycine max
  Clone ID: PAT_MRT3847_133244C.1.pep
SENQYKSLNLIKKIIKLLNPRNMSTFCYSLILISFPRNNKKKHILSCVLPFFFKDLTMVFSNHSRKVDLKKIIYKTVPSLRTDFLM

SEQ ID NO: 179656 - protein, 94 aa, Glycine max
  Clone ID: PAT_MRT3847_133245C.1.pep
SCCAPEERRPLPIRSSSGQAGYLRQRFLASKVKATRLQSENNREVRVLTKLTKAYRLDAIGGSKNLYRAREAEKAESTRVGKTSRGGTRIVGQL

SEQ ID NO: 179657 - protein, 87 aa, Glycine max
  Clone ID: PAT_MRT3847_133246C.1.pep
LGLGNLFTCCFRRAGEAGPGDIGTTKILLVGKDRRTQFPLKKKNSKEPPQTRRKCPRGGATQTGTPAVKAQKKNPGSSKRGRAPRGA

SEQ ID NO: 179658 - protein, 137 aa, Glycine max
  unsure (1)..(137): unsure at all Xaa locations
  Clone ID: PAT_MRT3847_133247C.1.pep
VFLGEVGGEEEYKISQALKEKPIDKPVIIRRIGTCADHITXSDQVGHAGDLINAAKETADHKNAARKTDDTHLPDYSEDFSDMISDXTTQSVPNGSMVSRAAKPPSPATREHXWHWYQGLNRKPGCFMTCICDERGG

SEQ ID NO: 179659 - protein, 48 aa, Glycine max
  Clone ID: PAT_MRT3847_133248C.1.pep
PCLNRRYFLICSTHRSTTGSLMTLPSTIYWSSVSATLRPVMSSAYKIR

SEQ ID NO: 179660 - protein, 48 aa, Glycine max
  Clone ID: PAT_MRT3847_133249C.1.pep
MTQEQSLNYTFTSRSAREPIPEFPMPEKSIPEVAAYRIINDGWLLHGA

SEQ ID NO: 179661 - protein, 49 aa, Glycine max
  Clone ID: PAT_MRT3847_13324C.1.pep
RYLVYSVQVRPNCIRIRANVTNYTHIIKKVVLILVNSVSKNISLRIELI

SEQ ID NO: 179662 - protein, 53 aa, Glycine max
  Clone ID: PAT_MRT3847_133250C.1.pep
APYLCFLAKMSPRELFSLRQLNKQVQRDILVPITHLLCEHSELALLSSSFSQP

SEQ ID NO: 179663 - protein, 59 aa, Glycine max
  Clone ID: PAT_MRT3847_133251C.1.pep
QMKGNIWHSYKCSCLRILYLQRGVLVLVDSDMYVMLAKLELKTKNMFHKKNHVLAKVTN

SEQ ID NO: 179664 - protein, 122 aa, Glycine max
  unsure (1)..(122): unsure at all Xaa locations
  Clone ID: PAT_MRT3847_133252C.1.pep
HASERIYLDFFKMTYKHENVIYLDGKGNYTTIHPISPFNIKYYTLYALHRPKSYTHLINEXHIENFTXLKIFNTYDLYNNSNILLHIQKFKPYYIPLIEKYIPTFLKLSNFKTYTSIWNQHH

SEQ ID NO: 179665 - protein, 86 aa, Glycine max
  Clone ID: PAT_MRT3847_133253C.1.pep
RQKVLNGYPKVTESLGICEPRHQLGRCWGSLVRPFRYTRSPLRYVVQNCNTRRTVPKSIQRYIKEEKEKGEKREGAPLSEGLKSHG

SEQ ID NO: 179666 - protein, 121 aa, Glycine max
  Clone ID: PAT_MRT3847_133254C.1.pep
GSTGRQEFGTRVVQDTIRGGVTDVFLTLGGVLFLHALFIEKGRLETTCAVLRNFVYNDELKLKDDILPVPTNHVPHHTVELTNEAIDFIRAIYLLHDNDNDGSLQPSPFDDIYVTAPKSGP

SEQ ID NO: 179667 - protein, 84 aa, Glycine max
  Clone ID: PAT_MRT3847_133255C.1.pep
KLGKNGFPRGLDPAISKFFVQLQIVVKSQLSRLAKHDGMSLMRSVQRKGGSFSYSEAELNEQLRAWRENPSWVDKPPLIKVRSS

SEQ ID NO: 179668 - protein, 903 aa, Glycine max
  unsure (1)..(903): unsure at all Xaa locations
  Clone ID: PAT_MRT3847_133256C.1.pep
MAKSGNKNMGSTAKVHPSNDPELDPDSYALEKFRLYETRARFYLIGSDRNKRFFRVLKIDRSEAWDLNISQDPVLYSPQEIKSLLQRIAEGNRATGGLTFVAKVFGIAGCIKFLESYYLILVTKRRQIGSICGHAIYSIKESQLIAIPHVSIQSDLAHSKTELRYKKLLSSVDLTNDFFFSYTYPIMQSLHDNVSSRSRQEVRMFXDNLLVRNAKFTLAIRSXGYYTLGSVALVHGHYEKICQSCIRSFLHITTYTSLFLRFQGVVLMPKSLIIFXINLIRIVIFLDEEAGSCKXRMRSAHAKGLFESLCLSPEESIFSPKPDIILLTMTPTYQATKLHFEDLAKRYGNPIIVLNLIKTVEKRPREMMLRREFANAVGYLNQILPVENHLRFIHWDFHKFAKSMSANVLAVLGAVASEALDLTGFYYSGKPSIIKRANKSNQTSTGGDTSLRDLRDSSGYIVRXGTSNEMLKXVVNQDKETDMNHKNKKDNFGSDAPHFQSGVLRTNCIDCLDRTNVAQYAYGLQALGRQLHAMGLTDVPKVDPDSSIAAALMDMYQSMGDALAQQYGGSAAHNTVFPERQGKWKATTQSREFLKSIKRYYSNAYTDGEKQDAINLFLGYFQPQEGKPALWELDSDYYLHVSGIGDDLIPEKCSEPNLSSSGRGGMIFTPIPACREDFSRIKLTSFDKLIEKTCSTIKNVRLCREPDQRPGGVSGNSGVAPDAAEIQLKSPNWLFGQRKYEEGSSAAKVASCESDVEGSHANGFCDLNWLSSGNDMNEEDVFQRYLTMTSANEANGWYGGSLLGDQDESSEIYKHYAELCQGPALELFQNDPDKEQHYADALSTSSYEIVNDAVVAAEMEAALKEYDQVGADLGIIPKSCKFFADDPSWLTRWLTGDEKVPRI

SEQ ID NO: 179669 - protein, 181 aa, Glycine max
  Clone ID: PAT_MRT3847_133257C.1.pep
MDTDSFVSFDHVSPEDSHEVHVLAVDDSLVDRKVIERLLKISACKVTAVDSGIRALQFLGLDEQRRTSESDGFVPDLKVDLIITDYCMPEMTGYELLKKIKESTMFREIPVVIMSSENILPRIDRCLEEGAEDFIVKPVKLSDVKRLKGYMTPKEVIKMRSQEDRRSDGYVNGGDGGGCGR

SEQ ID NO: 179670 - protein, 59 aa, Glycine max
  Clone ID: PAT_MRT3847_133258C.1.pep
RRFKSHSRLGYTLTYTLIRHLISLILTHLFNTHFLSFHNFDSENTFRFTILYPFISYPF

SEQ ID NO: 179671 - protein, 232 aa, Glycine max
  unsure (1)..(232): unsure at all Xaa locations
  Clone ID: PAT_MRT3847_133259C.1.pep
MGAQKKSGARVSEDPDELVRVPLQAVLLADSFTTKFRPITLERPKVLLPLVNVPMINYTLTWLESAGVEEVFVFCCSHSKQVISYLEKSEWLSQPNFTVTTVESQNSVSAGDALRVIYERNVIHGDFVLISGDTVSNMSLTQALLEHKERKKKDSNAVMTMVIKRSKPNPAIHQSRLGTDELFMAIDPNTKQLLYYEDRADQSKGTLHLDKSLLADNPSLSLHHDKXELYID

SEQ ID NO: 179672 - protein, 157 aa, Glycine max
  unsure (1)..(157): unsure at all Xaa locations
  Clone ID: PAT_MRT3847_13325C.1.pep
MTLLKFHEVWKPVLVMIIVNLALAFVNIFLKKVLNEGVDYLTILTYRQAISAIFLTPIACFYERKRKLEGHIICLLFLSALVGVTLTQYLYLIGLEYTSATFACAFLNMVPVFTFIMALPLGIEKVNMKKLSAKAKVLRTFVCIGGXLMLILYKECP

SEQ ID NO: 179673 - protein, 70 aa, Glycine max
  Clone ID: PAT_MRT3847_133260C.1.pep
SYNRYCTLGCLPVFSVSDGSTSGLDYNSAYLLQSFNLSTMMIYTDWLMDQSQSMVAVNEPAYAIQMALDD

SEQ ID NO: 179674 - protein, 135 aa, Glycine max
  Clone ID: PAT_MRT3847_133261C.1.pep
QLLQTSCFCCILCSSAGATNRVRKKGKGNDEDGSKVCTFTSHTCYGVGTERKVKRDQPGLVQTVLLHGSSSHLMMRCGAMRTLSREPPTERHHRVTAEGLAHWRKWNEPDLMEMWLRPDPTCSVALPIISLSCVA

SEQ ID NO: 179675 - protein, 54 aa, Glycine max
  Clone ID: PAT_MRT3847_133262C.1.pep
NYYFIAPLINEVIIFRVILLHFLNIGTIVIHSIILANIFYKDGHHFLNHMLLIF

SEQ ID NO: 179676 - protein, 45 aa, Glycine max
  unsure (1)..(45): unsure at all Xaa locations
  Clone ID: PAT_MRT3847_133263C.1.pep
FTEGWGXRPNTXVNVTNYRIXXKSPLCXCXSXGHVCVXXRNSHDR

SEQ ID NO: 179677 - protein, 96 aa, Glycine max
  unsure (1)..(96): unsure at all Xaa locations
  Clone ID: PAT_MRT3847_133264C.1.pep
WTATPFHDVQVTIDWGISSHECVPRTYCVLNPQNPFVLNMWMGILTFPQCTFRSVKRMPLSIFXGAVANNAFLINIPYAFLSIVRYFVLNSLLRRF

SEQ ID NO: 179678 - protein, 145 aa, Glycine max
  unsure (1)..(145): unsure at all Xaa locations
  Clone ID: PAT_MRT3847_133265C.1.pep
STTLLRFFIYDPHLSKPNGPGSQMDWNAXLLMHRXGEPIGPRAYSYWLYNVPWGMCKSLIFIXERFGNPTVLLSEXGLDDPDHVTLPNGSRDTIWLNCYKGVLTHLMKAVDDGCXVVGCFAWSXLHNSEWRLSYTSRLGIVYVAI

SEQ ID NO: 179679 - protein, 52 aa, Glycine max
  unsure (1)..(52): unsure at all Xaa locations
  Clone ID: PAT_MRT3847_133266C.1.pep
MAASLXMPSSXXXEXXRFEAEXAEVXXWXXSERFRLTKXPYTXRXVXSLXXN

SEQ ID NO: 179680 - protein, 71 aa, Glycine max
  Clone ID: PAT_MRT3847_133267C.1.pep
PRPTPSKPSTLFPFLNLLTLGPLGFQTSTMASIIPLLTFTLLFLSFTLSCTIDTYTILYIPHSYDVLIEQP

SEQ ID NO: 179681 - protein, 124 aa, Glycine max
  unsure (1)..(124): unsure at all Xaa locations
  Clone ID: PAT_MRT3847_133268C.1.pep
LGDGGTWEKRNDPLKPQKAPGPLFEIPQNPNSEPPRPGGERVNCGIGEPKTNPRAHPVQRGKRENPGPSPPRGLAPPPPFRLWGKREKGPAAPPFQHFXXPKRKGPPPAPSIRGGGGGNPPPPP

SEQ ID NO: 179682 - protein, 118 aa, Glycine max
  Clone ID: PAT_MRT3847_133269C.1.pep
ICIAAALWSLVLFSLSFLQFQYLPPSPGGYCLVCTLASGHASITLTLPPLPIFLMRDLASFEAEFLTCSRLIALHLCKIYRHLLKNYSSKLLSKKELDSTLVNLEGEDYAGYATLDAI

SEQ ID NO: 179683 - protein, 300 aa, Glycine max
  Clone ID: PAT_MRT3847_13326C.1.pep
MEEEKAAAYYDELSRKGEGAARFKQGLGFSSSAPNDDVPKPSSFLSKFVKASSTAPSNSEKQAQLQSIHHKLKKKPSSESRVSSSDSDRSRRRSRDRYRESRRRSRSRERHRHRERGRRRSRSVSPRKQRRSEKDANDRGKVSETKKRKNAEIDYYKLIPGYDRMSSAERVKAKMKLQLSETAAQDSEKGEGWERFEFNKDAPLDDEEVEVAEDDASLVKHIGQSFRFSAVKARREEQIQAAHEEAMFGATALLPPTSTDSEPERDNEKETDKKELVTSLLSETVLAKQNGSWRDRVRQT

SEQ ID NO: 179684 - protein, 129 aa, Glycine max
  Clone ID: PAT_MRT3847_133270C.1.pep
MAPPQKTRSKFVERLIFLGLGFAAFLFVCGCYAFVHGGPIFFFFLFLQPLTFSFFGFGSVGPLVLPSLGPIFQVSLVSPMLGPFFFGLTKEKIPPKGLIFSKQQTLYQIIYKKFRSKNFKIEKKKKILS

SEQ ID NO: 179685 - protein, 171 aa, Glycine max
  unsure (1)..(171): unsure at all Xaa locations
  Clone ID: PAT_MRT3847_133271C.1.pep
PGLPSSPLPCGGQRPPGPRGRGIPSAPKRGXNPVGSAAKGNVKXGPRRGGPGENPPGFFIWXGEPPGGVFPPPKGGNGPPLGRGLPKKKGGLFPQKGDPPTGGNRGQKRGGNRGFPPLRGRAPPKRGGGGGENPILLPLLGGGERFFFFKKKKKKKKKKKKKKKKKKKKKK

SEQ ID NO: 179686 - protein, 36 aa, Glycine max
  Clone ID: PAT_MRT3847_133272C.1.pep
LPLTHTDSTTGGFYSSICRYTHTQEHSIFIFTCSVK

SEQ ID NO: 179687 - protein, 111 aa, Glycine max
  Clone ID: PAT_MRT3847_133273C.1.pep
ILKELTRIRMGYKRCHEANEFEDLSLNKAKRFECNNELVSLADIVTPNKAFAQTVIKGDDEDGFYNIQWHDPLETDAAKEFPYTGDKNVQTSGHFSCYSSEDDTGFGGTWL

SEQ ID NO: 179688 - protein, 35 aa, Glycine max
  Clone ID: PAT_MRT3847_133274C.1.pep
HTSDHTSDHSFYINLYLSPRTFIFKLWINQHFYTL

SEQ ID NO: 179689 - protein, 52 aa, Glycine max
  Clone ID: PAT_MRT3847_133275C.1.pep
GCEKTTEGEVTLETYYVAERSEKFILLIACKICMTVYSCDTPLNPQSKRLLI

SEQ ID NO: 179690 - protein, 79 aa, Glycine max
  Clone ID: PAT_MRT3847_133276C.1.pep
LEPILHALLFPRISTAQTDTIFETPSSLFSSLFSPLLPFCIHFFLSSSLFLCFSVSLGPSPNVKKDFLTPGAISPSFRF

SEQ ID NO: 179691 - protein, 86 aa, Glycine max
  Clone ID: PAT_MRT3847_133277C.1.pep
LSLQIPAQNATLHSGGASIGCKSGNHASQSKFTSSSFLPWVKGDGRALKAWKKKLVPSSIYLVPRATLTFDAPTSNSDKTKQRKHT

SEQ ID NO: 179692 - protein, 532 aa, Glycine max
  unsure (1)..(532): unsure at all Xaa locations
  Clone ID: PAT_MRT3847_133278C.1.pep
MASEALEDNKPPLQDDNHAKSEIPEKDASSDAAAAKSQNANAGDKDGGAAGNQEVEEEADALEEKKEEIDEDGEEKDEQEEKEEEDEAEEKEKEKAKGKGKRRRSKKDPVTPAPSERPTRERKTMERFSVPSPAKSARSSASKGLIIEKGRGTQLKDIPDVGXKLSKRKPDDPLLMXYAKLXGRNTKAKDIKRHVFQVXSKRYRENKMTMSHPLLSRKKTKVHNLKCSTWXSFLDVQVTKTDVKKKEELPAQISWVGCEKKTEGDILLADKEQKGKKRTRKSVPSKSPGEASTETPAKKQKQTSQSGKKQKPSSDDEEDDKAELSDAKDVSQEDEDVAVPNNESDDERSKSEEQKEKSKSHKRTSKKSVKENSVSKADRTSSAKKTPVKDAKSIEKIKKKTTSKKSVAEHDSASASGKTASKKQTDKSSKALVKDQGKSKSNKKAKAEPTKQDMHAVVVDILKEVDFNTATLSDILRQLGTHFGLDLMHRKAEVKDIITDVINNMSDEEDEEAENDGDADKDDDGDDDDDDA

SEQ ID NO: 179693 - protein, 100 aa, Glycine max
  Clone ID: PAT_MRT3847_133279C.1.pep
PGHLYTYHNPDSPLNTTIMGSKTLLIGLILVHALLLSYFSFITNASDSDHRSLLNFPHPHMLQVKTIKRRIPTPPPPKPNGPIQIKPPYPRSRAPPPPPN

SEQ ID NO: 179694 - protein, 82 aa, Glycine max
  Clone ID: PAT_MRT3847_13327C.1.pep
HLHRYIDLKAYLPELRLLCPLPLETFIGYYQKIFILGSNRLRFDAKGHCTCFYNLIIPPNMLSILTMSANTGGPCAADIHHA

SEQ ID NO: 179695 - protein, 90 aa, Glycine max
  Clone ID: PAT_MRT3847_133280C.1.pep
AHGYQSIDDISYGFKKLHEDADGNGSLVDGDTHAIGPALPDDEEELLPGITGDFDLHGLPGSLEDLEEYDLYGRGGGMVLETDAQEGLTG

SEQ ID NO: 179696 - protein, 59 aa, Glycine max
  Clone ID: PAT_MRT3847_133281C.1.pep
RVRTRLHAPVRTGPRRRQKGTTEQDKTVHSSTKKRIAPSSTSLYFAPLPLTYLNPPVVM

SEQ ID NO: 179697 - protein, 50 aa, Glycine max
  Clone ID: PAT_MRT3847_133282C.1.pep
TNILEFLLFHEGVQITKVTIAIIYSHLFLEWRHCPLIIESRAAIVPELDM

SEQ ID NO: 179698 - protein, 100 aa, Glycine max
  unsure (1)..(100): unsure at all Xaa locations
  Clone ID: PAT_MRT3847_133283C.1.pep
RFVVSYHLVFREENIKLLVFFVAAIFLVAWPCHGACFLTFPLRMITGYGERSSEGKSASFRLAVLSHNIRALYTIPEXCVGPTMDYIYGVQFRSDSKTIT

SEQ ID NO: 179699 - protein, 86 aa, Glycine max
  unsure (1)..(86): unsure at all Xaa locations
  Clone ID: PAT_MRT3847_133284C.1.pep
SCDQMKMNGXGLMQKLNIITRTSLTKQFLTVQMVLTSLCLLNSRATAIQVGMMTGFFHPRPDSPESRQPQSLPPLIIFIITLFICR

SEQ ID NO: 179700 - protein, 53 aa, Glycine max
  Clone ID: PAT_MRT3847_133285C.1.pep
CPPCSRLCGVVAAASQVMSLFPNESDEIYHRVSFIHSFHIMMLMARSSKQRRT

SEQ ID NO: 179701 - protein, 105 aa, Glycine max
  Clone ID: PAT_MRT3847_133286C.1.pep
LVNIRRLSAVDITLSTNFSSAISVNSTTGGNGLLSILVCVKVVVLFISMPSSCRQIIQNYCRLPSKREPPVRQNRNPAMHKRQNPQNRVWPLQSMRGLWYMLAYI

SEQ ID NO: 179702 - protein, 42 aa, Glycine max
  Clone ID: PAT_MRT3847_133287C.1.pep
VWTYSDDWFSGVSKVTTILHFKFLFFTKTNFLRFFTCLLQNK

SEQ ID NO: 179703 - protein, 51 aa, Glycine max
  Clone ID: PAT_MRT3847_133288C.1.pep
KLFFVTGKAIRRGGTKLFCTTLPIHCFHDSLSLPRLGRMALGSWPKLVNIF

SEQ ID NO: 179704 - protein, 95 aa, Glycine max
  unsure (1)..(95): unsure at all Xaa locations
  Clone ID: PAT_MRT3847_133289C.1.pep
PRVRLNYGTFINGXCKTGKRKAGARLLMNLERHYAKPDLVMYTTSIYCLCKNKLLGDATRFVLXMIDNGNSPNVLTYTTLIHGYGIMGYLKEAFS

SEQ ID NO: 179705 - protein, 269 aa, Glycine max
  Clone ID: PAT_MRT3847_13328C.1.pep
RAARAAFLLAGSPHNPCFYILGLRLALQFFITISVRESSLGLPKSPSGGIRKQLSQLLVALRKPEISYSISWFTASYAIIPALTGTMFFYQTQYLKIDSSVLGISKVFGQATMLLWGIIYNQYFKSVPPRKLISAIQAMMAFLMISDFLFVRGFYRQMGVPDSLYVVIFSGFLEVLFFFKILPFSVLIAQMCPPGCEGSIMAFLMSCVALALIVSGYLGVALASCIKVTASDFSGLPLGLLIQAACTLVPTFWSSCIPDKVESKAKRKD

SEQ ID NO: 179706 - protein, 25 aa, Glycine max
  Clone ID: PAT_MRT3847_133290C.1.pep
GSILAVIVVIVTLHIPYHEFALHAV

SEQ ID NO: 179707 - protein, 82 aa, Glycine max
  unsure (1)..(82): unsure at all Xaa locations
  Clone ID: PAT_MRT3847_133291C.1.pep
PLTLEEVANHNIRKDSWIIINGLADDFTPFLHEPAAXYAVLGSCPLKVATYDFPYAFHSDSDIQLFERYSGADVDSVSLSST

SEQ ID NO: 179708 - protein, 34 aa, Glycine max
  Clone ID: PAT_MRT3847_133292C.1.pep
YKLVSQPCYLLKTFIQSQATNKKMGDRAMKMKWV

SEQ ID NO: 179709 - protein, 72 aa, Glycine max
  Clone ID: PAT_MRT3847_133293C.1.pep
MQPYKSLPHPIKAAISQITQSSHPNLLTINNNTLLIQSPNFNHYNLNPLTIIHYISNLIPTSSVISFPITYI

SEQ ID NO: 179710 - protein, 81 aa, Glycine max
  Clone ID: PAT_MRT3847_133294C.1.pep
GAVDVLSESLPRMFRHPLKVRMVVILIIHPVCQDAHQRSCYSFPSQQESAYHCQRSCAFRTDILWIKFERMGISRPTGFVR

SEQ ID NO: 179711 - protein, 75 aa, Glycine max
  Clone ID: PAT_MRT3847_133295C.1.pep
SLSVFSYHVPIQHLNGSECYWYLSTFIPHSLLPLIICSKLTNFKTICHNIILVHPIHSLHGSRGGKGDILALGAS

SEQ ID NO: 179712 - protein, 108 aa, Glycine max
  Clone ID: PAT_MRT3847_133296C.1.pep
KKKYHKDYLLQPIDHTFFFIIIIMSNSHLFYGKCGILRHHRPLQILQAHIATAKQHPRATSNGGVPYTPPLAPNSIQMIQHFAQHQLLRFESVPYVNKIPNPRHLHRI

SEQ ID NO: 179713 - protein, 77 aa, Glycine max
  unsure (1)..(77): unsure at all Xaa locations
  Clone ID: PAT_MRT3847_133297C.1.pep
TTTSQTYFYQNSPPLSAPAAPRAAYNTAKAPDWDAACANNHDPSGTPALGVHASAYKNQVXAVEPETILPKMEVSPL

SEQ ID NO: 179714 - protein, 48 aa, Glycine max
  Clone ID: PAT_MRT3847_133298C.1.pep
ILKFLIICTHTSEPEFASLFSYQVCELDLIFNFHKVIHFFSYCILSNY

SEQ ID NO: 179715 - protein, 99 aa, Glycine max
  Clone ID: PAT_MRT3847_133299C.1.pep
KQKEFFQLVKYPIKRRKVGQGTQPPQKTKLASDPSKSQKGTNFDAREPRERERESIGRSQSIKNEEGSERKERKRVLATRHSNSRERKGKERTRGRTRG

SEQ ID NO: 179716 - protein, 77 aa, Glycine max
  Clone ID: PAT_MRT3847_13329C.1.pep
PRVRFSAVEARREEQIQAAHEEAMFGATALLPPTSTDSEPERENEKEADKKELVASLLSETVLAKQKGSWRDRVRQA

SEQ ID NO: 179717 - protein, 73 aa, Glycine max
  unsure (1)..(73): unsure at all Xaa locations
  Clone ID: PAT_MRT3847_1332C.1.pep
QCEDDRLPGRRFISDYWDPPGGMKNDYFVLGTVWRPTGWSVGGGLAYFSFXXXGGGGGGDASTTAALETGSDA

SEQ ID NO: 179718 - protein, 57 aa, Glycine max
  Clone ID: PAT_MRT3847_133300C.1.pep
FLVCTSIFSEIIILMHEFPLVLINWVGRKRSCDSVIELNNWNTTSFHLELTVFVSDC

SEQ ID NO: 179719 - protein, 176 aa, Glycine max
  Clone ID: PAT_MRT3847_133301C.1.pep
MVAHSSSWGRALVAISPYTFSAIGIAVAIGVSVLGAAWGIYITGSSLIGAAIRAPRITSKNLISVIFCEAVAIYGVIVAIILQTKLESVPASNIYAPESLRAGYAIFASGLIVGFANLVCGLCVGIIGSSCALSDAQNSSLFVKILVIEIFGSALGLFGVIVGIIMSAQATWPTKV

SEQ ID NO: 179720 - protein, 104 aa, Glycine max
  unsure (1)..(104): unsure at all Xaa locations
  Clone ID: PAT_MRT3847_133302C.1.pep
MVAHSSSWGRALVAISPYTFSAIGIAVAIGVSVLGAAWGIYITGSSLIGAAIRAPRITSKNLISGIFXEAAAIYGVIVAIILXTKLESVPASNIYAPGFLRAGY

SEQ ID NO: 179721 - protein, 105 aa, Glycine max
  Clone ID: PAT_MRT3847_133303C.1.pep
MEYSMAQSSCKTLVQWLVAALLIALLGGAQAVAICNIDSSQLNLCRAAVTGQNPPPPDEKCCAVVRQANLRCLCSYKSTLPSFGINPKNALALPGKCGLQWPPNC

SEQ ID NO: 179722 - protein, 101 aa, Glycine max
  Clone ID: PAT_MRT3847_133304C.1.pep
MAQSSGKTLVQWLVAALLIALLGGAQAVAICNIDSSQLNLCRAAVTGQNPPPPDEKCCAVIRQANLRCLCSYKSILPSFGINPKNALALPGKCGLQSPPNC

SEQ ID NO: 179723 - protein, 273 aa, Glycine max
  Clone ID: PAT_MRT3847_133305C.1.pep
AQGPEKMLVYEYLPNKSLDRFLFDKRRSSSLDWATRFTIVTGVARGLLYLHEEAPERIIHRDIKASDILLDEKLNPNISDFGLARLFPGEDSYMQTFRISGTHGYMAPEYALHGYLSVKTDVFSYGVLLLEIVSGRKNHDMQLGSEKADLLSYAWSLYQGRKIMDLIDPTLGRYNGDEAAMCIQLGLLCCQASIIERPDMNNVNLMLSSDSFTLPRPGKPGIQGRAGRWNTTSTSALTNTNASSATRVSGGSGSFVEDYSRNSISTSSFDEGR

SEQ ID NO: 179724 - protein, 47 aa, Glycine max
  Clone ID: PAT_MRT3847_133306C.1.pep
VELYTRFYGSEFFRGYRIEIRNPSKQDKSCAVLFLVIVLIKTHSSSH

SEQ ID NO: 179725 - protein, 48 aa, Glycine max
  Clone ID: PAT_MRT3847_133307C.1.pep
SDTSKFSCTAGMLKSICLISKPQNIYSKDNKKTFSKNNGVLWNKDCFY

SEQ ID NO: 179726 - protein, 97 aa, Glycine max
  Clone ID: PAT_MRT3847_133308C.1.pep
ESRVRVFRERERRNQANCVWFGLGHGTAGHAESAYWSPSAALVRSPISLSFFFYSHSSASSHSPLSTTTPQVLFLSLRSIYSLLLASFSLLFIFQVN

SEQ ID NO: 179727 - protein, 157 aa, Glycine max
  unsure (1)..(157): unsure at all Xaa locations
  Clone ID: PAT_MRT3847_133309C.1.pep
RNSRVDPRVRPALSEKLQSHASTLHAYTVFQYSYFFYLLQIPHPSSFLFRILNFVQRPTGRRKESHRKEERKRAKMGSQSTTGNTNKIVVRSSFVESFRGCGISGIRIDKEELKKQLTMPQYLRYAMRDSIRLQDPAAGESRYISRAEGEDSXGPPW

SEQ ID NO: 179728 - protein, 137 aa, Glycine max
  Clone ID: PAT_MRT3847_13330C.1.pep
MEEEKAAAYYDELARKGEGAARFKQGLGFSSSAPNDDVPKPCSSFLSKFVKASSESEKQAQLQSIHDKLKKNPSSESRVSSSDRSRSREKRRKRSRSGDRYRETRRRSRSRERHRDSERGRRMSRSVSPRKQRRSEK

SEQ ID NO: 179729 - protein, 220 aa, Glycine max
  unsure (1)..(220): unsure at all Xaa locations
  Clone ID: PAT_MRT3847_133310C.1.pep
MTTAARPTWAPAKGGNEQGGTRIFGPSQKYSSRDIASHTTLKPRKEGQDTQDELKRRNLRDELEDRERRHFXDHGKGSHLFLEGSKRDIEDRIVARSVDADDSDVEVKSDDDSDEDDDDEDDTEALLAELEQIKKERAEEKLRKEXRQQQEEELKVKEAELLRGNPLLNNPTASFNVKRRWDDDVVFKNQARGETKTAKRFINDTIRNDFHRKFLQKYMK

SEQ ID NO: 179730 - protein, 207 aa, Glycine max
  Clone ID: PAT_MRT3847_133311C.1.pep
VPSDIRYFSARDSHSLSSECRSMLLSQELHETWKCGVFYLAGTRIPEWFHHCINGSSISFWFRNNFPSISLGVVAGPKSYLNVHSRFRININNNITFNLGIRNHLVQVRHHRVELASIPIGFWGNKWNRVECTVYPLQEFIKQIGIHVLEQGNNMEDIQFTNPLSSSGEMNKKRKKRGITRPAPPQVLEGPVSRLFLSFFVQVKMSL

SEQ ID NO: 179731 - protein, 46 aa, Glycine max
  Clone ID: PAT_MRT3847_133312C.1.pep
AHVASRTAKHVQCTSWWKMHTNAEVSDNKAMYYICSLTGKLTTPSF

SEQ ID NO: 179732 - protein, 229 aa, Glycine max
  Clone ID: PAT_MRT3847_133313C.1.pep
MTTAARPTWAPAKGGNEQGGTRIFGPSQKYSSRDIASHTTLKPRKEGQDTQDELKRRNLRDELEDRERRHFSSKNKSYDDRDHGKGSHLFLEGSKRDIEDRIVARSVDADDSDVEVKSDDDSDEDDDDEDDTEALLAELEQIKKERAEEKLLKERQQQEEEQMIMKAELLRRNRLLLNHPTASFNKKRRWDDDVVFKNHSRGETKTAKRFINDTIRNDFRKKFLHKYMK

SEQ ID NO: 179733 - protein, 177 aa, Glycine max
  Clone ID: PAT_MRT3847_133314C.1.pep
HAPLRQLGIRLEQSYRNPNLLHLASSFIFSSSIFNNMANLQGGPDFDKIFHFLSICILAFINEGSSSLSSAFMNEPWSWGLSIPISLYVKFALEIHTHLGICVGVGVPSLVYWGATRGAIDWYWEAALKFNHEIFKTCLFNVVIGLLHLLVSKLAHYIIEWVRDHKPMNNKGLLSHC

SEQ ID NO: 179734 - protein, 66 aa, Glycine max
  Clone ID: PAT_MRT3847_133315C.1.pep
TFWDTTVAPPPLAFLIPLEAQDYSSEQRSRFVPHDKVWSCVELELTDTCQGVILMRFFTSGAVAVM

SEQ ID NO: 179735 - protein, 89 aa, Glycine max
  unsure (1)..(89): unsure at all Xaa locations
  Clone ID: PAT_MRT3847_133316C.1.pep
NKFFFFXXVAQPRCFVVSSRQQLQQPTGGGIVVITSSSKSEYLNMTHSEAHIFIKKSSFCASFRLISHKIAIIPSQNTLLQNIKKISSG

SEQ ID NO: 179736 - protein, 130 aa, Glycine max
  Clone ID: PAT_MRT3847_133317C.1.pep
SYLYLYNNAYTNLVLAAGIPDVRWFGVEGDYNVLVMDLLGPSLEDLFNFCSRKLSLKTVLMLADHMINRVGFVHSKSFLHRDIKPDNFLMGLGRRANQVYCIDFGLAKKYRDSSTHQHIPYRENKNLTGT

SEQ ID NO: 179737 - protein, 61 aa, Glycine max
  Clone ID: PAT_MRT3847_133318C.1.pep
RRFGLFEFKLLLSNGNYFKKILCFESSQVLLKIPSFLFPQISISKFKYLSHYYTLLPLIRT

SEQ ID NO: 179738 - protein, 273 aa, Glycine max
  Clone ID: PAT_MRT3847_133319C.1.pep
KISVPSMLSREGFTADSFSMCFGRDGIGRISFGDKGSFDQDETPFNLNPSHPTYNITVTQVRVGTTLIDVEFTALFDSGTSFTYLVDPTYTRLTESFHSQVQDRRHRSDSRIPFEYCYDMSPDANTSLIPSVSLTMGGGSHFAVYDPIIIISTQSELVYCLAVVKTAELNIIGQNFMTGYRVVFDREKLVLGWKKFDCYDIEDHNDAIPTRPRSHADVPPAVAAGLGNYPANDSTRKSKYNSQRSIASPSSHCSHSSLPTFLGFLVLCFVYIL

SEQ ID NO: 179739 - protein, 47 aa, Glycine max
  Clone ID: PAT_MRT3847_13331C.1.pep
LLKAKNHRSTQSIMDGTEALLNKIIMVTVFSTSKSLNLNYYTATCPI

SEQ ID NO: 179740 - protein, 73 aa, Glycine max
  Clone ID: PAT_MRT3847_133320C.1.pep
CISYPVLICHQTLETVLAKYCQKERCKNRQMKPSDWYSNTFLKTRVSRKRINKRFWFYFQRLVSNNKVSPDAW

SEQ ID NO: 179741 - protein, 91 aa, Glycine max
  Clone ID: PAT_MRT3847_133321C.1.pep
PVIISENYSLPFSDVLNWSQFSIQISVENISDIKTIFQNVSQKKSKKLHRNVRRVQRHFVMNRPAKPFDLMHMILHSIWLKRLNFRVMASH

SEQ ID NO: 179742 - protein, 90 aa, Glycine max
  Clone ID: PAT_MRT3847_133322C.1.pep
QGGRGEGKTCILKTGAQNNKTKNFIPGLAWAGEFLPETGYLGPAQRPPVLGGEGLLEEAPDDHCVNDPSWLFVNVGADDFGQGSGEGAFG

SEQ ID NO: 179743 - protein, 111 aa, Glycine max
  unsure (1)..(111): unsure at all Xaa locations
  Clone ID: PAT_MRT3847_133323C.1.pep
WGTVIGLAILKLGNNIQGLSSSCVNKQEHYTVERVHNLGDKXSMCYGLTFRTTVFYCHRVRDTPSSMGPLTAGDGTNSHXLAVCHSDTSELKHHMLHELMGAVPGTNPVCH

SEQ ID NO: 179744 - protein, 82 aa, Glycine max
  Clone ID: PAT_MRT3847_133324C.1.pep
NGNSRLGCCSASEVGKPRPNDDRRGSAEMFVALLLLLSLDLCPPPPRSTCKWASRRSRLSKERAWLPGMMNLRSRRRFLRLE

SEQ ID NO: 179745 - protein, 110 aa, Glycine max
  unsure (1)..(110): unsure at all Xaa locations
  Clone ID: PAT_MRT3847_133325C.1.pep
HTASSALRCAAASLSLVLYDAVFERPLPTLPKAKKKKLVGCGGGRPTPRXRRSPXXPGGGGAPXGTTAXXTPPPPPARTTTAXAAXPSTPGNRTPPTPTPGPAGPGARTA

SEQ ID NO: 179746 - protein, 43 aa, Glycine max
  Clone ID: PAT_MRT3847_133326C.1.pep
GQPCFNRTCPLERIKRGTYWAAQNYTSRMIQFVGCDKKITFNI

SEQ ID NO: 179747 - protein, 54 aa, Glycine max
  Clone ID: PAT_MRT3847_133327C.1.pep
FLRQLGKKYSREENVEAQSGLSPCFNISGVKTISFPEFTFQFKGGAKMSQPLLN

SEQ ID NO: 179748 - protein, 72 aa, Glycine max
  Clone ID: PAT_MRT3847_133328C.1.pep
LAHEARQAMHFMRQLVCRVAWSTSPFFYEHTAMSLSQPSHNKAHHRESWHTPRHRSKLYPGVVVVSSWRPPI

SEQ ID NO: 179749 - protein, 293 aa, Glycine max
  Clone ID: PAT_MRT3847_133329C.1.pep
PSITNKKIKQILLFSLLLLAPFFSITTLAQSPAAAPKAPAKLAPSKPAPATPAPAPAKPLVPSLPQSPSSGVDSSGSQDIVKILRKAKSFNTLIRLLKTTQIINQVNAQLVTSKNGGLTILAPDDGAFSELKAGYFNSLGDRQQKALIQYHVLPVYVSSSNFDALSNPVLTLASDSPTGYQINVTAYGNSVNISTGVVNATLTGIVYTDKTLAIYHVDKVLIPLDFSKPKPIAPAPAVAKAPKADKENASAEDDDQAQAAKDSSGAMSFVSTQGTTLVSFGVALLAAAATMSS

SEQ ID NO: 179750 - protein, 73 aa, Glycine max
  unsure (1)..(73): unsure at all Xaa locations
  Clone ID: PAT_MRT3847_13332C.1.pep
ATNKVPAKSKLLYFLRKXKRSRIAISIFYAINEIFENNPTKHKYYVIXSHFHIMTCYHKMYNEYRNTTLNGSD

SEQ ID NO: 179751 - protein, 43 aa, Glycine max
  Clone ID: PAT_MRT3847_133330C.1.pep
PHPDRAFPKRHIDVVPRPKNHWQDLEDPPDPTNVRGLKNKLLP

SEQ ID NO: 179752 - protein, 73 aa, Glycine max
  Clone ID: PAT_MRT3847_133331C.1.pep
FGLFLNIFLICSFYKCLTYPYYNDILPRALYICLIVVQPLALYSFNISKMFLGHINNNCLFILSQSSNVWMFN

SEQ ID NO: 179753 - protein, 167 aa, Glycine max
  Clone ID: PAT_MRT3847_133332C.1.pep
FCEVTPCLLPERSILKRIRVCGPRYWPQVIDFTPEDKLWWNFGDKNSPFNSGILFIKRKVGACSYVDDPIGCQSLLSRAMHKVFGLTSLTASDTITDIRSGSGSITVDQLVGTFSSDPSLIAFAQLCCDPSWYNRSDVDFKEFCLQVLFERVTKDRPALLQVMCLEG

SEQ ID NO: 179754 - protein, 55 aa, Glycine max
  Clone ID: PAT_MRT3847_133333C.1.pep
SMINRFAMLADNIRTYLTILYHNHHNIKYSSNQFSMIHSNSMFIYPSSFVLVSDT

SEQ ID NO: 179755 - protein, 296 aa, Glycine max
  Clone ID: PAT_MRT3847_133334C.1.pep
PVALAFVFLSVMCVWHYGTLARDEFDVQNKVSLSWLLSLGHTLGFARVRGIGLVHTELVSGIPAIFSHFVTNLPAFHQVLVFLCIKHVPVPHVRPEERFLVGRVGPRDFRVYRCIVRYGYHDVHKDDDEFEKDLVCSIAKFIQAGSGGGCNNSSNDEPEKGGGKMTVVGTCSSTSHHPILVSENAHEINHVDKAETSSESHKVVKPKKKVRFIVPESPKIDTGAMEELKELMQAREIGVAYIIGQSYMRAKPGSSMLKKLVINLGYEFLRKNSREPSYELSAPHASSLEVGMMYQV

SEQ ID NO: 179756 - protein, 74 aa, Glycine max
  Clone ID: PAT_MRT3847_133335C.1.pep
APTLVASASLIPTEALLVYVSLTPTLPVLIADVLIPDLESVAVLPSAVFYPLLPIEKPVLAEVPSIIFYDHAST

SEQ ID NO: 179757 - protein, 836 aa, Glycine max
  Clone ID: PAT_MRT3847_133336C.1.pep
RPYRTYARARVMGKEEEVQELMEADMEAMKEQMATMMEAMMSVKKIMEANAVAIAATSVVAKVNPTSPSGINQMNHPTSDMVGKDLGSTGGPHDVQIQNEHAFPPYGLPLNYTPPNVAYTPNKNETHEIPHHNLADLEPCLGYATEGQVVGEMGKLDHLEERLRAIKGCEDYAFANLEELTTCPENHLKVYCRKMGAYAKDEKLLIHSFQESLTGVAVTWYTNLEPSRVNSWKDLVVAFVRQCQYNVFGYDATTEHVQKGGTNLSKEYAQSFDDMVFTDERIKVGLKRGKSDHHALINAKKTRANEEGENEGEAHAVTAIPIQPSFPPTQQCHYSANNQPSPYPPPTRKPVEFTPIPVCYPDLLLYLLDNSMVAIIPTKVHQPPFLREYDSNATCACHGEAPGHSIEHCRGLKRKVQGLIDAGWLKFEENRVIFNFHRNWVQAIGLFAQAICAPEFGLPRSFNQRLLVLHGGPLGTSTLSFRGLHVLTFRGLHVLTFIGLHALTFRGLHALAFRGSCTFTFRGLHILAFKGLHALTFRGLPVLAFKGLHALIFKGLHALTFRGLHVLTFIGLHALTFRGLHALAFRGSCTFTLRGLHVLAFGGLHALVFRGLYVLPLRRLHVLTFGGLHALAFRGLHGDTSSPSEGCALPRLLRAMRPHFHFLLSVPGPPPDIGGQPTVRAHPEREAITHLLCIPGQDFTRAAAKRRVWIMRTNMTTFTWIWMTLLFSNILPDDHNANLPLQMYRLGSRPQDAQWARRSPTGPWGFQFWLRASVVLQGARSPWQGHVIIGIAPARHPVDPKKSNRVLELSSSNYGKGIRPPTNRAFIKKYCVPRQA

SEQ ID NO: 179758 - protein, 134 aa, Glycine max
  unsure (1)..(134): unsure at all Xaa locations
  Clone ID: PAT_MRT3847_133337C.1.pep
MFRLHKHRIAKSGDKIEFRISHLKALQVPKGWDKLFVSVVSVETGKTIAKSSKVSVRNGGCQWSDTFSESILVSRDNSSKEIDDYVLKLIVAMGSSRSGILXEATVSLTSYRSSXAAIPLSIPLNKCNHGTVXH

SEQ ID NO: 179759 - protein, 48 aa, Glycine max
  Clone ID: PAT_MRT3847_133338C.1.pep
SCMNFTMKDPSLTKWLGGTPLSISEQPMNAVDSCPQMVLVIVEFGANR

SEQ ID NO: 179760 - protein, 325 aa, Glycine max
  Clone ID: PAT_MRT3847_133339C.1.pep
MGEVEEIQEKMKADMEAIKEKMATMMEAMMSVKKIMEANAVAIAATSVVAKGKQLVVYPCKTLWRALNIIHNHNPHVPQRLKTLMTMAGMGKLDHLEERLKAIEGGEDYAFANLKELFLVPNIITPPKFKVLDFDKYKGTTCPKNHLKMYCQKMGEYAKDEELLIHSFQESLTGVAVTWYTNLESSRVHSWKDLMVAFVRQYQYNFDMTHYRYSTMKRWWATHPQSFADLVFASERIDVGSKRGKFDHPTRTTEKTGANEEGEKEGETHVVTAIPIRPSFPPTQQCHYSANNKPPPYTTTQLSTKAIPKSTTKSVYRTSNDEDHL

SEQ ID NO: 179761 - protein, 108 aa, Glycine max
  Clone ID: PAT_MRT3847_13333C.1.pep
ARAMNNNVFCDHREGTILGQSDSYTRDMVMQATMAYNHVGEGLILRMPRWTHGYFHVGNNDYTHWKMDAMGGCANPTINSQGTRYSAPTNPLAKEGTKRVEAAASQWK

SEQ ID NO: 179762 - protein, 90 aa, Glycine max
  unsure (1)..(90): unsure at all Xaa locations
  Clone ID: PAT_MRT3847_133340C.1.pep
MAEMEKLEERLSAIERGEDYAFANLKKLFLEPNIITPPKFKVPDFDKYKGTTCPKXHLKMCCRKMGAYAKDEKLLIHFXQESLTGTTVTW

SEQ ID NO: 179763 - protein, 285 aa, Glycine max
  unsure (1)..(285): unsure at all Xaa locations
  Clone ID: PAT_MRT3847_133341C.1.pep
ARGINQVYIIGGDGTHKGAALIYEEVKKRGLQVAVAGIPKTIDNDIAVIARSXGIGTAVGEAQRAIQAAAVAVESVATGGGKDRQRGSNSGIRAVQAAMAGRDEDSRMIPYFKHVGHNMIVYICKILKSVREDGHYVNVEAASAGEGCIVAEEHAAYIVDVSGNNLLVDXIDPTYMIRAIPSNASDNIXCTLLAHGAVHGAMAGYTGFTVGPVNSKHAYIPIARVTEKQNKVKLTDRMWARLLASTNQPSFVASDQERVEKEXNEYINNMNIASLSRFKCLMGID

SEQ ID NO: 179764 - protein, 145 aa, Glycine max
  Clone ID: PAT_MRT3847_133342C.1.pep
THYQYSTMENGGLRTFKAFADLVFASERIDVGLKRGKFSHPAWTNEKTGANEEGEDEGEAHAVTAIPIQPSFPPTQQCHYSANNKPSPYPPPSYPQRQSLNQPQSLSTALPMTNTTFSTNQEHQPRNEFCSEKACRIHPNSSILC

SEQ ID NO: 179765 - protein, 68 aa, Glycine max
  unsure (1)..(68): unsure at all Xaa locations
  Clone ID: PAT_MRT3847_133343C.1.pep
GLGWVPPPSKKKRRDSPVXAALXGXXHSLLSSSGSQVLQRKYKVPSSCFCCCCFGASRSTSMVLAQAE

SEQ ID NO: 179766 - protein, 217 aa, Glycine max
  Clone ID: PAT_MRT3847_133344C.1.pep
MAAVGDEKEQEELIPGLPYEIAELCLLHVPYPYQALSRSVSSTWNRAITHPSFIFSKKTLSRPHLFVLAFHSQTGKIQWQALDPSSGRWFVLPQMPLQENSCPTEFACAALPHQGKLFVMAGGGGGSDTLVYRAATNQWALAAPMPGGRKRGFFAAEGVEGKIVAVGRSGTDIYDPESDTWREGKKQGGELKRYEVVAAGGKVYVSEGWWWPFMYRP

SEQ ID NO: 179767 - protein, 143 aa, Glycine max
  Clone ID: PAT_MRT3847_133345C.1.pep
MAGMGKLDHLEERLRAIEGGEDYAFANLKELFLVPNIITPPKFKVLDFDKYKGTTCPKNHLKMYCQKMGEYAKDEELLIHSFHESLTGVAVTWMQLQNICKKGDGSFKEHAQKVEGSGGPSGTPNDGKGDDNRDGRHIIDTLL

SEQ ID NO: 179768 - protein, 86 aa, Glycine max
  Clone ID: PAT_MRT3847_133346C.1.pep
YVQPQYNYYKKEKTEFEVEVEVEVTIREEIKKEKRVIVVTVFLHYIHHQHRITTPTTSTLRSAHFVRSIIHQAGAEPINENAQLHF

SEQ ID NO: 179769 - protein, 46 aa, Glycine max
  Clone ID: PAT_MRT3847_133347C.1.pep
FSVVLAYNNSLNLLFMTRDCFGFKATVHTYAGRTNTISPWKIAPKK

SEQ ID NO: 179770 - protein, 218 aa, Glycine max
  unsure (1)..(218): unsure at all Xaa locations
  Clone ID: PAT_MRT3847_133348C.1.pep
MPPLPPPPQANPDSGATSAPSQVRTYRVWQGSNVFLCGGRLIFGPDVKSIFISIFLIVLPVAVFCGMVARKLLDDFPHHTGWSIMAVLIALTLFVLITLVVTSARDPGIVPRNAQPPETDDYHWTDNSNNGQISLSRFPRTKDVILNGITLKVKYCDTCMLYRPLRASHCSVCDNCVERFDHHCPWVGQCIGLRXYRFYYMFVFSATLLCLYVHAFCW

SEQ ID NO: 179771 - protein, 47 aa, Glycine max
  unsure (1)..(47): unsure at all Xaa locations
  Clone ID: PAT_MRT3847_133349C.1.pep
DAYERXNDVISNPNKYGFQNSDSPCCSFGNIRPALTCIPASXLCKDR

SEQ ID NO: 179772 - protein, 130 aa, Glycine max
  Clone ID: PAT_MRT3847_13334C.1.pep
LTRGFKLKREEKKKEESESDAGSELETQSVNTEQSFDDTGRENAASDYVMDWIGKEVRKERPNEVKKNGSSSAAATAASSSGTVEKKSRKKLEWWEFMDDSAVLKNEKRTPAWEWWMEEYSAELAWKKRT

SEQ ID NO: 179773 - protein, 86 aa, Glycine max
  Clone ID: PAT_MRT3847_133350C.1.pep
LNFWAFFLSYPSISTPIAPQKTSSKVIQTMERVKPFPLQYTFKYHSHPSQKNQTLAKEFHNSFAHGLIYSKTPPIFFLMDQGRVHY

SEQ ID NO: 179774 - protein, 74 aa, Glycine max
  Clone ID: PAT_MRT3847_133351C.1.pep
LRVRSKTAMSGTALVKRQCRASLVHVFTTNSNSTDDYNVSMYTYEKLQCWELIFPIDVCGSTNGFDMWSTERAN

SEQ ID NO: 179775 - protein, 73 aa, Glycine max
  Clone ID: PAT_MRT3847_133352C.1.pep
VPQNYYYRLNNKMKYDKKKNLRALDYVCSALQLLSNCREFWSYRVTCSLQLLYSVIGCNVIYSDYIKLPQPSG

SEQ ID NO: 179776 - protein, 34 aa, Glycine max
  Clone ID: PAT_MRT3847_133353C.1.pep
GQLFLFLRIPPDLLKMRNPLHDMELAFSFACSSA

SEQ ID NO: 179777 - protein, 127 aa, Glycine max
  unsure (1)..(127): unsure at all Xaa locations
  Clone ID: PAT_MRT3847_133354C.1.pep
MGEREYPGDQEREKTRSRRKNHPHLLSVPCFGTESHDRVGHGNNPPTATLPXGYHPPGXQAHTQRVMELCIEHRLEVRXLLDLAHVLLTHTSTFEKGMECSQGWRVWKTQRGESQRWCTLQTESHAV

SEQ ID NO: 179778 - protein, 96 aa, Glycine max
  unsure (1)..(96): unsure at all Xaa locations
  Clone ID: PAT_MRT3847_133355C.1.pep
MAQMMNRLWGGDKKLMPDRTHLLSAWCSRMAICKKDVWRVECGIPSGFPLTAICNSIFNEMLIRYSYEKXLRQAKAPSMFLQSFKNSDALWGHGSD

SEQ ID NO: 179779 - protein, 134 aa, Glycine max
  unsure (1)..(134): unsure at all Xaa locations
  Clone ID: PAT_MRT3847_133356C.1.pep
PHVRSNDTLSLTYAPGTVALHALNPLILINIQMSYYAEWLLWIMQHIDVDHTITLLTKARIIDTLAGANILNECLNTHPTAVHADYPTYDLXGNAVCLQHSGXGFHETLTLSTGALYPDASDPYTLSTLAKCLL

SEQ ID NO: 179780 - protein, 64 aa, Glycine max
  Clone ID: PAT_MRT3847_133357C.1.pep
PRVRPRVRPCFSVHRLLRVATRDDAALMTRHGTCHHGPRAIGAGPADSYVSATTLRHDARRSPG

SEQ ID NO: 179781 - protein, 223 aa, Glycine max
  Clone ID: PAT_MRT3847_133358C.1.pep
QAAYNDWFMSLYNVFFTSLPVIALGVFDQDVSSKLCLKFPLLYQEGVQNILFSWKRIIGWALNGVVTSAIVFFFCIRSMEYQAFRKGGEVMGLEVLGATMYTCVVWVVNCQMALSISYFTHIAPLLPWGGNASRQMRLLAKGAQEPQWMRNDRQTSDPEYCNVVRQRSIRHTTVGFTARLEASKRFEASRRVEASNPFEASNHFDASKRLEASKRSEGKFEDR

SEQ ID NO: 179782 - protein, 123 aa, Glycine max
  Clone ID: PAT_MRT3847_133359C.1.pep
SRFLCAPWKLTSSLNEGPCVHFSGSHPHQHSLHLNGPSSFCMANASITPGGKMMTLITSPFVAICILPDTPVSQYLFLCEPAVYGCAGRGITHLRRMLDLLAEQDAVAPLPMKETWVLVAVTG

SEQ ID NO: 179783 - protein, 138 aa, Glycine max
  Clone ID: PAT_MRT3847_13335C.1.pep
PTRPKKFMELSKVYDGFVDSSDNLIIKAQVQVIREKSDRPFRCLDCQYRRELVRVYLTNVEQICRRFVEERRSKLGKLIEDKARWSSFFTFWREVDQTSRRRMSREKTDVILKVVVKHFFIEKEVTSTLVMDSLYSGL

SEQ ID NO: 179784 - protein, 105 aa, Glycine max
  unsure (1)..(105): unsure at all Xaa locations
  Clone ID: PAT_MRT3847_133360C.1.pep
APRFFFGDSSRIGSRIASLLPYLIXASIQMRFFPMYHQMIQWMRNDRQTSDPEYCNVVRQRSIRHTTVGFTARLEASKRFEASRRVEAFNPFEASKRSQGKSEDR

SEQ ID NO: 179785 - protein, 98 aa, Glycine max
  unsure (1)..(98): unsure at all Xaa locations
  Clone ID: PAT_MRT3847_133361C.1.pep
MLVYQDLLTGDELLSDSFRYNEIENGMLWEVEGKWAAKGAADVATVANPSAAGGXSPGVDDAXVKDVDIDDTFKLEDQADSDXHSGVTFMNRIITNWT

SEQ ID NO: 179786 - protein, 199 aa, Glycine max
  unsure (1)..(199): unsure at all Xaa locations
  Clone ID: PAT_MRT3847_133362C.1.pep
MVSSQVVNTYPLSSYTFGTKEPKMEKDTSVADRLARMKVNYMKEGMRTSVEGILLVQEHNHPHILLLQIGNTFCKLPGGRLKPGENENEGXKRKLTXKSLGVQKAFPCSFIXREYFAVPKNXNFLLFHCFCPPHITKPKECKKLFLVHLSEREYFAVPKNLKLLAVPLFELYDNVQRYGPVISTIPQQLSRFQFKMITN

SEQ ID NO: 179787 - protein, 200 aa, Glycine max
  Clone ID: PAT_MRT3847_133363C.1.pep
MVSSQVVNTYPLSSYTFGTKEPKMEKDTSVADRLARMKVNYMKEGMRTSVEGILLVQEHNHPHILLLQIGNTFCKLPGGRLKPGENEIEGLKRKLTSKLGANSPALVPDWQISECVAIWWRPNFETIMYPYCPPHITKPKECKKLFLVHLSEREYFAVPKNLKLLAVPLVELYDNVQRYGPSICAIPQQLSRIQFKMITY

SEQ ID NO: 179788 - protein, 77 aa, Glycine max
  unsure (1)..(77): unsure at all Xaa locations
  Clone ID: PAT_MRT3847_133364C.1.pep
KIYTSKEKIHKDYDSXPTEFYESIXQAFFDLKNTNHXLKNDLKNLFLNLTFQIYFFGNPKAFVIHIPYKLMKRFPKN

SEQ ID NO: 179789 - protein, 37 aa, Glycine max
  Clone ID: PAT_MRT3847_133365C.1.pep
PRVRHTLSRSLRSDFTFTGIQLNLVHDSFLSSHHHYH

SEQ ID NO: 179790 - protein, 83 aa, Glycine max
  Clone ID: PAT_MRT3847_133366C.1.pep
MRAFKILFVTKENPLEKGETIPPEEEVHAPTLYDSKTDQDSLEIFTLYIDYPTVGTNVHLLLLSLYNKSLINQNSHALNILSY

SEQ ID NO: 179791 - protein, 241 aa, Glycine max
  Clone ID: PAT_MRT3847_133367C.1.pep
NAAIMRSNDTYFYDLASKLGIDRLHDYLNKFGVGQKVSLDMFEESPGLMPSREWKRTTRRQAWFPGETVILGIGQGYMQVTPLQLAQATTLIANKGVWNRPHLARSIGQVAPVDQNPIPNIVLHDPRQWEQVNYAMQLVMHDPRGIARAAAVGAQYRIAGKSGTAQVVAIKQGERYDRLKTSERNRANALFVGFAPAEDPQIVISVMIENGEAGGRVAGPVVREILDAWLLDKDGKLKPEY

SEQ ID NO: 179792 - protein, 94 aa, Glycine max
  Clone ID: PAT_MRT3847_133368C.1.pep
KNLFGSLNSFEAYITMGAYRDYSLSRSLSFDQLKLIYWTCNPQYCGAIEHSSSCSTVTLPILIQPEGHPRLNILHHRMDSLEKIPETHEYLYGP

SEQ ID NO: 179793 - protein, 86 aa, Glycine max
  Clone ID: PAT_MRT3847_133369C.1.pep
RTREDKTGDSITHIQKAPRRNKVREAARKKGRLMGKIRMTGKAPGKRSDRARLAQGCLTNRRRTEDVDAWKWTKTEPHTWEVSLPR

SEQ ID NO: 179794 - protein, 74 aa, Glycine max
  Clone ID: PAT_MRT3847_13336C.1.pep
KHPNLRNINQGMKGSNSGIKKKKDSPKGETLRGGGAVNTKNGHLLGSGKNNERGLFFAPGFFYMLPLLLIKGPQ

SEQ ID NO: 179795 - protein, 253 aa, Glycine max
  Clone ID: PAT_MRT3847_133370C.1.pep
MIPLAGGMIQKSSCWVTVPMDEVLLKVVKKYSDKILLKESDRKPKSSKKKGKKHSLFNGISLEKHFEKSDEWRGTPPWDPLVGGNAYPKFLCDVMVEGLAKHLRCVGIDAAIPYSKKPEPRMLIEQAQKEKRVILTRDAKLLRHDYLTKNQIYRVKTLLKNEQLLEVIEAFQIKINEDQLMSRCTKCNGTFIQKPLTTEEAIEAAKGFQRIPNCLFNKNLEFWQCMDCHQLYWEGTQYHNAVQKFVDICKLSD

SEQ ID NO: 179796 - protein, 52 aa, Glycine max
  Clone ID: PAT_MRT3847_133371C.1.pep
NCTNFFYNRKKKSYKFQMISQELVHTKQNYCLHIKYNKKPCFTADRFTWPKT

SEQ ID NO: 179797 - protein, 486 aa, Glycine max
  unsure (1)..(486): unsure at all Xaa locations
  Clone ID: PAT_MRT3847_133372C.1.pep
MENSDEQLPFSPQNPNNAEEEDDDIEEPEDEDEEEEEDDDDDDDVVSQEQSPLSRLREQRSKLETLSRRLASELVPIRVHDVLIRGNTKTXIEAELMLLEEATTVQELIRAXKSPSLEIFDTAELTLQAGRSCLTPNGVVDVVETFSPTAAISTLNILAACNGWLVLFFSFSFKILTEIGXGDLWDASLAYGANQTTELLGLSLGLISTRHHDLVYTLGWRTLTDPSQMSSRSIRRQLGHGLLSSLKYTFKIDRRNSPIRPTNGYAFLSTTHFGGLTPDHRSLRFLRQEFDVRCVIPFGFYNTALNLGISAGAVFPWGHGFMNKPSPLPERFYLCGAFSPVCTLGGPITLWGFKTRGLGPTEPRRRSRDGIIDDNDDSSRWDFIGGDLAVTAFADLSFDLPVRWLRDHGIHGHVFAGAGNTAKLTQNEYKHFSPRKFLESFRTSVGCGFVVPTRLFRLEGNFYYILKQNEHDRGKTGFRFSFSAPS

SEQ ID NO: 179798 - protein, 133 aa, Glycine max
  unsure (1)..(133): unsure at all Xaa locations
  Clone ID: PAT_MRT3847_133373C.1.pep
YINAXXFYLKQLCSTLKVDPXEVTTRIQNLLXXLXXXXNXNSSFHSKXAIYKASFISSKVMLIGNSKQYMVXVECFDDTDAESLKSAAXYLLETLTYLXXVVLSSCPXEGXVXLXAAFTPGVVYQGIHSGNFI

SEQ ID NO: 179799 - protein, 103 aa, Glycine max
  Clone ID: PAT_MRT3847_133374C.1.pep
MAVTFSNLHTESGLKSLDDFLSGKVYVSGDQFTKDDIKVYGAVLEKPGDSFPNAAKWYEVVSSQLAASFPGNAQGVRFSGKASAPAEAAPAKPVCIYFFIFYF

SEQ ID NO: 179800 - protein, 506 aa, Glycine max
  Clone ID: PAT_MRT3847_133375C.1.pep
MENSDEQLPFSPPNPNNAEEDDEIDEPEDEDEEEEEDDDDDDVVSQEQSPLSRLREQRSKLETLSRRLASELVPIRVHDVLIRGNTKTKAWLIEAELKLLEEATTVQELIRASEIALARLRGLEIFDTAELTLQAGPPELPHTANVIVDVVETANKISGDFGVYTKPATSSWSAEGGLKYKNLLGYGDLWDASLAYGANQTTEVSVGVYAPRLKGLLTPFVARLSMLSQDWQEFSSYKEQLLGLSLGLISTRHHDLVYTLGWRTLTDPSQMSSRRNSPIRPTNGYAFLSTTHFGGLTPDHRSLRFLRQEFDVRCAIPFGFYNTALNLGISAGAVFPWGHGFMNKPSPLPERFYLGGDFSPVCTLGGPITLWGFKTRGLGPTEPRRRSRDGIIDDSDDSSRWDFIGGDLAVTAFADLSFDLPIRWLRDHGIHGHVFAGAGNTAKLTQNEYKHFSPRKFLESFRTSVGCGFVVPTRLFRLEGNFYYILKQNEHDRGKTGFRFSFSAPS

SEQ ID NO: 179801 - protein, 179 aa, Glycine max
  Clone ID: PAT_MRT3847_133376C.1.pep
RVRPELPHTANVVVDVVESANRISGDFGVYTKPATSSWSAEGGLKYKNLLGYGDLWDASLAYGANQTTEVSVGVYAPRLKGLLTPFVARLSMLSQDWQEFSSYKEQLLGLSLGLISTRHHDLVYTLGWRTLTDPSQMSSRSIRRQLGHGLLSSLKYTFKIDRRNSPIRPTNGYAFLSTT

SEQ ID NO: 179802 - protein, 168 aa, Glycine max
  Clone ID: PAT_MRT3847_133377C.1.pep
MASSSRARSSSPFSHRKPSTPLSSASSSTSSFTNGRVMPRSCSSSTSSFYNSGGGGRSMTPSRGHSESVCYDYGNPSPLEFGMDEEVITEPVDSSRARDSISVTIRFRPLSEREYQRGDEIAWYADGDKIVRNEYNPATAYAFDRVFGPHTNSDEVYEVTAKPVVKAA

SEQ ID NO: 179803 - protein, 49 aa, Glycine max
  Clone ID: PAT_MRT3847_133378C.1.pep
VTEFLLDTNRFILSLYHSLSASVRHCVGINPCAESRFIIVIVLFFQNYP

SEQ ID NO: 179804 - protein, 50 aa, Glycine max
  Clone ID: PAT_MRT3847_133379C.1.pep
MPWHTTPQGRKDTPWEEMDMPFPCGQTWQTIIDALLVNQGVIVARPYCII

SEQ ID NO: 179805 - protein, 51 aa, Glycine max
  Clone ID: PAT_MRT3847_13337C.1.pep
SRSCFVNFFLVGLLHNEKHLIIFVYISFKKLLLLDGNWSFITSLKMSISYR

SEQ ID NO: 179806 - protein, 101 aa, Glycine max
  Clone ID: PAT_MRT3847_133380C.1.pep
KTKLSYVSISGEDNIIMGTNRQEHEISGGSEATYQEMIENEVKDTQEGSTHKLITESCKSNSMVLKKPHYVIPAHIITEAISTIADLDIRWSGPITPKERE

SEQ ID NO: 179807 - protein, 79 aa, Glycine max
  Clone ID: PAT_MRT3847_133381C.1.pep
GSLIKTLTNKLERRLNRTQGASNRKLLTPLKIQWSPPPLRSILYQMHLPHTLEIPRILTCRHLSLSITTRGDTSQLPIT

SEQ ID NO: 179808 - protein, 80 aa, Glycine max
  Clone ID: PAT_MRT3847_133382C.1.pep
GFLHGGLSSTICIRVERVVRHRGLSIPFGRLVVIPDLLDVRQPTGSRVLHTRHESQCLLCSVQYPSQAVHREFARGPVSW

SEQ ID NO: 179809 - protein, 90 aa, Glycine max
  Clone ID: PAT_MRT3847_133383C.1.pep
VSAQKLLKELCFEVQKLQYVKPDCSLEDEGDELKSMLREDVMCHSENWTGFSVQLPGVVLDAERQIFKDLIDELVIDEMASLQVKSGRHR

SEQ ID NO: 179810 - protein, 55 aa, Glycine max
  Clone ID: PAT_MRT3847_133384C.1.pep
IIKSSRLKQDRLRLHTINIKTYTPMSHPIRALCPDILQHPFCRLLAAVLEPIRLE

SEQ ID NO: 179811 - protein, 60 aa, Glycine max
  Clone ID: PAT_MRT3847_133385C.1.pep
PMSIVSQLYINVNYFLFLLQNNYLMIRFQIFNLYSFSLFLSIPQISSFNSLYSFKCPPLK

SEQ ID NO: 179812 - protein, 208 aa, Glycine max
  Clone ID: PAT_MRT3847_133386C.1.pep
MDGFSPEAEATAVAVRRALELLQLNDPVLRVQAARDIRRLTKTSQRCRRQLRQAVAPLVSMLRVDSSEFHEPALLALLNLAVQDEKNKISIVEAGALEPIISFLKSPNPNLQEYATASLLTLSASPTNKPIISACGTIPLLVNILRDGSPQAKVDAVMALSNLSTTQPENLSIILETNAMPFIVSLLKTCRKSSKIAEKCSALIESLL

SEQ ID NO: 179813 - protein, 90 aa, Glycine max
  Clone ID: PAT_MRT3847_133387C.1.pep
LNSIISEMVSWHLLGVFNWRLRVQIIETPSPFLGVRLCTSNFPPNPIKWEPCALGCLSLSLSLSLSLCLSLSLYIYIYILLISSTHIFHF

SEQ ID NO: 179814 - protein, 91 aa, Glycine max
  unsure (1)..(91): unsure at all Xaa locations
  Clone ID: PAT_MRT3847_133388C.1.pep
TFPIPLVRCPLNHFRPNTXXHAXXGAXRDNKNXXLHXCSXXLPSSGSITXVRNSXWRXXARXXYILLXPXXPGKLGNPXIPPPRYLXXVSH

SEQ ID NO: 179815 - protein, 101 aa, Glycine max
  Clone ID: PAT_MRT3847_133389C.1.pep
SSHTSANSPLTPPPSVVVFCRTMGGGLSREVCQWCHTMEARSARYVQRNCKMAKDEDDSILQARVPPASLTQTKLSTLWFESRFVLSWSYSLKEQICVVLL

SEQ ID NO: 179816 - protein, 219 aa, Glycine max
  Clone ID: PAT_MRT3847_13338C.1.pep
MNPTQHNPNVSLQQHSNPTLDTISLMKQGFLMMEEDFERGPRYHAYAALRETKLRMKYTRQQEYEQEEEKEGVVEAKVLTLTPPRKKQVKFQDGGTGVVSGRKGSSYSSSSSLVAQSVPDFSAVLRKENRKPVNGNVLPPLMELTPPSSKGVLSSARGSKSANAGEKRRAVGGGVLMPRKSYASIDELKSLPNAINGENRGGRSSRVITRKTVLGYRHI

SEQ ID NO: 179817 - protein, 105 aa, Glycine max
  unsure (1)..(105): unsure at all Xaa locations
  Clone ID: PAT_MRT3847_133390C.1.pep
XXXPXYPXRHTXLPQXTXXPXPLXTXPXPHQXPXXQXXXXXXXXXRXXPXXXXXXXTPXXTXRXXXXXXXXXXXXXXXXXXXXXGXXXXXXXXXXXXXSTARXXX

SEQ ID NO: 179818 - protein, 45 aa, Glycine max
  unsure (1)..(45): unsure at all Xaa locations
  Clone ID: PAT_MRT3847_133391C.1.pep
DEAAYDLQYFKFQPIKESIVSRXMTRRYMTDMITYADADVVIVGT

SEQ ID NO: 179819 - protein, 65 aa, Glycine max
  Clone ID: PAT_MRT3847_133392C.1.pep
VLRLLIKPSCCYENSGLIFWHTSICGYCKQSPIFTGLLKSYDFGCMPKCKPYGLSDAIANAEKLS

SEQ ID NO: 179820 - protein, 356 aa, Glycine max
  Clone ID: PAT_MRT3847_133393C.1.pep
THSFVGTRVLNFPDEGDEFDSDTDIDPMHAGLSQWISTDEDNEEEEEEEEEEEEEEDREWELADVYEAEATSHLQIFFTSSPSESRDHINSTESGGMFSQIIRETWHAFEDVDLPHGANFGDYLDARRFEDLLEHLAENDSSRRGAPPAAVSFVNNLPRVVIGKEHENHGELVCAICKDVLAPRTEVNQLPCSHLYHINCILPWLSARNSCPLCRYELPTDDKDYEEGKQNIDSRNVIHERQRIDVTDDSYSDVSDGDEVNGSGQGGIRQRLLSSGSTVDSSATRSGRGRWFFLAAAPIVSLVGIVLVLWLGNNSQNEGSRHLGSHYLSGQNQHAVHAYSSPNQREGRSRGWWCPF

SEQ ID NO: 179821 - protein, 116 aa, Glycine max
  Clone ID: PAT_MRT3847_133394C.1.pep
IENSIADIGREMALTDIFQPTLRNFFIKNARWPIMFFLTAGEVFLFRCCIKNLHCRSAKFFRASSTDVSFRPKLACSDLFGQENISPPRQKKYYSPILIEKNDSRRRPGKTTDRGV

SEQ ID NO: 179822 - protein, 166 aa, Glycine max
  Clone ID: PAT_MRT3847_133395C.1.pep
MLLVIFCNWIRANDMYDGVEDGYDSSRDDISSVSSYNPMRESLHRGFGSSLSLRSSSARSLSRDASTLEGFRTSLSSNMALPKLSVAEVLSDSGADVLSTQKSFAIVSPNEQQKLRKTFSAEDDVGVSSSPEAGAVESLSSEGFIRGRSYNIRLDDQVLLKFSPRN

SEQ ID NO: 179823 - protein, 70 aa, Glycine max
  Clone ID: PAT_MRT3847_133396C.1.pep
VVYAFHCTCRAMRTRECASDINTKSPYGVALSIQTLDQPIGAAYDVQQLNDMTVRKYGAASSGTNERGRD

SEQ ID NO: 179824 - protein, 54 aa, Glycine max
  Clone ID: PAT_MRT3847_133397C.1.pep
SSTTFIRGSGLLINNIICYRQLNTPPIHFQIIIFDPVQIFSLRGQITHSLLAYN

SEQ ID NO: 179825 - protein, 36 aa, Glycine max
  Clone ID: PAT_MRT3847_133398C.1.pep
YYHVKTVRILLQLDSDVRVMACGNKREAPFVWLAQL

SEQ ID NO: 179826 - protein, 46 aa, Glycine max
  Clone ID: PAT_MRT3847_133399C.1.pep
TSAREQGIDLTEVKARHRLGMPCSAACSSSTICSDWPSPDTRHDEE

SEQ ID NO: 179827 - protein, 94 aa, Glycine max
  unsure (1)..(94): unsure at all Xaa locations
  Clone ID: PAT_MRT3847_13339C.1.pep
FIIYRIFSRTFNTTLAREWENKIKLFRCFSLFISKGFPFKTHEPLVGLNARIIIIINKVQRIHPGFEPESIFLFIFFHVRVLHGXFPIYIYIYI

SEQ ID NO: 179828 - protein, 170 aa, Glycine max
  Clone ID: PAT_MRT3847_1333C.1.pep
MATAGGGAGHLKLLGAWPSPFVNRVRMALHLKGLEYENVEEDLTNKSDLLLASNPVHKLVPVLLHGDKPISESLVIVEYLDDAFPGAGQAVLPADPYERAVARFWAKYVDGKLHGMMVKALMEATEEERATATVDALAAMDTLEGAFAECSGGKKFFAGDAPGYLDVALG

SEQ ID NO: 179829 - protein, 47 aa, Glycine max
  Clone ID: PAT_MRT3847_133400C.1.pep
SINCYPSMNTNNDITYIDIYSIIGLIIAIVTSKRLYEISNFLISRRP

SEQ ID NO: 179830 - protein, 56 aa, Glycine max
  Clone ID: PAT_MRT3847_133401C.1.pep
FRSFPLFCLQIHCFVQIPIFNHASPKRRLCRFCFVSLPLQLYLRTSPCGSRSWIRG

SEQ ID NO: 179831 - protein, 256 aa, Glycine max
  unsure (1)..(256): unsure at all Xaa locations
  Clone ID: PAT_MRT3847_133402C.1.pep
GSRGDLHGLKVCRGAPLLTHFFADHLFLFCRANVNXVDILHSILGAFEKASGLSIIFQKSXFFSRNTPPSIKQQISGQLQVTDCLGTGKYLGMPSMNGRKKKSIFSYLRDKIWRKIQQWXHLSKVGREVLIKSVSQAILAYCMSVFLLPSTLQDEIQKMMNSFWWGSNRNYGKGINWLSWERLTIRKKDECMRFRHLYAFNLSMLGKQGLKLASDGHWEMGKLPKFGRTHRHDLLMVHSSPTPLLMVWRTYQLRLW

SEQ ID NO: 179832 - protein, 61 aa, Glycine max
  Clone ID: PAT_MRT3847_133403C.1.pep
NGCIFDAASSSEIRDALNDKALQELICRIDCGSNAENELDKAMAEEAFRLLTDKILSTINP

SEQ ID NO: 179833 - protein, 261 aa, Glycine max
  Clone ID: PAT_MRT3847_133404C.1.pep
MATSFSPTASVGSIIFQNPPKGLLLLSQQQQQRSFASSASYATLKLPRAFALSPRPLLSKGRTTLVRAATIEEIEAEKAAIEKDAKTRMDRTIDNVRTNFSSIRTGRANPSMLDKIQVEYYGSPVSLKSIAQISTPDASSLLVQPYDKSSLKAIEKAIVSSDLGMTPNNDGELIRLSIPQLTSDRRKELSKIVAKQAEEGKVALRNIRRDALKAYDKLEKEKKLSEDNVKDLSSDLQKLTDEYMKKVDTIFKQKEKELLTV

SEQ ID NO: 179834 - protein, 182 aa, Glycine max
  unsure (1)..(182): unsure at all Xaa locations
  Clone ID: PAT_MRT3847_133405C.1.pep
MAPKGLTFLAVLICISALSLSPSVAGEGQDNGLVMNFYKESCPQAEDIISEQVKLLYKRHKNTGFFWVRNKFHELACXSWDGLLVVDSTKRSLSWKETNRNFRLRNFKYNWTHQEAFGRECAGXVSCADILGLSARNGIGSLGRRHIPLKTGRKDGXRSRTDVVEQILPHHKESISAVPDIF

SEQ ID NO: 179835 - protein, 45 aa, Glycine max
  Clone ID: PAT_MRT3847_133406C.1.pep
VTPDTNVICIWGLVSFSVQTMESMMRRFIWRPKSFSEATSQRVQY

SEQ ID NO: 179836 - protein, 102 aa, Glycine max
  unsure (1)..(102): unsure at all Xaa locations
  Clone ID: PAT_MRT3847_133407C.1.pep
MAKMLGLLFMIGAMLFGVGAEPVEDKQALLDFLQSINHSHYLNWNKSTSVXKRWIGVICNNDQSQVIALHLTRTGLSGPIPPNTLSRLLALETVSLASNSIT

SEQ ID NO: 179837 - protein, 65 aa, Glycine max
  Clone ID: PAT_MRT3847_133408C.1.pep
ATFSDLHTEQGIKSLDQFLSVKTYISRDQLTQDDIRVYATAARKPSDTFSPAAKWYDAVSSSLAP

SEQ ID NO: 179838 - protein, 75 aa, Glycine max
  Clone ID: PAT_MRT3847_133409C.1.pep
ASNTDVRRGENGTTKVANDQVKPQVPISALPTHASVCRHTSAKFSSIPRSGTNPLSRWYEILNLNESIVTRTRMM

SEQ ID NO: 179839 - protein, 113 aa, Glycine max
  unsure (1)..(113): unsure at all Xaa locations
  Clone ID: PAT_MRT3847_13340C.1.pep
KERSQRTVERVHLLKVLETRKSALQKXQGMAFVRAVTAGFEIDYISPLMSFAECFGASRMKDARTKFRNLWRRKHETGXWLEIEAAETVSNRSDLEMEEINDSEQLDQILVHA

SEQ ID NO: 179840 - protein, 99 aa, Glycine max
  Clone ID: PAT_MRT3847_133410C.1.pep
AHLLDHFTTASAAFLHIIGSYKLQVYNYPLFSCYNPWFSLPPAESGKVDLVPKVQGITGSSTLSKEKKLTLPSVTRQIFKGMPPHCFSRASISALDGGF

SEQ ID NO: 179841 - protein, 72 aa, Glycine max
  unsure (1)..(72): unsure at all Xaa locations
  Clone ID: PAT_MRT3847_133411C.1.pep
PFPGQVFPQIELWGENISAKIDKKFSVLTKPFDEKVPALPLGKVGGKVPXIFPAQDIYISVPVEGPFNLVLY

SEQ ID NO: 179842 - protein, 135 aa, Glycine max
  Clone ID: PAT_MRT3847_133412C.1.pep
FCLGPKDPFPLWVFHVFLWCPPPPGLAPPLGQPFPGLGVAPSPWRRLSIFSRWASFFGAPPGWRGPPFCFLPVYPRFLTRFWCGPGSYPFFLGSGWNKGPFPLLFPCLCNSLFPGPLVFFSKKTKIMKIRKKTCM

SEQ ID NO: 179843 - protein, 56 aa, Glycine max
  Clone ID: PAT_MRT3847_133413C.1.pep
IQDLSTINIFSANRAKTFLKTNIAIILIYTKSVSGAYILYRHLDVSHGHERPIPKS

SEQ ID NO: 179844 - protein, 47 aa, Glycine max
  Clone ID: PAT_MRT3847_133414C.1.pep
EELKISILREINHGLHGESKPKRYSLTNVVNLVILNVRNIMKFEIFH

SEQ ID NO: 179845 - protein, 48 aa, Glycine max
  Clone ID: PAT_MRT3847_133415C.1.pep
SVGIGHRNCDLQDRHFFIPKEAKYRNGNRMNRTQSVDIERQQAQTKKY

SEQ ID NO: 179846 - protein, 47 aa, Glycine max
  Clone ID: PAT_MRT3847_133416C.1.pep
FSYGENPIVRTVKGLRAAPVIDHERGRIDKPAEMEADMTQVGSHYEL

SEQ ID NO: 179847 - protein, 141 aa, Glycine max
  unsure (1)..(141): unsure at all Xaa locations
  Clone ID: PAT_MRT3847_133417C.1.pep
WEDGPFDGLHTTHAMSQMAPMMNRXCGVEELLPREXRTHLVMTCCXRMAMCKRDVGGCGMKESLSWIIXLTAVWNSDSSEMVIRYRWEKLLGQAKAPSLLIQSLKDNVSLCVNGDDNLIRVHEYDTPYFSGSKLKCYIAGD

SEQ ID NO: 179848 - protein, 111 aa, Glycine max
  Clone ID: PAT_MRT3847_133418C.1.pep
CKGREVRGEELRRMPSLIEITGKCLRSSAAFMRRSARMLSRSRLASMGPVVRGSHGRLSMFRVVLAIMLEIHRFPTRRISVALLRAKFPPEERLAMDLLMRYTISRTTRRS

SEQ ID NO: 179849 - protein, 587 aa, Glycine max
  unsure (1)..(587): unsure at all Xaa locations
  Clone ID: PAT_MRT3847_133419C.1.pep
MEMPPSPSGHSALSIKVPHPRWLTTIMTTPTGNPFWTPYTAPNWIGEGEFDKQRRTTVISFPKQLLPCVPSFLAPKRHVFGRTRVDIAAGERTPQPSKHLSPENRSFDHMLGWMKRLNPAIDGVTGSESNPLSVSDPDSKRLTHPFLANSXIVCSENGNASFSIGAFRTLPRTTRPSTKGFVQQGLFYGXTSHMSQSVMXNGFGEDVVAVYKTLVSEFAVFDRWFASVPASTQPNRLFVHSATSGGATSNVAAKLTAGYPQQTIFDSLHDAGHDFGIYYQNIPATLFYRNLRKLKYVLKFHIYDVSFKQHAKEGKLPSYTVVEQRYMDTKLLPANDDHPSHDVYEGQVFVKEVYETLRASPQWNETLFLITYDEHGGFYDHVPTPARGVPSPDGIVGPEPFNFTFNRLGVRVPTIAISPWIEKGTVVHGPNGSPSPTSEYEHSSIPATVKKLFNLPSFLTNRDAWAGTFEGIVQTRTEPRTDCPEKLPTPEKIRKGEPNEDAKLSEFQQELIQLAAVIKGDNILTSFPGTIGKDMTVKQGKYYMDDAVRSFFEAGRYARKMGVNEEHIVQMKPSLTTRSSKSPNTNP

SEQ ID NO: 179850 - protein, 121 aa, Glycine max
  Clone ID: PAT_MRT3847_13341C.1.pep
TNALARIKVLFKFLKKHSDLPGAKPLKIEKTSRSGSRYKRKRRREETLPTNALTGNHSRLNPLSSYTHHFSFESQWLRHQKTSPHVCPRRTSKLRRSKDKTFLLYTWKENITSLLGIISNH

SEQ ID NO: 179851 - protein, 51 aa, Glycine max
  unsure (1)..(51): unsure at all Xaa locations
  Clone ID: PAT_MRT3847_133420C.1.pep
KIKKGALKNPLFXTYSLSKYSELFKTHIHCFFQHSCITKTHCYSHRTCKLE

SEQ ID NO: 179852 - protein, 126 aa, Glycine max
  Clone ID: PAT_MRT3847_133421C.1.pep
IYCHISILAPVKGQAFLAMVGLLLIGLEVTGSNPRNNFYTCGGKNVYIYPLKTPLGGSLLHWVTSLLHTCSNAYVPLLFFFEDNLPVVFWVYAQSIYSFLQCFTLIFHFENLLHLFFTSIVIQHSN

SEQ ID NO: 179853 - protein, 70 aa, Glycine max
  Clone ID: PAT_MRT3847_133422C.1.pep
MKLEISQVAHHTPTTVPEHETSDVIKTQETTPGPVPATEAPATDQAAAEVPAHEEQQATEVPAAESTTEA

SEQ ID NO: 179854 - protein, 104 aa, Glycine max
  Clone ID: PAT_MRT3847_133423C.1.pep
QPKTIDPPKPKVAVKPSSKSIHVETPAVHINRSANPTPKKLSRKADASLNDFLQSLGLEKYLLSFQAEEVDMTALNHMTDEDLKAMGIPMGPRKKILLALESKG

SEQ ID NO: 179855 - protein, 50 aa, Glycine max
  Clone ID: PAT_MRT3847_133424C.1.pep
FVFSSLIVLHVGHDDAGSDEPVKADVLCSSMFCMDPFHLCLVPQSSCTSQ

SEQ ID NO: 179856 - protein, 63 aa, Glycine max
  Clone ID: PAT_MRT3847_133425C.1.pep
TGVHGRIYSSGDGRPLPGSITVSGINYTVRAGNTFGDYHRILAPRDKYEGILIQFKLFCYSMD

SEQ ID NO: 179857 - protein, 59 aa, Glycine max
  Clone ID: PAT_MRT3847_133426C.1.pep
RRFPSTHLPPPHLEKKCLHYSLSEREYWCIFTLFTIPTLPPVGHRGIFKGPILVRQERG

SEQ ID NO: 179858 - protein, 71 aa, Glycine max
  Clone ID: PAT_MRT3847_133427C.1.pep
TCPLYGTILKEGPKTETSSSPLWDKKPPFNHGGAGAAQKKPREFPWTPLLNGGPRVCAPPDVFTSNFTNPG

SEQ ID NO: 179859 - protein, 55 aa, Glycine max
  Clone ID: PAT_MRT3847_133428C.1.pep
CPIVDGGLESFALDLGKSNAKMFCLEPTSFTVYAEGVAMNASPEFQITQLMTRLT

SEQ ID NO: 179860 - protein, 77 aa, Glycine max
  Clone ID: PAT_MRT3847_133429C.1.pep
RPRGFLPGFPQKMAGPTVLPLIFFPTMFPFPKVGKAPIFCKVGGEKPSGNPFFTFLMTSLGGTPPPPSWWWFPPPLG

SEQ ID NO: 179861 - protein, 281 aa, Glycine max
  Clone ID: PAT_MRT3847_13342C.1.pep
MPLTKSPKQAPPSSGEKSVHVEVSPVSEPDIVSQPTLGCKPPGDDKFTVRERLSPVAETVPVVTTTKSSSQKVLQEKGTLLQNPAQERPDTGHLPPAFDDVIHVIRHSSYRVGSEQPVKESVEMGVQNVDVGKFINVVRDDLEMRNITSPLTPLKSSSCSDAASLKSDISDQPQTKNSNTAQEQDVSNPSPIVSEPDSAELSKCNTPMNEEKPPAAKETLDVKSFRQRAEALEELLELSAELLQQNRLEELQVVLKPFGKDKVSPRETAIWLAKSFKGMMS

SEQ ID NO: 179862 - protein, 80 aa, Glycine max
  unsure (1)..(80): unsure at all Xaa locations
  Clone ID: PAT_MRT3847_133430C.1.pep
SHGSNHRKFNTLFSELDAQYGSLFCDMEVKWLSRGMVLKXFFELLDELDFFMSSKGQSVPQLTSXNWVKDLALLINLQHF

SEQ ID NO: 179863 - protein, 570 aa, Glycine max
  Clone ID: PAT_MRT3847_133431C.1.pep
MAACGYISAANFNHLVGARNLSKFSSSDATISLSFGGSDSMGLSLRPAPIRAPKRNHFSPLRVVCVDYPRPELENTVNFVEAAYLSSTFRASPRPLKPLNIVIAGAGLAGLSTAKYLADAGHKPILLEARDVLGGKVAAWKDKDGDWYETGLHIFFGAYPNVQNLFGELGINDRLQWKEHSMIFAMPNKPGEFSRFDFPDVLPAPLNGIWAILRNNEMLTWPEKVKFAIGLLPAMLGGQPYVEAQDGLSVQEWMKKQGVPERVTDEVFIAMSKALNFINPDELSMQCILIALNRFLQEKHGSKMAFLDGNPPERLCMPIVDHIQSLGGEVHLNSRIQKIELNDDGTVKSFLLNNGKVMEGDAYVFATPVDILKLLLPDNWKGIPYFQRLDKLVGVPVINVHIWFDRKLKNTYDHLLFSRSPLLSVYADMSVTCKEYYSPNQSMLELVFAPAEEWISRSDDDIIQATMTELAKLFPNEISADQSKAKILKYHVVKTPRSVYKTVPNCEPCRPLQRSPLEGFYLAGDYTKQKYLASMEGAVLSGKLCAQAIVQDSELLATRGQKRMAKASVV

SEQ ID NO: 179864 - protein, 31 aa, Glycine max
  Clone ID: PAT_MRT3847_133432C.1.pep
FRSGAGSLAEARERERELGLLLALTVSILVS

SEQ ID NO: 179865 - protein, 335 aa, Glycine max
  Clone ID: PAT_MRT3847_133433C.1.pep
RIFLCDKRLDWKKGKVNPFMSSIRARLSQPMPLNIFPDMEGLPRIILTEATGSSAEVLLYGGQVISWKNHRKEELLFMSSKANKKQHKAIRGGISACLARFGDLSSLEQHGFARNRMWSLDRDPSPLPPLDNQSSVDLILKSTEVDLKTPCSFEFRLRISLNAGKLILIPRVRNTANKAFSFSFTLCNYLSVSDISEVRIEGLETLDYFDNLLNRSRFTEQADALTFDGEMDRVYLHSPTKIAIIDHEKKRTFVLQKKGMPDAVVWNPWGKKAKAIPDLGDDDYKIMMCVNSAAIDTPIILKPSEEWMGYQELSTVSSSYCSGQLDPPKVLYGFH

SEQ ID NO: 179866 - protein, 120 aa, Glycine max
  unsure (1)..(120): unsure at all Xaa locations
  Clone ID: PAT_MRT3847_133434C.1.pep
MPLNIFQDKDGLPRIILTEPKGSSAEVLLYGGQIISWKNHRKEELLFMSSKANKKQHKAIRGGISACLARFGDLSSLEQHGFARNRMWSLDRDPSPVAALDNQSSVDLIXKSTEGDLKTP

SEQ ID NO: 179867 - protein, 115 aa, Glycine max
  Clone ID: PAT_MRT3847_133435C.1.pep
DASPLPPLDRWVGSFSHGPFCGPSGFYRYIVFPIGHWQVWSLQLPCFDGFLTFGGASVVAKAGPVSCVLVFQSPLIRLWFSALPFGSLSIGFLRLSFYGPLPFGAQSVSLWCLER

SEQ ID NO: 179868 - protein, 166 aa, Glycine max
  unsure (1)..(166): unsure at all Xaa locations
  Clone ID: PAT_MRT3847_133436C.1.pep
ASRNRSPVEQRDGSAIASVSSPSSSFNLLXLSESSSGAKSXXKSFXENHDHVDGDGNSAKSDGHVLRHFFDDWPRTLQEPDNGESNGCQNNNSGTCLFMSTPGIPSSDVSLKLSPGHGEDACHAASMGGPLAEALRSSPPSSTFSPTSVLLQLPPSYASEASFISP

SEQ ID NO: 179869 - protein, 82 aa, Glycine max
  Clone ID: PAT_MRT3847_133437C.1.pep
RQFFRSISCVYSLVTLVGPRVSQHVTEREKEWYYGKDKGDKDVMDGWLAELSKYYKRNSAWWHNIHYPVYLRGVLPTTRGPL

SEQ ID NO: 179870 - protein, 150 aa, Glycine max
  unsure (1)..(150): unsure at all Xaa locations
  Clone ID: PAT_MRT3847_133438C.1.pep
MAIAMPESSSSSSSSTTKRQKQEQHIHQQEEQPLIPGLPDHIAQLCLSSINPCLLFSISHSWRRLIYSPSFPPFFSLYAILSHSHSSAVIQFHTFDPISATWRPPXPPHPPXHHLLLRRHPSFLSRNLSVQSVFADNRXFSSSHHPHLSP

SEQ ID NO: 179871 - protein, 46 aa, Glycine max
  Clone ID: PAT_MRT3847_133439C.1.pep
NESKKTHTYVFQSIYKLVLWVESSYTCMRCNGFSFLARLCRQSADF

SEQ ID NO: 179872 - protein, 257 aa, Glycine max
  Clone ID: PAT_MRT3847_13343C.1.pep
HASERNAGFLSPFGYSAATIAAAVDAVCSMEWISYPVAGEDGPAILLVHGFGAFWEHYRDNIHGLAESGNRVWAITILGFGKSEKPNVVYTELLWAELLRDFIVDIVGEPVHLVGNSIGGYLVAIVARVWSDLIKSIVLINSAGNVIPRYSFIPLSTIQDRQTSGASWLGSRILVFYLRLRTQELLKKCYPTRGMKDPISDSNSKVAMLKEHCDGVMIKELDAGHCPHDEVPERVNTIICEWILGVESNNILAECAV

SEQ ID NO: 179873 - protein, 78 aa, Glycine max
  Clone ID: PAT_MRT3847_133440C.1.pep
RDGFHEMGIHKHVLDLGKRIVLHIRQMPAVRSGHAAVSEYKCCEWKKMQPSTVFTAVRSYVPAPTIAPVQVTTFTKPL

SEQ ID NO: 179874 - protein, 117 aa, Glycine max
  Clone ID: PAT_MRT3847_133441C.1.pep
IYIYKKINRKKRKKKSGGQKKFKFGGAPPINKTGGPPPGQNPPPAGKGKWPPLGPRGGGGRGPQQKGRTRESPETPQTESGEIQKGPQKTLQAQKKTAPQKRQETRGRGPPPPRGGP

SEQ ID NO: 179875 - protein, 73 aa, Glycine max
  unsure (1)..(73): unsure at all Xaa locations
  Clone ID: PAT_MRT3847_133442C.1.pep
PAHTLATTTELAVPSYLMHLTFQSRYDPAXYAPQPNFDHLRRQNLLSSAGSVAVFHGIYVLILPFPPNFQLQL

SEQ ID NO: 179876 - protein, 47 aa, Glycine max
  Clone ID: PAT_MRT3847_133443C.1.pep
SRISLPTRAVNRRNGGRNKHKRDHVKFILCSHIRQCFPKDNAINKFL

SEQ ID NO: 179877 - protein, 51 aa, Glycine max
  Clone ID: PAT_MRT3847_133444C.1.pep
LRHTEPRSLYCQLRMNATIPAQNLQCYFSSQLHSYINWNYNERGPSLHNFY

SEQ ID NO: 179878 - protein, 90 aa, Glycine max
  unsure (1)..(90): unsure at all Xaa locations
  Clone ID: PAT_MRT3847_133445C.1.pep
PTGYDLYKHQRGNRASKDDHFCLMXLDQQKPQDVIYECLGSMWKITLVVLIQLEEDFEASKRPFIWVIREGNQLMELDKWIKEEGFEVRT

SEQ ID NO: 179879 - protein, 98 aa, Glycine max
  Clone ID: PAT_MRT3847_133446C.1.pep
RAQKKLVSCPGCMSIDKAVFVRHFNGPTQFLNHLAPELGFELGGTKPPHACRLKKWGLGNPPHPFFLSTTGFGAFKNKQKNKKHFINVTHSGNQLILT

SEQ ID NO: 179880 - protein, 110 aa, Glycine max
  unsure (1)..(110): unsure at all Xaa locations
  Clone ID: PAT_MRT3847_133447C.1.pep
DPGTSATLSIGEACWGLHKKLAQRKHSTCGNWLMAYGKCXRGLGTLDERWGAGWMNIGTKGGEDLEREDDXDEMEEVGEKDAAAEGDEMTLXETGELFREDYLAEVGGGI

SEQ ID NO: 179881 - protein, 110 aa, Glycine max
  Clone ID: PAT_MRT3847_133448C.1.pep
SQNNKLSVAFTTQGFPSKPNKKWGVLKVKSPPFIEKMERIPLFKGVFLLGLEKFPKKSGRQFLARGFFPFRPAIFVLVSVPVFLGVCVPPLLPGRVSELPVPVKRGLFNY

SEQ ID NO: 179882 - protein, 97 aa, Glycine max
  unsure (1)..(97): unsure at all Xaa locations
  Clone ID: PAT_MRT3847_133449C.1.pep
AWVGPSFLGQVHKHEQCWLHMTEQDYXSGKGLLKEDFVKKSPGWVERIXLVVKGKQKGEIQALSTFGLQNRREVLLPLEGQQKDWLSPGSNVVISKD

SEQ ID NO: 179883 - protein, 39 aa, Glycine max
  Clone ID: PAT_MRT3847_13344C.1.pep
YGQKFLHVYMIRPNYNQIQYYSMTITQHNSHRFVLRTTD

SEQ ID NO: 179884 - protein, 40 aa, Glycine max
  Clone ID: PAT_MRT3847_133450C.1.pep
ECQWHLPCYLDCSSEENENLLFHHSVSSYLDQQTPVCPLL

SEQ ID NO: 179885 - protein, 34 aa, Glycine max
  Clone ID: PAT_MRT3847_133451C.1.pep
RVLERATHDHHWHEDAHQQQKEGVIIESFTVCDP

SEQ ID NO: 179886 - protein, 61 aa, Glycine max
  Clone ID: PAT_MRT3847_133452C.1.pep
MIAEIKFAVGPATLPENVLLRAQFELYSGYRTEICFLEMSHRGRQLFYIFQIRRIGFPSPA

SEQ ID NO: 179887 - protein, 41 aa, Glycine max
  Clone ID: PAT_MRT3847_133453C.1.pep
SGTIQPMNVKRAEAKKALLSNHRPNYTNKHHIRRLELSHQS

SEQ ID NO: 179888 - protein, 201 aa, Glycine max
  unsure (1)..(201): unsure at all Xaa locations
  Clone ID: PAT_MRT3847_133454C.1.pep
MHVIKRDGRQERVMFDKITSRIQKLCYGLNMDFVDPAQITMKVIQGLYSGVTTVELDTLAAETAATLTTKHPDYAILAARIAVSNLHKETKKVFSDVMEDLYNYINPHNGRHSPMVASSTLDIVMANKDRLNSAIIYDRDFSYNYFGXKTLERSYLLKINGKVAERXQHMLMRVSVGIHXEDIDAAIETYNLLSEKWXTHA

SEQ ID NO: 179889 - protein, 175 aa, Glycine max
  Clone ID: PAT_MRT3847_133455C.1.pep
MSRCFPFPPPGYRARGDALIESIKLREEMEKAEKDRKEKREKKREKKEKKMEKKEKKKEKKEKKERRKEEKEIKLKEGTATTSHGTDDGKKFKLISKLKETKADGKLQKGEDCENEQLERSGITEEFDQPVTSVEPCCLSDSTQSSKRKRSSPQLTHDHGPAIKIRLPLRKHREP

SEQ ID NO: 179890 - protein, 48 aa, Glycine max
  Clone ID: PAT_MRT3847_133456C.1.pep
ACLYTVTKQLPAGEYRQRTETCRRSRRSKLTSSYMRTDRCPILTTKSK

SEQ ID NO: 179891 - protein, 77 aa, Glycine max
  Clone ID: PAT_MRT3847_133457C.1.pep
SLSSNMHGNASQNGRTRYSEQIKIDTETFGDFVRHHGGRRGRGPGRVGRTRGGYYGRVGGYGYNGRGRGRGMSSQNL

SEQ ID NO: 179892 - protein, 93 aa, Glycine max
  Clone ID: PAT_MRT3847_133458C.1.pep
VKLIDNIENTNPSNSKERVCSYSINIVVRSNKQTSQFILHSNIFHKAKSMHGNIKKLAYPDILCENPFLPVITKIKLKKKKRNSLIVGLMTRF

SEQ ID NO: 179893 - protein, 73 aa, Glycine max
  Clone ID: PAT_MRT3847_133459C.1.pep
NDLCLKIFYFKTNFIIKFNIKFFTNCKSYVLNFWLFALIKLNFKDITMFDSIKQPNMIFFSEVKLRFLFTTYQ

SEQ ID NO: 179894 - protein, 126 aa, Glycine max
  unsure (1)..(126): unsure at all Xaa locations
  Clone ID: PAT_MRT3847_13345C.1.pep
RGYLGEIQTRYVAKANKCLAIELYIGGGGGDIGKKITHGGGDGGDDDGDYGPPPHSYVXLYPRGGIYADPYMPTGSYPFNPFAMPSPNGIAEASXNTPGSMEADGKPSEVKGKLPIERSNMKLGSV

SEQ ID NO: 179895 - protein, 149 aa, Glycine max
  Clone ID: PAT_MRT3847_133460C.1.pep
NQIAKKLQITNTTTHYGTKGCVVSFRFHSHVLKFCLCIAGIRIRYGPSGNQTFQSINSYFKLPILIRLRNSFSLIRSGREANRHGFLSDVANLLKDRNPPVPDAAESGVVLVCLQSEVILFWYGILGIHADFRSHWNHRDPLHQYLFQQ

SEQ ID NO: 179896 - protein, 65 aa, Glycine max
  Clone ID: PAT_MRT3847_133461C.1.pep
CARVCSAPARGAATGGLQSRDRGRTPGDKKGSRPRGTDRPRPGARPQQGHPTGEGPAGTTSHRAP

SEQ ID NO: 179897 - protein, 70 aa, Glycine max
  Clone ID: PAT_MRT3847_133462C.1.pep
MGFLVTTLIFVVIGIIACLCTRICCNRGPSTNLFHLTLVITATICCWMMWAIVYLAQMKPLIVPILNEGE

SEQ ID NO: 179898 - protein, 73 aa, Glycine max
  unsure (1)..(73): unsure at all Xaa locations
  Clone ID: PAT_MRT3847_133463C.1.pep
DWNEHFTKGEQCKKLIVGALTASWCGPCHFITPILAXLHKKLPNVTFLNVDVDELDTVYNEWGIDAIPTSLFL

SEQ ID NO: 179899 - protein, 152 aa, Glycine max
  Clone ID: PAT_MRT3847_133464C.1.pep
TRPGREKITWVSWKKNFSPKGHGVKDIIFNIVFLAKWTWYLFNNRGDLWNKVLESKYFGWMGLGEGGARSLGVHLVERFEISMWGRQDKWFGDLIEWRVGDDKNIRFWEDRRVSDLSLQNSFLRIFSNSGKKERWLGIWGSGEMVSGNEIFC

SEQ ID NO: 179900 - protein, 83 aa, Glycine max
  Clone ID: PAT_MRT3847_133465C.1.pep
PFSEKVEGISLPFTKKITPFLPFLLNETGNSPRGLLGPNLTSFYPMILQQNYGTSFLFPLILHQKDKTWAFFSKLGGGDHFPF

SEQ ID NO: 179901 - protein, 90 aa, Glycine max
  Clone ID: PAT_MRT3847_133466C.1.pep
CCGLFGFFGRWPSVFFWSRPVICGPAGVFPLPVVLTSGRFFYFGAPFGGVCKLRSGVGTLVSFLAAPPFFFFFFFFFFFFNIYIFLQTRH

SEQ ID NO: 179902 - protein, 65 aa, Glycine max
  Clone ID: PAT_MRT3847_133467C.1.pep
QDLSTYRNSSWDCTTVLNDSLKRIPRKKKQQTELGTPDSAVYALLLYPQVFLNSDVPAPLSTLTS

SEQ ID NO: 179903 - protein, 48 aa, Glycine max
  Clone ID: PAT_MRT3847_133468C.1.pep
HSFLTSKQKGHMHPPCYHRTLGQLICRSNKITRLWGHEAEKKTRCSKW

SEQ ID NO: 179904 - protein, 44 aa, Glycine max
  Clone ID: PAT_MRT3847_133469C.1.pep
LSTIISMSRISRTFCIPFNNYYRIYRCPFLCLRFQVSRAFLHYN

SEQ ID NO: 179905 - protein, 43 aa, Glycine max
  Clone ID: PAT_MRT3847_13346C.1.pep
KYSSSFNYSRHDGETCINYTHPMYLFQMKTGLAAALQDPNLPT

SEQ ID NO: 179906 - protein, 304 aa, Glycine max
  Clone ID: PAT_MRT3847_133470C.1.pep
MGFTRKPMFPVLLVLFITSLLEPPHVAESTSSDYSTLVYKGCSKEPFTDPNGVYSQALSALFGSLVSQSTKAKFYKTTSGSGQNTITGLFQCRGDLTNSDCYNCVSRLPVLCDKLCGKTTAARVQLLGCYILYEVAGFSQISGMQMLYKTCGATNAAGRGFEERRDTAFSVMENGVVSGHGFYTTSYQSLYRTAPCATRPGDSDCGECVKNAVQRAQVECGSSISGQVFLHKCFISYSYYPNGVPSRSSSSSSASYSSSSSGQNPGKTAAIILGGAVAVAFLVILLLFARSLKKKHDGMSYVRQ

SEQ ID NO: 179907 - protein, 55 aa, Glycine max
  Clone ID: PAT_MRT3847_133471C.1.pep
SSTHDIGRGCRSYIMHNYTIPLNRLITHNQMQCSHRSKHEEGLVPCLNSIIQGFK

SEQ ID NO: 179908 - protein, 70 aa, Glycine max
  unsure (1)..(70): unsure at all Xaa locations
  Clone ID: PAT_MRT3847_133472C.1.pep
NDAILALGPSGTIVRHIFSAGVEAGNPALIXDRDTAACANTPMLGTVADPVTPEHLIVSFHDYAIALSPG

SEQ ID NO: 179909 - protein, 103 aa, Glycine max
  Clone ID: PAT_MRT3847_133473C.1.pep
HEWFMNFVVLLASFVVSNLQSGLRTSYIFTSNVTLRELMKGNGESLCYLLLAFFFINPLEVNFENFHCKKKKFIYKLLRHSAVQKFILQDIFMYRSLHEFLRH

SEQ ID NO: 179910 - protein, 360 aa, Glycine max
  Clone ID: PAT_MRT3847_133474C.1.pep
MNIGYTIRKDEPLAINDESSLIVVVLYEWWERSNRLSVMFIKIKISAGIRGSVDQHEKEEEGIIMEIGESALLTIACGKNKTTSLKIIRRGMRLGHISIERIKRLVKDGVLNTLDFADFKIYVDCIKDIDAHGQKYFITFIDDYSRYINVYLLHNKNETLDAFKVFKAEVENQCGKQINIVRSDRGGEYYEFDYNIGVENDPETFDQAMSCKESNLWYDVMRDEMNSMLCNKVGNLVEFPNGTKHFDLELQKMDVKTTFLNGDLEEKVYMKQPEGLSSSSDDSLLVANDKGLLHEVKQFLSKNFDMKDIGDASYVIGIKIHRDRPLVVGSLMYAQVCTRLDIAFVVGMLGRYQSNSGIDH

SEQ ID NO: 179911 - protein, 149 aa, Glycine max
  unsure (1)..(149): unsure at all Xaa locations
  Clone ID: PAT_MRT3847_133475C.1.pep
MDQQDEEAILTKPSNSLTFPSLTHSACLEIRLFYVRISPCLVDTLPEHLTLCHPRRHAAVSLVVNAAPVPASDPATLPLRRGRVDRHAAEVTYVATDTVSLSGSADFEVYENDKLFLCGSLERLDADXRAGSPSAHTCGWDIDCHVALG

SEQ ID NO: 179912 - protein, 55 aa, Glycine max
  Clone ID: PAT_MRT3847_133476C.1.pep
LASFKFSVRYTSLLLNISFLLFIQSLLHDAGSSFAFPFPPFIKPYSHCSSNTLLF

SEQ ID NO: 179913 - protein, 45 aa, Glycine max
  unsure (1)..(45): unsure at all Xaa locations
  Clone ID: PAT_MRT3847_133477C.1.pep
XGSDKKNLCYKILCVRDVXKGCQRYKNIMNMVIKWWRRIGRRDFY

SEQ ID NO: 179914 - protein, 46 aa, Glycine max
  Clone ID: PAT_MRT3847_133478C.1.pep
TRQPKPRPEFELLAWLVATHIQVSGLGWVLLEFYCELGELHLINVL

SEQ ID NO: 179915 - protein, 101 aa, Glycine max
  Clone ID: PAT_MRT3847_133479C.1.pep
GGVAIRCESKRKTATVRKSGISWVGSDKTYSSSGIHSPYLHFFLPFPSIQMTFNCHNRRDSGHFEAWGTRGMSLGEHASPLIYMGLDNHCGTRAQINCCLS

SEQ ID NO: 179916 - protein, 96 aa, Glycine max
  Clone ID: PAT_MRT3847_13347C.1.pep
GMGDLPLHISPSYSSPNLPHIHASGSTFIKTQIPTLSFPISQFNQFKPYTLSYDSNILYESSNFFVYCITHNTSRDFQCSDFHGCAFFLLQPLIHH

SEQ ID NO: 179917 - protein, 53 aa, Glycine max
  Clone ID: PAT_MRT3847_133480C.1.pep
PFLPETKLHQICPQDSLNGDPISLIKISPSFKGLLGNINRLRGYLPPPKITLR

SEQ ID NO: 179918 - protein, 81 aa, Glycine max
  unsure (1)..(81): unsure at all Xaa locations
  Clone ID: PAT_MRT3847_133481C.1.pep
TTKKLAGTSWQASKSANALHTISNKKTVPQAKVEEKRGCKDSLVKQKSFAKLSHGLIAGLEMKEITKMDDGSGKDLLRRTX

SEQ ID NO: 179919 - protein, 93 aa, Glycine max
  Clone ID: PAT_MRT3847_133482C.1.pep
EVRVLMGGQNSKEESWRQSSSVRSSSSSWSAYLDPLSSYGFNEPQPSYSSYGYEAYGGDGMVRYDSTKLERRYSRISDHYRSIDQVSEALALA

SEQ ID NO: 179920 - protein, 140 aa, Glycine max
  unsure (1)..(140): unsure at all Xaa locations
  Clone ID: PAT_MRT3847_133483C.1.pep
RAVSLYLSFRGRARGDIYTICSXDRELWNPACTKAMTMSFNTKPXSDAWSEECLKRTGFDWDIIWVTGWTATPMQDVQVTTDRFIASDECVPRTYCVVNAQNTLVPNRWRGQATVPQGTYASVXRRPVSIGGGAGAQNAI

SEQ ID NO: 179921 - protein, 47 aa, Glycine max
  Clone ID: PAT_MRT3847_133484C.1.pep
AEKITTEVIGSIYIKIKMICSMTIDFVYFNCSFISESSHESIYINRC

SEQ ID NO: 179922 - protein, 153 aa, Glycine max
  Clone ID: PAT_MRT3847_133485C.1.pep
MATRGKLEVDIDLKSNADKYWQTLRNSTEIFPKAFPHDYKSIEVLEGDGKSPGSIRHISYGEGSPLVKSSFEKIEAVDEEKKVVSYTIIDGELLQHYKTFKGDISVTPIGDGCEVKWSAVYEKVSHDISDPTLVKDFAVKNFLEVDAYVQANA

SEQ ID NO: 179923 - protein, 32 aa, Glycine max
  Clone ID: PAT_MRT3847_133486C.1.pep
PFIEGICHQWSAVLKVKLNINVLGCYETVLSS

SEQ ID NO: 179924 - protein, 36 aa, Glycine max
  Clone ID: PAT_MRT3847_133487C.1.pep
TPSGVAPTPNRNSPHPFSLVLALTTPPKTFSCFELS

SEQ ID NO: 179925 - protein, 107 aa, Glycine max
  Clone ID: PAT_MRT3847_133488C.1.pep
ISSSINLVINFLRPSMGYYYCKPRPCDTRTPNVVLILAVALLLLCAPKLFSGEAEEEEETNNTSPFVVPIIVVLILLLLSFLGGSSRRRVCVKPPYCQCTYACYCYR

SEQ ID NO: 179926 - protein, 89 aa, Glycine max
  unsure (1)..(89): unsure at all Xaa locations
  Clone ID: PAT_MRT3847_133489C.1.pep
HPIKETSTNICTSAKASMDNTKATVQDNAXRMTSLYPLQNYLPTQNKYAYINHSYHYKHSTRHHNTVTKQSTTTAXHILHCHHTTITLT

SEQ ID NO: 179927 - protein, 209 aa, Glycine max
  Clone ID: PAT_MRT3847_13348C.1.pep
KEAMESERESFDLSGPLHLTYVLWDNAYHRMSVAASLVQGVYILERDRQEKREGQNALAPPWWTFFHFKLLRPLVDDVDSSIFGAIYEFRPPSSQYNDTLYRSPHYVIAFRGTLTKSHSVSRDIELDIHFIKQGLHQTSRSEIAIQAVQNTVATVGDSNVWLAGHSLGSAMAMLTGKTMAKNGMFIESFLFNPPFVSAPIERLRMNLKD

SEQ ID NO: 179928 - protein, 160 aa, Glycine max
  Clone ID: PAT_MRT3847_133490C.1.pep
SFNHTSPCAGGPQADSTTCCGHLSTYHYGTKLYYAHWLYGGGVDGGGDGGGIGIGIGHSIANGVPFPRFVTQYPFIHLAGVTFSSFILYFFKVFFHVPLFPCLTLQSLLLPTYGAKFSLLTSVIFVSLSCAHSPLTGLVWPVPILVLPPPPPPKKEDVIQ

SEQ ID NO: 179929 - protein, 150 aa, Glycine max
  unsure (1)..(150): unsure at all Xaa locations
  Clone ID: PAT_MRT3847_133491C.1.pep
TTDILITNDQPPSRYYITAHTYQSAQNATFDNTSTTSRLEYKXPSHHSKHSDHDTKRVKNRTKPIIPALPTYNDTSAGATCSKSFRSPRKVEXPTEINQSLFFTRSVEIKKCAGNFXPERCQGPRNETKFTTNMNNVWVVRPSKRSILQT

SEQ ID NO: 179930 - protein, 69 aa, Glycine max
  Clone ID: PAT_MRT3847_133492C.1.pep
EYGARGTSRFTAMTLMLLVLKKTLCSGRVESVADDVLMTMIITLATFFCVDAVIKTLRKKTCTFYLECI

SEQ ID NO: 179931 - protein, 71 aa, Glycine max
  Clone ID: PAT_MRT3847_133493C.1.pep
SKRMVRTSSDYEKRTKLEWNKGIFTELDSFFNQSLPELKYKEDEPAKCNRSLFPRNIKSPSSPSPKSIFRI

SEQ ID NO: 179932 - protein, 97 aa, Glycine max
  Clone ID: PAT_MRT3847_133494C.1.pep
HVIIGQISIPPDKRMGTFMGFHAVVIHGRIRSLKLQDLISYGAGIKRRIKHCQRDSRCLPELIHDRCILFAHLILIRSRFSKHSPYLQRASVCTVKF

SEQ ID NO: 179933 - protein, 129 aa, Glycine max
  Clone ID: PAT_MRT3847_133495C.1.pep
NAMWQINLRSSETMESEPYPEHPGEPDCSYYIRTGLCRFGATCRFNHPPNRKLLPDSFFFENYQAIAAARMKGEFPERIGQPECQYYLKTGTCKFGATCRFHHPRDKAGIAGRVAMNILGYPLRPNEPE

SEQ ID NO: 179934 - protein, 110 aa, Glycine max
  unsure (1)..(110): unsure at all Xaa locations
  Clone ID: PAT_MRT3847_133496C.1.pep
PPGPTPPASLDGEKMTLRGGSSXEEAHNTVIVGLEKRVPTLEGIECAKDENLTRRKILDKRKTRWFTVLPMEXMLRPRHKYINEKRLMMNKRYKLKMXGAYNPYSMEGTG

SEQ ID NO: 179935 - protein, 94 aa, Glycine max
  unsure (1)..(94): unsure at all Xaa locations
  Clone ID: PAT_MRT3847_133497C.1.pep
PPSDMAXAYSDPVRSPYYNIALNEIHXAGKRLPLKANVFDGKHGTVLDSGPTYAYLXEAAFLAFKDAIVKELQSXKXISGXDPXYNDICSPXAG

SEQ ID NO: 179936 - protein, 36 aa, Glycine max
  Clone ID: PAT_MRT3847_133498C.1.pep
RERPQAAVGTEHRSMSSEIDIELEDMSVSDGILHIA

SEQ ID NO: 179937 - protein, 37 aa, Glycine max
  Clone ID: PAT_MRT3847_133499C.1.pep
RNFKAFVGKERIIVIFVLKILINLNLNMSTSSDKLGF

SEQ ID NO: 179938 - protein, 61 aa, Glycine max
  Clone ID: PAT_MRT3847_13349C.1.pep
IAFSSSKLNSYCQTCHLFDLTEYHYAGQLIAFQLLTDTEYRSIFSPFSQFLKLPLEGSHGI

SEQ ID NO: 179939 - protein, 54 aa, Glycine max
  Clone ID: PAT_MRT3847_1334C.1.pep
RAKRILILGETPIAGLINKKFFLNRSNSDFYPPLNSSAPVGLEVEVFCGPFTNL

SEQ ID NO: 179940 - protein, 111 aa, Glycine max
  Clone ID: PAT_MRT3847_133500C.1.pep
KPTLRIFGPSSIKGAAEVSLAVGVIPKRKARVERKPGAKMKFPVAFPVVNREIDAPIGTCQEHRSLYKRIACFRPIFQSISSGVWEPMLLGEENKKYSLLRGLVARLIIPV

SEQ ID NO: 179941 - protein, 77 aa, Glycine max
  Clone ID: PAT_MRT3847_133501C.1.pep
PRAPKENNLKPFVGGGDHFENFEFGAFQVFKGGKEGENFPFFPNQANIGDLNFHPNPPFSFFVNQKSPIFFFCFKGI

SEQ ID NO: 179942 - protein, 77 aa, Glycine max
  Clone ID: PAT_MRT3847_133502C.1.pep
RWGRWSIVSVEQNPMLYQSTLKAMNCNARYQGQSQTVKAAPMLREANEYESATAKIAPTRAVPCTRRALIQDGSVWE

SEQ ID NO: 179943 - protein, 84 aa, Glycine max
  unsure (1)..(84): unsure at all Xaa locations
  Clone ID: PAT_MRT3847_133503C.1.pep
XDGYXXHXIAPEQGYRRXXEGXLGYFRXPAEASVXXXNFXXXELXRKSIAXTKELXXVXTFQAELAAXXNXALERFREXXXKTT

SEQ ID NO: 179944 - protein, 69 aa, Glycine max
  Clone ID: PAT_MRT3847_133504C.1.pep
CIDHHHLDPVAQGASPHCSTSMPTTTIATLLNRSYCLCPGQALHSAAYDALLSSECTFVSSNSAPKPEP

SEQ ID NO: 179945 - protein, 116 aa, Glycine max
  unsure (1)..(116): unsure at all Xaa locations
  Clone ID: PAT_MRT3847_133505C.1.pep
RCXCCXSIDPSALSPVKPCISTYLXGXXWLVHAIXFVSVPPTMSHLSPYXEPPFTRSLXXPQSPLSPPXXPGVAHSANFVPRPSPEIYFRMVYFDGSLSSXKHPMLFFHALILNXS

SEQ ID NO: 179946 - protein, 152 aa, Glycine max
  unsure (1)..(152): unsure at all Xaa locations
  Clone ID: PAT_MRT3847_133506C.1.pep
PATQQSAKHPPPRPAPPEAPRKPQTARTKQTARKPTGGKAPRKQPATKAARKPAPATGGAKKPHRPRPGTAAPRETRNHQKSTERPTRKPPTQXKDRETAQDPKTDQRPQSSAETAPQEAAEAHPGGHPEDTNPSATHANTGTKRPKDQQPA

SEQ ID NO: 179947 - protein, 52 aa, Glycine max
  Clone ID: PAT_MRT3847_133507C.1.pep
YPFFLSSFRTAARRRQKGISDVFISSGHTPRRKASINLFYFNLGLDCVKPKL

SEQ ID NO: 179948 - protein, 273 aa, Glycine max
  Clone ID: PAT_MRT3847_133508C.1.pep
IRLELEPNRLEERPTEEFTDIGGLEKQIEELREAIVLPIAHKDKFKSLGIRPPKGVLMHGPPGVGKTMMARACAAQTSATFLKLAGPQLVQMFIGDGAKIIRDAFALAKEKAPAVIFIDELDAIGTKRFDSDTSGDREVQRTMLELLNQLDGFSSAEDIKIIAATNRPDILDPALLRSGRLDRKIEFPLPNEEARSQIMKIHSRKMNVSKKDVNFQELARSTDEFNGAQLKAVCVEAGMSALRRGATFLTHEDFLEGIAQVQAKKKNELDYFA

SEQ ID NO: 179949 - protein, 71 aa, Glycine max
  Clone ID: PAT_MRT3847_133509C.1.pep
NYRSLNTHNSTQSQPIVVAINSKSYLFFYICIPSKPKTPEYASKDSRTIRQSELFTPNSKKCRHPHVKLNS

SEQ ID NO: 179950 - protein, 65 aa, Glycine max
  Clone ID: PAT_MRT3847_13350C.1.pep
MKNHRHDSGSEKQLNYQETHSKITLKQNGGRDPKNVTKKVWTQKLSSVPEKTGSPLSYCTQKSSN

SEQ ID NO: 179951 - protein, 42 aa, Glycine max
  Clone ID: PAT_MRT3847_133510C.1.pep
RFSFLTVKNHVFYIFLMYEFNAASIYKMDIIKNITYENLNLF

SEQ ID NO: 179952 - protein, 51 aa, Glycine max
  Clone ID: PAT_MRT3847_133511C.1.pep
YHSTLFILPPSKRFTHHSLLPNPESPFKYILDPTVYIPDSLALPLFSIFWL

SEQ ID NO: 179953 - protein, 122 aa, Glycine max
  Clone ID: PAT_MRT3847_133512C.1.pep
MEVEVPISLDLNNQLQPETVVSVQNGDPGVSSSVANAVNPQQPATKKPTRQWAAWTRQEEESFFTALRQVGKNFEKITSRVQSKNKDQVRHYYYRLVRRMNKLLGPGLCLDAKNSKDTNAAM

SEQ ID NO: 179954 - protein, 72 aa, Glycine max
  unsure (1)..(72): unsure at all Xaa locations
  Clone ID: PAT_MRT3847_133513C.1.pep
AKPQHXVQNLDLGCKFSTLPLEERTETIWGIHFYLEGSSQIKGASFTLGYKCASKEKKESQPIKDWRKEEKK

SEQ ID NO: 179955 - protein, 41 aa, Glycine max
  Clone ID: PAT_MRT3847_133514C.1.pep
IFKHNLFFCPVVYIVTQRIFVFVICMHPLKGQLPCIKVVWF

SEQ ID NO: 179956 - protein, 407 aa, Glycine max
  Clone ID: PAT_MRT3847_133515C.1.pep
MAQYFFLFVLVFASQLMAGFNAPLPLPSPSYGNHTTILSIDGGGIRGIIPATVLEYLDKALKAKDPTTSLAHYFDVISGTSTGGLMTAMLAAPNSSNANSPLFTPSEVVQFYKNYGPKIFEPRAWYDLDKCPKFNGEFLHDITRQILKETRLNKTLTNVVIPTFDERKTKPVIFSNYKLKTETYLNAKLSDICIGTSAAPTYLPPHQFQNDGVQFDLVDGAMSANNPALVAVSEVIQHNEHKEILLLSLGTGTIKAEEKLSGIFDGLCQLEWLVSSTNVFSEALYSTNMIHYYLATVFPGVLPADNYLRIEEYNLDPSMEEMDNADKKNMDNLVKVGKNLLLQKALRMNVNTFVPVELDQTNAEALDRLSEKLYAERQLRLKRKSMEKGGSRIIESVKVPSGRMHAT

SEQ ID NO: 179957 - protein, 112 aa, Glycine max
  Clone ID: PAT_MRT3847_133516C.1.pep
NCSLISINVDELMDFYCCICLLLFVYLKCRVESTHWDLKKVLQNSLGDLCSVWDAMNNMMTLQHNKIRASFETSTHVVRHVFKKTLYKRLLGMVSRYALNHIATEFERVRTR

SEQ ID NO: 179958 - protein, 39 aa, Glycine max
  Clone ID: PAT_MRT3847_133517C.1.pep
FGQLWSLVRTPEGYLHHSSAKYANSTLWQSVLLLSQLEL

SEQ ID NO: 179959 - protein, 50 aa, Glycine max
  Clone ID: PAT_MRT3847_133518C.1.pep
TSRNRLELYFILSEELTNCANVIHTLIMGAKINVLWIICTLITGGPNLEI

SEQ ID NO: 179960 - protein, 190 aa, Glycine max
  Clone ID: PAT_MRT3847_133519C.1.pep
IRNIRDGIHNIYTIILLYISQCGNLYKIVLLTWKVILGSGICCFDAEWPFFIAFMHGTVQKEDISPGITISRWIYEELPADFKDRLQTVYFVHPGFRSRLVIATLGRFFLSGGLYWKIKYVSRLQYLWDDIKKGEIEIPDFVKSHDDILENRPLTDYGIEPDPFHLTGMPSTTYSFGKYEERWAGRNYVS

SEQ ID NO: 179961 - protein, 49 aa, Glycine max
  Clone ID: PAT_MRT3847_13351C.1.pep
SYSLMYVKSMLLFPFQILINKLPFVSLGWMQLKGFHDIFYSSFKKVKYC

SEQ ID NO: 179962 - protein, 59 aa, Glycine max
  Clone ID: PAT_MRT3847_133520C.1.pep
MTCTDVHHLMHDVFLNKSIREIILFVCLKKKKKKKKKKKKKKKKKKKKKKKKKKKKKKK

SEQ ID NO: 179963 - protein, 62 aa, Glycine max
  Clone ID: PAT_MRT3847_133521C.1.pep
NLTITHKLISCSQNDFLFSLSSLPVFLSLKISKHAKASRIAQNPSPFMILGLNRWPCWCLCA

SEQ ID NO: 179964 - protein, 91 aa, Glycine max
  Clone ID: PAT_MRT3847_133522C.1.pep
VAGDSKNDPPMEAAGFTAQVIILNHPGQISAGYAPVLDCHTAHIACKFAELKEKIDRRSGKKLEDGPKFLKSGDAAIVDMVPGKPMCVESF

SEQ ID NO: 179965 - protein, 55 aa, Glycine max
  Clone ID: PAT_MRT3847_133523C.1.pep
LDQAIHHQGFVDTFSAFGNILSLQIATDASGGSKCHCFLQFEREKSAQNAIDKVN

SEQ ID NO: 179966 - protein, 66 aa, Glycine max
  Clone ID: PAT_MRT3847_133524C.1.pep
HFRAARPLIAMAISTSPESGELPCTTEQTIQYNRVRVLSVLAMARLDCSLFNTAAPTRCASWFTQL

SEQ ID NO: 179967 - protein, 98 aa, Glycine max
  Clone ID: PAT_MRT3847_133525C.1.pep
RLTSQQILRLNHYKTSSSLVILSHCYFFKTTTPTTLFIITHTITYFTLSTTASNPSSTSFSQEKGQLIPFQTPFLISRMPLPFNNKSNNNPIALIDNY

SEQ ID NO: 179968 - protein, 58 aa, Glycine max
  unsure (1)..(58): unsure at all Xaa locations
  Clone ID: PAT_MRT3847_133526C.1.pep
MXMXVLVFXVATIXVAXXCHAYDMFPLRMNTXYGAXTPXVKCASXRLXVEAXNXFGFE

SEQ ID NO: 179969 - protein, 97 aa, Glycine max
  Clone ID: PAT_MRT3847_133527C.1.pep
ITFSLYFGVIFLLNCCFRTDVQAYPGGPFFNPLGFGKDEKSLKNLKLKEVKNGRLAMLAILGYFVQALVTGVGPYQNLLDHLADPVHNNILTSLKFP

SEQ ID NO: 179970 - protein, 78 aa, Glycine max
  Clone ID: PAT_MRT3847_133528C.1.pep
IQNQPLGIAWNQIPKKIKKMNFQIKMFIKKSLPRIRNSLYCPSLIFPPNLKKLRKRWIFPGGGKCPFLQLFFPPKKKV

SEQ ID NO: 179971 - protein, 82 aa, Glycine max
  Clone ID: PAT_MRT3847_133529C.1.pep
PPIIFSLLKSLKIRLHGENSKPALLRYIEDCETRYNLTLASSLTYPCSYAFYKNSFYLAVSLISTGSLYRRRVSPIASPRSN

SEQ ID NO: 179972 - protein, 175 aa, Glycine max
  Clone ID: PAT_MRT3847_13352C.1.pep
HEGLSFFFFRSNFVGTTHRHADDLHSLSATHPFCCVFVVSDHSSLVKLRRPHLAPLPVAIARSVVRSSPFLSIIFLIFFPDLRLAPPRSEIRSSLGVLLFRLVLVGNSIDVVTARSRPAPRCRLHTIASGTAFPLFVVEVFGCLWVLAAEASVVVGWGVCLYSVGVDAFLGGKQR

SEQ ID NO: 179973 - protein, 123 aa, Glycine max
  unsure (1)..(123): unsure at all Xaa locations
  Clone ID: PAT_MRT3847_133530C.1.pep
PAEKKPKAKKKLPKEGRAGGERGKKKKKNKKSVETYKIYICKVLKQVHPNINISSKAMGIINSFINNIFEXLTQESCRLAHYNKXPTITSKEIQTTIKLMLPGKLTKHXMSKDTETITKWTSS

SEQ ID NO: 179974 - protein, 87 aa, Glycine max
  Clone ID: PAT_MRT3847_133531C.1.pep
VQALKSIAAMTPSCISVFLTSSFISIRDKVPVILQLGNKSPLSSQLCRVLPRCYAQVCTYRHSKCENYQKLGTCIAESRSCNPPCSF

SEQ ID NO: 179975 - protein, 64 aa, Glycine max
  Clone ID: PAT_MRT3847_133532C.1.pep
FNFYKTWQPTSLNIYDIITFRRYKVGLMVKKGLNGGGRGCRFKFLPPYSYKTNKLIFADKKKTT

SEQ ID NO: 179976 - protein, 135 aa, Glycine max
  unsure (1)..(135): unsure at all Xaa locations
  Clone ID: PAT_MRT3847_133533C.1.pep
MRVFRAQLSLHLLLSMKLVRFLMKLTNQTVXIEFKNGTIVHGTITDVDISMNTHLKTVXLTXLKGKNPVTLXDHLSVRGXNIRYXYILPDXLNLETLLVEEXSPKIKPKKPTAGKLLGSGRRSGRGRKRVRGGGR

SEQ ID NO: 179977 - protein, 61 aa, Glycine max
  unsure (1)..(61): unsure at all Xaa locations
  Clone ID: PAT_MRT3847_133534C.1.pep
RILEAHRTRDRNGLFMQESVVXXXTLPWRVLFHSIVHTSYYNQLFVPEHLLTSETSNLQWE

SEQ ID NO: 179978 - protein, 79 aa, Glycine max
  Clone ID: PAT_MRT3847_133535C.1.pep
FKTWFRKISGLGFFFRPWHGGPNWAFCPDNFAPGPLTNYGPFIFPPPPPPPPPPPPPPPPPPPKTGGRHTVMTGNLPWN

SEQ ID NO: 179979 - protein, 135 aa, Glycine max
  unsure (1)..(135): unsure at all Xaa locations
  Clone ID: PAT_MRT3847_133536C.1.pep
GCVFGATLTSISNVGAYGLNPAISSSLLLGTIAQSISQHTVWTQMVTVRTPLNFDSSKHTFCEFSIDLLRGGILVDKTGDWITLIQNSPIRNLLRVAAWTKGXLMVKIEMAGNATLQRSDWPXLVQVVLTYSHST

SEQ ID NO: 179980 - protein, 162 aa, Glycine max
  Clone ID: PAT_MRT3847_133537C.1.pep
ICNNKQNSHSKRFSHRFLRIMETSKKKAITMKKSFDPWAFLEHIEAPMWVDLTLEVKSGCVDTGDDEWFNTSHPFHQMSARELKSRFSHGEEILTSGVDSPELPSSVSRSRGKHYNNKKWEGIDLNSLLDKQKGLSRRGFQQGSSFGQEVKPKPNSNVNKPK

SEQ ID NO: 179981 - protein, 53 aa, Glycine max
  Clone ID: PAT_MRT3847_133538C.1.pep
IAYDMRKWSELSLEQYNISSRSSGSSGSRMTSCMNIEELEKGKTSGDSYHDLG

SEQ ID NO: 179982 - protein, 88 aa, Glycine max
  Clone ID: PAT_MRT3847_133539C.1.pep
KTLKIVMSESGRGHHGATAETGRREQFMTENVAGDSSSSLSWRLNVKEFQLPRLSHSHDHHHQHLPSYFTFRDLLRKPKKQRKVAEYY

SEQ ID NO: 179983 - protein, 101 aa, Glycine max
  unsure (1)..(101): unsure at all Xaa locations
  Clone ID: PAT_MRT3847_13353C.1.pep
DXERVXKDXXFXXDXNGVDXKKVDGXVXXLKGXSLRIGXXRVKNXWIGXXXFCEEXXXDGWXRCLXKVKKEXWIXKNKFEKMFRFEXEIVXXGGXXKEMSF

SEQ ID NO: 179984 - protein, 82 aa, Glycine max
  Clone ID: PAT_MRT3847_133540C.1.pep
PNHRGTFFSRVARVQPLLLLPVRLPFSHSLRFGLFWFVFNGVVPSTFPFNLPTAGYTFYQHAPPPPPKEGGRHTVMTGNLPG

SEQ ID NO: 179985 - protein, 155 aa, Glycine max
  unsure (1)..(155): unsure at all Xaa locations
  Clone ID: PAT_MRT3847_133541C.1.pep
CQLGKHVRHTDSHHVNKCVVSPFALVHSYIWGPSRVYSTLGYFYFVTFIDXFFQMYWVFLMKRRSGVFFIFQDFAHEFQNQFVVSIKTLRTNNAHEYLSSQFRSFLTSQGILHETLCAQTPQQNRVAERKNLHLVDPTRTLMLHYNVPHPFWGDA

SEQ ID NO: 179986 - protein, 90 aa, Glycine max
  Clone ID: PAT_MRT3847_133542C.1.pep
LEPCPSVLSSRPNCKPGFVSPCNSKSTIELVKADDRLNYFALGFVPPSSKTDLIGCKTSCSAYCSCLAMFFNSSSGNCFLVDRIGSLYES

SEQ ID NO: 179987 - protein, 73 aa, Glycine max
  unsure (1)..(73): unsure at all Xaa locations
  Clone ID: PAT_MRT3847_133543C.1.pep
RLIYDDPTCLLATVRESLFVHLNLNFLKEIDVCGEDFXXVVXIYXGNIVAVNTCCRSNPPWRCSQFCIRFEIG

SEQ ID NO: 179988 - protein, 82 aa, Glycine max
  unsure (1)..(82): unsure at all Xaa locations
  Clone ID: PAT_MRT3847_133544C.1.pep
RWLQINKKKSNCLXATYFTSSSSRGCWLMDSGCTNHMTHDQEVFRELDKSYVSKVRIDNGDLIILEGKGTVAIENCAGTKLI

SEQ ID NO: 179989 - protein, 93 aa, Glycine max
  Clone ID: PAT_MRT3847_133545C.1.pep
KPCTLCLRYICLLLASSACSTISSSKLNGRHLNNLNALEPDHRDESKGGGTQTWNSQHPEPKCASVTVIKLTLIRSGLHLPSYSPHTRMTIIP

SEQ ID NO: 179990 - protein, 174 aa, Glycine max
  unsure (1)..(174): unsure at all Xaa locations
  Clone ID: PAT_MRT3847_133546C.1.pep
MDFARDGNVVQIITGGGGGGGGGESWSGDQADWATEDEYRFWNNNNSGGDSETTPSNSNYEGRSSEPPSKKSRNSSQEGSSSNRSKAIGKMFFKTKXELRRPPPNWQEIVAAHEEEKAVMIEPPREEFQIPTVGSTTFSGEMMQRSYKGRHXCRSFTRREGCPYGDSCPFLYDE

SEQ ID NO: 179991 - protein, 39 aa, Glycine max
  Clone ID: PAT_MRT3847_133547C.1.pep
YHERHLCPACLYATIRVLGSTACSAVARSTVSVVIVFPM

SEQ ID NO: 179992 - protein, 238 aa, Glycine max
  unsure (1)..(238): unsure at all Xaa locations
  Clone ID: PAT_MRT3847_133548C.1.pep
MAWTHASAHTSVRLREDDRGGTIIPFHSFSMATTQGQVITCKAAVAWEPNKPLSIEDVQVAPPQNGEVRIQILYTALCHTDAYTWSGKDPEGLFPCILGHEAAGIVESVGEGVTAVQPGDHVIPCYQAECGECKFCKSGKTNLCGKVRAATGVGVMLSDRKSRFSVNGKPLYHFMGTSTFSQYTVVHDVSVAKIDPQAPLDKVCLLGCGGSTGXLGAVWNTTKGEXGQLVAFFGLGTV

SEQ ID NO: 179993 - protein, 158 aa, Glycine max
  unsure (1)..(158): unsure at all Xaa locations
  Clone ID: PAT_MRT3847_133549C.1.pep
LILRFLKAFLRRGKGLATPIRKVASLIDLYIAEIAPDPCLKTSKFLALATAIPDSARDSXDALYHVMDMYLAMIHLATXSGAAQKGKKNKTSEQVVLYSSNFDISTDNEKLEAXLQGMQWRVMELEKFCRKMQIQMAKITKSKASGHSYAKSLPKLCS

SEQ ID NO: 179994 - protein, 37 aa, Glycine max
  Clone ID: PAT_MRT3847_13354C.1.pep
ITSHRLDIRSSAVYRPFCGTNSGGSLKRWRRPVLLWN

SEQ ID NO: 179995 - protein, 324 aa, Glycine max
  Clone ID: PAT_MRT3847_133550C.1.pep
MATRNRTIEFRKHRDAVKSVRAPLSSSASASTGPVIEMVTTSLLPPNRSSSYALLSTQEPAPSTSRDAFTVGLPPSWVDDSEEIATNIQRARVKISELTKAHAKALMPSFGDGKEDQRHIETLTQEITSLLRKSEVRLRRLSAAAGSSEDSNVRKNVQRSLATDLQNLSMDLRRKQSAYLKRLQQQQQGYDGIDLEMSFTGSKFGSQNDEFSDVGFSEEQMTKLKRSEQFSEEREREIEQVVKSVHELAQIMKDLSVLVIDQGTIVDRIDYNIQSVSTSVEEGLKQLQKAERTQKKGGMVMCATTLVIMCFVMLVLLILKEILF

SEQ ID NO: 179996 - protein, 42 aa, Glycine max
  Clone ID: PAT_MRT3847_133551C.1.pep
TAARRRQKGKRLEVIFIIHSKRLVLLSHNIGLRNFSSYDDFS

SEQ ID NO: 179997 - protein, 41 aa, Glycine max
  Clone ID: PAT_MRT3847_133552C.1.pep
LDSRGAMDSDRVNPACDTIHNCLRIIAVYLRPIVGNKISHL

SEQ ID NO: 179998 - protein, 52 aa, Glycine max
  Clone ID: PAT_MRT3847_133553C.1.pep
RQGDNERGKLGYGQIVLHLVLRSSSVCRLCIQTIPDFSKATNLIRQGGKARH

SEQ ID NO: 179999 - protein, 234 aa, Glycine max
  Clone ID: PAT_MRT3847_133554C.1.pep
LTQAFSGLPRSTNFIQHSSQLGWKFNKRGKPIIIDPGLYSLNKSEIWWVIKQRSLPTSFKLYTGSAWTILSRSFAEYCIVGWENLPRTLLLYYTNFVSSPEGYFQTVICNSEDYKNTTVNHDLHYITWDNPPKQHPRSLGLKDYRRMVLTSRPFARKFKRNDPVLDKIDRELLKRYHGKFSYGGWCSQGGKHKACSGLRTENYGVLKPGPSSRRLKNLLTKLLSDKFFRKQQCR

SEQ ID NO: 180000 - protein, 39 aa, Glycine max
  Clone ID: PAT_MRT3847_133555C.1.pep
RGLPRSLPFDIQFHHYLSVSPNNLCVVLRRSLEGLGFRF

SEQ ID NO: 180001 - protein, 100 aa, Glycine max
  Clone ID: PAT_MRT3847_133556C.1.pep
LNYYDPHLETGDLNINNQYPISDLTLQLLQMKTALSTKDIHILVPHHKPFNTDAIPNKRTYTISSLYWCETREAHNSKRGYETFVLNSRDPPSNYYAYAS

SEQ ID NO: 180002 - protein, 118 aa, Glycine max
  Clone ID: PAT_MRT3847_133557C.1.pep
ICKDFITVCGPVLVFPLRHWRRVRAMSFQPVPESSAFASSSGSKAVGLCSSNSDSPGRSLCPEVLPPSWLSPDPCRQVSIRPRLGRGPVPASGLTEPDFVGHPPWGPLPARRDARPGA

SEQ ID NO: 180003 - protein, 200 aa, Glycine max
  Clone ID: PAT_MRT3847_133558C.1.pep
AGILAFTKLTPYTAVSAIRPLSIIIGATMVKEGIEDWHRKKRDIEVNNRRVILLKADGNFEYTEWKNLRVGNIVKVEKDEFFPADLLLLSSSYEDGVCYVETMNLDGETNLKLKQGLEVTSSLQEDLNFLKFKATVKCEDPNANLYSFVGSMEFEEKNYALFHQQLILRDFKLCNTYYIFGAVIFTVHDTYGNQNYTDPP

SEQ ID NO: 180004 - protein, 70 aa, Glycine max
  Clone ID: PAT_MRT3847_133559C.1.pep
VFEFTILRGFIKVFFLDIEYLAKFFWVITNFKVPFGARKYLYILRLLSFYLTYVKIISKKYLGTFIRGKI

SEQ ID NO: 180005 - protein, 46 aa, Glycine max
  Clone ID: PAT_MRT3847_13355C.1.pep
VELNEPRDLLKRYLYLESVNAANRNLILVEMLQHDTCYERFWSFTI

SEQ ID NO: 180006 - protein, 30 aa, Glycine max
  Clone ID: PAT_MRT3847_133560C.1.pep
FILNCFVMHIASVELRLYVNLNYAVCNHNY

SEQ ID NO: 180007 - protein, 92 aa, Glycine max
  unsure (1)..(92): unsure at all Xaa locations
  Clone ID: PAT_MRT3847_133561C.1.pep
KGVVFIYRFPDLDSVFNLYELCCACQVFRYLMLCKLNFQPGLALLDNILPFSNLNDWCGILFFSACILFLLWRLPXFLIFSHFLHIIASGIF

SEQ ID NO: 180008 - protein, 189 aa, Glycine max
  unsure (1)..(189): unsure at all Xaa locations
  Clone ID: PAT_MRT3847_133562C.1.pep
GGFDGLYMKMLACGIPTAVHLMWIPFSELNIRQQFLLILRVSRGILSGLWSSGVVTNVRNWIFKNIKDTXDDIMVVIVFPIVEFLVPYPVRIQLGMAWPEEIYQTVDSTWYLKWQSEAELNFRSRQTTTDDDEEVPWFFWFLVRAAIYGFVLFHVLKFTRRRLPSLLGFGPLRRDPNTPKLQRVKYYIS

SEQ ID NO: 180009 - protein, 134 aa, Glycine max
  Clone ID: PAT_MRT3847_133563C.1.pep
MFTQFLIFSLFFTPFIFTAAHDTHDFVRTLYRKMLGLDEKQEKLSHFRFYWHDVVSGRNPSSIEVVPPPLKNSTTSFGSVNMIENPLTLEPQLNSKLVGTAHGFYASTSHSEISLLMAMIFAITDRKYNGSTIA

SEQ ID NO: 180010 - protein, 108 aa, Glycine max
  Clone ID: PAT_MRT3847_133564C.1.pep
HNIATRYRISDMFDTDRSLCRKFKVHVPMGGSIKSRWPIGSPVSVQCRRTSRVLVDVAGSCLGWDWWRRASCLIVTWLLISAHLKLSQRNEMGLRKCEANTRYVGETG

SEQ ID NO: 180011 - protein, 97 aa, Glycine max
  Clone ID: PAT_MRT3847_133565C.1.pep
FLQPHSFFLFFFFSSKKIEIKKGGTSLPQINNPSKNFPLLATLPGLKNKNLNCWDTNPQVPPFTLFSKLKTMPGAWISPPREKKQSLMEIFFPHHDH

SEQ ID NO: 180012 - protein, 75 aa, Glycine max
  Clone ID: PAT_MRT3847_133566C.1.pep
KPTQMSDSFSLPGSFSLVSSIKHFQTKPTKKCQLYINERDHMQSSMAKYLSISHPVHKSICLKFIWCVGPCIPVG

SEQ ID NO: 180013 - protein, 39 aa, Glycine max
  Clone ID: PAT_MRT3847_133567C.1.pep
TRPKVSGGGAQIKVRVTPGLGVGGTEQEGMVKDMGDGTY

SEQ ID NO: 180014 - protein, 81 aa, Glycine max
  unsure (1)..(81): unsure at all Xaa locations
  Clone ID: PAT_MRT3847_133568C.1.pep
LNIHINIFIVISTQPNLTLIPTIKDLIENTLSSHHNKLISLLSTYLSQHKXIFQPHNFINQLDNILFDDQSIFDLKNILFS

SEQ ID NO: 180015 - protein, 245 aa, Glycine max
  unsure (1)..(245): unsure at all Xaa locations
  Clone ID: PAT_MRT3847_133569C.1.pep
MEWTRKKQDGSAAAAGNGSDDFYDGIPRFTDSFSHKSRSVKSRHAVAKVSEVSLRLGRAGIDVSDTLGSSMTNLSAGGFVSGAVTKGNEIGILAFEVANTIVKGFSLMESLSTKNIKHLKEEVLQLEAVQDLVSKDTDELLKIVGADKRDELKVFSDEVIRFGNRSKDPQWHNLDRYFEKVSRELNSQRQSKEEAELLMQQLMTMVQFTAELYHELHALDRFAQDYQHXREEDDNSGXSSSGDGL

SEQ ID NO: 180016 - protein, 64 aa, Glycine max
  Clone ID: PAT_MRT3847_13356C.1.pep
RKGMKHGVGIKGSTFRGSKAKGHVELITPWSVFRRDMQQPQITLVVLKLVVPPLSIDPAKVPSI

SEQ ID NO: 180017 - protein, 209 aa, Glycine max
  unsure (1)..(209): unsure at all Xaa locations
  Clone ID: PAT_MRT3847_133570C.1.pep
HCAFPHGVIGSSRSSQNLFRIVVSLLLILTFLQLAASASASTSTTDSLKAYKKFIKDKCNSTTFPKVCYKSLSPXCSVTLTKPPIPLPREAAKSANSTLTKLSNSKGKLTHGETSVIADCRENIDETWDMLEQSAEGLAHLNGASTADEKFQWDSIKTWMSXAITDEGTCTDEFDEIQVRPSLQENIKTTVYNVSWVTTNALALVNRLY

SEQ ID NO: 180018 - protein, 53 aa, Glycine max
  Clone ID: PAT_MRT3847_133571C.1.pep
VFNKVCRMCYDVSLLSDRFGVTEKNNFRCCFGTHFKSEEINSTNVLKGISGKV

SEQ ID NO: 180019 - protein, 75 aa, Glycine max
  Clone ID: PAT_MRT3847_133572C.1.pep
RVRPTRPNSESNSQISDVILYFGIIDILQDYDISKKIEHAYKSLQVDSASISAVDPKLYSKRFRDFIHRIFVEDK

SEQ ID NO: 180020 - protein, 232 aa, Glycine max
  unsure (1)..(232): unsure at all Xaa locations
  Clone ID: PAT_MRT3847_133573C.1.pep
RVHCVKPVGGKKTQFIVMGNVFCSEYQIHKRFDLKGSSHGQSTDKPREQIDETTTLKDLDLNFVFRLEXSWFQELIWQLGRDCEFLEAKGIMDYSLLIGLHFCDDSSVDEMKSSPRSSHSWALCKHSXSIIEMLTCRGPLIRLGMNMPATAERVCKAGLDHQTTSGSSNSQISDVILYFGIIDILQDYDISKKIEHAYKSLQVDSTSISAVDPKLYSKRFRDFIHRIFVEDK

SEQ ID NO: 180021 - protein, 51 aa, Glycine max
  Clone ID: PAT_MRT3847_133574C.1.pep
MGGFPIKLVGPPSLLNFGCKKNWPRGGRNLIGLRFFCFLLKLCPHRGESFF

SEQ ID NO: 180022 - protein, 63 aa, Glycine max
  Clone ID: PAT_MRT3847_133575C.1.pep
ARGLLADERNVPPSLPEQGQVPVDNGSKTSSSSSSSSDSGSSSSDSDSDSSSASGSDAGSPKT

SEQ ID NO: 180023 - protein, 50 aa, Glycine max
  Clone ID: PAT_MRT3847_133576C.1.pep
KAMVELKILDSHCIHHFWLSVIISITAVTRSLVLFFPCCFSFPCCFPIIQ

SEQ ID NO: 180024 - protein, 65 aa, Glycine max
  unsure (1)..(65): unsure at all Xaa locations
  Clone ID: PAT_MRT3847_133577C.1.pep
GTRTPKXLNCSPXXXYXXXXSXXTXSXGKIQXALXPXRAXMVXXTEXINIXTSENIKXYQXRXHS

SEQ ID NO: 180025 - protein, 200 aa, Glycine max
  unsure (1)..(200): unsure at all Xaa locations
  Clone ID: PAT_MRT3847_133578C.1.pep
FSLKKLTLEGLSNLKCVWSKTPRGIHSFPNLQDVDVNKCRSLATLFPLSLAKNLANLETLTVLRCDKLVEIVGKEDAMELGRTEIFEFPCLWKLYLYKLSLLSCFYPXKHHLECPLLGSLDVSYCPKLKLFTSEFHNGHKEAVTEAPISMVQKQPLLLVDKIVPNLKSLTLKWKNIMLLSDARLPQDLLFKLTLDLSFDN

SEQ ID NO: 180026 - protein, 75 aa, Glycine max
  Clone ID: PAT_MRT3847_133579C.1.pep
LCRWFLRRMFGSVLINKLVVICKMSLTDEAGDFETNGSGLELRALSLLIPLCESNLRFDHLLSPRHILSLSESLS

SEQ ID NO: 180027 - protein, 90 aa, Glycine max
  Clone ID: PAT_MRT3847_13357C.1.pep
PPRDAHVREFSLLFLQWHQPRVIPLRPRLTRSSRANGIEIMDRRRRDTNETCISSAFAIQHRVLLPLRAQIWNSNLMLSGTRSIPPLLSI

SEQ ID NO: 180028 - protein, 75 aa, Glycine max
  Clone ID: PAT_MRT3847_133580C.1.pep
GCHIAICNLQVEPSKLRLENSRIHIRIMIHSLHVFIKKIAILLTHELHCMLSLRNWHVTHQAGGDNLFSKINLII

SEQ ID NO: 180029 - protein, 193 aa, Glycine max
  Clone ID: PAT_MRT3847_133581C.1.pep
ENDADKQRRSTSVIAKLMGLEPLPDSEPGPGPGPVAKLQRSASESRVPRDPPLPLTTQCRFFDPNNFFSAQFTTNVVYENNNNNNAAIESRFVNSRVAADPPKQRLKKSFYDSADFFPEPKHTVSVYGEIERRLRMRGINEPSKDLHTLKHILEALQLKGLLHSNNKPNQSPIVVMKPVRSVNRTGNDYSPRS

SEQ ID NO: 180030 - protein, 68 aa, Glycine max
  Clone ID: PAT_MRT3847_133582C.1.pep
QTPTEIMEVFKFLVYSKDAPQLLFHGATKTTVCDSSNKFIIKFCDQLPPKNKRKIYFMNILIIVLICF

SEQ ID NO: 180031 - protein, 554 aa, Glycine max
  unsure (1)..(554): unsure at all Xaa locations
  Clone ID: PAT_MRT3847_133583C.1.pep
PNQSEPWDTVKKEDDLHSKSTRPQLNSEDPQKGIAYDDDGYGGEDAYDDDDGKTKDFSKLELKPDHTNRPLWACGNGRIFLETFSPLYKHAYDFLIAIAEPVCRPESMHEYNLTPHSLYAAVSVGLETETVINVLNKLSKTKLPKEMIKFIHDSTANYGKVKLVLKKNRYFIESPFPEVLKTLLRDETISRSRIISENVNGDGFTISKAAGEIEGTHDELLNEAEVAAVAEEKEAHSFEIDPXQVENVKQRCLPNALNYPMLEEYDFRNDTVNPDLDMELKPQAQPRPYQEKSLSKMFGNGRARSGIIVLPCGAGKSLVGVSAACRIKKSCLCLATNAVSVDQWAFQFKLWSTIREEQICRFTSDSKERFRGNAGVVATTYNMVAFGGKRSEESEKIIEEIRNREWGLLLMDEVATRLYDYMLPAXILRLFLCIISWHDKQVHVVPAHLCVFSXVISITKSHCKLGLTATLVREDERITDLNFLIGPKLYEANWLDLVKGGFIANVQCAEVWCPMTKEFFAEYLKKENSKKRQALYVMNPNKVRACXEFLIKFH

SEQ ID NO: 180032 - protein, 91 aa, Glycine max
  Clone ID: PAT_MRT3847_133584C.1.pep
HARNFIDYLCFLIYHNHQNSLIIYRSGHHLLSPQHATHPYTFNATLSHFISTFIFMFTLSFSLINYNNLTDNFSYTPSILIFDSITHTLTL

SEQ ID NO: 180033 - protein, 209 aa, Glycine max
  Clone ID: PAT_MRT3847_133585C.1.pep
MMMMMNKFLPLFVFALFFTSLCSVRADNAPAPSPKSSPSPPTAKPPSPATHPAPPAKSPTLSPPSQSPAVSPSGSTPPPATNPPAKSPATQPPSSVPPASSPSNNVSSPPAPSPATPPPTVAPVSSPVGAPPVAEAPTPESSTGIPSSAVPAGSPITLPSTSASPGTAPASSSPESSRGSVGDDSGSSSNFGAPMVLGGVALWVALAMI

SEQ ID NO: 180034 - protein, 123 aa, Glycine max
  unsure (1)..(123): unsure at all Xaa locations
  Clone ID: PAT_MRT3847_133586C.1.pep
MSMATTSPHTALFQNRTNPFTLSSFKPTSIKCATQLHTQAPPLTHSQDRVFNFAAGPATLPENVLLRAQSELYNWRGSGMSVMVQLKGHRSVGGMRASIYNAMPLAXVEKLVAFMKDFQARHA

SEQ ID NO: 180035 - protein, 408 aa, Glycine max
  Clone ID: PAT_MRT3847_133587C.1.pep
MSMATTSPHTALFQNRTNPFTLSSFKPTSIKCATQLHTQAPPLTHSQDRVFNFAAGPATLPENVLLRAQSELYNWRGSGMSVMEMSHRGKEFLSIIQKAESDLRALLQIPPEYSVLFLQGGATSQFAAVPLNLCSSPDSAVDYVVTGSWSDKAAKEAQKYSKPTVIWSGKSEKYTKIPSFHDLELNENSGYLHICANETIHGVEYKDYPVPKSGVLVADMSSNFCSKPVDVSRFGVIYAGAQKNVGPSGVTIVIIRKDLIGNAQGFTPVMFDYKIHDENNSLYNTPPCYGIYMCGLVFEDLLEQGGLGEVERRNKKKAEILYSAIDGSKGFYKCPVEKSVRSLMNVPFTLEKSELEGEFIKEAAKEKMVQLKGHRSVGGMRASIYNAMPLAGVEKLVAFMKDFQARHA

SEQ ID NO: 180036 - protein, 412 aa, Glycine max
  unsure (1)..(412): unsure at all Xaa locations
  Clone ID: PAT_MRT3847_133588C.1.pep
MSMATTSPHTGLFQNRTKPSFPFSSSSFKFKPTSIKCATQLHTQAPPLTHSQDRVFNFAAGPATLPENVLLRAQSELYNWHGSGMSVMEMSHRGKEFLSIIQKAESDLRALLQIPPEYSVLFLQGGATSQFAAVPLNLCSSPDSAVDYVVTGSWSDKAAKEAQKYCKPTVIWSGKPEKYTKIPSFHDLEQNNNSGYLHICANETIHGVEFKDYPVPKSGVLVADMSSNFCSKPVDVSRFGVIYAGAQKNVGPSGVTIVIXKDLIGNAQGFTPVMFDYKIHDENDSLYNTPPCYGIYMCGLVFEDLLEQGGLGEVERKNQKKAEILYSAIDGSKGFYKCPVEKSVRSLMNVPFTLEKSELEGEFIKEAAKEKMVQLKGHRSVGGMRASIYNAMPLAGVEKLVAFMKDFQARHA

SEQ ID NO: 180037 - protein, 36 aa, Glycine max
  unsure (1)..(36): unsure at all Xaa locations
  Clone ID: PAT_MRT3847_133589C.1.pep
KCMXIQLYWKSXLLDINXTXFHPVEXAXXPXRFXHV

SEQ ID NO: 180038 - protein, 298 aa, Glycine max
  unsure (1)..(298): unsure at all Xaa locations
  Clone ID: PAT_MRT3847_13358C.1.pep
STASVQVREDNRRGTKIEPDDPNGYIPERLIGEIEFHEVHFAYPARPNVAIFENFSMKIEAGKSTAMVGQSGSGKSTIIGLIERFYDPLKGMVTIDGMDIKSYNLKSLRKHIALVSQEPTLFGGTIRENIAYGRCESERVDESEIIEAARAANAHDFLSSLKEGYETWCGDKGVQLSGGQKQRIAIARAILKNPKVXLLDEATSALDGPSEKVVQDTLMRVMRGRTGVVVAHRLSTIHNCDVIGVLEKGRVVEIGTHSSLLAKGSCGAYYSLVSLQTRHATTPNNTSCTKAGSTHSIN

SEQ ID NO: 180039 - protein, 38 aa, Glycine max
  Clone ID: PAT_MRT3847_133590C.1.pep
LVRHIRRDSVMDMHHICFKHVKPLVLVIRASPLLSSSR

SEQ ID NO: 180040 - protein, 54 aa, Glycine max
  Clone ID: PAT_MRT3847_133591C.1.pep
ILIVKHFVSKYKLFFINLKYLFIMYNKYLSRVLHKHYNTNNNKFPLKGVTKGNA

SEQ ID NO: 180041 - protein, 59 aa, Glycine max
  Clone ID: PAT_MRT3847_133592C.1.pep
WFQKKKGLLPNPEEEDSSKSTLSIKNCRRWLSSRHLSSENVVSRSSSNVVLLCYDDLRL

SEQ ID NO: 180042 - protein, 57 aa, Glycine max
  Clone ID: PAT_MRT3847_133593C.1.pep
NYTNWQRQWLSLERLQQQAQYWRSALAGTARLVLPTDHARPAQQSFAAAAVPITVDA

SEQ ID NO: 180043 - protein, 57 aa, Glycine max
  unsure (1)..(57): unsure at all Xaa locations
  Clone ID: PAT_MRT3847_133594C.1.pep
SPWWASLGSLRCRCVSLSLAPRVSLCCVLPPCPSXSLLGQVPGSRFKGVPLSLFCAG

SEQ ID NO: 180044 - protein, 80 aa, Glycine max
  Clone ID: PAT_MRT3847_133595C.1.pep
FAPKRPSVSTTTLVQCCCLRLWQATCSCWLLGKVQVRLQLAPCICFQFGCGCHCGYVRLRCSWWLVLGWLGHHSTFMVHV

SEQ ID NO: 180045 - protein, 77 aa, Glycine max
  Clone ID: PAT_MRT3847_133596C.1.pep
KWILLNFLKGLFKGRGHPTPLLNQKNLNFWRKLKFLEFTKINFVILGYTIAKLISKSSSHYLRRALFLGSTTKPRNL

SEQ ID NO: 180046 - protein, 83 aa, Glycine max
  Clone ID: PAT_MRT3847_133597C.1.pep
SGDAMVIPLHSGTEWDLSLQSAKHSSLLTVVPLTASRRVPCRSHWSQILTILHYKTPAIYLPMNSMMDANRETECMRNIPLMP

SEQ ID NO: 180047 - protein, 317 aa, Glycine max
  Clone ID: PAT_MRT3847_133598C.1.pep
MGSEVSKQMERRKTIQTEKKSLSDLKSSGEDYPGSDYRPQDRKNWMSHLDPQKLRINQIVWPGTHDSATNKIGIPLLTRPFAQCQSLSIYRQLSLGTRVLDIRVQEHRRVCHGILLTYGVDLVLNDVKKFLSDTQSEIIILEIRTEFGHEDPPEFDKYLEEQLGEHLIHQDDAVFGKTVAELLPKRVICVWKPRKSSQPKPGSPLWSAGFLKDNWINTDLPSTKFDGNLNHLSEHPPVTSRKYFYRIENTVTPVADNPVLCVKPVTRRIHGYARLFIAQCFAKGFADRLQVFSTDFIDEDFVDACAGLTHARVEGKA

SEQ ID NO: 180048 - protein, 129 aa, Glycine max
  Clone ID: PAT_MRT3847_133599C.1.pep
MQKCGRVHIQFPFYLRNSNKFNHTTDYPTGFGLLCTEKDDTLLELPSVPIKLFVRNIDYKSQQIEIYDPQNCLPSQLLKLGNASISPFQFSKPKGFYDYEKDLYDSRTNVSFFRVIQGHCALFFYLTHR

SEQ ID NO: 180049 - protein, 53 aa, Glycine max
  Clone ID: PAT_MRT3847_13359C.1.pep
RREFQRYNGTFWEKKRLCNNRVVKEEHSGMGMLGIGVAEQEVDEGHTGSNTMS

SEQ ID NO: 180050 - protein, 39 aa, Glycine max
  Clone ID: PAT_MRT3847_1335C.1.pep
LESHDLSHLLFAMYKRIVMFNCTYSTLPAKFPPRDFVFF

SEQ ID NO: 180051 - protein, 78 aa, Glycine max
  Clone ID: PAT_MRT3847_133600C.1.pep
RLREDDRRGITQTREGAEGKAKGVSLRRVTPPAVHMISADTFNASSAESVQDPVIRPTLELRQDDAEMQAQVDAMWEK

SEQ ID NO: 180052 - protein, 87 aa, Glycine max
  Clone ID: PAT_MRT3847_133601C.1.pep
PTFPSISLPQLVFRPPPSGAKFLSTPPHFLKTFFLTNPFSWGGLKQGPSFFFWGLENKTSFGWINKPFKKIFFRPGNLFFRNKKRDF

SEQ ID NO: 180053 - protein, 155 aa, Glycine max
  unsure (1)..(155): unsure at all Xaa locations
  Clone ID: PAT_MRT3847_133602C.1.pep
RVPLYHYSWLNSSSLANASXGDPNYGSTDFIPENALNGSAQPVHKAGGAPGGNPSLYDVLFRVYATVKNTGSIVGEEVPQLYLSRGGPYDPVKELRGFERISIAPNTTARVSFDITRKDIASWNTVEQDWVVQNTTKNVWVGSSSRNLPLSGVLA

SEQ ID NO: 180054 - protein, 67 aa, Glycine max
  Clone ID: PAT_MRT3847_133603C.1.pep
RTRPPTRPICQNGRHGFFPSGFARSDADGEDPFGDSRRIACKRCGGFHVWIHTKKQKSRARWCQVFS

SEQ ID NO: 180055 - protein, 88 aa, Glycine max
  Clone ID: PAT_MRT3847_133604C.1.pep
FNSATRSSVHLSSPSSPHLCSFVHPAIEGGQAVHLSSWTLHTQSQRPPRSMTIPRVQTRTSSRVSHQHQRFRLSTGELSSQPTGGHAA

SEQ ID NO: 180056 - protein, 118 aa, Glycine max
  Clone ID: PAT_MRT3847_133605C.1.pep
GAASRRRCWRGPPSFTASKLGIRLEGFFPHSARLQKNGSYRTVKHSQTVHIHPSLGLAQVLPRWVVYHELVLSTKEYMRQVTELKPEWLVEIAPHYYQLKDVEDSYSKKMPRGAGLAS

SEQ ID NO: 180057 - protein, 64 aa, Glycine max
  Clone ID: PAT_MRT3847_133606C.1.pep
YKLRRKNIYNTSPMFKNDTFLSPQNDLIKVLSPPKAYVKMPTICPTMEVLLHEAFSSNMSLQHP

SEQ ID NO: 180058 - protein, 159 aa, Glycine max
  Clone ID: PAT_MRT3847_133607C.1.pep
KKALRGLKFISSKSNGADAWNEVQSNFYSLAKDGYLYRTDFAQCIGMKDSKEFALELFDALSRRRRLKVEKISRDELNEFWSQITDQSFDSRLQIFFDMVDKNEDGRITEEEVKEIIMLSASANKLSRLKEQAEEYAALIMEELDPERLGYIEVGVLYK

SEQ ID NO: 180059 - protein, 123 aa, Glycine max
  unsure (1)..(123): unsure at all Xaa locations
  Clone ID: PAT_MRT3847_133608C.1.pep
LSFAGTHPRKHGPDIEDQDNPYKIEARLKQIIAPXHTEVHAKMETNLSKPPIEEVETPKGPMLDLKLSQSKIAPPKNTVXGGTILRRDLWANSRTEGNNRASVVLHRTHGIKGMIKRWPQWFS

SEQ ID NO: 180060 - protein, 97 aa, Glycine max
  Clone ID: PAT_MRT3847_133609C.1.pep
LFAYGIVLRVPPLPIVVPTSGLVLYVVGWSGVRPRPGIPLLLHESARVSVCFFPCRVCVGSPFFFLFWGGLFYSGCVFSVFVCCPFLLWAFVLPFTL

SEQ ID NO: 180061 - protein, 136 aa, Glycine max
  unsure (1)..(136): unsure at all Xaa locations
  Clone ID: PAT_MRT3847_13360C.1.pep
KSVXXXRKXVVPEXWCXXCLXRXXLXXXXECIXVXXXDXXPVXXXXVVXXXXXXIXPXCXXXXXXXCAXXXXCVXSXLGXXLXXXSTHXXXXXRXXXFXRXVXGXCXHSXAYMCCXXXCCXRXVXTXXXXDRXXXX

SEQ ID NO: 180062 - protein, 61 aa, Glycine max
  Clone ID: PAT_MRT3847_133610C.1.pep
IQFSLLSMLLLNVQEYEIIIWFKNIKLYIHLDFSLSFFHMIPLITSVIYLSISECMDDHPT

SEQ ID NO: 180063 - protein, 69 aa, Glycine max
  unsure (1)..(69): unsure at all Xaa locations
  Clone ID: PAT_MRT3847_133611C.1.pep
XXIARGATQLHKYLPLFFFSFPLLPLSFWVTLMKRGGIFPFPFLSNPNPHSLTYKPFLLHIETITSHFT

SEQ ID NO: 180064 - protein, 99 aa, Glycine max
  Clone ID: PAT_MRT3847_133612C.1.pep
MGENEEATTTDMLQRLHFLKQPLNMEQLSIPQFNPSQMRARHHHQNQNQFDGGNSNKRAGIPPSHPHQIPPISPYSQIPLSRQHSDINSNSNICPTPTH

SEQ ID NO: 180065 - protein, 85 aa, Glycine max
  Clone ID: PAT_MRT3847_133613C.1.pep
RNMASLSSSLVLLLAALILSPQVLADYEKPPIYKPPVYKPPVEKPPVYKPPVYKPPVYKPPVYKPPVEKPPVYKPPVYKPPVYNH

SEQ ID NO: 180066 - protein, 138 aa, Glycine max
  Clone ID: PAT_MRT3847_133614C.1.pep
VYKPPVYKPPIEKPPVYKPPVYKPPVYKPPVYKPPVYKPPVYKPPVEKPPVYKPPVYKPPVYKPPVYKPPVEKPPVYKPPVYKPPVYKPPVYKPPVEKPPIYKPPVYKPPIEKPPVYKPPVYKPPVKKPPIYKPPYPK

SEQ ID NO: 180067 - protein, 111 aa, Glycine max
  Clone ID: PAT_MRT3847_133615C.1.pep
MRNMASLSSSLVLLLAALILSPQVLADYEKPPIYKPPVYTPPVYKPPVEKPPVYKPPVYKPPVEKPPIYKPPVYKPPIEKPPVYKPPVYKPPVKKPPIYKPPYPKYPPGSN

SEQ ID NO: 180068 - protein, 88 aa, Glycine max
  Clone ID: PAT_MRT3847_133616C.1.pep
MASLSSSLVLLLAALILSPQVLADYEKPPIYKPPVYTPPVYKPPVEKPPVYKPPVYKPPVYKPPVYKPPVKKPPIYKPPYPKYPPGSN

SEQ ID NO: 180069 - protein, 117 aa, Glycine max
  Clone ID: PAT_MRT3847_133617C.1.pep
LQCNCFLSITTMPFNYKITNAWPAYGSDYELQVLPWRGSNGQHFNLTRIKALKSMSRASINFPMNDVSTFYSLILCKGITPNRSNRFIRLDVQYLRTWWWCSHECQTTRTCSRNLSF

SEQ ID NO: 180070 - protein, 81 aa, Glycine max
  Clone ID: PAT_MRT3847_133618C.1.pep
MRNMASLSSSLVLLLAALILSPQVLADYEKPPIYKPPVYTPPVYKPPVEKPPVYKPPVYKPPVKKPPIYKPPYPKYPPGSN

SEQ ID NO: 180071 - protein, 217 aa, Glycine max
  unsure (1)..(217): unsure at all Xaa locations
  Clone ID: PAT_MRT3847_133619C.1.pep
MEGGGGTLSEIHQSAKKLLLRSRDGLERLERLEYSAAAGAAFSGADSELSFAVKKDITQIQTLCVEMDRLWRSIAAKPQRDLWKRKVEQIAEEAESLRASLDKYNLRNQIRMREANERTELLGRANGDSAHVLRIYDEEAQAVQSVPSSSRVLXTIHGQRERLQSAHRKALDILNTVGISNSVLRLIERRNRVDQWIKYAGMLLTVVFLFAFIMWRH

SEQ ID NO: 180072 - protein, 69 aa, Glycine max
  Clone ID: PAT_MRT3847_13361C.1.pep
TPFKGLFNIEGLALLLIGCFSTIHQENELKNDIHTLVGCLLPSVSPGQELETNFLRMDEGFTIFVSFTA

SEQ ID NO: 180073 - protein, 100 aa, Glycine max
  Clone ID: PAT_MRT3847_133620C.1.pep
PIYKPPVYKPPVEKPPVYKPPVYKPPVYKPPVYKPPIEKPPVYKPPVYKPPVYKPPVYKPPVYKPPVYKPPVYKPPVYKPPVKKPPIYKPPYPKYPPGSN

SEQ ID NO: 180074 - protein, 267 aa, Glycine max
  Clone ID: PAT_MRT3847_133621C.1.pep
AAALELVDPPGCRNSARGNMASLSSSLVLLLAALILSPQVLADYEKPPIYKPPVYTPPVYKPPVEKPPVYKPPVYKPPVEKPPVYKPPVYKPPIYKPPVYKPPVEKPPVYKPPVYKPPIEKPPVYKPPVYKPPVYKPPVYKPPVYKPPVYKPPVEKPPVYKPPVYKPPVYKPPVYKPPVEKPPVYKPPVYKPPVYKPPVYKPPVYKPPVYKPPVYKPPVEKPPIYKPPVYKPPIEKPPVYKPPVYKPPVKKPPIYKPPYPKYPPGSN

SEQ ID NO: 180075 - protein, 76 aa, Glycine max
  unsure (1)..(76): unsure at all Xaa locations
  Clone ID: PAT_MRT3847_133622C.1.pep
AGAGVDVFVIDTGGYTEHQEFSGGRATMVYNAITTESDQDLNGHGTYXAGTIGGTTYGVAKKDTITGVTVLAGNGS

SEQ ID NO: 180076 - protein, 276 aa, Glycine max
  unsure (1)..(276): unsure at all Xaa locations
  Clone ID: PAT_MRT3847_133623C.1.pep
RNMASLSSSLVLLLAALILSPQVLADYEKPPIYKPPVYTPPVYKPPVEKPPVYKPPVYKPPVEKPPVYKPPVYKPPIYKPPVYKPPVEKPPVYKPPVYKPPVYKPPVYKPPIEKPPVYKPPVYKPPVYKPPVYKPPVYKPPVYKPPVEKPPVYKPPVYKPPVYKPPVYKPPVYKPPVEKPPVPPVYKPPVYKPPVYKPPVYKPPVYKPPVEKPPVEKPPVYKPPIEKPPIEKPPVYKPPVYKPPVYTNHRCTSPLXEVKKPPIYKPPYPKYPPGSN

SEQ ID NO: 180077 - protein, 180 aa, Glycine max
  Clone ID: PAT_MRT3847_133624C.1.pep
VWWQWRGVVGGDAGEAFTEAEGPLPPVYKPPVYKPPVYKPPIEKPPVYKPPVYKPPVYKPPVYKPPVYKPPVYKPPVEKPPVYKPPVYKPPVYKPPVYKPPVEKPPVYKPPVYKPPVYKPPVYKPPVEKPPIYKPPVYKPPIEKPPVYKPPVYKPPVYNPPVKKPSIYMPPYPKYPPGSN

SEQ ID NO: 180078 - protein, 327 aa, Glycine max
  Clone ID: PAT_MRT3847_133625C.1.pep
MEAAAATANSSQRKPKRKRASAKSDPELDRLDSLPWNSALPQNDDDDAFSLFIGSNELEGGFLSLEEIDEAEYGLSIPEPEVDKRKTKKKKSEQNENVKKQQQDGVDSACSDDTVVEAELDESLKSKEKKKKKKKTKNKKKDAREDQTVEPSDAGLDTNVKDDIGEEDVDETEFYAWNELRLHPLLLKAICKLGFKEPTPIQKACIPAAAHQGKDVVGAAETGSGKTLAFGLPILQRLLEEREKAGNMVGERGEEPEKYASTGLLRALIIAPTRELALQVTDHLKAVAKHINVRVTPIVGGILAEKQERLLKAKPEIVVGNSRMLWG

SEQ ID NO: 180079 - protein, 41 aa, Glycine max
  Clone ID: PAT_MRT3847_133626C.1.pep
HYMHAARCLQSLEALSQSLQLVITGLMLLRYPPPLYDMRTF

SEQ ID NO: 180080 - protein, 64 aa, Glycine max
  Clone ID: PAT_MRT3847_133627C.1.pep
SPLTISTTLSTALPSPLQTHTVIIGTILNLVDPHPPDPVMSSPDSRTGAWEEREIGTGRCRSFS

SEQ ID NO: 180081 - protein, 51 aa, Glycine max
  unsure (1)..(51): unsure at all Xaa locations
  Clone ID: PAT_MRT3847_133628C.1.pep
MFLCSPPGSGRFFNCGIYGHRAQNCKSLYCKNKCXRCCERGHIQKNCINSP

SEQ ID NO: 180082 - protein, 90 aa, Glycine max
  Clone ID: PAT_MRT3847_133629C.1.pep
LCYGTRLFYASSTTITSSSLITALICRIMSSGAGFMIENRLLIIVSFHSPNIQSCVKSKPAPVFLLSHIYPYAWGGPGIPNLRACRRQAF

SEQ ID NO: 180083 - protein, 52 aa, Glycine max
  Clone ID: PAT_MRT3847_13362C.1.pep
ITYFISPPYLRSNIIPSRIRFLHHIPVCEMVPLWLSVQVPMTSRSHQSIRYT

SEQ ID NO: 180084 - protein, 124 aa, Glycine max
  unsure (1)..(124): unsure at all Xaa locations
  Clone ID: PAT_MRT3847_133630C.1.pep
MIYKEIILFISKEFTFFILFFYFIFFLSLFFFSSYQSLRIYYIHTLTFFSFLLLGYSISIFLFYIIYHIYNFLFLLLLFFSISLFSLSXSFQNKIIFNYFXYLIYLSFFCNFFFFLFLFIHLKN

SEQ ID NO: 180085 - protein, 53 aa, Glycine max
  Clone ID: PAT_MRT3847_133631C.1.pep
YSIRGLYQALGIVAMCGEEQPNLLSETTDVDTALNYLSFHKYHPQVLFNTNLL

SEQ ID NO: 180086 - protein, 87 aa, Glycine max
  Clone ID: PAT_MRT3847_133632C.1.pep
TKKGVKGRATFFLSVYPMWMRFFLNARLKTLENFHWGVVFKGRRGATSAPVVPQSLSIKGAENHNSKKWARLEYPRKGFFNNFRGVD

SEQ ID NO: 180087 - protein, 84 aa, Glycine max
  Clone ID: PAT_MRT3847_133633C.1.pep
PQSSSPMLFFLNGSWMLPMMLRRLFGDCRYILQCSLTTSVRCSRLSSFTTTAATAVTATRNFCPCRFGESMLNEENISNKYNKE

SEQ ID NO: 180088 - protein, 55 aa, Glycine max
  Clone ID: PAT_MRT3847_133634C.1.pep
PGIHAQQRHTVTSTEDHGLSSNLGCCSTSSDDGPCWKFPLWAEALLHALSPQCHL

SEQ ID NO: 180089 - protein, 184 aa, Glycine max
  Clone ID: PAT_MRT3847_133635C.1.pep
KMMNNDEREEVNPPFSILQRLDRLEHQMLFLEERHGYGAPNLAVVADKCLKPEEQCKSMFSALEEVHHKGSLLERVAVLENRLIQLSRDMDLENTSRSSSSNAAVTEKLGNGLGSLEARGPNEGMNMITTIQEKQGPFVTQGEDSIVLEACSLNSPSCRAQRRRIKAISRMGCYRMLKWLKLGC

SEQ ID NO: 180090 - protein, 213 aa, Glycine max
  Clone ID: PAT_MRT3847_133636C.1.pep
MVYLSPLALSCKSCLREIVIHASANVDEDISIVSEKLATAVKASKVAIVYDPHDICDLELTLAKNFWKIQVNRLLNGLPKPTIQQIQKHLKEGLAMDISPEDHYMLKLTNVNCLGLQWAELAKKVATDSGALSLDKVFELVVVGENLPVDMNEELRILRARCMLYCICRKPFDPERMIACYHCNEWYHFDCMKLPCTEEVYICPACNPCTETC

SEQ ID NO: 180091 - protein, 299 aa, Glycine max
  Clone ID: PAT_MRT3847_133637C.1.pep
CQLVEKALSCKSCLREIVILASANVDEDISIVSEKLATAVKASKVAIVYDQHDTCDLELTLAKNFWKIQVSRLLNGVPKPTIQQIQKHLKEGQAMDISPEDHYMLKLTNVNCLGLQWAELAKKVATDSWALSLDKVFELVVESENLPVDMNEELRTLRARCMLYCICRKPFDPERMIACYHCNEWYHFDCMKLPCTEDVYICPACNPCTEGLPSNHDRLTSGKFEEPKTPSPRHSNPRKKQKRDVPSLTCNIFASRNQDKLRYSSGIECLRWQNRKPFRRAAKKRVELRSLSPFLCIQR

SEQ ID NO: 180092 - protein, 95 aa, Glycine max
  unsure (1)..(95): unsure at all Xaa locations
  Clone ID: PAT_MRT3847_133638C.1.pep
ENLKAWXQGTPXGLNRQXLPGDRKPDGGDKKEXKFEPAAXXXRXSRKQRXQKGPXATXXLXXVTRXSXCXLXLLXTXFALKELXLXDEDSGPDLR

SEQ ID NO: 180093 - protein, 46 aa, Glycine max
  unsure (1)..(46): unsure at all Xaa locations
  Clone ID: PAT_MRT3847_133639C.1.pep
NRTFSFWVAFNGSGRVIGEATYIYASANAXNTVFDATPVIGRTLSD

SEQ ID NO: 180094 - protein, 72 aa, Glycine max
  Clone ID: PAT_MRT3847_13363C.1.pep
WTSSCHPHRYDVAEPVTSLGSYPVSMSQQSAALQVDTQSSDAGNGRSLFMHYSMPESASHATESHEPSVSQR

SEQ ID NO: 180095 - protein, 39 aa, Glycine max
  Clone ID: PAT_MRT3847_133640C.1.pep
SPSGKHFSGPMPASRPTSPGSRCVSTASRCASFSPATGS

SEQ ID NO: 180096 - protein, 93 aa, Glycine max
  unsure (1)..(93): unsure at all Xaa locations
  Clone ID: PAT_MRT3847_133641C.1.pep
GKGVCCPALPYNRTPARWLKISSHDVQRXISCEYAKKGXLTPSQIGVIVRDSHGLAQVNSVSGSIILRILKAHXLAPEIPEDLYHLIKNAAEL

SEQ ID NO: 180097 - protein, 69 aa, Glycine max
  unsure (1)..(69): unsure at all Xaa locations
  Clone ID: PAT_MRT3847_133642C.1.pep
PLIVHGVKLPSLSDVTTWALSYGMIYVSRADDTAKTVKRSRIMAMSMXMXXRVVCLMEAEEPTGDVLGE

SEQ ID NO: 180098 - protein, 589 aa, Glycine max
  Clone ID: PAT_MRT3847_133643C.1.pep
MSSASLKEMRNGGEDYSNGHGGGGVRDLYGEDCATEDQLITPWTFSVASGCSLLRDPRYNKGLAFTEGERDAHYLRGLLPPAIFNQELQEKRLMHNLRQYEVPLHRYMAMMDLQERNERLFYKLLINNVEELLPVVYTPTVGEACQKYGSIFRRPQGLYISLKEKGKILEVLKNWPEKSIQVIVVTDGERILGLGDLGCQGMGIPVGKRPLYTALGVDRPSSCLPITIDVGTNNEKLLNDEFYIGLKQKRATGQEYAELLEEFMHAVKQNYGEKVLIQFEDFANHNAFDLLEKYSSSHLVFNDDIQGTASVVLAGLLASLKLVGGTLVDHTFLFLGAGEAGTGIAELIALEISKQTKAPVEETRKKIWLVDSKGLIVSSRLESLQQFKKPWAHEHEPVKSLLDAVKAIKPTVLIGSSGAGKTFTKEVVETMASLNEKPLILALSNPTSQSECTAEEAYTWSKGKAIFASGSPFDPVEYEGKLFVPGQANNAYIFPGFGLGLIISGAIRVRDEMLLAASEALAAQVSQENYDKGLIYPPFSNIRKISAHIAAKVAAKAYDLGLASHLPRPKDLVKYAESCMYSPGYRSYR

SEQ ID NO: 180099 - protein, 379 aa, Glycine max
  unsure (1)..(379): unsure at all Xaa locations
  Clone ID: PAT_MRT3847_133644C.1.pep
ALFRLERATGQEXAELLEEFMPAVKQNYGEKVLVQFEDFANHNAFDLLEKYSSSHLVFNDEVGGTASVVLAGLLASLKLVGGTLADHTFLFLGAGEAGTGIAELIALEISKQTKAPVEKTRKKIWLVDSKGLIVSSRLESLQHFKKPWAHEHEPVKTLLDAVKAIKPTVLIGSSGAGKTFTKEVVETMASLNEKPLILALSNPTSQSECTAEEAYTWSKGKAIFASGXSPFDPVEYEGKLFVPGQANNAYIFPGFGLGLIISGAIRVRDEMLLAASEALAAQVSQENYDKGLIYPPFSNIRKISAHIAAKVATKAYDLGEFFENVFISSNTVLVILFFYILNPDFYVWWTGLASHLPRPKDLVKYAESCMYSPGYRSYR

SEQ ID NO: 180100 - protein, 117 aa, Glycine max
  unsure (1)..(117): unsure at all Xaa locations
  Clone ID: PAT_MRT3847_133645C.1.pep
MSWSLKYYFMIVFMDTPPKHFSIILDTCIHLNXIQYVPFIPCFXQISPYYDPKDSTSFKNINXNNPHFQLIFTPSYPPNPCIAXIQSYPYFYWYLNSSNTSWNFTXQTITVNLTTPK

SEQ ID NO: 180101 - protein, 94 aa, Glycine max
  Clone ID: PAT_MRT3847_133646C.1.pep
WQHLPEPRRPSCQCGPPFHNGVTGSSGSFCRSLSDPTGIALTPSISRYVAASFGEWLPARASTPIYIYPTVHAGLLCAYIFKPPSRPRWWFKKE

SEQ ID NO: 180102 - protein, 104 aa, Glycine max
  Clone ID: PAT_MRT3847_133647C.1.pep
SFEGVASEKKKKKKKKKKKKKKKKKKKKKKKKKKKKKKKKKKKKKKKKKKKKKKKGRPFKKTKFNYPVLQNKNFFFRAPKIKSLARVLKTRKLKNPWVTQIKSL

SEQ ID NO: 180103 - protein, 71 aa, Glycine max
  Clone ID: PAT_MRT3847_133648C.1.pep
PEPSLAGLVMQSSLESSIHCLDWIANDGKNLHVHMSEKVIVTVLLANPVKFKLVPRFTPFTAWRMWMEWFL

SEQ ID NO: 180104 - protein, 97 aa, Glycine max
  Clone ID: PAT_MRT3847_133649C.1.pep
PTRSFLEKKKKKKKKKKKKKKKKKKKKKKKKKKKKKKKKKKKKKKKKRGRPFKKTKFNYPVHAKKNFFYRAPKIKFLARFLKTSKLKKPWLTQIKSL

SEQ ID NO: 180105 - protein, 69 aa, Glycine max
  Clone ID: PAT_MRT3847_13364C.1.pep
FMHDNKSAPFTRFYQHKPLPLKPFKGFHLFKKGCPFFSKGLNYRVVPTLFTLGGKRQKFFLGPDFLGGQ

SEQ ID NO: 180106 - protein, 348 aa, Glycine max
  Clone ID: PAT_MRT3847_133650C.1.pep
PRAEFGTRAQRKPSSINGGGGGGGVLLPITTPSPSSFPSSTTSDVTLTSTTTTAATTAATAATTTTAVENLRCPRCDSSNTKFCYYNNYNLTQPRHFCKTCRRYWTKGGALRNVPIGGGCRKNKSIGVASSVAGKTASTKMKTIASEFGKSPGFGGGFEVEHELPPPPGQILWGSPQNTHLLALLRATQTQNPNPNPSPMSLKEEGTLLGHMVSTDQPLVSNTLLSYRTLGYDAVAQVPSSLGLFGRNNQDQQQQNGGFLVGEHHNNSGIQELYQKLRSSSTVNNNYCSDNNSSQMFMGNMASNYSSSVSNNILETTSVAGGEFGYWNGPTFSNWSDLPTTNGAGAYP

SEQ ID NO: 180107 - protein, 68 aa, Glycine max
  unsure (1)..(68): unsure at all Xaa locations
  Clone ID: PAT_MRT3847_133651C.1.pep
ASSLISSPAVTTVNRAGAGMVAPFTGLKSMAGFPTRNTNHDITFIATTXMTALLYVWPPVVKKSFRLL

SEQ ID NO: 180108 - protein, 58 aa, Glycine max
  Clone ID: PAT_MRT3847_133652C.1.pep
ILCRLRVAKFITRTNKTFRERQIKVSVTKKLILQCKTRWNSTYHMLVVALAYKGVLIV

SEQ ID NO: 180109 - protein, 69 aa, Glycine max
  unsure (1)..(69): unsure at all Xaa locations
  Clone ID: PAT_MRT3847_133653C.1.pep
MKWVTFISLLXLFSSAYSRGVFRRDAHKSEVAHRFKDLGEENFKALVLIALLSIXQQCPFEDHVKLVMK

SEQ ID NO: 180110 - protein, 72 aa, Glycine max
  Clone ID: PAT_MRT3847_133654C.1.pep
RCLSKLDGTPVCDFSLGASKMSCNISWPISMKFVNYYTKIMVSRSMPWYLWAGSSDWILDVSRPIFVSCLKL

SEQ ID NO: 180111 - protein, 91 aa, Glycine max
  Clone ID: PAT_MRT3847_133655C.1.pep
QNLSSVPQRCIQPQNEDIVVLSEESISILVIPIIDMQSLLSVESCSFDLAKLLLACKELMGILPDLFSLFILQFLYNFNTSFCLILYYIFT

SEQ ID NO: 180112 - protein, 86 aa, Glycine max
  Clone ID: PAT_MRT3847_133656C.1.pep
VFEGAEMSVSGERLLYRVGGDGDVAKGNGDVYCLTFGNSDLLGIEAYVIGHHHQQNVWMEFDLVNSRVGFADTKCELASRRLGLDS

SEQ ID NO: 180113 - protein, 41 aa, Glycine max
  Clone ID: PAT_MRT3847_133657C.1.pep
ILGIPTLYTKQDPTPYTIESMVYYICILRHARIEPFIEYHS

SEQ ID NO: 180114 - protein, 78 aa, Glycine max
  unsure (1)..(78): unsure at all Xaa locations
  Clone ID: PAT_MRT3847_133658C.1.pep
DTTDDANAEIHEKGGFSPNLXRVIFAREHLDNLRTLAYYNIQKASTVHLQTRLHGGMLVLVKTLTGYTVNFEVDSSDT

SEQ ID NO: 180115 - protein, 56 aa, Glycine max
  Clone ID: PAT_MRT3847_133659C.1.pep
FLSLSALKCHTLIMHQHFVAYKKTLVFESSPFLFEHLLTNGTSFSLPCDKKLLSYH

SEQ ID NO: 180116 - protein, 114 aa, Glycine max
  unsure (1)..(114): unsure at all Xaa locations
  Clone ID: PAT_MRT3847_13365C.1.pep
VPPPGNPGKGTPGVGEAPGSHTNPSETPPPGDQGDKGPLPKKPFGATAPAASPAEAPAPAQPEKKVRAGAADSPPGAAGPAPEAPRAGRXKRPPGEGGTPGAAGGVKNGSGFRK

SEQ ID NO: 180117 - protein, 69 aa, Glycine max
  Clone ID: PAT_MRT3847_133660C.1.pep
CCLMSLWSPSQNVKADGVLPQPKLALPQEPQAVFIEGPWSGMEPSTNFSTKHNFIFPPIQLTTLGRREP

SEQ ID NO: 180118 - protein, 68 aa, Glycine max
  Clone ID: PAT_MRT3847_133661C.1.pep
HIINKYFISPSFNNCLFFFLSGLLLNLTFCFAYFSTSPFFFLFHVSSFFIWVNRSFLVPSVYFHPIVN

SEQ ID NO: 180119 - protein, 67 aa, Glycine max
  Clone ID: PAT_MRT3847_133662C.1.pep
IFIGPPGVFPLAAKEKAGVKNVLRMLREEFELPRPLRGCPPPKDIPRDPIVPDWDHPRIFPRALPKL

SEQ ID NO: 180120 - protein, 69 aa, Glycine max
  Clone ID: PAT_MRT3847_133663C.1.pep
MANAASGMAVHDDCKLGFLELKAKRTHRFIVFKIDEQQKQVIVEKLGEPAQGYEDFSASLPGDECRYAV

SEQ ID NO: 180121 - protein, 348 aa, Glycine max
  Clone ID: PAT_MRT3847_133664C.1.pep
MAFTSSCSLASQFLPPIYHSAIPFHSTNCTNLSFPAVPTPRQQPLLFSSTSTCLAAAAASNSNSTSNSNNNNPASASASSKEKKVEVEVEVEEELPWIQEKALDLVEFTGSVTQAIPGPRVGPTSLPWILAIPLTYAGLTFVIAFVKTFRKFSSPKAKRRRQVSKNATLCKSLDDLFQKGRDQVKLDALKQIENKTGFDLEEILRKYIRYTLNEKPFNPDMVADLIHLRKASILNDSQVAEILNDISRRIVRDKGPIVMDKSGYTEKGFKRKIAVQALFGKVFYLSELPEFCSRDTSLVVKEIFGVTDEDADKLRIHTISEAGSLDALEKMVDSSNSEDASEDSFEAS

SEQ ID NO: 180122 - protein, 89 aa, Glycine max
  unsure (1)..(89): unsure at all Xaa locations
  Clone ID: PAT_MRT3847_133665C.1.pep
KGARQCHAYXDMLGLRLNTGYGARTPVAKCAGCWLALDAXTVFGFETIPAGCALAAPEFIPVEQFGSDSTGVNPLAYFYARDLXVHPKD

SEQ ID NO: 180123 - protein, 86 aa, Glycine max
  Clone ID: PAT_MRT3847_133666C.1.pep
NSRVDPRVRENMRSEFHWIKNKANVLKTMGMVYKQKLETKSSDLSKAEAEVCNQKHYCFLFFCPAIGNIAQLCVSESYFMLMLITT

SEQ ID NO: 180124 - protein, 77 aa, Glycine max
  unsure (1)..(77): unsure at all Xaa locations
  Clone ID: PAT_MRT3847_133667C.1.pep
GMLRHVDGTWVVQGPVDVDIGANPSAAGGGXHEGFDDAAGNAADIAGTSTLQDQPVLLEQQSGAFMTSFVTDRPPTL

SEQ ID NO: 180125 - protein, 134 aa, Glycine max
  Clone ID: PAT_MRT3847_133668C.1.pep
DHDHNYYIPSFHSHYHFHCSSLQLFCSSTLFLSSSSKRLTFLFCTMAEEGFEHYHVPQQSRRNKLRVFPEHQPYCFVESSSTCPTLASLYDPSLIIPSDLLACATQQGGGGAAAKEQEGSNLMMGFVKGAVVNG

SEQ ID NO: 180126 - protein, 299 aa, Glycine max
  Clone ID: PAT_MRT3847_133669C.1.pep
MNFRCYNFFNVMSPYPKHIFSVMQGSGLSGPIPSGISILRNLTDLRVTDLNGSDSWFPQLNNMTNLVTLILRSCNIIGSLPENLGKLTNLEVLDVSYNKLTGPIPSIFGDLRHLDMFFLEGNHLTGSLPRLIDRPHYVDLSYNNLSIGNNIEELQCPQGTVNLFASFSNGNSLGNVSCLSNIPCKTSYSMHINCGGNLVTDGKKTYDDDTGETTGPASFHNDRGKNWALINNGHFFDTDRLNYYNVTNSTKLVMENVELYMNARVSPTSLTYYGFCLGNGNYTVKLHFAEIMFTDDKTI

SEQ ID NO: 180127 - protein, 35 aa, Glycine max
  Clone ID: PAT_MRT3847_13366C.1.pep
QQRNLLVSEFLFVTLSVNVHIVSENNESYWRLGAR

SEQ ID NO: 180128 - protein, 140 aa, Glycine max
  unsure (1)..(140): unsure at all Xaa locations
  Clone ID: PAT_MRT3847_133670C.1.pep
APFRSFLWKMFFEKHDDYKFNGLAWLFLGVPTSSSLLYKEEFEKMKEKAPXNFRLDFAVSREQTNEKGEKMYIQTRMAQYAEELWELLKKDNTFVYMCGLKGMEKGIDDIMVSLAAKDGIDWIEYKRQLKKAEQWNVEVY

SEQ ID NO: 180129 - protein, 276 aa, Glycine max
  unsure (1)..(276): unsure at all Xaa locations
  Clone ID: PAT_MRT3847_133671C.1.pep
SRKKRIERRQAAQTYSRVALFLWNLYSSPKLFCNYPLFVIFLIHVSSEIEYLKDVSFQVDLLLSFCSEIGFSSVVLIGHDDGGLLALMAAQRIQTSMNYFNVNLKGIVLLNVSLSREVVPSFARILLHTSLGKKHLVRPLLRTEITQVVNRRAWYDSTKMTPEVLTLYKNPLSVPGXCEALPEIGKLSSEXNHSAKNAESLLQAVGDIPVLVIAGAEDSLVTLKSCQAMASKLVNSRLVAISGCGHLPHEECPKALLAAISPFINRLLSASDSQRQ

SEQ ID NO: 180130 - protein, 167 aa, Glycine max
  Clone ID: PAT_MRT3847_133672C.1.pep
NGCSNFLCDLKPGAEVTITGPVGKEMLMPKDPNATIIMLGTGTGIAPFRSFLWKMFFEKHEDYKFNGLAWLFLGVPTSSSLLYKEEFEKMKEKAPDNFRLDFAVSREQTNEKGEKMYIQTRMAQYAEELWELLKKDNTFVYMCGLKGMEKGIDDIMVSLAAKDGNIT

SEQ ID NO: 180131 - protein, 71 aa, Glycine max
  Clone ID: PAT_MRT3847_133673C.1.pep
TACKRTTKGDTSVEISKPSTIKTRALDSYAAILLLAYDMQDSNYRNIALQVKPAYGDQFRGAVFVIYCGLS

SEQ ID NO: 180132 - protein, 51 aa, Glycine max
  Clone ID: PAT_MRT3847_133674C.1.pep
DPRIHQVAKRQRTGSCVSTEELNMDHEVSVSDSLHHLPPYRAGALPRRSGR

SEQ ID NO: 180133 - protein, 48 aa, Glycine max
  Clone ID: PAT_MRT3847_133675C.1.pep
LARGVFGDRPRTRWWTIDPTGFNLVAREKRLDPERLIMNKRDKLSRQV

SEQ ID NO: 180134 - protein, 38 aa, Glycine max
  Clone ID: PAT_MRT3847_133676C.1.pep
FKELLETDLIYPNFYHSILTILTTKVHLLRLPKPNYDL

SEQ ID NO: 180135 - protein, 32 aa, Glycine max
  Clone ID: PAT_MRT3847_133677C.1.pep
INIIHIYYSNFNYMGLTCQRGILKSELSHASD

SEQ ID NO: 180136 - protein, 58 aa, Glycine max
  Clone ID: PAT_MRT3847_133678C.1.pep
AQKIMEYVYMSPFLLLSTKRYIAYDGGAAIIRLCLDVRSYAYPTRRPIKQINSPASRN

SEQ ID NO: 180137 - protein, 52 aa, Glycine max
  Clone ID: PAT_MRT3847_133679C.1.pep
FQLGKVLTDIASLKLISSAANKHNSIIIIYLEVIRFHFKGLVVQFLSISNLA

SEQ ID NO: 180138 - protein, 76 aa, Glycine max
  unsure (1)..(76): unsure at all Xaa locations
  Clone ID: PAT_MRT3847_13367C.1.pep
LKKKTRYPPFPEAKPPRDFSSKKGSLCQKKLKRLFWFPQNESWYKIERKKGGLKNLIFPLKCPARHILQRFKSGXP

SEQ ID NO: 180139 - protein, 93 aa, Glycine max
  Clone ID: PAT_MRT3847_133680C.1.pep
EKFDLAVQRCTQRAFALPAFLAHKRQCAQVSLPGVLMPNFRPLATYIGNFYITLQAVSRKTCNWVNFVLGYPGMMVVAVCKHGSPAFTVWCSH

SEQ ID NO: 180140 - protein, 444 aa, Glycine max
  unsure (1)..(444): unsure at all Xaa locations
  Clone ID: PAT_MRT3847_133681C.1.pep
MARRAHCLVLPYPLQGHINPMLQFSKLLEHQGVRITLVTTRFFYNNLQKVPPSIALETISDGFDLGGPKEAGGSKAYLDRFWQVGPETFAELLEKLGKSNDHVDCVVYDAFLPWALDVAKRFGIVGAAYLTQNMTVNSIYYHVQLGKLQAPLIEHDISLPALPKLHLKDMPTFFFDEDPSLLDFFVAQFSNIDKADWILCNTYYELDKEIVDWIMEIWPKFRSIGPNIPSLFLDKRYEDDQDYGVTEFKRDECIEWLDDKPKGSVVYVSFGSIATFGDEQMEELACCLKECLGYFLWVVRASEETKLPKGFEKITEKGLVVTWCSQLKVLAHEAVGCFVTHCXWNSILETLCLGVPTIAIPCWSDQRTNAKLIADVWKIGIRTPVDEKNIVRREALKHCIKEIMDRDKEMKTNAIQWKTLAVRATAEGGSSYENIIEFTNHLLH

SEQ ID NO: 180141 - protein, 79 aa, Glycine max
  Clone ID: PAT_MRT3847_133682C.1.pep
LASPASHEEVGHMIHSMCTRSRSCSFNSHDCSSYLPRTSAYTSRHITVNSITELRENWTYLRPVTLNYRTLHDEQGTRS

SEQ ID NO: 180142 - protein, 172 aa, Glycine max
  Clone ID: PAT_MRT3847_133683C.1.pep
GGTPSGAVVVLKTELCRFSGAKIYPGKGIRFVRGDSQVFLFANSKCKRYFHNRLKPSKLTWTAMYRKQHKKDIAQEAVKKRRRATKKPYSRSIVGATLEVIQKKRTEKPEVRDAAREAQLREIKERIKKTKDDKKAKKAEVAAKSQKSQGKGSISKGAMPKGPKLGGGGGKR

SEQ ID NO: 180143 - protein, 42 aa, Glycine max
  Clone ID: PAT_MRT3847_133684C.1.pep
GFPTTKTNCDITYIASNRGRVLCMRVWPPRGKKNFETLAYLP

SEQ ID NO: 180144 - protein, 90 aa, Glycine max
  unsure (1)..(90): unsure at all Xaa locations
  Clone ID: PAT_MRT3847_133685C.1.pep
LEPNTARADSSAPPIKLLYSLTQCPCIPYSLPYPLQCSDVPMNTANPIHVGGKSSSXIXSQPQIPEPLNGHLETSRVSSRYGPLDWAPAG

SEQ ID NO: 180145 - protein, 108 aa, Glycine max
  Clone ID: PAT_MRT3847_133686C.1.pep
TRPIWLGSYTTPMAAARAYDTAVFYLRGPTARLNFPELLFQDDQEEGNDSVQHGAAAGNMSADSIRRKATQVGARVDALQTALHHHASSTNSLKPDLNEFPKLESLQD

SEQ ID NO: 180146 - protein, 82 aa, Glycine max
  Clone ID: PAT_MRT3847_133687C.1.pep
ALQSPLVRSFLTSCVKKVLNLCCYLVQFPWIGGLLYLLILNLIQSQLVEISGGVNTPPRIFTLQVCITYTPVPLILTVIITS

SEQ ID NO: 180147 - protein, 77 aa, Glycine max
  Clone ID: PAT_MRT3847_133688C.1.pep
LEMKTNTVCPAFTVVMLAPTAMTMENIMNGLVSLGTKKLPLVEKSMTRWRIDHNMCGMSGLGLADTMGERGVGYGPC

SEQ ID NO: 180148 - protein, 75 aa, Glycine max
  unsure (1)..(75): unsure at all Xaa locations
  Clone ID: PAT_MRT3847_133689C.1.pep
MAXSXXEYXCXVXGLAWATDXXALEXXFSQXGEIXXTXXINDRETGXSRGFGXVXFXSEQXMXDAIDGMNGXNLD

SEQ ID NO: 180149 - protein, 77 aa, Glycine max
  Clone ID: PAT_MRT3847_13368C.1.pep
ISKVQFLAGQRFIKLAKSPISAPLAFPFKITSSGLVLLDDEGIEMKGPEINTIHCQGLSLSTLAVSSAEYILRTKNA

SEQ ID NO: 180150 - protein, 65 aa, Glycine max
  Clone ID: PAT_MRT3847_133690C.1.pep
KKLTRQFEIESNFHKERGIIYMAGWSQLNFEQIPSSNDITVHHQLQHNLNLPFKKSKKVLLQFEP

SEQ ID NO: 180151 - protein, 73 aa, Glycine max
  Clone ID: PAT_MRT3847_133691C.1.pep
KGPPKWWSTPWWPTKKDRRQFKGFSRLPTREKKFEIVCSPPPNKFLRGVYFIGRGVGPPQPHREGVKKTWERV

SEQ ID NO: 180152 - protein, 127 aa, Glycine max
  Clone ID: PAT_MRT3847_133692C.1.pep
ANFLTEGLLRASDDSHRTHAIRRMIKTAATGGMPDNTGISLACAMNIAPKVSARSDIYTICSKDCELQNTDRTKAKTMAFNPNPSSDAWSSESPKRTAFHCNVICVTGWTATPMHDVHDTIDRPLPL

SEQ ID NO: 180153 - protein, 67 aa, Glycine max
  Clone ID: PAT_MRT3847_133693C.1.pep
PTLKKNKSIAINGIETKIRYNKNPVFFFIYFFLFFIFYFFFFFFFFFPLILFFIIFFIYRTRGRTRG

SEQ ID NO: 180154 - protein, 131 aa, Glycine max
  unsure (1)..(131): unsure at all Xaa locations
  Clone ID: PAT_MRT3847_133694C.1.pep
RPLWFRPITVIKVAEHNSGSGLVELEALAQKKRELYQAVEGIHRGIFGIPATXKSEIERLVKQIESLNPTPCPTLVLEKVAGCWRLVYSTISAFNPEGWLEITYVDDTLRIGRDDKSNIFVLERFDDSNNT

SEQ ID NO: 180155 - protein, 180 aa, Glycine max
  Clone ID: PAT_MRT3847_133695C.1.pep
NNRGIFGHASAKKSEIERLVKQIESLNPTPCPTLELEKVAGCWRLVYSTISILGSKRTKLGLRDFISLDDFFQSIDISKSKAVNVIKFSAMGLSLLSGQLNIEASFRISSSTRVDINFENSTITPDRLMNVFRKNYDLLLGVFNPEGWLEITYVDETMRIGRDDKSNIFVLERFDDNNNM

SEQ ID NO: 180156 - protein, 164 aa, Glycine max
  Clone ID: PAT_MRT3847_133696C.1.pep
MAPSRRRGVSKAAAAAAACRQFQVGDLVLAKVKGFPAWPATVSEPEKWGYSTDRKKVHVHFFGTQQIAFCNPADVEAFTEEKKQSILGKRHGKGAEFGRAVKEIIEVFEKLKKETQLDETGSGGDVANADVSNPVNSSAKYQTDAPELAHTLPMNSSNSIINKH

SEQ ID NO: 180157 - protein, 69 aa, Glycine max
  Clone ID: PAT_MRT3847_133697C.1.pep
GSGTCKGLYTLEQIVFGRIGKSFFGFFVSLESWKHMQSKQKAVPCGKGKVGFFQSGDSAVILSSKDHHF

SEQ ID NO: 180158 - protein, 70 aa, Glycine max
  Clone ID: PAT_MRT3847_133698C.1.pep
CFRMIPGIKFVQEIGFVSASIIKSPKVTLGVINSSSIVIAIVIILKERFNNGHQSNIDLERYKRYDNSRI

SEQ ID NO: 180159 - protein, 59 aa, Glycine max
  Clone ID: PAT_MRT3847_133699C.1.pep
GSRSFNPVTILFFSTQRKTISKNNSQTIALPSPMILIATYPINHTSPVIITPNHIIILL

SEQ ID NO: 180160 - protein, 134 aa, Glycine max
  Clone ID: PAT_MRT3847_13369C.1.pep
IRLETAARRRRREAKRRLHSFKGNSLKTWDEVMEKFLKKYFPESKTAEGKATISYFHQFPDESLSEALERFCGLLRKTPTHGFLKPIQLNIFIDGLRPQSKQLLDASPGGKIKLKTPAETLDLIENMAAVTLLF

SEQ ID NO: 180161 - protein, 35 aa, Glycine max
  Clone ID: PAT_MRT3847_1336C.1.pep
LSFFDGDLPPIAIKLSHESELKTAMRRTTRRICRL

SEQ ID NO: 180162 - protein, 55 aa, Glycine max
  Clone ID: PAT_MRT3847_133700C.1.pep
TYAIPIIIISDTIRIDTLSKFHSPTPFGLYRDRETRQSSTGYYQWLPRFILCKTF

SEQ ID NO: 180163 - protein, 75 aa, Glycine max
  Clone ID: PAT_MRT3847_133701C.1.pep
ECKTTPVLSMADGRTWQKAQIPPYKHATVPYGAAMAGLPSQISYGGVAKNPPRHSAMVAIFLTWTELYNFTGSRN

SEQ ID NO: 180164 - protein, 127 aa, Glycine max
  unsure (1)..(127): unsure at all Xaa locations
  Clone ID: PAT_MRT3847_133702C.1.pep
MAAFSGDETAPFFSFLDTTATLIFSCIGATYSTAKSDIDITSIDIIRPXLIIKSIVPIIITKILDIYNLIITIIISTNINPKTKSYYLFNNYTHLSFNLTYDFTNLATNVTISSIDNASIEASTQQP

SEQ ID NO: 180165 - protein, 78 aa, Glycine max
  Clone ID: PAT_MRT3847_133703C.1.pep
NYNLAVAVVPNRVSYVTRTKTRALMGVLHLDFPVKTSAVEISGDQVMNENPCLGGHLDQVYPYNFFLYLDLPFHFHTY

SEQ ID NO: 180166 - protein, 82 aa, Glycine max
  Clone ID: PAT_MRT3847_133704C.1.pep
LKKKKLSSLYDFLFSTLAWLKGPCHWTSLIGVPVLTFCLALFIAKPLSPEGNPSHMIPFPNFFVDLSLTSQVQNRYLILQAC

SEQ ID NO: 180167 - protein, 55 aa, Glycine max
  Clone ID: PAT_MRT3847_133705C.1.pep
YFTHFLCSNAPISQLISYTSSPPTFVFYHEYHNTFSLSKSTKVPSPLFFFSTFQL

SEQ ID NO: 180168 - protein, 168 aa, Glycine max
  unsure (1)..(168): unsure at all Xaa locations
  Clone ID: PAT_MRT3847_133706C.1.pep
MDIAHCYLKGNADSVEFCPHDSYQNVLAVSTYTLQESCQPSXHGSISLFSVDVDTGHLDMVFSEETAGIFDIKWSPAGGHASPFLAQADADGYLRIKILGGCCNGVEGANLKEITNGKISNSMCLYLDWNPSATSITVGLSDGSVSNGSLLDXKLEIPDEWKAHDFDF

SEQ ID NO: 180169 - protein, 91 aa, Glycine max
  unsure (1)..(91): unsure at all Xaa locations
  Clone ID: PAT_MRT3847_133707C.1.pep
MDIAHCYLKGNADSVEFCAHDSYQNVLAGSTYTLQESVQPSXHGSISLFSVDVDTGHLDMGFSEETAGIFDIKWRSAGGHASPFLAQADAD

SEQ ID NO: 180170 - protein, 83 aa, Glycine max
  unsure (1)..(83): unsure at all Xaa locations
  Clone ID: PAT_MRT3847_133708C.1.pep
AAQASVSSSSLTFSGEATRQSLGPRSLQSPFGFLRKAYXLVKAAVTPPVKQGSDRPLRFASKLTFSYLHGTLPGDYGLRPSRD

SEQ ID NO: 180171 - protein, 40 aa, Glycine max
  Clone ID: PAT_MRT3847_133709C.1.pep
YSKVFKRNVPNHSLARTSKYHYNWAIDRTVIFTGKNVIQP

SEQ ID NO: 180172 - protein, 69 aa, Glycine max
  unsure (1)..(69): unsure at all Xaa locations
  Clone ID: PAT_MRT3847_13370C.1.pep
MASVKVACVVLMYMAVKSALMMVQAVSCNDVSVNVAPCVSXLSQGGDVRESCSSRLKDILGSANNTFDR

SEQ ID NO: 180173 - protein, 92 aa, Glycine max
  Clone ID: PAT_MRT3847_133710C.1.pep
SRESLTLTKKHPCFAHSERSILTKAYGSSFIERKSARSMLWKGPYVSVVAIHCNALSEILALRYISWGLDQSVNCPIYSVGLFDHITTKTAE

SEQ ID NO: 180174 - protein, 416 aa, Glycine max
  Clone ID: PAT_MRT3847_133711C.1.pep
MGKKRVMTPAKDVDLSSIKYKREVVQAPHLTGFVFRLFVRIIEAPLIGPIIMNILKKENKMDEILRHTVIPEEPMFKPEYPPQEMEPGVVVLEEDGRPEDRVEYALKCLPHYDVAESWENSSASFRYWKIRDYAHAYQSRKVTPSMVAERIISIIEDNGRNKPPTPLLISFDAAEVREQAAASTQRFEAGNPLSILDGIFMAIKDDIDCYPHPSKGATTWMHEVRTVKEDAVCVSRLRTCGVIFIGKANMHELGMGTTGNNPNYGTTRNPHAPDRYTGGSSSGPAAIVASGLCSAALGTDGGGSVRIPSSLCGVVGFKTTYGRTSMEGSLCDSGTVEIIGPIASTVEDVLLVYSAMLGASPANRISLKPSPPCLPSLSSNDNSNALGSLRIGKYTPWFNDVHSTEISDKCDEALNL

SEQ ID NO: 180175 - protein, 177 aa, Glycine max
  Clone ID: PAT_MRT3847_133712C.1.pep
LRLKNHSKIALSLFHYAKTLPNPPLSHSSFTLLIDTMAKVRQFDVAWQLIVEMDQRHHLTPTPSTFLTLIRRLICAGLTRQAVRAFHDIDAFSETKTTPQDFCVLLDTLCKYGHVRLAVEVFNKNKHTFPPTVKMYTVLIYGWCKIGRIKTAQSFFNEMIDKGIEPNVVTYNVLLNG

SEQ ID NO: 180176 - protein, 63 aa, Glycine max
  unsure (1)..(63): unsure at all Xaa locations
  Clone ID: PAT_MRT3847_133713C.1.pep
SQGKLTGILHYTEDDEVYTDFEDHLISSITDAXAIIALNNNFEKLDYSYDIEWQYSLLILNLT

SEQ ID NO: 180177 - protein, 53 aa, Glycine max
  unsure (1)..(53): unsure at all Xaa locations
  Clone ID: PAT_MRT3847_133714C.1.pep
IIRYSTLRTTGFKKVLKEENNDDDKRGMXYLLLGLIYLWHNEQRLTGLDAESS

SEQ ID NO: 180178 - protein, 78 aa, Glycine max
  Clone ID: PAT_MRT3847_133715C.1.pep
LITTLSRKSVAPAGALPFRLNMSANIAPPFFGEAVLSEYKTGGSSYLITLPFFLLIDKWTASLPRLRRHYAQNSAMAN

SEQ ID NO: 180179 - protein, 120 aa, Glycine max
  unsure (1)..(120): unsure at all Xaa locations
  Clone ID: PAT_MRT3847_133716C.1.pep
PPTPPPPPPPPPAPHTSPPHPPPPPHPPPPPPPPPRPAPSPPPQRPPPAPQIPPHAPPPTPSRXRPNPAAACLITALGYPLSQRSRVPSPTHGRLWGSHMRQTEAQAEAAAAANLTHLVP

SEQ ID NO: 180180 - protein, 83 aa, Glycine max
  unsure (1)..(83): unsure at all Xaa locations
  Clone ID: PAT_MRT3847_133717C.1.pep
NNPNQHREDQGSKTENKRKRKRKXQDXTGXEXXTPTPTPTHDLAILNINTEFLDDPEKKTENPDEKECILMRLTKWGLEITVP

SEQ ID NO: 180181 - protein, 80 aa, Glycine max
  Clone ID: PAT_MRT3847_133718C.1.pep
FNTKGIMEYWLESANLDEIRQETGVQDPYIGELKMLKIEMAQMKKDMQELIAKKQEKSEMCLMEETQKSFVNWKAMTEHV

SEQ ID NO: 180182 - protein, 32 aa, Glycine max
  Clone ID: PAT_MRT3847_133719C.1.pep
YTLWVTFWNQRHHKAKLSPQAAKGEPIGFAPS

SEQ ID NO: 180183 - protein, 41 aa, Glycine max
  Clone ID: PAT_MRT3847_13371C.1.pep
ALVVLGLQGQTCKVFFYLLDPSKKCSHPLYSNHSLFLNLYS

SEQ ID NO: 180184 - protein, 164 aa, Glycine max
  Clone ID: PAT_MRT3847_133720C.1.pep
IPITVGFYLYQARALYQGRAAGSQHTHWPLHHLFLASICSLLAGIVGGLLGTGSGFVMGPLFLEVGIAPQVASATATFGMMYSSSLSDIQYYLLNRHAVPYALLLTLVAAIAPFLRQYLIDKLGNILQRASLIITVLAFTIIVSSIALGGPGVSDMILKIQRYE

SEQ ID NO: 180185 - protein, 83 aa, Glycine max
  Clone ID: PAT_MRT3847_133721C.1.pep
PQCSILYWYRKPCQMLLDHWLKWIVKSFSKLLSQVQRRNVASSNSLLALQVALENIMLFLSFQMDHVKASHQHCHLLILTPSA

SEQ ID NO: 180186 - protein, 100 aa, Glycine max
  Clone ID: PAT_MRT3847_133722C.1.pep
GERKKKNARRALSSARLISSNSGRSSRHKVQMKNRIGTNGRYDGPIVCDRILVGGSYSGASSKRFRFIFRLRAFRTCSRTYSGVPITCTHTGAPAGDRDS

SEQ ID NO: 180187 - protein, 184 aa, Glycine max
  unsure (1)..(184): unsure at all Xaa locations
  Clone ID: PAT_MRT3847_133723C.1.pep
MSEIGKSTLGQTLYERISNQCNSDCYIDDVSNVYRLYGTLGVXKQLLSRSLYERNPEIYNLSNGTLLTWKRLSNAKTLIVLDNVDQDKQLDMFTGGIVYLFPKCXGRGSIIIIISSDPXILKAHGVDAIYQVKSLNDKDVVRLFCRKAFKSNYIVSDFEKMTCVVLSQCQCHPLAIEVLDSSLF

SEQ ID NO: 180188 - protein, 88 aa, Glycine max
  unsure (1)..(88): unsure at all Xaa locations
  Clone ID: PAT_MRT3847_133724C.1.pep
XVXXXVQRQNLXLFSTNPTATPSHPXLHXSEFYLPXLDPXREAPYIYXCIYXXYAASXKIXSLLGLMXELXWPXXDXQIKRXKPRXRX

SEQ ID NO: 180189 - protein, 59 aa, Glycine max
  Clone ID: PAT_MRT3847_133725C.1.pep
CLIRIFCFMIIKSGNSAIKCIMQLTSWLCNIHGYGSANKYICPSEMVMVFFMKPTDNGH

SEQ ID NO: 180190 - protein, 63 aa, Glycine max
  Clone ID: PAT_MRT3847_133726C.1.pep
KLHFFKVDVVVLPFNIFPDQQFPCMVIKPVVEDYLISGDQFFSSSKWNHGSATDGTSIWMVMS

SEQ ID NO: 180191 - protein, 42 aa, Glycine max
  Clone ID: PAT_MRT3847_133727C.1.pep
PRHRKWVLCPYLTIYHTKQAQKNDIKLKGTKWLLLLCSLGNI

SEQ ID NO: 180192 - protein, 60 aa, Glycine max
  Clone ID: PAT_MRT3847_133728C.1.pep
GVASGASHESVGHEETSSSGTFLYTFTSKLLLPSLRIQVHHQDVVFKCLSLSLYLSSITC

SEQ ID NO: 180193 - protein, 44 aa, Glycine max
  unsure (1)..(44): unsure at all Xaa locations
  Clone ID: PAT_MRT3847_133729C.1.pep
YDADVHYEWGCKIYNRLGMFLQENGVCIIIKQNCYXEIYNSVSP

SEQ ID NO: 180194 - protein, 70 aa, Glycine max
  Clone ID: PAT_MRT3847_13372C.1.pep
LIMVGVILHVGSTRLVRFLSCSSRQKRSNVEKNFGLRGATSSRVREPSPSAVIQAATLNHLLSSSSKEKA

SEQ ID NO: 180195 - protein, 69 aa, Glycine max
  Clone ID: PAT_MRT3847_133730C.1.pep
EPKTLFLNLRHLGVFYKSFLWTITSFDQCKQKSSFFFYKGKNLGQTTQIKDGNFVQGGNPPFRSKEIIF

SEQ ID NO: 180196 - protein, 59 aa, Glycine max
  Clone ID: PAT_MRT3847_133731C.1.pep
MWVPGFQWFSCWRDQGLAGFYHESVKNRDREFNSLKIDGKLKGKKWNENLYYTKMIFLS

SEQ ID NO: 180197 - protein, 46 aa, Glycine max
  Clone ID: PAT_MRT3847_133732C.1.pep
LPALKLLQTKEGAVVKIIGRTDFLIQKKKKGFFVSLGVTAHVCKHF

SEQ ID NO: 180198 - protein, 38 aa, Glycine max
  Clone ID: PAT_MRT3847_133733C.1.pep
HYVLYSVGATKTQVKKPINELPPGEGSGLCIYYLTVDP

SEQ ID NO: 180199 - protein, 144 aa, Glycine max
  Clone ID: PAT_MRT3847_133734C.1.pep
TSPLPPSRVRSARSADRSTAKDGALNELRAKRLKQQDSEANRRPSEASRSSGPGHFSPKHKPFPNLSSSSDSETESKSLSDNEGLSDDDRIIDSDDDRIMLGSEGLSFEDIKEITIRRSKLAKWFMEPFFEELIADCFVRVGIG

SEQ ID NO: 180200 - protein, 100 aa, Glycine max
  Clone ID: PAT_MRT3847_133735C.1.pep
SFRVCSNMLTFFHVISKRRSLINSPINNEVSAYPVISQRLCLTSHNVNRAHLEQYYYMGNKCKRVPLVLGQPWLWPRSQYFITEPKQTGIDMNCIKLQYA

SEQ ID NO: 180201 - protein, 111 aa, Glycine max
  unsure (1)..(111): unsure at all Xaa locations
  Clone ID: PAT_MRT3847_133736C.1.pep
ENLISMPDLIHAHLSNELNHLLTNGWISCWXIHLXHRIWSRVHTKQPPYYYGPYWTMWKLSMSVRTDASHALKELQEANTAFPTGFMRIIXFNNVRQVHCIIFIAYKPPCF

SEQ ID NO: 180202 - protein, 53 aa, Glycine max
  Clone ID: PAT_MRT3847_133737C.1.pep
EIRLITNFLRLHSLYKLTTINCLMDQQRTILYPAQKNAGTAILLEQLTSTEWV

SEQ ID NO: 180203 - protein, 65 aa, Glycine max
  unsure (1)..(65): unsure at all Xaa locations
  Clone ID: PAT_MRT3847_133738C.1.pep
TPIADANWQSLVIESXSPVLIEFWTPXCGPCRMIHTIIDXLAGEYTGVLAXHKRNTDESPLTDTK

SEQ ID NO: 180204 - protein, 91 aa, Glycine max
  unsure (1)..(91): unsure at all Xaa locations
  Clone ID: PAT_MRT3847_133739C.1.pep
XSKPPXLQREKXLSPTTFSTHTTXXLPNGFYXXSXRTLMNLCCXXEXFTRASFLYXXIQXKAMXSDGELARILSNTRRPFAKSXXGNXGGV

SEQ ID NO: 180205 - protein, 83 aa, Glycine max
  Clone ID: PAT_MRT3847_13373C.1.pep
LVDTTVIPASSVIPTGGLSGSHKHHNCAVHVDNKTSTSTTLVATDKSPSNVHGDVSAISIDLEALCNKTTSLLQSPSRSLQLP

SEQ ID NO: 180206 - protein, 83 aa, Glycine max
  Clone ID: PAT_MRT3847_133740C.1.pep
NLSANNKKKIEDAFGRAIQWLYETPLAKPAEFEDKMKELESICNPIIPKMYQAPGGDPGGPMDKNGPAAASGNGVGPQIEEVD

SEQ ID NO: 180207 - protein, 58 aa, Glycine max
  Clone ID: PAT_MRT3847_133741C.1.pep
HQFSAHKHQWPHPPYQPVARYTPRSGPLASIIMIVARIFARRNNNTASVDSTIPIARP

SEQ ID NO: 180208 - protein, 50 aa, Glycine max
  Clone ID: PAT_MRT3847_133742C.1.pep
IGHEFYFFYHSHQFFFLISSLSLKKIIYFLDLFVFIISECNINIVFFIFT

SEQ ID NO: 180209 - protein, 69 aa, Glycine max
  Clone ID: PAT_MRT3847_133743C.1.pep
QYYSFLTTYLNSAFCFLQYYPYHILSATAAIQPTNWSAILILSAMEATVVAKGRSILLNCYRTLFKALF

SEQ ID NO: 180210 - protein, 79 aa, Glycine max
  Clone ID: PAT_MRT3847_133744C.1.pep
ATFIRFLGADSALYIIISTCTDGVEGAFQSWINGETIELMSDDFACSVFSGCISMICRNYGVLLSHNIRRRYIVPKNLC

SEQ ID NO: 180211 - protein, 80 aa, Glycine max
  Clone ID: PAT_MRT3847_133745C.1.pep
YGCEKTTEGIIKQTYRAKHKCASDTPGSCPARTPRNPVVPTTVKRKAACTIKDFCYLLVKNAYNLQETCVFKIESLNRNY

SEQ ID NO: 180212 - protein, 98 aa, Glycine max
  Clone ID: PAT_MRT3847_133746C.1.pep
ELLGKVQKLKKNTDNDGSSSSSKDSSSKDSSSSKGSSSHKDSSSGHSSESKESHSSKDSSLKPCSPNEDSSSVNENPSNSKSLDTVSTSEASHRILKS

SEQ ID NO: 180213 - protein, 78 aa, Glycine max
  Clone ID: PAT_MRT3847_133747C.1.pep
NHPQGGGAMVPTKKCHVQTGFFKAFMLLGGSLLKSNMQKKICFSTKFLEKPSQIVHAKKTTRGGPPPQRKKKEMISLF

SEQ ID NO: 180214 - protein, 370 aa, Glycine max
  Clone ID: PAT_MRT3847_133748C.1.pep
VGYSSAHASAHACGEKTTEGYGCEKTTEGYGCEKTTEGYGCEKTTEGYGCEKTTEGYGCEKTTEGGFKPSSAMRLSPCANTTSMSSGSGSLLWFRKGLRIHDNPALEVASRGASHLYPVFVIDPHFMEPDPNSFAPGSSRAGLNRIKFLLECLVDLDLNLKNLGSRLLILKGDPAEVVIRCLKELHVKKLCFEYDTEPYYQALDVKVKNFALAAGIEGFSPVSHTLFNPTEMPHKNGGKPPLSYQSFVKLAGEPPSSLSTVYSSLPPVGNLGSCDISEVPTIRDLGYGDAEQDEFSPFKGGESEALKRLDECMKDKKWVANFEKPKGNPSAFLKPATTVLSPYLKFGCLSPRYFYQSIQDVYKSMPKHTL

SEQ ID NO: 180215 - protein, 89 aa, Glycine max
  unsure (1)..(89): unsure at all Xaa locations
  Clone ID: PAT_MRT3847_133749C.1.pep
LFQYHKGPVICGENSVYLIXYGNFKPFQLAIMFRLHHRNFHMTNSQPIHSLSRDGKAPNXYYQLIKAAPKLSLTLGTQMLCENYSLGKS

SEQ ID NO: 180216 - protein, 44 aa, Glycine max
  Clone ID: PAT_MRT3847_13374C.1.pep
RRRFRYVTLFFLCSLSLYFFDGTHLVSTYHALYSSVKGIMPLLA

SEQ ID NO: 180217 - protein, 132 aa, Glycine max
  Clone ID: PAT_MRT3847_133750C.1.pep
IKRKVSYTTSFRVAKPLFKLTGKSALRPPTECEFKDMQYEISVRAFMNNNNNNNNISTSTHNFSVCDLKWQKNKSLKWNFFSRELHLTKRSHLSLSLSFFLYIFWVGFRWVFSSSSQKFCFHSRWIFYMLEN

SEQ ID NO: 180218 - protein, 154 aa, Glycine max
  Clone ID: PAT_MRT3847_133751C.1.pep
YNTLLGACAHRGLGDEAEMVFRTMNESGIVPDINTYSYLVQTFGKLNRLEKVSELLREMESGGNLPDITSYNVLLEAYAELGSIKEAMDVFRQMQAAGCVANAATYSVLLNLYGKHGRYDDVRHIFLEMKVSNTDPDAVTYNILIHVFGEDVYF

SEQ ID NO: 180219 - protein, 133 aa, Glycine max
  Clone ID: PAT_MRT3847_133752C.1.pep
QHGEYVSLGKVEAALSSCDYVDNIMVYADPFYDYCVALVVVSYQSLEKWAEQAGIEHRNFSDLCNKPETITEVLQAIFKVAKATKLVKSEIPAKIKLLPDPWTPESGLVTNALKIKREQLKAKFKDDLLKLYA

SEQ ID NO: 180220 - protein, 101 aa, Glycine max
  unsure (1)..(101): unsure at all Xaa locations
  Clone ID: PAT_MRT3847_133753C.1.pep
NFVERNSLTNTVNQAGPRICWERKMAFMQIKRLVAGILRRFTVVPVLTPGDEPHLISFXSSLMKGGFPVKIVDREASSSNKTYFIQSLHVIIPTVFLKFTY

SEQ ID NO: 180221 - protein, 418 aa, Glycine max
  Clone ID: PAT_MRT3847_133754C.1.pep
MGVTDRIIQIGGQISGNPTAGGREKILQKNPDDIVVTAACRSAFTKGGRGGFKDTPAADLMAGVLKAILDRSKINPALVEDLCVGTVLAPGGGATEMRAASLVAGFPESIAVRTLNRQCSSGLQATVDVANQIKTGMIDIGIGAGVESMSLNYGPGAVSEFSEAFENHPEAANCKVPMGVLSEQMAKDLNVTRAAQDAFAASSYQKAVKAQKAGLFDEEIAPLKVSFEDKEGNTKEITVSKDDGVRDGITAESLGKIRPAFAKDGSIHAGNASQISDGAAAVLLMKRSTAEKLGQKILGKYVCASIVGVKPLLMGQGPWKAIPKALDLAGISKDDVDIWEINEAFASQCLWCANELGIPQEKINPKGGAIAFGHPLGCTGARQVSTLLYELKRTGQKVGATSMCVGTGMGMAAIWVAE

SEQ ID NO: 180222 - protein, 96 aa, Glycine max
  Clone ID: PAT_MRT3847_133755C.1.pep
PCHLLIPLVSHLSTMTLQLFVPPPPKEPPPSIAEELVLVPTPKTYHNLLCDMVKDVFCYAACFRRGTLGSNSSTLFFITDSLTLTFYSAIFTFRLE

SEQ ID NO: 180223 - protein, 74 aa, Glycine max
  Clone ID: PAT_MRT3847_133756C.1.pep
PGVIRLKTRFSICLLHDYLEHIQKKVSLAKILCGTTFRFLSLEQLQNVQARTISLITLGCEMKLYLIWYQQLLL

SEQ ID NO: 180224 - protein, 79 aa, Glycine max
  Clone ID: PAT_MRT3847_133757C.1.pep
KCFFNNFCLFFSTGLKGNPAAAHFQSINKNSAATRSRVNIEPQFICAGGVPLNPLWSFNPWCPRIFAFSRPRSQGEQCR

SEQ ID NO: 180225 - protein, 32 aa, Glycine max
  Clone ID: PAT_MRT3847_133758C.1.pep
PCNLAKAIDLLVYNLRLSWMTESSSFMYLRAL

SEQ ID NO: 180226 - protein, 47 aa, Glycine max
  Clone ID: PAT_MRT3847_133759C.1.pep
SFRILTTLLICVRKSWMIDQVQHPTFMDKVAGQLHLGSGRSSRITTL

SEQ ID NO: 180227 - protein, 233 aa, Glycine max
  unsure (1)..(233): unsure at all Xaa locations
  Clone ID: PAT_MRT3847_13375C.1.pep
HASEPHENVYQIRFTKEIFQDYNDYLNRLNQYRQRVWTCKITGKSGLTYEEALVSEKHAAEKVQQIPEELVAPALRIIHYSMLPLKDLADSIAEKLQEQLFVGAQLYGKKNDRVRPCKVLKVMQEDAENVRYVVAWLDENNNIIEREEVSSQDLVQKKPCFSRNILKSFIRKSTYRNAPWVXHDXLAKKHGISTDIPEELRRKFFFHNGLCGLHQKKRKNEGRVNQISNLMIY

SEQ ID NO: 180228 - protein, 226 aa, Glycine max
  Clone ID: PAT_MRT3847_133760C.1.pep
EAWKIGTVKQLRSSRLGLEKSERAGRPPTRKLSDRKAYARQKHSAISASADFLVGSEDGHEELLAAVKGVINSARAFSSQFWRQMEPFFGLMSEEDLAYWKQKINLEPSGLMPTPVPSYIDDCEAVANGFGLTGSERDFEPGDQTGAGIVAEQLQLAKGDSNGIPFCQRLISALISEECNSESEDIMFDACDTESEADGELDLRSLDHHSRSNSHLAWRSPYNYRI

SEQ ID NO: 180229 - protein, 33 aa, Glycine max
  Clone ID: PAT_MRT3847_133761C.1.pep
FFFFFFFFFFFFFFFFFFFFFFFLQCKFYCMSL

SEQ ID NO: 180230 - protein, 55 aa, Glycine max
  Clone ID: PAT_MRT3847_133762C.1.pep
MLSFYAPCVFAEKVYHEQVSLADIADGAFDPVDKIVKGDPGSGKLMACWLMCTGE

SEQ ID NO: 180231 - protein, 53 aa, Glycine max
  Clone ID: PAT_MRT3847_133763C.1.pep
SSSHNPKKEKILAPRFKRSEVNESVSLITAPPIPALLTCIVQLFLMKYAYTKL

SEQ ID NO: 180232 - protein, 195 aa, Glycine max
  Clone ID: PAT_MRT3847_133764C.1.pep
LTAAAATALRGAATLKARALKEVWNIAAVIPVEKNLAVAGGHNNNNNASNGNSKSSFSGELVPEENFLGICSRELLARGCELLKRTRKGDLHWKVVSVYVNRMNQVILKMKSRHVAGTITKKKKNVVLEVIKDVPAWPGRHLLEGGEDRRYFGLKTVMRGLVEFECRNQREYDVWTQGVSRLLSIAAEKNNKNRI

SEQ ID NO: 180233 - protein, 46 aa, Glycine max
  Clone ID: PAT_MRT3847_133765C.1.pep
NVASWGAPAIGIYQTPVFFGGAIKAFWASCQVKPKLFFFARPAFGL

SEQ ID NO: 180234 - protein, 307 aa, Glycine max
  Clone ID: PAT_MRT3847_133766C.1.pep
MGRSPCCSKEGLNRGAWTAHEDKILREYIRVHGEGRWRNLPKRAGLKRCGKSCRLRWLNYLRPDIKRGNISPDEEELIIRLHKLLGNRWSLIAGRLPGRTDNEIKNYWNTNLGKKVKDGHQTTTGNNTQNPMPNPSPSLSPPKLDSHVVRTKATKCSKLLFLNPPPHPSMQNKFKTEAEEEEEEARLVNGVIRNQMEHTTYDNGFLSFPDEEKELSTDLLIDFNVGDFCLSDFLNSDFSNSYNFSCNINNVNNHEQLSPCSDQPDPMFSDEVLKDWTHSNFADEANASNNLRSFISFLESTEERLGE

SEQ ID NO: 180235 - protein, 343 aa, Glycine max
  unsure (1)..(343): unsure at all Xaa locations
  Clone ID: PAT_MRT3847_133767C.1.pep
LLFILFNNKTNVKKIVKSLYGLKQAPKHSHKSLIKXILLYDFQINDSDKCVYVKQFDDNGCVILCLYLDDILIFGSNMHFINDVKFFLFRNFGMKDLGCVDVILGIKLIKKNDDMTFTQSXYVEKLLKKFNYFDAKHAFTPYDSSIKLKKKKSKEISSHKYSQSIGSLLHLTNFSRPVDIAHAVGRLXVIEGFSDTKXSSDFDEIKITSGYVFALASCVVSXNLLDKLLFHMKAKIIALNTATSEDEFLKNVLCDLSLLNKRIPPIPMHCDSQIVISKVTSKILMKKRRHLRVTHKSIRNLISHDVISLDFVRSKNNIADPLTKGLMCQQVFESSRGMRLKPI

SEQ ID NO: 180236 - protein, 47 aa, Glycine max
  Clone ID: PAT_MRT3847_133768C.1.pep
ATFVASWVKGTSGATASTNGGFSSSTSIPISIWIAQKPRCPQIDMNG

SEQ ID NO: 180237 - protein, 38 aa, Glycine max
  Clone ID: PAT_MRT3847_133769C.1.pep
MGKPLFYEILEKPATSCIIGICSMIWFYIQKKNIGYSH

SEQ ID NO: 180238 - protein, 347 aa, Glycine max
  unsure (1)..(347): unsure at all Xaa locations
  Clone ID: PAT_MRT3847_13376C.1.pep
AYVKTKYGSQPWFQENLHSGCISTKDALKFSLIYPLQNLLECKSNMGPFRIRLTYTHTKGNDKSSDCAAETCKRRKIGEPSIVGERSFSSTLENDSSDCCKFLLEKANEPCHFTYSCYRTPFYFGGRYRQYSRNVSQTRWIIDDERMGEASVEEIIGGNILQACXVRMLGPGRPFLVEVQNGRHIPSELFVKDIEKTINKMENKLVRVKNLKLVGSDGWNLMREGEAEKQKQYAALVWISRPLKDEDIQCVSSLKDLKVLQRTPIRVLHRRSPLEREKIIHWMKTETIAGSSQYFLLHLCTQAGTYIKEFVHGDLGRTHPSIGSILGCRAEILQLDVTDIKMECFLT

SEQ ID NO: 180239 - protein, 271 aa, Glycine max
  Clone ID: PAT_MRT3847_133770C.1.pep
MGKPLFYEILEKPATSCIIGICSMIWFYIQKKNIGYSHVGLSYETALEGHHWRIITSAFSHISVIHLVFNMSALWSLGVVEFGAHLGLGVEYYLQYTLVLVVLSGVLVLAMYHLLIQRFKLEYFRRVTAVGYSCVVFGWMTILSVKQPSSKLDLFGFLSLPISFAPFESLIFTSIIVPQASFLGHLSGIVVGYAIAWGLIHGMSNYWALSLLGWIALVFVLSLKRSGAVDLNFLEIESVTDPSLPSVRFLASNSGRTLQMSALPNGNVEIV

SEQ ID NO: 180240 - protein, 58 aa, Glycine max
  Clone ID: PAT_MRT3847_133771C.1.pep
NPQFFKILKGKFKIFQFLLQNHPIFITMLTKKRIPKNLGKPCIHIFFNRGKKKKMIFA

SEQ ID NO: 180241 - protein, 59 aa, Glycine max
  unsure (1)..(59): unsure at all Xaa locations
  Clone ID: PAT_MRT3847_133772C.1.pep
XKLPSXXXSXPXXXXWXSXXXFGIXXXLXXQXSEXAXIXXSSLDXXSXLXXXXXRSXXS

SEQ ID NO: 180242 - protein, 71 aa, Glycine max
  Clone ID: PAT_MRT3847_133773C.1.pep
NYQEYSLANIIYYSLKESTTSEQSARMTAMDNASKNASEMIDKLTLTFNRTRQAVITKELIEIISGAAALD

SEQ ID NO: 180243 - protein, 138 aa, Glycine max
  Clone ID: PAT_MRT3847_133774C.1.pep
PQEPRHGKQRSPRIQPTNQGFRPVKPKVNFQEPPPSADVPPEPRKRPNGDPRLSGIKCPKEQKSQPLTWLGACLCVIFWLIIIIGGLIVLIVYLVFRPQSPHFDVSSVTLNAAYLDLGYLLNADLTMLANFTNPNKKV

SEQ ID NO: 180244 - protein, 76 aa, Glycine max
  Clone ID: PAT_MRT3847_133775C.1.pep
EPWENQTTKTSYCSWRAQGLINPTLESCTSNVGLKCHALQMGSNIKLTKYLNRIHRIRTFDQLHLPGIQFFFLVFE

SEQ ID NO: 180245 - protein, 85 aa, Glycine max
  Clone ID: PAT_MRT3847_133776C.1.pep
RCRSHHLGCQSPPSTLSCFLTPPILTSHVYPCWITPFTTSLSSFLSWSNFPHPILGSILSFLQNVSSYCPFFNLHIIISIKFGFF

SEQ ID NO: 180246 - protein, 40 aa, Glycine max
  Clone ID: PAT_MRT3847_133777C.1.pep
EASLVHIVFCLDACKIRGQVGYRHMHFSVGWVYICCILFP

SEQ ID NO: 180247 - protein, 51 aa, Glycine max
  Clone ID: PAT_MRT3847_133778C.1.pep
NLQDTHLLTVCLVRSLNFDLDLIFYNRGSILIHIRFLYYMVIYFMIYYLFF

SEQ ID NO: 180248 - protein, 61 aa, Glycine max
  Clone ID: PAT_MRT3847_133779C.1.pep
MGRMHSRGKGISSSALPYKRTPPSWLKITTQDVEEDICKFAKKGLTPSQIGVILRDSHGIA

SEQ ID NO: 180249 - protein, 128 aa, Glycine max
  Clone ID: PAT_MRT3847_13377C.1.pep
RNSDDFFGKISVITHWCCSRHRKRSIHVPSLAPSLPAKQLRSPVHDGAFGTFSSRDFLLLHRLPYAPLPLEFQLHRTYFGKKPCFALYVSVLCFFRHYLVRALQLLFLLIMHLLVLMRMSLLSSLAAV

SEQ ID NO: 180250 - protein, 139 aa, Glycine max
  unsure (1)..(139): unsure at all Xaa locations
  Clone ID: PAT_MRT3847_133780C.1.pep
MGXMHSRGKGXSSSALPYKRTPPSWLKISSQDVEENICKFAKKGLTPSQIGVILRDSHGIAQVNSVTGSKILRILKAHGLAPEIPEDLYRLIKKAVSMRKHLERTRTDEDSKLTLIIGERRMRRLAWCXKTTERLPPSW

SEQ ID NO: 180251 - protein, 63 aa, Glycine max
  Clone ID: PAT_MRT3847_133781C.1.pep
NTKFFHSKATTSSWCPSSLLLLQPLLIVKSGSMCMQRQILSSHLCCLCWCYLLSQRQTIFYYP

SEQ ID NO: 180252 - protein, 43 aa, Glycine max
  Clone ID: PAT_MRT3847_133782C.1.pep
PTRPKDTDLGVKTYRLTSDISLSCSLPRQPQNLRTRYFLSFEK

SEQ ID NO: 180253 - protein, 330 aa, Glycine max
  Clone ID: PAT_MRT3847_133783C.1.pep
MELTFPHQDEDDSVVSDCESGVSGSGVVVAPPPPPPQQQQRGFFVRLGEGDVVHDLIKTRFIRGLGMLGPKTEVVSVRRNACSDVVSQARLHSFHAHARAVARLRGGGNHANVKYAWYRTNGEDDVNDIVSQGFGFAHGPKLVLSPDDAPLQSARGCGVGKDGVRHALLCRVILGRSEIVRDNTQHCYEGCEEYDSGVDSFSGPTKYIIWSNRMNTHVLPAYVVSFRVSSFKGMEKSEEEPLRPTSPWMPFPTLISALSKVLPPCDIALISKFYKDKKDKKILRHELIQRVREIAGDKLLVAAIKSYRDNKKKPSFLQSRSKNGLATRIK

SEQ ID NO: 180254 - protein, 34 aa, Glycine max
  Clone ID: PAT_MRT3847_133784C.1.pep
ELTYLINPSTLHSKYLRTQIYIQVLNFIREVRSW

SEQ ID NO: 180255 - protein, 141 aa, Glycine max
  unsure (1)..(141): unsure at all Xaa locations
  Clone ID: PAT_MRT3847_133785C.1.pep
YLFLIFSLALIIAFYCMMIISRASELVSCGLGTXSKLLLKSSSSAPPLQTTSLVGSMVPKVQCPYHSSSFPRSYMSSTLASLANEEEVPSTGINTLIAIEYQHGAVIVNIENPIDSSVFSSLLEASISHWREQVQISKYYY

SEQ ID NO: 180256 - protein, 62 aa, Glycine max
  unsure (1)..(62): unsure at all Xaa locations
  Clone ID: PAT_MRT3847_133786C.1.pep
LLIPCSVAALKRSEQACVVXIHWQQAPPMAANYLVHSAFYXPSFKXPDLYSVFFAFSLXEAR

SEQ ID NO: 180257 - protein, 39 aa, Glycine max
  Clone ID: PAT_MRT3847_133787C.1.pep
PLKNSHTQSPCILFINMAPSPRSPYHYKTHFSSIFITTL

SEQ ID NO: 180258 - protein, 52 aa, Glycine max
  unsure (1)..(52): unsure at all Xaa locations
  Clone ID: PAT_MRT3847_133788C.1.pep
KALNFRRSSWFPGQNQNWQSMPKVFSGLGWQKPQRLWPQIHXELTSGRQSAD

SEQ ID NO: 180259 - protein, 56 aa, Glycine max
  Clone ID: PAT_MRT3847_133789C.1.pep
RGPFLGIFISPSPSSINFFNRQIVPLGFHGIQKLKMNSLLKPRLLFFAKFCPCKMF

SEQ ID NO: 180260 - protein, 155 aa, Glycine max
  unsure (1)..(155): unsure at all Xaa locations
  Clone ID: PAT_MRT3847_13378C.1.pep
ILSTGAQVNELAHIANGRDHGNCVSLLRVNTQNVGQNNMLILQESFIDATGSFVIYAPIDVAAINVVLGGGNPDYVAXLLPSGFAVLPDGXGLNGGPGPICEAGSGGGCLLTVAFQILVDSAPTSKISVGSVTTVNSLIKRTVEKIRDAVSLDGN

SEQ ID NO: 180261 - protein, 260 aa, Glycine max
  unsure (1)..(260): unsure at all Xaa locations
  Clone ID: PAT_MRT3847_133790C.1.pep
MALSCSKVLSFYLSPVVGGGDVPKKLTFSSFLGLSKGVGGSRSSRVRAASNAPAPLAGVIFEPFQELKKDYLAVPIAHNVSLARQNYADDSESAINEQINVEYNVXYVYHTFVCVRRQKTTVALKGTCKVPCKESSEXEEREHAEQLIEYQNIRDERLVLHPITSPSSEFPQSEKGDALYAMEIALSLEKLTNEKLLHVHSVAERNNDPQLADFIESEFLYEQVKSIKKIAEYVAQLRLVGKGHGVWHFDQKLLHDEDHV

SEQ ID NO: 180262 - protein, 225 aa, Glycine max
  unsure (1)..(225): unsure at all Xaa locations
  Clone ID: PAT_MRT3847_133791C.1.pep
PPPXXXXXDEIPEXXNDFRMAAKNAIEAGXXGXEIHXANGYLLXXFLKDKVXDRDDEYGGSLENRCRFPLMVVKAVCDDIGADKVGVRLSPFANYCNCVDSNPQALGIYMAQSLSQLGILYCHVIEPRMLTMFEKHETDVSLLPIRKAFNGTFIVAGGYNRSEGNRVIANGGADLVAYGRLFLANPDLPKRFELDVELNKADRSTFYTTDPVVGYTDYPFLENDC

SEQ ID NO: 180263 - protein, 38 aa, Glycine max
  Clone ID: PAT_MRT3847_133792C.1.pep
PLQPLLMPAWADHRRRLASFLSSTKRDFLLRNKRQTEL

SEQ ID NO: 180264 - protein, 94 aa, Glycine max
  Clone ID: PAT_MRT3847_133793C.1.pep
QPLSQAFVTVPKKQQKGNNPKGQRKKTKNQKKTGRPKGSNLSYPSSQVKNPPKWSPNSIPRAVFYNVLNGKNLAVTQLNPLQQIPPSPTGVITK

SEQ ID NO: 180265 - protein, 197 aa, Glycine max
  Clone ID: PAT_MRT3847_133794C.1.pep
MAEAEHNDPTSPEREVQTKSNKKKLRKRKRPHKTEQKRDEDKNDANIDSAQTQTEDEEEEQKEEDTNNFSSGIMSTESFSSLGLSEPTSKAIADMGFHRMTQIQAKAIPPLLTRKDVLGAARTGAGKTLAFLVPAVELLYSIQFTPRNGTGVVVICPTRELAIQTHAVAKELLKYHSQTLGLVIGGSGRKGEAERIV

SEQ ID NO: 180266 - protein, 734 aa, Glycine max
  Clone ID: PAT_MRT3847_133795C.1.pep
MEAKNLWRFLVLSIGVVLVLLVTWLPNKEALDCNLYSGWCTSKNRFYSSAHPNNPIKKPSFSTYHHHKNQHHESEIPQHPLDPLTIQEFNKVRTILLNYPLFKSSSSYTLNSVVLEEPDKKLVLKWKKGDLPLPRKASVVAYVKGDSHVLTVDLETGQVVSQEAITWSVSGYPTMTLEDMVGVLEVPLKSTEFNRSITKRGVNLADLACLPISSGWYGTQVEENTRLIKVQCYSKEGTVNFYMKPIEGVTALVDMNKKEVLSISDNGQNIPVANGINTDYRYSIQKLNGGELRMLNPISLEQPKGPSFTINGHLVKWANWEFHLRPDPRAGIIISQAKVRDPDTSKLRSVMYKGFTSELFVPYMDPTQDWYFKTYMDAGEYGFGLQAMPLDPLNDCPKNAYYMDGVFASSDGTPYLQPNMICIFESYAGDIAWRHAECPITDLKVTEVRPKVTLVVRMAAAVANYDYIVDWEFQTDGLIRAKVGLSGILMVKGTTYENMDQVPNQEYLYGTLLSENIIGVIHDHFITYYLDMDVDGSDNSFVEVNIKKQETSPGESPRKSYLKAVKKVAKTEKDAQIRLQLYDPSEFHVVNPLKKTRIGNPVGYKLVPGATAASLLDPEDPPQKRAAFTNNQIWVTPYNKSEQWAGGLFAYQSKGDDTLQVWSNRDRPIENKDIVLWYTIGFHHIPCQEDYPVMPTVSSSFDLKPANFFERNPILGVPPNFEDDLPVCKARDSA

SEQ ID NO: 180267 - protein, 269 aa, Glycine max
  Clone ID: PAT_MRT3847_133796C.1.pep
MASVSSVLAPFRRLDGKVAIITGGASGLGAATARLFSKHGAYVVIADIQDDLGLSVAKELESASYVHCDVTKEEDVENCVNTTVSKYGKLDIMFNNAGVSDEIKTSILDNNKSDFERVISVNLVGPFLGTKHAARVMIPAKKGCIINTASVAGCIGGGATHAYTSSKHALIGLTKNTAVELGQHGIRVNCLSPYLVVTPLSKKYFNIDEDKIREIYSNLKGAHLVPNDVAEAALYLAGDESKYVSGHNLVIDGGYTDVNAGFTVFGQSQ

SEQ ID NO: 180268 - protein, 54 aa, Glycine max
  Clone ID: PAT_MRT3847_133797C.1.pep
TRPFFFFFFFFFFLKGILENSIKIVVSYLDSREVSYINIQCKIWAGGIGICRRD

SEQ ID NO: 180269 - protein, 141 aa, Glycine max
  Clone ID: PAT_MRT3847_133798C.1.pep
LWATSNVISINRAHGRRTGAHAFKVRPFMIGCGTRLPLYRSIHKAECGVTGTVMGFESGTVDLIMRAVAITGVIYTVKECRELGVAGGCILEGEGNHLKLLHIWCAGTVHMCCQRKHDNSIHTILTVLMLSELALLQVIMP

SEQ ID NO: 180270 - protein, 157 aa, Glycine max
  Clone ID: PAT_MRT3847_133799C.1.pep
IRLERLEGLDPLAVSAVFCAAQYMGEKEISGMDCFVLKLSADQKDLVERSDNTAEMIKHAIFGYFSQRSGLLVYLEDSYLTRIQAPGSHPTYWETTMSTKIEDYRIADGAMIAHAGSSTALITRFGDNLKAGPSITRLEESWTIDDVAFNVPGLSSD

SEQ ID NO: 180271 - protein, 91 aa, Glycine max
  Clone ID: PAT_MRT3847_1337C.1.pep
RVPPLRESTLLGLNLIMILCILSKSLYLSFFFLRVTPLREIIVTHAYIDTGSICILPIDPFENLFSGNRVSRVCIVYPTRFVEDRFSAKKK

SEQ ID NO: 180272 - protein, 60 aa, Glycine max
  Clone ID: PAT_MRT3847_133800C.1.pep
NLCSWQFVPESLLQNGPGFGILEKALVLLFIFLGISYETFCLTSFAGDLVMLCPILLPLI

SEQ ID NO: 180273 - protein, 415 aa, Glycine max
  Clone ID: PAT_MRT3847_133801C.1.pep
IRLELEPNRLERLEVDGSHGRRPVAHRLSFVEMVVPYGDPNDPHYRKNAFDAGEDGLGKNAHSLKKGCDCLGYIKYFDAHFTNFTGGVETIENCVCLHEEDHGMLWKHQDWRTGLAEVRRSRRLTVSFICTVANYEYGFFWHFYQDGRIEAEVKLTGILSLGALLPGEFRKYGTMIAPGLYAPVHQHFFVARMDMSVDSKPGEALNQVVEVNMKVEEPGEKNVHNNAFYAEETLLRSELEAMRDCNSLTARHWVVRNTRTCNRTGQLTGYKLVPGSNCLPLAGSEAKFLRRAAFLRHNFWVTPYSRDEMFPGGEFPNQNPRVGEGLATWVKQNRSLEETNVVLWYIFGITHVPRLEDWPVMPVERIGFMLTPHGFFNCSPAVDVPPNACEMDSKDNDIKDNGSSKPIQSGLTAKL

SEQ ID NO: 180274 - protein, 39 aa, Glycine max
  Clone ID: PAT_MRT3847_133802C.1.pep
CGGNLDICSTSIQQNGDMTIQSANGGDDKKSRGSLHQGY

SEQ ID NO: 180275 - protein, 116 aa, Glycine max
  unsure (1)..(116): unsure at all Xaa locations
  Clone ID: PAT_MRT3847_133803C.1.pep
GPGFWLENPPPPPGGLRKEGKPVRVVFFFSWGLFFGPPVGSQKGFFPPSGPVKVSLWAGSPFGWPKIFXTPGKALGLFFFGARAPPGKISRGFGFPQEAFFFFPQNPLWIFLLPFF

SEQ ID NO: 180276 - protein, 106 aa, Glycine max
  Clone ID: PAT_MRT3847_133804C.1.pep
RKQLILTRGAPYGTMKTLRCPYCRNSNGGSKAQKKTSHVGSEPNQVMELFENSSLTIHLEPLIQCQPLTLFLLDPHNHVGFVRKWAFMGLIEKNAYMLPVLGTPPF

SEQ ID NO: 180277 - protein, 254 aa, Glycine max
  unsure (1)..(254): unsure at all Xaa locations
  Clone ID: PAT_MRT3847_133805C.1.pep
MEGIQVRCDKLQGGVIQRSRLRVWFIRVCSSIVLWTCLVQLVTVSELWHSHFFLGISSRIYHTNQSPLEAQNELAQPPPPFLPARNYTSNGFLRVSCNGGLNQMRAAIRDMVTVARLLNLTLVVPELDKKSFWADPSYFEDIXDVRHFIGSLQDEVRIVKRVPKRFSRISGYSTLKMPPVSWSDEKYYLEQILPLCRTHNVVHFNRTDARLADTGLPLDLQKPTCCVKFQALEISPALCHVGPRLDRYLPENGT

SEQ ID NO: 180278 - protein, 93 aa, Glycine max
  unsure (1)..(93): unsure at all Xaa locations
  Clone ID: PAT_MRT3847_133806C.1.pep
DSQEAVAHIGDLKYGEYVPLSTETNXVETPPEWQLDLPCDKIPRVLTTTDERLLGSXHAGYDPFLWGIEKFAPPKMPLEEEILCKAAQTWLRN

SEQ ID NO: 180279 - protein, 265 aa, Glycine max
  Clone ID: PAT_MRT3847_133807C.1.pep
RNQQSKSAVYGLDQFSDLSDEEFRTTILMKNTLPIDNSAPVPFVGSPSAPATFDWRSSGAVTAVKDQEQCGSCWAFSATEAIESAWILAKKATNNSVDLAPQQIVDCDRQDGGCNGGWPSSAMEYVHSAGGQEDESHYPYTAKNGNCAFNSAYVKAKINAYKVAATPKDENSLQAGLLALGPLSICVDASSWNGYQGGVLTSRECCTSCQLDHCVQLVGYNSAASTPYWIVRNSWGNGWGYGGYIYLAMGGDTCALTAKATWPTL

SEQ ID NO: 180280 - protein, 66 aa, Glycine max
  Clone ID: PAT_MRT3847_133808C.1.pep
SLTKYLKVHETCHMSLLLFTHKPIFFLYSDVIVTFIFPTIMCWFAYKGHGKTNSTDKANLTMLDII

SEQ ID NO: 180281 - protein, 90 aa, Glycine max
  Clone ID: PAT_MRT3847_133809C.1.pep
YNPKLKLLGKYLKGGGLYRGKKNTFGGEHPFAYKNRHTKGWFWLYNKKGACNIPRAIWGWIYWLAIQRFTNRFLNGNPIPVNRVVPKTMP

SEQ ID NO: 180282 - protein, 31 aa, Glycine max
  Clone ID: PAT_MRT3847_13380C.1.pep
HDGYINRPYIWTISFDTLYVRFYYIRLIDIK

SEQ ID NO: 180283 - protein, 89 aa, Glycine max
  Clone ID: PAT_MRT3847_133810C.1.pep
RKKEHPDSSHPHTGNSTTKISSLNAYACGQSNFFKLSANGKIAAPIVYVNVHILMDYYEAELTALKKKLGGLFETKDLDPLEHFEEIIC

SEQ ID NO: 180284 - protein, 57 aa, Glycine max
  Clone ID: PAT_MRT3847_133811C.1.pep
APHIYRLNTVLFSLPIISYFLSLKSSTSLYKFFMYFLFSYNAFAFQPSQNTYLKIQK

SEQ ID NO: 180285 - protein, 190 aa, Glycine max
  unsure (1)..(190): unsure at all Xaa locations
  Clone ID: PAT_MRT3847_133812C.1.pep
GSGVSSNTSVSPALSRPADQIFEIVNLANELLPPLPQGTISLPVSSNLFVKESVVKKSPPSGNPGIQEDTNGNVHEISARAKLLNDKPELLKQFGMDLLPVLMQIYGASVNGPVRHKCLSVIGKLMYFSTAEMIQSLLSVTNISSFLAGVLAWKDPHVLVPALQISKILMEKLPGIFSKXFXKKGVVHAI

SEQ ID NO: 180286 - protein, 53 aa, Glycine max
  Clone ID: PAT_MRT3847_133813C.1.pep
HSPILYLFFIDKRLRPTIYFTHVKHIITYAKRHVLFMYPRIISMAILLNTHCL

SEQ ID NO: 180287 - protein, 202 aa, Glycine max
  unsure (1)..(202): unsure at all Xaa locations
  Clone ID: PAT_MRT3847_133814C.1.pep
VVDALTHEDASVRTAACICLRSVSRSIKNLSPGRFMNERVVCPLVQLLSDLSTSVQVAALGAISNIVVDFMPHKSTFIECGGIKELVQLTKSMDSSLRLNAVWALRNMVFRADKICKEGIFVELTASSMASLICDPEPSVQEQALALVRNFVDGCVYSVEHAFAEDGIILDAVGRQLKKSTKIEIGIXGMYVLSNIASGNEF

SEQ ID NO: 180288 - protein, 81 aa, Glycine max
  Clone ID: PAT_MRT3847_133815C.1.pep
GSSMEMGAAITILIFSQYKLPVSTSMCISGATVGVGLCNGTFKAVNWQRVGLLFFSWVMTIPIAGLIGGITMGLFLNAPSY

SEQ ID NO: 180289 - protein, 102 aa, Glycine max
  Clone ID: PAT_MRT3847_133816C.1.pep
MAASLSTVGAVNRALLNLNGSGPGVSDPSSYFFGSSLNNGIGSRVPITKTSSGSFKIVAVQQKKQIDQTHQTNPDRWNGLAYDISHDQQDITRRKGLVDSLF

SEQ ID NO: 180290 - protein, 147 aa, Glycine max
  Clone ID: PAT_MRT3847_133817C.1.pep
MDWAFVHKTWDKWASTNIGYSGHPLKAALLINYDPTGPSRLLSTIAEQEGIRANPIELSHFVDFIKQNKLQSELFIIGSNQYLVTSIHENWFSARCINTSKPAGEGAIVIQTAAYILVALYEGSIGPASRAMAAADQLTWQLGRKNL

SEQ ID NO: 180291 - protein, 139 aa, Glycine max
  unsure (1)..(139): unsure at all Xaa locations
  Clone ID: PAT_MRT3847_133818C.1.pep
KPGGHGSTXTVRKPAVTTIERVSTSPLAPTCRVALILDVDNNLALLIPRVRNPRLRVTITQCTRLTPIPRPLATPTKLGGTAAQVLFSKPAVTTNQRVSTSPLAPTCRVAVMVDVDKKFSSDYILLTILGPALPPFTIS

SEQ ID NO: 180292 - protein, 108 aa, Glycine max
  Clone ID: PAT_MRT3847_133819C.1.pep
ESARAGALRTKVDSDGANVMVALYENGLVTDCPRGENKGRVLSNDYVVRKLEKLCTVKDISAKKTVSGMVNFPLWEGFKSSKCGLAVFVQSKSHQIFGSQSFQLPDDI

SEQ ID NO: 180293 - protein, 94 aa, Glycine max
  unsure (1)..(94): unsure at all Xaa locations
  Clone ID: PAT_MRT3847_13381C.1.pep
TSXAXXRKLGIRLELGRSXGXXXRXRXXXLPHAIASXXXGXGXXNEXWTXXVTXKXXTXSAQWKDXXQXXXHXDXSXEXHXNXXHDXXCXXXNX

SEQ ID NO: 180294 - protein, 54 aa, Glycine max
  unsure (1)..(54): unsure at all Xaa locations
  Clone ID: PAT_MRT3847_133820C.1.pep
EGLFGPLLILFSLSLCLAMSGVLVLASFFHMFNQHRTLSILPXPXXXFVSLPFP

SEQ ID NO: 180295 - protein, 98 aa, Glycine max
  unsure (1)..(98): unsure at all Xaa locations
  Clone ID: PAT_MRT3847_133821C.1.pep
MGLMIHLIILTLSDTTITVIAEYIYTIDSGMALXSDTGTIPGPVHSLIYLAKQLYDGCSIGDANIQDGSTIIYALAISSDPLILGNTITVMTDTHTAA

SEQ ID NO: 180296 - protein, 57 aa, Glycine max
  Clone ID: PAT_MRT3847_133822C.1.pep
NIYCSKFVLKDKIYLQANQQTYSKFLEHAHNQNLSQPYTRSLNTKSCWNPTSSKLVN

SEQ ID NO: 180297 - protein, 71 aa, Glycine max
  Clone ID: PAT_MRT3847_133823C.1.pep
LMYGHLRDFLKKKNQSCKHLGWSLVKMKTNFPKGFYKKIRGGSYDSINGSMKITFYTKLLYWSKLIPPHLD

SEQ ID NO: 180298 - protein, 45 aa, Glycine max
  Clone ID: PAT_MRT3847_133824C.1.pep
TKHQVLFAVIAVICCQRAIKTLWRLTLLDITPHQTLSISRKICCH

SEQ ID NO: 180299 - protein, 75 aa, Glycine max
  unsure (1)..(75): unsure at all Xaa locations
  Clone ID: PAT_MRT3847_133825C.1.pep
RRKGLVAGRTTAAXRDKDKDEKEPVCRSCGAEIQLPLERVHKQVKRGVPPEGPVKGTSTMYWASILKYLTTEGVE

SEQ ID NO: 180300 - protein, 92 aa, Glycine max
  Clone ID: PAT_MRT3847_133826C.1.pep
VSYVMFQGSKRLVGYWCYRGTCGCARGSFGTDSVGIWKLILVHTMMLASARSSCLGKLLLGSCVPALLLMAGSPPRLVLPVRRLAWDQALIL

SEQ ID NO: 180301 - protein, 204 aa, Glycine max
  Clone ID: PAT_MRT3847_133827C.1.pep
MTMALLAGQSSISALPFVNPTSLSFKPLAFTKSLALPSAQRPTSLRLKCKMESDGDILRGSTRTVTTLMGLAVLLMKKAAIPVLNININSSSNSVSTMGALFLASLRDRPSASGALNTPLTVVAAGLGKWLDIYSGVLMVRVLLSWFPNIPWERQPLSAIRDLCDPYLNLFRNIIPPVFDTLDVSPLLAFAVLGTLGSILQTAM

SEQ ID NO: 180302 - protein, 147 aa, Glycine max
  Clone ID: PAT_MRT3847_133828C.1.pep
WKVRAWGCKGPCRGDEKGKRTGEEKEKAREMKREKEQLKRAKNHLLEQLQIKKEQEVALRKSVEKLEAKASKEESEKMNLTTTVVQLNRTVGELEKKMKEKEDGMLDLGEEKREVIRQLCLWIDYHRSRYDYLKDILSKSRRGQSAA

SEQ ID NO: 180303 - protein, 35 aa, Glycine max
  unsure (1)..(35): unsure at all Xaa locations
  Clone ID: PAT_MRT3847_133829C.1.pep
XSDMXKENDXXYAEDIIGMYLFNYFYKIKSIYMRP

SEQ ID NO: 180304 - protein, 83 aa, Glycine max
  Clone ID: PAT_MRT3847_13382C.1.pep
IKKNKKLDPNLHCQRACNRELNYSKTNPGMEYVGLTVENKRGNQRGLAKTSPPSFLSPHLGGTMGLGSGIRVQELKREAKLAP

SEQ ID NO: 180305 - protein, 67 aa, Glycine max
  Clone ID: PAT_MRT3847_133830C.1.pep
GATLLFLELWSLFVQQPQAVYPAWFQHNGGLEVVFKGWRFIRHHFESFKNSEYVFGDSLTNARIVLY

SEQ ID NO: 180306 - protein, 131 aa, Glycine max
  unsure (1)..(131): unsure at all Xaa locations
  Clone ID: PAT_MRT3847_133831C.1.pep
VYTPETAQEETRTHRARDVRTARASKNSKPQATAKQAGARESIIEEXARPDCNIVGAMRSVEDHQTNPENAARTIEEAPLRGGRPKQEDTYTKTNVQTEPNMKSRRQPKSTTTKGESAQGKDPARGKAKEA

SEQ ID NO: 180307 - protein, 89 aa, Glycine max
  Clone ID: PAT_MRT3847_133832C.1.pep
MPVRNIADTRPEEATHPHTLKADVAEFILTFMFLFAGSCSSIVYNKLTDNGADTPAGLMSVFIAHAFALFVAGFVCANICGGQLNPRVT

SEQ ID NO: 180308 - protein, 61 aa, Glycine max
  Clone ID: PAT_MRT3847_133833C.1.pep
NKLVYTLTSNLYHPIIKFEPEPAGIQNIPIMNPFKPYHLNAHRCLLIKIDIPLQFHKTYNY

SEQ ID NO: 180309 - protein, 63 aa, Glycine max
  Clone ID: PAT_MRT3847_133834C.1.pep
TPPPICGNTIQGEPRMMNNIFIYLDLLFIPSMYSLYVKQVINSRIRHRIISHTHSQIVRSYKS

SEQ ID NO: 180310 - protein, 53 aa, Glycine max
  Clone ID: PAT_MRT3847_133835C.1.pep
SNPVSLFVGSLCASSSMVLEELTTLPTARIVFSIDFFLQSHGLWFMISGTDRI

SEQ ID NO: 180311 - protein, 53 aa, Glycine max
  Clone ID: PAT_MRT3847_133836C.1.pep
QSPSTFTRSDSSSEFKPSLIAFTPTHQNTKTNKPEWELPYPLYFNSLTTRAQK

SEQ ID NO: 180312 - protein, 58 aa, Glycine max
  Clone ID: PAT_MRT3847_133837C.1.pep
DFFKGSLSLASCCTTMEKLLHTQSSLMAKAYNQHIQAFNSIQFELVRGFQYIIDISKD

SEQ ID NO: 180313 - protein, 84 aa, Glycine max
  Clone ID: PAT_MRT3847_133838C.1.pep
SEVKCASFRLAVAAHKIRALKTIPDECVERIKDYIKGEQFRSDSKTVNQQGFFYARERQVHHNDIFIFCIDNTVLSNIPYYEKH

SEQ ID NO: 180314 - protein, 60 aa, Glycine max
  Clone ID: PAT_MRT3847_133839C.1.pep
HFSAYRVIAWTPFLLLLVEDEYHQTSCAKTMTANSTQIPRIKTLSNIVIILAMRNKNSFF

SEQ ID NO: 180315 - protein, 52 aa, Glycine max
  Clone ID: PAT_MRT3847_13383C.1.pep
FSPPLPQICLYVPQKSFCALEFWQGHEKGLFFWGSVKIFPPLKRIFRGSDQG

SEQ ID NO: 180316 - protein, 192 aa, Glycine max
  unsure (1)..(192): unsure at all Xaa locations
  Clone ID: PAT_MRT3847_133840C.1.pep
MLDPRTHHPTNSFELYDAAPHKPHTWEATNSSGLWPSKPAFEEVEVDDSGICSPPMWTTSPARRKNNLRSLSPTSRTQAIVSGQRELMEMVKNMPESNYELSLKDLVEHHRVVDATRQEKNVVEERKNLSSVYMKREKSRKVDNNNKMAQVKRNGNIDRGGFYLKMGLPFPFGSXGQKKKMXKXNESLGNSS

SEQ ID NO: 180317 - protein, 49 aa, Glycine max
  Clone ID: PAT_MRT3847_133841C.1.pep
RWLHCLKSGVSSGIHLLCDHFPGKRERKQCNLVLQKKDETCKSFMTLIK

SEQ ID NO: 180318 - protein, 277 aa, Glycine max
  unsure (1)..(277): unsure at all Xaa locations
  Clone ID: PAT_MRT3847_133842C.1.pep
AARRRRKSCSLWLVRRARCSDNEGIEGKTFAVTGGLGFVGSPFGLERGRRLRRXALCLELIRRVARXVRSFDLRLSSPWSRPLKDKGVLCVQGDVARKEDVERVLRGSDCVFHLAAFGMSGKEMLQFGRIDEVNINGTCHVIDACLHLGIKRLVYCSTNNVVFGGQQIINGNETLPYFPIDHHVDPYGRSKSIAEQLVLKNNARTLKNDSGNRLYTCAVRPAAIYGPGEDRHLPRIVTLAKLGLLLFRIGDITVKSDWFFVDNLVLALILASMGLLG

SEQ ID NO: 180319 - protein, 167 aa, Glycine max
  Clone ID: PAT_MRT3847_133843C.1.pep
MHLSENEGIEGKAFVVTGGLGFVGSALCLELIRRGAREVRAFDLRLSSPWSRPLKVKGVLCVQGDVARKEDVERVLRGSDCVFHLAAFGMSGKEMLQFGRIDEVNINGTCHVIDACLHLGIKRLVYCSTNNVVFGGQQIINGNETLPYFPIDHHVDPYGRSKSIAEQ

SEQ ID NO: 180320 - protein, 63 aa, Glycine max
  Clone ID: PAT_MRT3847_133844C.1.pep
LGLDRPKCPACGTFESGRAIHLTRSFRGLLLTISVILGAGNACSQVAPIRSLRLPLLSSSHTC

SEQ ID NO: 180321 - protein, 43 aa, Glycine max
  Clone ID: PAT_MRT3847_133845C.1.pep
CKRTTRGLFIYHSLTVHYIPLIHSLARLLIIVQEPMLVLSVTF

SEQ ID NO: 180322 - protein, 96 aa, Glycine max
  unsure (1)..(96): unsure at all Xaa locations
  Clone ID: PAT_MRT3847_133846C.1.pep
MLPFVLTTPPFSGEQFCSSASCSTHHHSPPSLPFRPPTGDLGQTEWTASTLKHIDSSDYDVFLLPGDLSYADSQQPLWDSFXRLVEPYASKKPWMV

SEQ ID NO: 180323 - protein, 228 aa, Glycine max
  unsure (1)..(228): unsure at all Xaa locations
  Clone ID: PAT_MRT3847_133847C.1.pep
LSFQKQYIRCLELKTDYHIGWICLKLMECQYELQIDSNTIDLNFEECVKRSGKXSNMWMAVYNLVRGMISLQKRDLVSAEDFMAQACSLGGXESCLFLCHGAICMELVRQCHGSQFLSRAINSLTKVHEHSLIPLPFVSVLVAQAEGSHGSKERWNRNLRLEWYNWPPGMRPAELYFQMHMLARQLKVGPNASIESTQSPHRWVIRAIHMNPSCMRYWRILQKLMEET

SEQ ID NO: 180324 - protein, 59 aa, Glycine max
  Clone ID: PAT_MRT3847_133848C.1.pep
HHHATPLSEDRNLLVQKPKSYAAGTQAVRSDDYHESSKRRPEPVFTFSLINASLPKVKV

SEQ ID NO: 180325 - protein, 49 aa, Glycine max
  Clone ID: PAT_MRT3847_133849C.1.pep
LVCDVSIVLFVFRGAVFKSWATCVYYKDMGKRWYIFVVCFSFNSLYIYI

SEQ ID NO: 180326 - protein, 102 aa, Glycine max
  Clone ID: PAT_MRT3847_13384C.1.pep
TLSLLSSGVLVHSPISMTASAIHMDPFVSTSSSLLIIILRSPMFPCKRASTTISTRRASEPCFIAEVSFFLFTVTNRDAPCREVAETTFTINLRLIHDDQVL

SEQ ID NO: 180327 - protein, 96 aa, Glycine max
  unsure (1)..(96): unsure at all Xaa locations
  Clone ID: PAT_MRT3847_133850C.1.pep
RASDRQKNIFVYLFFFVLYMLLGLCLPSRGFVHFSTYFQLKTSTCTICRYLGTGPSLFLSNEVVSSPNLXMYPDTLPVPAISLILPRVDXKKTKTK

SEQ ID NO: 180328 - protein, 45 aa, Glycine max
  Clone ID: PAT_MRT3847_133851C.1.pep
TKVHNMMCCIYIGRYFIPLHPLNYHQACPARFGFVEFCASHWIPS

SEQ ID NO: 180329 - protein, 61 aa, Glycine max
  Clone ID: PAT_MRT3847_133852C.1.pep
CSTCSRRSQRSICSCIAALRRTGGLPADCFGTRSGSFDLRLLRVCMGSQVLWKLPYVPGDS

SEQ ID NO: 180330 - protein, 106 aa, Glycine max
  Clone ID: PAT_MRT3847_133853C.1.pep
GGGGVLDNKAVSKWVGIVVLASNQASGGKLYEAACSLKSLLQDRAYLLVAERVDIAAAAAASGVLLSDQGLPTVVARNMMLDSKSELVVLPLVARMVRTVDAAVNA

SEQ ID NO: 180331 - protein, 276 aa, Glycine max
  Clone ID: PAT_MRT3847_133854C.1.pep
PRVPLPTPPIKPHSEPKVWNFFKLPFRHSATTNTTPSSANLHHLHHHHNHHHHHHHHHNPNNLPLEGSTSHTSNSVSSVARSLLPTRRRLKLDPSNKLYFPYEPGKQVRSAIRIKNTSKSSVAFKFQTTAPKSCFMRPPGAILAPGESIIATVFKFVEQPENNEKPEKSGLKFKIMSLKVKGSIDYVPELFDEQKDQVAVEQILRVVFLDPERPCPALEKLNRQLADADAALEARKKPAEDAGPKIIGEGLVIDEWKERRERYLAKQQGEVVVDSV

SEQ ID NO: 180332 - protein, 77 aa, Glycine max
  unsure (1)..(77): unsure at all Xaa locations
  Clone ID: PAT_MRT3847_133855C.1.pep
NNDFYLLFKLHQSLYERILSTKTHSMTSXIKWKAKDSISPYPYSTFMNAFYNFLNXSAENSNFEDXCLAIICNQSYV

SEQ ID NO: 180333 - protein, 65 aa, Glycine max
  Clone ID: PAT_MRT3847_133856C.1.pep
PRVRTRVRAFVSSLIKAAVRGQHKGGLGTLVNRDDDGYQHHHDGAKCVYGAIFHLLKVLLVPSYI

SEQ ID NO: 180334 - protein, 48 aa, Glycine max
  Clone ID: PAT_MRT3847_133857C.1.pep
KILIKWGKRNRLPPGLKGVNGKLNLFLTMGGEKNFYLSGLFFFSKPGF

SEQ ID NO: 180335 - protein, 88 aa, Glycine max
  Clone ID: PAT_MRT3847_133858C.1.pep
KDFEEVEVGRGKLNFVILYFIFFVMDWNLKAPSWDLVDHVDKATTLQQNIGTKEEQNRFGVYRMKGEFSVDLKLGHHHVGNSGTESAL

SEQ ID NO: 180336 - protein, 583 aa, Glycine max
  Clone ID: PAT_MRT3847_133859C.1.pep
STRTQHTQRKMDFELRRAREKLEKEQRERKERARLKLLKEKKAKEEAQKQKEAIEAVQRSRRIDAAQAQLKADQQMQENLLAGRGIVFYRLLEAFFYEGAGDKIKLPPSCFAELSEQGTFDKGQGPLYFQLSLVHEESTSSIQTTDKEKQGRTTHSGVLEFTADEGSVGLPPHVWNNLFSEGTPKPPLVEIRYVWLPKGTYAKLQPERVGFSDLPNHKAILETCLRQHATLSQGDILTVNYGELAYKLRVLELKPSSSVSVLETDIEVDIVDPDTSSEKTDEHVLMPLVFGMSQIGTVEEGKFVYYKFSVDNVTWEKLSSGNSCVELKLESETDGGDTDLFISRHPLIFPTRHQHEWSSHDIGSKTLILSSKDKNMGAGTYSIGVYGFKGITKYKISVMVQDNFNQNVGQQASSSMSSMELDTEQCRNCKHYIPSRTIALHEAYCSRHNVVCQHAGCGVVLRIEESKNHIHCDRCDQAFQQVELEKHMKVFHEPLHCPCGIILEKEQMVEHQASVCPLRLITCRFCGDMVQAGSSAMDVRDRLRGLSEHESICGSRTAPCDSCGRSVMLKDMDIHQVAVHQKG

SEQ ID NO: 180337 - protein, 120 aa, Glycine max
  unsure (1)..(120): unsure at all Xaa locations
  Clone ID: PAT_MRT3847_13385C.1.pep
SXPPIGSPQIILSLSSGSHFPFGXXVPPPPLFFFXLIIQFFHQTKKXFPPPPPLIPMXXLNIHSXXXNFXXPXPXXXXXXXSFPXXXXXXXXPKKPHXXPPXXXXXXXXPAPPRXXRPPQ

SEQ ID NO: 180338 - protein, 85 aa, Glycine max
  Clone ID: PAT_MRT3847_133860C.1.pep
HCMLRISWQGLGGREKPRIDGSGLYNVRSVYICVCVCERSVCVVNLEGGWKFLWHKLVPLNVIMFIWMVVKDRIPVKIIYIAEGF

SEQ ID NO: 180339 - protein, 166 aa, Glycine max
  unsure (1)..(166): unsure at all Xaa locations
  Clone ID: PAT_MRT3847_133861C.1.pep
GLRNSSFSPVRAACTEIRTNPEAVSHLLTELLADHHKLGPFMQXPLPYAARLLSQEILKDNGMLPNSKXGDFDRLQDIIPMTMAFLNLMRRVTWTGIGGWNTPLARDXYPVTTGMTMAWQVAAASATSYTAHRIWGLAIAVYTYPNSNFVGRLLGPRGNSIKRVEA

SEQ ID NO: 180340 - protein, 93 aa, Glycine max
  Clone ID: PAT_MRT3847_133862C.1.pep
RFNSRPLNLFETLVKTYRDSGSAPFVFDLLIKACLDSKKLDPSIEIVRILLSRGISPKVSTLNSLISRVCKSRGVDEGYAIYREFFRLDEENN

SEQ ID NO: 180341 - protein, 56 aa, Glycine max
  Clone ID: PAT_MRT3847_133863C.1.pep
VLKDETHPIFPIICDSSDEKLADLEKSPLDMLCFLNKGNTSHFLFILKDGGAFKPS

SEQ ID NO: 180342 - protein, 81 aa, Glycine max
  unsure (1)..(81): unsure at all Xaa locations
  Clone ID: PAT_MRT3847_133864C.1.pep
XXXXXHXXXXLXXXFXNFFXXXXXXXXIXTXXXXXXXXPXSXNLTIXXXXXXXXYXXXXLFPXRELTNRXPPTSXXLXSXN

SEQ ID NO: 180343 - protein, 45 aa, Glycine max
  Clone ID: PAT_MRT3847_133865C.1.pep
VKDAIQEGVGPYSPRSCNGYKWICNYKRMIYGSDRVESRREFGTG

SEQ ID NO: 180344 - protein, 40 aa, Glycine max
  unsure (1)..(40): unsure at all Xaa locations
  Clone ID: PAT_MRT3847_133866C.1.pep
PRGPPTGPRKSPNTPYAQKVGDIFIYNXKPTFGGTAGKGN

SEQ ID NO: 180345 - protein, 166 aa, Glycine max
  unsure (1)..(166): unsure at all Xaa locations
  Clone ID: PAT_MRT3847_133867C.1.pep
LTLLYIKWTDCFFMAFGNLAVDTINFEAFPHKLGQFGQIQEKVVLKYXQEVFLTDRPTQARAAXSLLADGCPYLYAMGHDSXVNPIPGDFEIGVXLATIDNMCAYGLNPGISGSRISGTRPXYISQQTDWNLMATARTPLNFDPSKQSFWQFXIDLLGGGILAHKT

SEQ ID NO: 180346 - protein, 81 aa, Glycine max
  unsure (1)..(81): unsure at all Xaa locations
  Clone ID: PAT_MRT3847_133868C.1.pep
MASSIISSPXLTTXNLXSSFIISPFTCLKSMAVFFTINTNNYITSISINSXIVQFMHLLPPIFNNKFETLFYLPDLYYSQL

SEQ ID NO: 180347 - protein, 49 aa, Glycine max
  Clone ID: PAT_MRT3847_133869C.1.pep
VSCKCPASHAYSIESTSHSVLPTTSRPRRRAHRVRPQRHAHASSPRVRV

SEQ ID NO: 180348 - protein, 96 aa, Glycine max
  unsure (1)..(96): unsure at all Xaa locations
  Clone ID: PAT_MRT3847_13386C.1.pep
VVRSKQPLGSAFSCYWWLGHFFFYDLFCTHVYFTIFLFIYXFIFFYVMIFSTHLFFFIYIFFLIIFXFVYFFFTLLFFVSHHFFVVYFIFFDMFIF

SEQ ID NO: 180349 - protein, 78 aa, Glycine max
  Clone ID: PAT_MRT3847_133870C.1.pep
LQDYYPERLGKLFIVNAPYIFMKVWKIIYPFIDNKTKKKIVFVEKNKVKSTLLEEMDESQVPEIFGGSLSLVPIQDAN

SEQ ID NO: 180350 - protein, 66 aa, Glycine max
  unsure (1)..(66): unsure at all Xaa locations
  Clone ID: PAT_MRT3847_133871C.1.pep
AKAKGNAAXGLQDYPAANHHXXEAXAXAPTNQSHKANRSDAYTSLKNYADAXAEAKKTEELKPDWS

SEQ ID NO: 180351 - protein, 135 aa, Glycine max
  Clone ID: PAT_MRT3847_133872C.1.pep
WNDRRRQCGCSSPVDFLQRIQVFKRKRKAVVTQLIFFKGSRFSKERGITLMGAMIIICSLPICLIYFPQWGGMFSGPSSKKVTEEDYYLAEWNSKEKEKGSHHASLKFADNSRSERGRKLNASTELTEEITPPHV

SEQ ID NO: 180352 - protein, 103 aa, Glycine max
  Clone ID: PAT_MRT3847_133873C.1.pep
GLTANSGLLNLLNNALDSYLKRLIESFMDLAGSRFGNEHLRQQNRQLVTSSNVLLPGRCMQTATRSASASVLDFRLAMELNPQVLGPDWPIQLEKICIRASEE

SEQ ID NO: 180353 - protein, 55 aa, Glycine max
  Clone ID: PAT_MRT3847_133874C.1.pep
AMFVYQLASRIAFSHKWELLASQCIIIPQIMGCMKREPTPCNLLPLNENDLCLLI

SEQ ID NO: 180354 - protein, 135 aa, Glycine max
  Clone ID: PAT_MRT3847_133875C.1.pep
VYLLSGRISDALNFFNGVRRQGLATKKLYVALITGLCKFNKIDISREYFFSMLRVGLNPSLECYELLVQKLCSLQKYSEAIHIINVSQKMGRPVSSFIGNVLLYHSLISPQLYDTCNYLRGAEEGVFSGNSTLCW

SEQ ID NO: 180355 - protein, 76 aa, Glycine max
  Clone ID: PAT_MRT3847_133876C.1.pep
PITVEELSQPPEGYPSSKVVLTGLEAESLMFISVPFGEDNITFYDRITSALRESDAIAIRTSREIEGNFCDYIASQ

SEQ ID NO: 180356 - protein, 536 aa, Glycine max
  Clone ID: PAT_MRT3847_133877C.1.pep
MRRRAAEYRRPARRRFSYWIWLLLAFSSILGLLLFLLQHNHHHQDPLHHPLPERNARVEHFAKEGLNFTEEILSVASFSRQLAEQMILAKAYVVIAKEHNNLHLAWQLSSKIRSCQRLLSKAAMTGEPITLEEAEPIIKSLSFLMFKAQDIHYDIATTIVTMKSHIQALEERANAAIVQSTVFAQIAAEAVPKSLHCFNVKLMADWLKMPSLQKREHESRISPRLTDNNLYHFCIFSDNVLATSVVINSTVMNADHPKQLVFHIVTDGINYGAMQAWFFSSDFKGATLEVQNIEEFYWLNESYSPIVKQLHIPESRSFYFGPYQGANVEPKLQNPKFLSLLNHLRFYIPEIYPLLEKVVFLDDDVVVQKDLTPLFSLDLHGNVNGAVETCLEAFHRYYKYLNFSNSIISSKFDPQACAWAFGMNIFDLVAWRKANVTARYHYWQEQNADGTLWKLGTLPPALLSFYGLTEPLDRRWHVLGLGYDLNIDNRLIESAAVIHFNGNMKPWLKLAIGRYKPLWHKYINQSHPHLQDCAAG

SEQ ID NO: 180357 - protein, 116 aa, Glycine max
  unsure (1)..(116): unsure at all Xaa locations
  Clone ID: PAT_MRT3847_133878C.1.pep
SLLLPTHSSPHRPPPXPKGGXPPXPPPXXXWGPPFPPGTXPXFXXXGGGGGXPPPGGGGAPPPPPPPPRAPPPPGRPRGGGFPPPPPPSFFGGGERTGPRGVQNTGGGGGFPTGGG

SEQ ID NO: 180358 - protein, 28 aa, Glycine max
  Clone ID: PAT_MRT3847_133879C.1.pep
KNIPAAPRGRFFWINERHPKKAYFLINR

SEQ ID NO: 180359 - protein, 75 aa, Glycine max
  Clone ID: PAT_MRT3847_13387C.1.pep
ISCHFFKREKSQPLTPLQVLPPYKIIPSPTTLFFEKKKILKKKQHSEAPVFFFKTPPPPPLLRPLPPNLFSKGNF

SEQ ID NO: 180360 - protein, 72 aa, Glycine max
  Clone ID: PAT_MRT3847_133880C.1.pep
WLEWEMFLKGLLVVNTREKLEVQRQSRIDLHQCSESNAHYSQHTISVSNAKIKPRGECIPMLLNQHIILHMH

SEQ ID NO: 180361 - protein, 55 aa, Glycine max
  Clone ID: PAT_MRT3847_133881C.1.pep
SPMIMGMHRANTAAPPLVTTAPPSEATSKSALGKAISERNKSQVPTFKNQSRSLR

SEQ ID NO: 180362 - protein, 38 aa, Glycine max
  Clone ID: PAT_MRT3847_133882C.1.pep
NQLIFLFLLHQYPIYLCNYHTRGKISLTYNPSPHYISS

SEQ ID NO: 180363 - protein, 44 aa, Glycine max
  unsure (1)..(44): unsure at all Xaa locations
  Clone ID: PAT_MRT3847_133883C.1.pep
QPPXXXSVDWXDTXXCILFGDAAGAVLVQACNXEEXGXFGFDXX

SEQ ID NO: 180364 - protein, 75 aa, Glycine max
  Clone ID: PAT_MRT3847_133884C.1.pep
NKKKKKKKKKREKKKKKKKKKKKKKNKKKKKKKKKKKKKQKKKKKKKMGPPPPFILLYPGYLFRPVPFGLPSFPF

SEQ ID NO: 180365 - protein, 150 aa, Glycine max
  Clone ID: PAT_MRT3847_133885C.1.pep
AWEHWTDIIPLVTAGGAFLFSTAPTTINRVTWRFYFYATAQNEMQRRMTVANNLHYFRRKKIFDLGLVKIGLLHRMTGTIWDIVLMLGKTRSDNVISMDTDLLRLEGTETSYFTQAGALECIVNHCKMNIHAGLLMNGVVGNDCNPGYRC

SEQ ID NO: 180366 - protein, 47 aa, Glycine max
  Clone ID: PAT_MRT3847_133886C.1.pep
FLRYSFILHYILSFLSLFPLFRLFIPFVLILSCFETAHRCVAYTGVQ

SEQ ID NO: 180367 - protein, 76 aa, Glycine max
  Clone ID: PAT_MRT3847_133887C.1.pep
GLLRLLVPPRRYCRVPPRRRGLDLCGEGYTSRSMLCGRFNKQLSLKLHFTFVPPDMIDNMRRMLSTAHLGEGSIDL

SEQ ID NO: 180368 - protein, 59 aa, Glycine max
  Clone ID: PAT_MRT3847_133888C.1.pep
RQTCVALLFNALYRIIVSFICSLHFYFSMCDLVTYYPFNCFSLHAMQQGISLLDVFVHS

SEQ ID NO: 180369 - protein, 53 aa, Glycine max
  Clone ID: PAT_MRT3847_133889C.1.pep
KERELKIEHFRRNLSVSPLCFRRWNTTQFKSVSFLSLSVQNNNSSEANGKAWK

SEQ ID NO: 180370 - protein, 81 aa, Glycine max
  Clone ID: PAT_MRT3847_13388C.1.pep
GVGAGEKNEPKEMILRITPLSLRAIAALSIVEALFFLQRRFNAPEIHSQVEKVREREREREESQACGNTFPRLLAAVRARD

SEQ ID NO: 180371 - protein, 59 aa, Glycine max
  Clone ID: PAT_MRT3847_133890C.1.pep
HKEKDQTFRFHNSAKCLHILSCKFKNTFGHFTSDLTKNLIFIRCMNFYFGLIYADNHER

SEQ ID NO: 180372 - protein, 55 aa, Glycine max
  unsure (1)..(55): unsure at all Xaa locations
  Clone ID: PAT_MRT3847_133891C.1.pep
TFPTFDNDTFCSHHHCDRQHCHHHYHCHCHHHTATICYHHHXHDRHYYHHCHQYC

SEQ ID NO: 180373 - protein, 85 aa, Glycine max
  Clone ID: PAT_MRT3847_133892C.1.pep
AVAGKAVSLIFSHTEMADSVRLRVMYQYRGIDIMSKKKQGLKRYWIMLKPPNCIGRRDTIKGCCSNIPEWCYSEGFGPFNPNPNG

SEQ ID NO: 180374 - protein, 117 aa, Glycine max
  Clone ID: PAT_MRT3847_133893C.1.pep
MHFNPNTALVDHSIILLTMQICVKTLTGKTITLEVESSDTMDNVKANIQDMVGIPPDQHRLIFADEQLEDGRTLADYIMQKESTLHLVLSIKGGMHIFCQTLTEKTITLEVESSDTI

SEQ ID NO: 180375 - protein, 197 aa, Glycine max
  Clone ID: PAT_MRT3847_133894C.1.pep
MTAQTQEELLAADLEQQKIHDDEPVVEDDDEDDEDDDDEDDDNVEGDASGRSKQTRSEKKSRKAMLKLGMKPVTGVSRVTVKKSKNILFVISKPDVFKSPTSDTYIIFGEAKIEDLSSQLQTQAAEQFKAPNVSNDGSKPETSAAAAQDDEDVDETGVDPKDIELVMTQAGVLRSRAVKALKAANGDIVAAIMELTN

SEQ ID NO: 180376 - protein, 108 aa, Glycine max
  unsure (1)..(108): unsure at all Xaa locations
  Clone ID: PAT_MRT3847_133895C.1.pep
NRSTTQEEDTEERTNHEGDTKAYGCHDHKARDNYIQKRRGTGTLAKAGAPADHTYKSVCACMGEGEXINDRGNKWRESAEGREISIAGVEWLYLGRGGNRGEEGARNG

SEQ ID NO: 180377 - protein, 135 aa, Glycine max
  Clone ID: PAT_MRT3847_133896C.1.pep
VAPPPQYHHPLKPQETMALSMVEKDFELHLFVAEPDIANPVAFAWYERGRLFVVESLDYPNELRADGKGSDRISMCEDTDGDGRANRCSVFADGLNIPTGIVAVNGGFIVAQAPHFLFLKDTHDDGKADLRQVLS

SEQ ID NO: 180378 - protein, 76 aa, Glycine max
  unsure (1)..(76): unsure at all Xaa locations
  Clone ID: PAT_MRT3847_133897C.1.pep
MTWXLKVKMLGGKEFLVSMTNSMMLSELKKQVAQKSGVPAFQQRLAHQSGEMLQDGVALIRQGLSSGSTVMLMVEN

SEQ ID NO: 180379 - protein, 42 aa, Glycine max
  Clone ID: PAT_MRT3847_133898C.1.pep
KGFSDSGDYSFNLYTRKGSVQTMKMFLTLFRCLRKKRAEPAA

SEQ ID NO: 180380 - protein, 122 aa, Glycine max
  Clone ID: PAT_MRT3847_133899C.1.pep
KNARICLACDMDATFSAVFSGDRAPYRPAKFLYSWWQHAANLATYEQQDAHEFFISMLDGIHEKVEKGRRKPHTEGNGDCCIAHKVFSGILRSDVTCMACGFTSTTYDPCIDISLDLEPNQW

SEQ ID NO: 180381 - protein, 95 aa, Glycine max
  unsure (1)..(95): unsure at all Xaa locations
  Clone ID: PAT_MRT3847_13389C.1.pep
RQILIQRCDLRIMNIYVEGTPSTGFLPKRVWDFWKEXXXXXXXXXXXXXXXXXXXXXXXXXXXXXXXXXXXXXXXXXXXXXXXXXXXXXXXXXXX

SEQ ID NO: 180382 - protein, 56 aa, Glycine max
  Clone ID: PAT_MRT3847_1338C.1.pep
CTTSSIESRLEAIACKFRLTISVASVVNSLCPTSMKSLRRSAYLKEEGLFLSAIMH

SEQ ID NO: 180383 - protein, 447 aa, Glycine max
  Clone ID: PAT_MRT3847_133900C.1.pep
PAPRPERLRTKRRVDYRPWAPDLRERALIGSCSVPAPGAGAGAVLAPVSAVFSGDRAPYSPAKFLYSGWQPPPHPPPLRHHVAREWLIPLLGRIHDNGEVARPQPTTGGNDGPGRARTSLPCDMDAMFSSVFSGDRAPYSPAKFLYSWWQHAANLATYEQQDAHEFFISMLDGIHEKVEKVRRKPHSEGPCNGDCCIAHKVFSGILRSDVTCMACGFTSTTYDPCIDTSLDLEPNQGGSTKITTASSNHSCNGEPDCMNSSQNCGTSTLMGCLKRFTRAERLGSDQKFFCRQCQVRQETLKQMSIRKLPLVSCFHIKRFEHSSTRKMSRKVDRYLQFPFSLDMSPYLSSTILRNRFGNRIFPFDGDEPDASDELCSEFELFAVVTHSGKLDAGHYVTYLRLSNQWYKCDDAWVTQVDENIVRAAQCYMMFYVQKMLYYKATDKQVAS

SEQ ID NO: 180384 - protein, 583 aa, Glycine max
  Clone ID: PAT_MRT3847_133901C.1.pep
MGKSPGKWIKTVLFGKKSSKSNISKGREKFVNKKEAVVSSNELENGLSLDPTPDEIATNEEDHELENEESENILPDNQERDIIGSVDPDAPPDPEKIRLEQAASKAQAAFRGYLARRAFRALKGIIRLQALIRGHLVRKQAVVTLCCMYGIVKLQALVRGGRIRQSNEIHEKCNLFKPLDAKLGEPVGISTKISKLTANTFIHKLLASSITIMALHLQYVNGDPNSVLSWLERWSASYFWKPVPQPKKIRDSKSQRKQGNVSNGEAQITKSKRTTRKLPIANFETALEQTNPEFEKPKRNFRKTPYQVSDPEQENPQSELEKVKRSLRKIHNPVVENAGQPEVESETPKQHLEMTKVIPGHAVLEQATITSDDKIKMEETSTISNVPDVEITPIPSVNKEVSEILNNYQVSVESKPLSETPTKDRNTSHDEVKNKLGNLPETIFKDENSLLTNGDLSHSDLTGNENQKPTRKISNLTKQENGEDGIKNSPKLPSYMAATESAKAKLRAQGSPRFGQDGTEKNNTAGGSGRHSLPSSTNNQISSHSPKPQRSVPAGGKGGNKSDRTVPSSKAGNGKVTQAEWRR

SEQ ID NO: 180385 - protein, 34 aa, Glycine max
  Clone ID: PAT_MRT3847_133902C.1.pep
GIPGSTHASADAWAYISKLIFQLQHCFIAMLVNC

SEQ ID NO: 180386 - protein, 584 aa, Glycine max
  Clone ID: PAT_MRT3847_133903C.1.pep
MGKSPGKWIKTVLFGKKSSKSNISKGREKIVNKKAVVASNELENGLSLDPTPNEIATKEEDLELENEESENILPENQERDINGSVDPDAPPDPEKIRQEEAATKAQAAFRGYLARRAFRALKGIIRLQALIRGHLVRRQAVVTLCCMYGIVKLQALVRGGRIRQSNVGFEIHEKCNLFKPLDGKLGEPVGISTKISKLSANTFIRKLVASSITIMALRLQYVSGDPNSVLSWLERWSASYFWKPVPQPKKIRDSKSHRKHGNISNGEAQITKSKRTTRKLPIANFEPALVQTNPEFEKPKRNFRKIPHQVLDPELENPQSELEKVKRSLRKIHNPVVENAVQPEVEIETPKEHLEIATVIPSHAVSEQAIITPDDKIEQEETLTIFNVPDVEISPRPSVNMEVYDIPSNYQVSVESKPLSETPIKDRNTSHGKVKNELGNLPETIFKDENSLLTNGDLSYNDLTGNENQKPTRKASNLTKQENGDDGLKNSPKLPSYMAATESAKAKLRAQGSPRFGQDETEKNNTAGSGRHSLPSSTNKKISSYSPKTQRSVPAGGKGGNKSDRTVPSSKAGNGKVIQAEWRR

SEQ ID NO: 180387 - protein, 59 aa, Glycine max
  Clone ID: PAT_MRT3847_133904C.1.pep
GDRPTHPSTLPLHQSSLSTFSTHIKMREGALLSGSPNSLTKSIKNIFKCFSTSTALIQN

SEQ ID NO: 180388 - protein, 70 aa, Glycine max
  unsure (1)..(70): unsure at all Xaa locations
  Clone ID: PAT_MRT3847_133905C.1.pep
EGMDVCVKIIRNNKDCFDHRLDDIKXLKYVHKRDRADQCHSLRLCSYNYYREYXVIVCGIPKASLYDDHA

SEQ ID NO: 180389 - protein, 79 aa, Glycine max
  Clone ID: PAT_MRT3847_133906C.1.pep
PRTRFDEGVQARAYLAASTADASLGMWEMLGNPINFRGATRPTTSASNPAYFKTVALFSKKNATPTPAKKAAAAAPAND

SEQ ID NO: 180390 - protein, 120 aa, Glycine max
  Clone ID: PAT_MRT3847_133907C.1.pep
MSEIEEVHERMKADMEAMKDQMTSMMGAMLNMRQMMEDNTTGGEVLGSMGGPRMVQSKNSFPPYSLPPNYTPPNAVHVPSENANHYVLILLEGQQPQLRHAPFAQPVGEAYEEPWDHALG

SEQ ID NO: 180391 - protein, 550 aa, Glycine max
  Clone ID: PAT_MRT3847_133908C.1.pep
MGHKDASRKLSKVFTFAALSPFGDLNYARLLLSTNPTLNSYYYNTLLRAFSQTPLPTPPFHALSLFLSMPSPPDNFTFPFLLKCCSRSKLPPLGKQLHALLTKLGFAPDLYIQNVLLHMYSEFGDLVLARSLFDRMPHRDVVSWTSMIGGLVNHDLPVEAISLFERMLQCGVEVNEATVISVLRARADSGALSMGRKVHANLEEWGIEIHSKSNVSTALVDMYAKSGCIVRKVFDDVVDRDVFVWTAMISGLASHGLCKDAIDMFVDMESSGVKPDERTVTTVLTACRNAGLIREGFMLFSDVQRRYGMKPSIQHFGCLVDLLARAGRLKEAEDFVNAMPIEPDAVLWRTLIWACKVHGDADRAERLMKHLEIQDMRADDSGSYILASNVYASTGKWCNKAEVRELMNKKGLVKPPGTSRIEIDGGVHEFVMGDYNHPEAEEIFVELAEVMDKIRKEGYDPRVSEVLLEMDDEEKAVQLLHHSEKLALAYGLIRIGHGSTIWIVKNLRSCEDCHEFMKLISKICKRDIVVRDRIRFHHFKNGECSCKDYW

SEQ ID NO: 180392 - protein, 94 aa, Glycine max
  Clone ID: PAT_MRT3847_133909C.1.pep
LLQSHISGGFWLGLPVHFCKSNLPKGDEVMTLIDEDGNEYPTIYLARKTGLSGGWKGFAVGHDLADGDAVIFQLIKHTAFKVYIIRANSPPEDK

SEQ ID NO: 180393 - protein, 127 aa, Glycine max
  unsure (1)..(127): unsure at all Xaa locations
  Clone ID: PAT_MRT3847_13390C.1.pep
MKATLWGMYYVYKNGADFDNIVGLKPGSFIEDYNVHKKDFRVQLMNTDRVGERHLDLTYTHIKGDNSTVLHGTFGYDCANKVVDNNTLDXGTANLSTLYDHKELATFELIYDEVKITRDFHVSRKIY

SEQ ID NO: 180394 - protein, 47 aa, Glycine max
  Clone ID: PAT_MRT3847_133910C.1.pep
QYYDYGMDGGFCIAERVLVITLKDGIIMSRRRRFFSAMYMLFRASFR

SEQ ID NO: 180395 - protein, 154 aa, Glycine max
  Clone ID: PAT_MRT3847_133911C.1.pep
GSSMRREIFTERVSRDLKNWHKRAKQSVSKNNSTSSKHSDTLHSKECDNSVRGSVDIVHTSDNVVLTSPPSHMISGEEEKSIAPTNEQEISSNSTSEIIKTTQEENPKIITRGTYDGEISFGSSWKNVGSSRGIGEIGSIIEEDDAEKLPELIP

SEQ ID NO: 180396 - protein, 353 aa, Glycine max
  Clone ID: PAT_MRT3847_133912C.1.pep
AYIDQYIEAMEKVKLKQGLKTAMSISSEGNAYLQEAEFWRLYKAAASRRPLGMKTAAGIVYLLACLLEPFIPSFTLEVFKQLNLPADTHVSLSDDKGDVDRVKRPWDIISAGHKIGTPKPLFRELKDEEVEFYRKKFAGSQADRIVRAEAEAQNVAEQLKKTKVSDGNGKKKPGKSSNEAKNKAAAEPDITITRLDIRVGLIIKAQKHPDADALYVEEIDVGEEQTRTVVSGLVKFIPLDEMQNRKVCVLCNLKPVTMRGIKSQAMVLAASDGDHTKVELVEPPSSAQPGERITFPGYEGNPDELLNPKKKVWETLQVDLHTNEELVACYKNVPLTTSAGVCKVSSISCGSIR

SEQ ID NO: 180397 - protein, 110 aa, Glycine max
  Clone ID: PAT_MRT3847_133913C.1.pep
IHLVVTLLQLLFWVGRFPLLGHHMQQILIGIPMMAQSHMIIKFLVNLYTLQHLMLLLLTMVVIWVLVLVCNPHTNHTCEFFFHPIISGKTTDLRRINSLVYAWFSIENFR

SEQ ID NO: 180398 - protein, 109 aa, Glycine max
  Clone ID: PAT_MRT3847_133914C.1.pep
KGGAPPPKKGNVNHGKKGGIGGEKNNPGGCGGGKPRKIFKLKTRELIRPLIQGGGGPLSGAGEREQTLGNPRVKSQRVPGKIFKKTAQGGAKNTKGGGAKLNPGVWVNK

SEQ ID NO: 180399 - protein, 81 aa, Glycine max
  unsure (1)..(81): unsure at all Xaa locations
  Clone ID: PAT_MRT3847_133915C.1.pep
TNHYHVCHAYAHLSSGIAVCLLVISAGMSIGIVAHARVXANAQQPHVFVGMIVILIFAKALALYGLIVGMILSSSAGQSRA

SEQ ID NO: 180400 - protein, 669 aa, Glycine max
  Clone ID: PAT_MRT3847_133916C.1.pep
EFPGRQRVRSSGRGGDGRRGSTRSSSLLQMWREIEDEHVVNQVQGRSGEVPLEQRRDGLVADLSREDRLDIQERGQRHVIEDTVLGENESETWSQSQSQNESHDGNEDLNNSSCENSSDLGEVERERVRQIFREWMNSGARDHVSNISERNNGSRGEWLGETEQERVRVIREWVQMSSQQRSVSSGENREEPSAEIDMQIERVRDGLVVNQIGGQTEHTRRGIRKLCGRQAMLDMLKKAERERQREIQELLNHQAVSQFPYRNRIQALLRGRFLRNDRPVDNNKPLSVAESELGFLRRRQTVSGLREGFFCRKENSGCSQATSNADTSSNVEIDFNTNEQMGSSSSHIVPIVHPEQSDPNHRGSNRLGVSGSQNCVRGTACENLHWQESTAQVDELQHLPIESLDCQSSLSAGVERGDNPEQNLDVMPTEDNANEITQQSLRIEDSEHSNNQEFSEVHNEPSELGGINNSQNNSSNYNIHMEDNVVDDVNWNESGALEGEQPEEVFENEGSEWYQNNTEWRNSTEENVDDNQLSNTANEWPDNSLANEDGENSRLQESHEVWQEDGGFQEAVENWLGGPSDHESAPVGRIRGFYFPEDDNVYSVELRELLNRRSVSNLLRSSFRESLDQLIQSYVERQGHANIDWEFQETTPSSASVEQDLEQHSRDQI

SEQ ID NO: 180401 - protein, 46 aa, Glycine max
  Clone ID: PAT_MRT3847_133917C.1.pep
CHAIPFSGSTPLTVEAQQLLKPPLQYIASTDPFSFLDKFLTLFLLH

SEQ ID NO: 180402 - protein, 172 aa, Glycine max
  Clone ID: PAT_MRT3847_133918C.1.pep
MNKMTGLALGGVVAAILMVLQYAEAQTSYVVGDGTGWRVPQDASTYQNWASDKNFTVGDTLSFIFQTGLHNVIEVSEESYNSCSSANPIGTTYNTGPANVTLNRGGEHYYICSFGNHCNNGQRLAITVSGSSTAFPPATTTVPPPLSFSAPSSFHTTVLPFLFLSAFVFIAF

SEQ ID NO: 180403 - protein, 77 aa, Glycine max
  Clone ID: PAT_MRT3847_133919C.1.pep
MGLSFTKLFNPLFAKKEMPILMVGLHAAGKTTILYKLKLGKIVTTIPTIGFNVETVEYKNITFTVWDVRSQDKIPPL

SEQ ID NO: 180404 - protein, 41 aa, Glycine max
  Clone ID: PAT_MRT3847_13391C.1.pep
IVHTSISTYFLLNATLTLRGILFICYTTSLKFLTPKPIHFS

SEQ ID NO: 180405 - protein, 515 aa, Glycine max
  unsure (1)..(515): unsure at all Xaa locations
  Clone ID: PAT_MRT3847_133920C.1.pep
MDRSTGRGGGGSVDMFLRNYKLGKTLGIGSFGKVKIAEHVRTGHKVAIKILNRHKIKNMEMEEKVRREIKILRLFMHHHIIRLYEVVETPTDIYVVMEYVKSGELFDYIVEKGRLQEDEARHFFQQIISGVEYCHRNMVVHRDLKPENLLLDSKFNIKIADFGLSNIMRDGHFLKTSCGSPNYAAPEVISGKLYAGPEVDVWSCGVILYALLCGTLPFDDENIPNLFKKIKGGIYTLSSHLSPVDMHFIAAMLVVDLKTFQISSRKXKGGIYTLPSHLSPSARDLIPGMLVVDPMRRMTIPEIRQHPWFQARLPRYLAVPPPDTMQQAKKIDEEILQEVVRLXMEQISIXESSGNRIQHEGEVASPVVGHHSTGYMDYQGVGMRQQFPVERKWALGLQSRAQPREIMTEVLKALQELNVCXEEDWTLXMKCRWVAGTAGHHEGMINNSLHSNHYFGNDSGIIENEAVSKSNVVKFEVQLYKTREEKYLLDLQRVQGPQFLFLDLCAAFLSQLRVL

SEQ ID NO: 180406 - protein, 47 aa, Glycine max
  Clone ID: PAT_MRT3847_133921C.1.pep
VLRGASYFTLNSLLRQFLLPCVNLSGNMKQFSIHLLLQSSRPLRTHE

SEQ ID NO: 180407 - protein, 117 aa, Glycine max
  Clone ID: PAT_MRT3847_133922C.1.pep
LVSHYTTGHCTLFKTLTMASAPSSPETPPNTNFTATSTPPLKISPATLPNPNNKRLLIGLSIGFALLSFVLILVIAFLVYFLHRVRKNKRHKSFGRIPLQDGFYDVLGEGGFGHVYK

SEQ ID NO: 180408 - protein, 89 aa, Glycine max
  Clone ID: PAT_MRT3847_133923C.1.pep
KGKALEFLLESLGYENSNDVFPIYIGDDRTDEDAFKVLRSRGQGIGILVSRVAKETDASYTLQDPSEVEQFLRRLVEWKRPSTVTPTSV

SEQ ID NO: 180409 - protein, 251 aa, Glycine max
  unsure (1)..(251): unsure at all Xaa locations
  Clone ID: PAT_MRT3847_133924C.1.pep
LRATLKGIARHFPTAIVTGRCRDKVYNFVKLAELYYAGSHGMDIKGPTKSQSPKQGNNNKAVLFQPASQFLPMIDEVYKILLEKTKTVPGANVENNKFCLSVHFRCVDEKSWAALAEKVRLVLIDYPQLRLTQGRKVLEIRPTIKWDKGKALEFLLESLGYENSNDVFPIYIGDDRTDEDAFRVTNAATPSLLVSXLKVLRSRGQGIGILVFRVAKETDASYSLQDPSEVEQFLRRLVEWKRSSTVTPASV

SEQ ID NO: 180410 - protein, 112 aa, Glycine max
  unsure (1)..(112): unsure at all Xaa locations
  Clone ID: PAT_MRT3847_133925C.1.pep
ASHIIGYPRMGPKRELXRALEHLWDGXSSSPDDFHMVSCDLRXSCMKLIADAGIYYILINTFSYXDPVLFAPSPLRAGSPRLSWTGCYIAFDTLPFMATGHANLPAMAIIIW

SEQ ID NO: 180411 - protein, 60 aa, Glycine max
  unsure (1)..(60): unsure at all Xaa locations
  Clone ID: PAT_MRT3847_133926C.1.pep
MMGLIGLFFALXILRLILFCITVFAVPPGLWLYPNLYEDVGFXDSSKPLWGWQEVRYPCS

SEQ ID NO: 180412 - protein, 114 aa, Glycine max
  unsure (1)..(114): unsure at all Xaa locations
  Clone ID: PAT_MRT3847_133927C.1.pep
VFSIGYGQLHINCFDLDKCNVCHIYDEYXNNLILHFYKCIIIIHARCYGKLEPINMVLXLYNLSRSYSPPSPFCLFPLICCTIKPTTYSLLTHFPYSMFIPXTCLSHLNIIHPI

SEQ ID NO: 180413 - protein, 479 aa, Glycine max
  Clone ID: PAT_MRT3847_133928C.1.pep
RVVECHPRVGAWIRYAKFEMICGGAGWSRFGAGSAVDSLSDDEEAVQFFVAFAEFEERCKETERARAIYKFALDHIPKGRLEDLYRKFVAFEKQYGDREGIEDAIVGKRRFQYEDEVKKNPLNYDSWFDYIRLEESVGDKERIREVYERAIANVPPAEEKRYWQRYIYLWINYALYEELDAGDMERTRDVYKECLNQIPHQKFSFAKIWLLAAQFEIRQLNLKAARQILGNAIGKAPKDKIFKKYIEIELQLGNIDRCRKLYEKYLEWSPENCYAWSKYAELERSLSETDRARAIFELAIAQPALDMPELLWKAYINFETAEGEFERARALYERLLDRTKHLKVWLSYAEFEATAMDMDSLDLPEEEQKKQCIQCARRVFEQALNYFRSSAPDLKEERAMLLEKWLNMEATSGELGDVSLVQSKLPKKLKKRRHVATEDGSTRIEEFIDYLFPEESQTTNLKILEAAYKWKKQKLSSDD

SEQ ID NO: 180414 - protein, 65 aa, Glycine max
  Clone ID: PAT_MRT3847_133929C.1.pep
LRIILGFLVEIVQGFTCRASLWPGIPLFLFAYLWTSPFSLSRDCHLCYLNIIRRKYNFLLHLKAL

SEQ ID NO: 180415 - protein, 72 aa, Glycine max
  Clone ID: PAT_MRT3847_13392C.1.pep
GPWVYFNVPHPYGFFGGKTILSEHVVVSVICLISVIPYYVVVAGAIVCSDRWSSDNLVWASFICFCVLAHSS

SEQ ID NO: 180416 - protein, 538 aa, Glycine max
  Clone ID: PAT_MRT3847_133930C.1.pep
MLNTLHLLLHHDQRIRSHLWFELTPSVHPPSSTTTVPQITKTTQRATNSALGQPCLLSLALSPPLAYSLLREFGSAWARHPVWGVPVARLAQQMLSQDGYVSSNSKVASVYQQGHFLVKNSKFLVPAQDLLNEFCSLCAKQSDLGKPTKSLKKQWEDQENNGVGSSKKHSLTSLEFVELQKRKTKLLSMLEEVDRRYKHYRNQMKSVVSSFEAVAGNGAATVYSALALKAMSRHFRCLKDGILSQIQATRKAMGEKDPVAPGTTRGETPRLKVIDQTLRQQRAFQQMSMMETHPWRPQRGLPERAVSVLRAWLFEHFLHPYPSDVDKHILARQTGLSRGQVSNWFINARVRLWKPMVEEMYLEEVKDPENNIASSEGATDQDNDINPNNVQYPPPPLSSRSEDQKPSLVRIDSECASSIINNHSTPDNKNDPKGQEQCFGSVELDFSSYTHHSSGMVSYGSSDQNGNNNQSGVSLTLGLQQHGVSLAFPPATQSSLYYPRDQIEDCQPVHQYSLLDGEGQNLPYRNLMGAQLLHDLAG

SEQ ID NO: 180417 - protein, 98 aa, Glycine max
  Clone ID: PAT_MRT3847_133931C.1.pep
SPTSFLPKKPFFFASIYSNPFARRGKKIKSRPFKPPSNSLVKREGKYLKENNGKPKTPKVLVGLALDKHSLLGPFTLTPSRVSSKWGPGVGFSRTKRD

SEQ ID NO: 180418 - protein, 81 aa, Glycine max
  unsure (1)..(81): unsure at all Xaa locations
  Clone ID: PAT_MRT3847_133932C.1.pep
GLNVWLLTHTEEIPFAMKXPYRNFQNEKKLEDNDFTGAVFEGQLYRPDEAKNLEFLATRAENYATLLGALKEPRSGLDGAL

SEQ ID NO: 180419 - protein, 90 aa, Glycine max
  Clone ID: PAT_MRT3847_133933C.1.pep
PFSLTILDKNNNSPFFFFSFSSSSLSNTRSSHFNYFPPSKFQYHNPPSLSKSYNFQNILILFLYSHHNSHPIHTLPSHSPHSPPPTTNFF

SEQ ID NO: 180420 - protein, 74 aa, Glycine max
  Clone ID: PAT_MRT3847_133934C.1.pep
SAYTCFPPEIYVHCRYPYLRSSRIFAFMIDLVFFLKKNTISPPASVSKIHLPPIPPPPPKEGGRHTVITGNLPG

SEQ ID NO: 180421 - protein, 146 aa, Glycine max
  Clone ID: PAT_MRT3847_133935C.1.pep
MKFNPRVSSSRRKSRKAHFTAPSSVRRVLMSAPLSAELRSKYNVRSIPVRKEDEVQVVRGTYKGREGKVTQVYRRKWVIHIERITREKVNGSTVNVGIHPSKVVVTKLKLDKDRKAILDRKAKGRAAADKEKGTKFAPEDIMQTVD

SEQ ID NO: 180422 - protein, 50 aa, Glycine max
  Clone ID: PAT_MRT3847_133936C.1.pep
KFYIQSSKECNTCVDKQVFLTGTTTAFASIKRKSRVWRKGKKKPSPPRFF

SEQ ID NO: 180423 - protein, 48 aa, Glycine max
  Clone ID: PAT_MRT3847_133937C.1.pep
FMPLPLLGFLVLLSNFIFNRPCCLYLSLSHQFIPRTKLQSRILKSESV

SEQ ID NO: 180424 - protein, 146 aa, Glycine max
  Clone ID: PAT_MRT3847_133938C.1.pep
MKFNPRVSSSRRKSRKAHFTAPSSVRRVLMSAPLSAELRSKYNVRSIPVRKEDEVQVMRGTYKGREGKVTQVYRRKWVIHIERITREKVNGSTVNVGIHPSKVVLTKLKLDKDRKAILDRKAKGRAAADKEKGTKFAPEDIMQTVD

SEQ ID NO: 180425 - protein, 69 aa, Glycine max
  unsure (1)..(69): unsure at all Xaa locations
  Clone ID: PAT_MRT3847_133939C.1.pep
MGGGKDKHNEEEKGVFSHLAHGVAQAAHGYPPGAYPPPXGAYPXYQGYPPXSWLPXTGGYPXAGYPPAG

SEQ ID NO: 180426 - protein, 56 aa, Glycine max
  Clone ID: PAT_MRT3847_13393C.1.pep
INIYNLPLGHDGCAVKFIDRTRYSTGRGYITFMDAKTKSFLGKAAKHAADAFRIDG

SEQ ID NO: 180427 - protein, 43 aa, Glycine max
  unsure (1)..(43): unsure at all Xaa locations
  Clone ID: PAT_MRT3847_133940C.1.pep
DVTGGSXLSLSRMIISDPLLDSRCLKHIGLQFYRFNRYRVVEY

SEQ ID NO: 180428 - protein, 46 aa, Glycine max
  unsure (1)..(46): unsure at all Xaa locations
  Clone ID: PAT_MRT3847_133941C.1.pep
XIYQXGSSSXDXLRXRTCEXXTXDGXXECIPLIDXTSTSXRLTTIX

SEQ ID NO: 180429 - protein, 90 aa, Glycine max
  Clone ID: PAT_MRT3847_133942C.1.pep
MSGIIHKIEETLHVGGHKKEEHKGEHHGEHKGEHKGEQHHGEHKEGLVDKIKDKIHGDGHDKGEKKKKKDKKKKEHGHDHHGHSSSSDSD

SEQ ID NO: 180430 - protein, 123 aa, Glycine max
  Clone ID: PAT_MRT3847_133943C.1.pep
MTKVFLSQVKYLTENIQIVLDAVRTSSVVEVQGDKIRRRNDWRRWIMPGGQVPNVRGSQTVGQLAERVQNITLERTNNNDAGVLDVSQNRPFGDLNSQYLHSTSEGTAQVGIQVSDHSISARN

SEQ ID NO: 180431 - protein, 102 aa, Glycine max
  Clone ID: PAT_MRT3847_133944C.1.pep
MSGIIHKIEETLHVGGHKKEEHKGEHHGEHKGEHKGEHHGEHKGEHKGEQHHGEHKEGLVDKIKDKIHGDGHDKGEKKKKKDKKKKEHGHDHHGHSSSSDSD

SEQ ID NO: 180432 - protein, 187 aa, Glycine max
  Clone ID: PAT_MRT3847_133945C.1.pep
MAPRLWSCFRSSSSKGSTTGGGVSDASASRRVVTADLTSEEQKRGGPVVVEMFSSQGCATSPAAELVLSRLGRGDFELEAPVVVLAFHVDYWDYMGWKDPFGASQWTVRQKAYVEALGLDTIFTPQVVVQGKAQCVGNDENALVSAITSAPRFPAPTFQATFTRPAPDSLQGSLTGALRTKVDSDGA

SEQ ID NO: 180433 - protein, 270 aa, Glycine max
  unsure (1)..(270): unsure at all Xaa locations
  Clone ID: PAT_MRT3847_133946C.1.pep
MGCVSSNLLNQDEDFSTQLGSSALGHHIVSLTSTTYGLLTLDPPSTPPSRFTLGSLFPSEPEVINSWELMSGLDTDSFRFSPLPLPKPKENRLTPPTGSKLLLTPTLADRFEKICPPNGEKRVVIYTTSLRGVRTTFEACNAVRAALEGFGVVVXERDVSMHSGFREELRTLLKGKQVMVPPRVFVKGLYIGGADEMLKVAEEGLLGDLLDGLPRKKVGAVCVGCGDLRFLPCFNCNGSCKTLVKEQGRTVVVKCTHCNENGLVLCPLCT

SEQ ID NO: 180434 - protein, 56 aa, Glycine max
  Clone ID: PAT_MRT3847_133947C.1.pep
DKKDNLIDYFIEFNQLPCRFNRLQAVIAIFSINNQLVFSCKHISISQNLENNTISL

SEQ ID NO: 180435 - protein, 249 aa, Glycine max
  Clone ID: PAT_MRT3847_133948C.1.pep
MALRSCSALLRSSFFHQLPQSTYASSRTLVSILFPRSTSPTCIHESHKDMHLAPSFSKRNLNLSILLTTFLWGQGVLLPNARDALLLAQELELQRYTDSEEGFTLLTPSSWTKVDKAGATVLFQEADMGSNNIGVVVNPVRLKTLEEFGTPQFVADKLLQAERRKESTKEVELITVAERSGEGGLQIYEFEYKVDSTRGGMKRIFSAAFVASKKLYLLDIVHSDKLEIPLDPNKRMILEQVLHSFDAAA

SEQ ID NO: 180436 - protein, 69 aa, Glycine max
  Clone ID: PAT_MRT3847_133949C.1.pep
YQSNSMCTSQASNMSIHDPDNVSVSSQVIAALTCHLRTFYLAESSSFSSNFVYTNLTVSRSIVQAYGFS

SEQ ID NO: 180437 - protein, 35 aa, Glycine max
  Clone ID: PAT_MRT3847_13394C.1.pep
QTPSLSFIHKLRNCMNPSMMLIHFASVHHANHPKL

SEQ ID NO: 180438 - protein, 59 aa, Glycine max
  Clone ID: PAT_MRT3847_133950C.1.pep
RPKGIIIFTQGFDHWGACEVNPPQKSLQITNFSNSTCMSSSSRKRCYTIHAYYFTNRVL

SEQ ID NO: 180439 - protein, 236 aa, Glycine max
  unsure (1)..(236): unsure at all Xaa locations
  Clone ID: PAT_MRT3847_133951C.1.pep
LQLPWQCCLPLQIWQQLLQQLTPLQPLGKEHVIELYMHDILGGSNPTARPVTGLLGSIYSGQVPFAMPVGFNTQGTAIPNANGANPTVNGVFGIPLGTGLAGTSFAPNSGNNNNQNNAPLQLGPDGLGLGFGTITVIDDILTSQPELGSQIVGKAQGVYVASSADGTRQMMXFTALFEGGEYGDSLNFYGLYKIGSTMSQISVMGXTGKFKNARXFAELRALIPPGQIATDGAEHC

SEQ ID NO: 180440 - protein, 333 aa, Glycine max
  Clone ID: PAT_MRT3847_133952C.1.pep
MAAISSLSLFFKLKFSLILISCVIGVTSAQLSSKFYDKSCPKALTTIRKEVERAVRNESRMGASLLRLHFHDCFVQGCDASVLLDDTANFTGEKNSFPNANSLRGFEVIDNIKSKLEGMCKGGVSCADILAVAARDAVVALGGQKWEVQVGRRDSTTASLDEANSDLPAPFLDLSGLITAFAKKNFTTQELVTLSGGHTIGLVRCRFFRARIYNESNIDPTFAQQMQALCPFEGGDDNLSPFDSTTPFKFDNAFYKNLVQLKGVVHSDQQLFTNNGSGPTNDQVNRYSRNMGNFKKDFADAMFKMSMLTPLTGSNGQIRQNCRLVNPPSTTVS

SEQ ID NO: 180441 - protein, 68 aa, Glycine max
  unsure (1)..(68): unsure at all Xaa locations
  Clone ID: PAT_MRT3847_133953C.1.pep
LEKGVTKFFPKVCVVRDSWQPRVPVKVLWHWSXGKGKPWVDLGANRPCPLDALWAPYDLLRTPFSFDS

SEQ ID NO: 180442 - protein, 216 aa, Glycine max
  unsure (1)..(216): unsure at all Xaa locations
  Clone ID: PAT_MRT3847_133954C.1.pep
MRIRNLVAPTLQFQTQSTVTGNLRRRLSPPGVDFAAYGSALQHCSDHRLLRQGKQLHARLILLSVTPDNFLASKLILFYSKSNHAHFARKVFDTTPHRNTFTWNAMLLGYSFNSMFRHALNLFGSFTFSTTPNASPDNFTIXCVLKALASSFCSPELAKEVHCLILRRGLYSDIFVLNALITCYCRCDEVWLAGHVFDGMSERDIXTWNAMIGWVF

SEQ ID NO: 180443 - protein, 46 aa, Glycine max
  Clone ID: PAT_MRT3847_133955C.1.pep
SHRKVSPSSPIPDSVVGALIHNVSSLNFPFITALTMPHKEAHWSSN

SEQ ID NO: 180444 - protein, 376 aa, Glycine max
  unsure (1)..(376): unsure at all Xaa locations
  Clone ID: PAT_MRT3847_133956C.1.pep
RLRKTTEGGKSLTYALEDNMKNMFLELTSHCASVICCRSSPKQKALVTRLVKSGTGKTTLAIGDGANDVGMLQEADVGIGISGVEGMQAVMSSDIAIAQFRYLERLLLVHGHRCYRRMSSMICYFFYKNITFGFTLFLYEVYASFSGQPAYNDWFLSLYSVFFSSLPVIALGVLDQDVSARYCLKFPILYQEGVXNVLFSWRLILSWMLNGFISATMIFFFCTKAIEPQAFNEEGRTAGRDMLAVTMYTCVVWVVNLQMALAIRYFTLIQHIFIWGSIAYWYLFLMVYGAIPPNISTNVYKVFIETLAPSPSFWVVTFFVAISTLIPYISCSVIQMWFFPMYHQMVQWIRYERKTNVPEXKYCDVIRQTNIIVAKN

SEQ ID NO: 180445 - protein, 57 aa, Glycine max
  Clone ID: PAT_MRT3847_133957C.1.pep
QMSSILVGCRHVASYCCVKNEQYERMVGSLVLRLFGHAQRKLIEAPVRESTRWKKVQ

SEQ ID NO: 180446 - protein, 128 aa, Glycine max
  Clone ID: PAT_MRT3847_133958C.1.pep
QSGAEAFIVSEGSIDKKILDAVHEVSNQSYGIQVGYGGNQGQSAGRGGPLASAGGGCSLKEQVRSDLQQCSPLCSVVSYLGPGNEGRDVQRPFIKSEKPHNVISFNREKSSPPGGRKKEKKSEQSKMI

SEQ ID NO: 180447 - protein, 272 aa, Glycine max
  Clone ID: PAT_MRT3847_133959C.1.pep
QQNSHSPLKGNENESSVDGHFQSSDMNRQDPGRHGYHDSKPTYSFTTDIHGVQHQNDASRNKNDLYALVTHEQPHKFNGVLESLKQARISLQQELKRLPLVEGGHTAKPSASVSKSEDRFEVPVGCSGLFRLPTDFSDGATASFNVHDPTAGFGSNFHVNRAMSRTSDGHFFSSLPYSGTPLSLPADDQSLAIQYVENGSRFDSNKALIDPFSNGGSLSSSKYTYPTFPINPSYQNATPQMPFGNELSRPYSSSTARVPLANRFSFNGDHLR

SEQ ID NO: 180448 - protein, 61 aa, Glycine max
  Clone ID: PAT_MRT3847_13395C.1.pep
TQNVTHSLMLDLRLHRQRLCILLTLPLSLPNITIFLLHPKILLHIIPLTPIETLLCQHIHI

SEQ ID NO: 180449 - protein, 97 aa, Glycine max
  Clone ID: PAT_MRT3847_133960C.1.pep
RAMSRTSHGQFFPSLPYPDTQLSLPANDQSLAIPYVKTGQMEVHSLPVNTRIPHFPSIHPIKMQHRRCHLVMKFQDRIQVAQLGFLLQIVSRLIAII

SEQ ID NO: 180450 - protein, 198 aa, Glycine max
  Clone ID: PAT_MRT3847_133961C.1.pep
PDNAVPMAYSFIANMRLGTSELNPPAFFSCRRHFPGIPTLQLHPPARPTSPRRCRDWVTYASRQKPPIPISSNIDERALCFDILWRWLSRLISFYLLSLNLAAAASDYPAPSTYPCEDISHYYSSVKHFRFRGEALKRQLNSIVAPHHSLSYREVWDALKVLDAADIDNPEASSEIVEIYSLRVVPKRLAGKPQGWNR

SEQ ID NO: 180451 - protein, 704 aa, Glycine max
  unsure (1)..(704): unsure at all Xaa locations
  Clone ID: PAT_MRT3847_133962C.1.pep
TRPPLYITRDACTRESRRTEEVRARTLQHTSMSMKLFQLFSLLPFFLYFYTIEAAVGPLQLTHPLDPLTQQEITLVKTIVLKKYPKPANRVFFHYVGLDDPDKAAVLKWLSSGARTPRNAFSIALINGQIHELTVNLLSPRNVVLDKIHTGNGFPTLTEEEQTEALELLPKYGPFLESLKKRGFNLSQVACTTFTVGWFGETKSTRTVKMECFLQDGSPNIYVRPISGITIVADLETMKIVEYHDELITTVPKAENTEYRASHLKPPFGPKLHSWSSRQPDGPGYTLDGHSISWANWKFHIGFDERAGAVISTASIYDPELHKSRSVLYRGYISELFVPYQDPTEEWYYKTFFDAGEFAFGKSMVSLVPLEDCPPHAQFLDAYFAATDGSPQHLENAICVFEQYGGISWRHTETGLDEIFTEVRTDVSLIVRSIVTVGNYDNIVDWEFKTSGSIKPSISLSGILEVKPVDITHTDQIKEDQHGTLVSANSIGVYHDHFYIFHLDFDIDGVENSFVKTNFKTVQVTDXNSSKRKSYWTTSNEVAKTESDAKTKLGFSPSEIVIVNPNKKTSTGNEVGYRLVSNAAVHPLLTDDDYPQTRGAFTSYNVWVTPYNKTEKWAGGLYVDQSRGDDTLAVWTKQNRGIENKDIVMWYVVGIHHVPCQEDFPIMPLLSTGFELRPTNFFERNPVLKTLSPGIVKFPGCEKP

SEQ ID NO: 180452 - protein, 137 aa, Glycine max
  Clone ID: PAT_MRT3847_133963C.1.pep
IRLEGNEVGYRLVPNAASHPLLREDDYPQRRGAFTNYNVWVTPYNKTEKWAGGLFVDQSHGDDTLAVWTKQNRGIENKDIVLWYVVGIPHVPCQEDFPIMPLLSTGFELRPTNFFERNPVLKTLSPDIVKWPGCGKP

SEQ ID NO: 180453 - protein, 70 aa, Glycine max
  Clone ID: PAT_MRT3847_133964C.1.pep
DSTCPSKLCSTCLITMFFLLSRVYPISILAMCNLCNQKIISFGYFSSNEVMHLSYSWFRTINTKLSSFNV

SEQ ID NO: 180454 - protein, 60 aa, Glycine max
  Clone ID: PAT_MRT3847_133965C.1.pep
MNVDSDVCSLMIQESSQVLGMSRVRCILRGLDVKTCIFLFAVVPMCIFGIYLHGQKISYF

SEQ ID NO: 180455 - protein, 63 aa, Glycine max
  Clone ID: PAT_MRT3847_133966C.1.pep
PEKHSSAQILRQKIQKISYICDLKKRGIACLGCCSILMNVFLYKNGFCIFCSKDTFKSSSKTC

SEQ ID NO: 180456 - protein, 59 aa, Glycine max
  Clone ID: PAT_MRT3847_133967C.1.pep
QRKRGIIKCKFLLESIITKCQFKRSHILITYLLIVILYFIAFQLITYFKKRYILIQFRG

SEQ ID NO: 180457 - protein, 118 aa, Glycine max
  unsure (1)..(118): unsure at all Xaa locations
  Clone ID: PAT_MRT3847_133968C.1.pep
MVDPYVLGWIICAVLSLVALRNFAFARKNRCHSSETDATRRAENVTTAAGECRSSSRDGDVDVIIVGAGVAGSALAHTLGKDGRRVLVIERDLSEQDRIVGELLQPGGYLXLIELGLE

SEQ ID NO: 180458 - protein, 42 aa, Glycine max
  Clone ID: PAT_MRT3847_133969C.1.pep
SATAILLFADQTFCYHCYPQLILLEVPFCRLLAAVLEPNRLE

SEQ ID NO: 180459 - protein, 194 aa, Glycine max
  unsure (1)..(194): unsure at all Xaa locations
  Clone ID: PAT_MRT3847_13396C.1.pep
EATSLAFVYSLDYARTRLTNDAKGAKNGGQKQXFNGLIDCYKKTLASDGIVGLYRGFVISCVGIIVYRGLYFGMYDSFKPLLPGTMRDSLAANFALGWAVTVVAGLASYPIDTIRRRMMMTSGQAVKYKSSIDAGQQILAKEGFRSFFKGAGANILRAVAGAGVLAGYDKLQLLVFGKKYGGGELFIKSDRMLI

SEQ ID NO: 180460 - protein, 80 aa, Glycine max
  Clone ID: PAT_MRT3847_133970C.1.pep
EFGSSLALLLYPRYDSLVSCSLSLAVFVFDDHENNFFHFCVQLVHDHDMVLHHLSFTSRQEGDPTMIAQQRTRVRWHPGT

SEQ ID NO: 180461 - protein, 67 aa, Glycine max
  Clone ID: PAT_MRT3847_133971C.1.pep
SNWNEKNQNYTTSIFKGPFAKKKRNRYKLAFFLFFCFCKFIFLILTQTYVNKNLKNKLGMKKIKKKC

SEQ ID NO: 180462 - protein, 146 aa, Glycine max
  Clone ID: PAT_MRT3847_133972C.1.pep
MSFRGLSRPNASSGMGVADHSKNTFMELKQKKVHRYLIFKVDEKKREVVVEKTGDPAESYEDFAASLPENDCRYAVFDYDFVTSENCQKSKIFFIAWSPSTSRIRAKMLYATTKDRFRRELDGVHYEIQATDPTEMDLEVLRDRAH

SEQ ID NO: 180463 - protein, 152 aa, Glycine max
  Clone ID: PAT_MRT3847_133973C.1.pep
MGSEEDSIEQSVASRRERLLALRAAQELSSVPEPEPNGNKDDDNEEDQEPQEMKFRNYVPHDKNLQEGKLAPAVLPKFEDPVDDVPPPEPEAKEDPFLNIAPKKPNWDLRRDVQKKLDKLEKRTQKALYQLMVEQEKQNQLTEGDDTNGTVE

SEQ ID NO: 180464 - protein, 63 aa, Glycine max
  Clone ID: PAT_MRT3847_133974C.1.pep
YIINKTPTGKTITLQAEGGGTSENDEANIQEPEGIAPDQQRLIYPRKPLDDGNTAADYDAGNE

SEQ ID NO: 180465 - protein, 100 aa, Glycine max
  Clone ID: PAT_MRT3847_133975C.1.pep
MKFRNYVPHDKNLQEGKLAPAVLPKFEDPVDAVPPPEPEAAEDPFLNIAPKKPNWDLRRDVQKKLDKLEKRTQKALYQLMVEQEKQNQLTEGDDTNGTAE

SEQ ID NO: 180466 - protein, 288 aa, Glycine max
  Clone ID: PAT_MRT3847_133976C.1.pep
MGASEHVVVEKEKENETVAEAKKEEKDLEKGGGVGVEERKFHSNNNNNDVNDHEESHISSFHRLNPTNPLRIVINSSTRVATPPPPAQSQRSHTHTRSIPTPQQQQPEPQPQPVTLNSRKYTNRISLFLFVLHMFLAVTLVFFLVFKGVQGLIQESESNKRKEKNVLKYFLPQVEAASFMSIILAFIWQGAIRKWPTFMLHFILWFTFVVSLAAGILLICFQKPATDGVGVCFIAFAIGNGLYACWVSHRIKFCCKVLSLSLQPVSKFPDLSKPTYYVLGAASLWISL

SEQ ID NO: 180467 - protein, 61 aa, Glycine max
  Clone ID: PAT_MRT3847_133977C.1.pep
RRVKRKHIWDTQNRTYIVQTLTQHNHHGHLCYSALSIHWSNCSEAAQSVRLQHRWRRYMSH

SEQ ID NO: 180468 - protein, 121 aa, Glycine max
  Clone ID: PAT_MRT3847_133978C.1.pep
MGASEHVVVEKEKENETVAEAKKEEKDLEKGGGVGVEERKFHSNNNNNDVNDHEESHISSFHRLNPTNPLRIVINSSTRVATPPPPAQSQRSHTHTRSIPTPQQQVLFLWKFSLFFFVMIN

SEQ ID NO: 180469 - protein, 53 aa, Glycine max
  Clone ID: PAT_MRT3847_133979C.1.pep
HILSLVPRRIKNALHVKGPIYECINGVIMEGTKLIMFQPIGTKLITFYIQGPN

SEQ ID NO: 180470 - protein, 79 aa, Glycine max
  Clone ID: PAT_MRT3847_13397C.1.pep
MATESPIRISEAGGKWPSHKEAAAFGSLSRNMATEDLGILLKGHRYQGGGKDVAPNRSGSAPPSIEGSFLAIGKPFTAP

SEQ ID NO: 180471 - protein, 78 aa, Glycine max
  Clone ID: PAT_MRT3847_133980C.1.pep
VVERIQWAFVAVFSTGHSGRIQSRSNSSITNLQTHLHVLNEVTNSTIKLVMQNGRFPSLASKFSLVPHPSLFLPLHCV

SEQ ID NO: 180472 - protein, 61 aa, Glycine max
  Clone ID: PAT_MRT3847_133981C.1.pep
EIFLGSYFGFLWKVKTEMGSSNVSLFYLPHTLLLSLSNYQALIISSRKREEGEESIKTFVL

SEQ ID NO: 180473 - protein, 79 aa, Glycine max
  Clone ID: PAT_MRT3847_133982C.1.pep
RIKRIRVLILTISSRSHRRAVLANVMSIIFTKERGSLPHRVHKLRLLFIALGGNRLSNSLGVPPIVHITVFVDRPFLYS

SEQ ID NO: 180474 - protein, 44 aa, Glycine max
  Clone ID: PAT_MRT3847_133983C.1.pep
NWTGFPGELPGVVLDVERLIFKDLIDEFVIDEMASLRVKFSKHR

SEQ ID NO: 180475 - protein, 39 aa, Glycine max
  Clone ID: PAT_MRT3847_133984C.1.pep
HGSKMKSLLASGEDHQLLKEFAHTKANLELENVGGPAFF

SEQ ID NO: 180476 - protein, 94 aa, Glycine max
  Clone ID: PAT_MRT3847_133985C.1.pep
PVVILRKTRLTLKPSTWCQTLFIRIVASAGKRQPLLLSYMRSNFLSSSTTVSLHGCITLLLPLLVVQPASAPRTTSINFLSFFNLCTLGLLSPP

SEQ ID NO: 180477 - protein, 81 aa, Glycine max
  unsure (1)..(81): unsure at all Xaa locations
  Clone ID: PAT_MRT3847_133986C.1.pep
MGRAIRWLKGLFGIRTDRERKENSNHSDRDSRGLCHNPTTIPPNISPAEAAWLQSFYSETEKEQNKHAIAVXAATAAAADA

SEQ ID NO: 180478 - protein, 191 aa, Glycine max
  Clone ID: PAT_MRT3847_133987C.1.pep
SEFGSSSSRSSRSGLDLSRPEEALDGDGLPISPARTPPRSLAWDERWQVTVRYFPYYQSVPFDHGERLEVYCGNRSIPLFLESIPDRDTKLSLQSESGLRSCGNPIQRDLRPFHLYQQDLFPRRGSNLRRHCQRSHSQENPSSGIVVELIKLWIARCESHPQCNRKAPAKLPFRIIDVGPADGSQTPRLTI

SEQ ID NO: 180479 - protein, 44 aa, Glycine max
  Clone ID: PAT_MRT3847_133988C.1.pep
SRNILYLLYFIDRPLYTSLLSQGIHYYTLNTRKNNNIPSARRLL

SEQ ID NO: 180480 - protein, 42 aa, Glycine max
  Clone ID: PAT_MRT3847_133989C.1.pep
QPTFFHLQLSSYAIYTYRSEVLIEVSAIIDISYSTSNDYQIS

SEQ ID NO: 180481 - protein, 100 aa, Glycine max
  unsure (1)..(100): unsure at all Xaa locations
  Clone ID: PAT_MRT3847_13398C.1.pep
CPRELSARWKRWLVVLVVVVVILGSLGNWLMAWIRRRGTGLGMNMLREGTLGEAFWGCEPAIAMXXGKCAYRSPLCGGFDRLRTVALXGEGLRGGWGVGS

SEQ ID NO: 180482 - protein, 105 aa, Glycine max
  unsure (1)..(105): unsure at all Xaa locations
  Clone ID: PAT_MRT3847_133990C.1.pep
MKIELARNENLFRLTYTMKEGGSENNETKQASADVLFIYSKFAMACIGCKVRPCDLRFHLMKEISGMPSSLNRESEXNAASPDAMGESSSTGTARFDRTDSFRAL

SEQ ID NO: 180483 - protein, 39 aa, Glycine max
  Clone ID: PAT_MRT3847_133991C.1.pep
RVMLYVLNLIAIGTHFQMPDSKELFFFTKSNISCHRTIA

SEQ ID NO: 180484 - protein, 469 aa, Glycine max
  Clone ID: PAT_MRT3847_133992C.1.pep
MKWPTWKSKSNTMAISVVFLHLSFSMEVFCHPSHADTIAALPGQPHVGFQQFSGYVTVDDKKQKSLFYYFAEAETDPASKPLVLWLNGGPGCSSLGVGAFSENGPFRPNGEFLIKNYYSWNKEANMLYLETPVGVGFSYAKGSSSYKTVNDETTARDNLIFLLRWFNKFPQYRSRDLFLTGESYAGHYVPQLAKLIIEMNTKNKIFNLKGIALGNPVLEYATDFNSRAEFFWSHGLISDSTYNMFTTVCNYSRYVSEYYRDSVSPLCSKVMGQVSRETSKFVDKYDVTLDVCISSVLSQSKVICPQSQEANESIDVCVDDKVTNYLNRRDVQEALHAKLVGIRKWDVCSNILDYDMLNLEVPTLPVVGSLIKAGVKVLIYSGDQDSVIPLTGSRTLVQKLARQLGLNSTVPYRVWFEGQQVGGWTQVYGNILSFATVRGASHEAPFSQPERSLVLFKSFLEGRPLPDAF

SEQ ID NO: 180485 - protein, 47 aa, Glycine max
  Clone ID: PAT_MRT3847_133993C.1.pep
RRTRTDTRPPTRATIMGSTETIWTVGVILASRGHCSTQPPKSHTPDQ

SEQ ID NO: 180486 - protein, 79 aa, Glycine max
  Clone ID: PAT_MRT3847_133994C.1.pep
IVFFCRTRFIISHWGVFFKRFFLKTKARKLQTYVDQMMLPEKTVSFPYNDTHAPEIRMLPSTPSKRHKHALASLFRKTM

SEQ ID NO: 180487 - protein, 114 aa, Glycine max
  Clone ID: PAT_MRT3847_133995C.1.pep
RSERGPKRGSFPNPRFPEPLNQPTLLTNSLTVPPPRATATIMLSGFTNLLHVLALLTGLCNCRVTASNGDVHTLDTNTHFIPQVRHLRIHSSSKRFECSSEFVILKDDMGPVLS

SEQ ID NO: 180488 - protein, 85 aa, Glycine max
  Clone ID: PAT_MRT3847_133996C.1.pep
FLGIYSKRLIRRQCIVNMFLWSKACVLLMVLSYHRVEVLCSHCENSWFHHTTMPDLSSSLLMSIIIMNHFLCTCNSPSLRIYSSS

SEQ ID NO: 180489 - protein, 75 aa, Glycine max
  Clone ID: PAT_MRT3847_133997C.1.pep
NSTHSSFCIPISFKIYIFKFFSSLKCKEFKTITQFSLAILSLSVRRSLSSLRLSLSLSLSLSQARWFKESLISAI

SEQ ID NO: 180490 - protein, 47 aa, Glycine max
  Clone ID: PAT_MRT3847_133998C.1.pep
LKIHSQGNIISHECYFLKMHIKHGKLSFQPMIFEKSKNSLLLNVPVE

SEQ ID NO: 180491 - protein, 94 aa, Glycine max
  Clone ID: PAT_MRT3847_133999C.1.pep
HFSFKPLPSSTSSFSSPRTFTTLALFISKTKAAPVNTKDTKPKKDVEDGIFATSARSAFTTQNKLFAGRDAMLGTSPSLLPEGISVQTTSSALE

SEQ ID NO: 180492 - protein, 186 aa, Glycine max
  Clone ID: PAT_MRT3847_13399C.1.pep
MEESRAYLELHRSRHQDTLYPLFFRESIYGLACGHGSIFVENVGYNNKFSLLIVKRLITRMYQQTHFIIFTNDSNKNPFMGYNNHFYSQIILEGFVVVVEILFSLQFCISSLREFEIVKSYNNLRSIHSIFPFFEDKLIYLNHESDIRIPYPIHLEILVQILRYWIKDVSFFHFGRVGGRVGGRVG

SEQ ID NO: 180493 - protein, 145 aa, Glycine max
  Clone ID: PAT_MRT3847_1339C.1.pep
MSELLFNDIFKVEKVDPDGKKYDKVSRIVARSEKCDMYMLLDINTEIYPMGEKERFLMALSPSLVLNTKDGSVSIQDKFEYIMHGRLYNITKPQLEEKECSKPQLEVEVYASFGGLQLMLKGHASHCVKFAVDQKLFLLIRKVES

SEQ ID NO: 180494 - protein, 212 aa, Glycine max
  Clone ID: PAT_MRT3847_133C.1.pep
HEATHADFAASNDSRPLAGVQGQVEGKAPTVGVGKCKVPVPVLTDSLWREDPRPTTALSPLFDLSGFAAPTRTSLIINSALASVPPSSYRLGVKAANLHQLFPIHVTEALKHSLVTFDKELPGFICNDALLHGVETRTSSPIQIPRNGDTYECTSVKGLYPVGEGAGYAGGIISAAVDGMHAGFAVAKKFSLFHGDVESVLGKAQNVGVVKY

SEQ ID NO: 180495 - protein, 74 aa, Glycine max
  Clone ID: PAT_MRT3847_134000C.1.pep
ARRPSSLCTNTSLETLTLHHQTSAATDDAALLHASTVCSPAILELVATTGSSNGSPLKRSIEHNMMVTILLSSH

SEQ ID NO: 180496 - protein, 268 aa, Glycine max
  unsure (1)..(268): unsure at all Xaa locations
  Clone ID: PAT_MRT3847_134001C.1.pep
FCRWPMVELRHGGNTFNLECGCKGELSLAHXRIXVKWFIMKGNGASDVCSHEVQDLPVTLLRVQNGLAQNGLAQNGLAHNMLGADASRYRCLIWDLVXIVHCLAFSCVLGSLASFTATVMVRRNHVWILATIGSGAIAMSLPFSCILGLLASMTATTMVRRNHVWIYATVQFCLVVLAGHLFFSLVHMQAVLAILLATFTGFGVVMCGASILMEILKWRGRSLAQSNQQQGSQEAIPPPDQSSTVAHQPQIGSEQTESNLGESPAQRS

SEQ ID NO: 180497 - protein, 86 aa, Glycine max
  Clone ID: PAT_MRT3847_134002C.1.pep
MKLRVVQLKTFCKMEPTFLQSQLSPQGTQMTALQHHPLKEPPLITANTVLSILAVDYPVDKVSCYVSDDGAAMLSFESLAKSAVST

SEQ ID NO: 180498 - protein, 152 aa, Glycine max
  Clone ID: PAT_MRT3847_134003C.1.pep
FIECEHHKGKKRKIFRQVFWCLVVFLFIELVTILLIWAILRPTKPTFTLQDVTVYAFNATVANFLTSNFQVTLISRNPNDRIGVYYDRLETFVTYRSQQVTYRTATSTCAARRSSALDPAAMESSSERTPSSSRLSNGAPLASKLNLRQEKC

SEQ ID NO: 180499 - protein, 143 aa, Glycine max
  Clone ID: PAT_MRT3847_134004C.1.pep
MSEAQLVSSPQFSPQKFSPFFHPFGEIRTLNSVRELHAQIIKMPKKRNLVTMDGSMMRNYLQFGDFESATKVFFVGFARNYLLWNSFLEEFASFGGDSHEILAVFKELHDKGVKFDSKALTVVLKICLALMELWLGMEVHACL

SEQ ID NO: 180500 - protein, 207 aa, Glycine max
  Clone ID: PAT_MRT3847_134005C.1.pep
MSECEHHKGKKRKIFRQVFWCIVVFLFLVLLTILLIWAILRPTKPTFTLQDVTVYAFNATIPNFLTSNFQVTLISRNPNDNIGVYYDRLEIYVIYRSQQITYRTAIPPTYQGHNEINVWSPFVYGTNIPVAPFNFLRLSQDQSDGNVLVTIRADGRVRWKVGAFISGRYHFYVRCPAFISFGPRSNGIVVGENAIKFQIIQRCSVSV

SEQ ID NO: 180501 - protein, 331 aa, Glycine max
  Clone ID: PAT_MRT3847_134006C.1.pep
MASELTKLILPWKVRLLISLLSTLADTSRRSNATINRRLFNLADRQSLPNPTPVDGVSSSDVTVDPARNLWFRLFVPSSSSATTLPVFVYFHGGAFAFFSAASTPYDAVCRLYCRSLNAVVISVNYRLAPEHRYPSQYDDGFDVLKFIDRNGSVLPDVADVTKCFLAGDSAGANLAHHVAVRVSKEKLQRTNIIGLVSVQPYFGGEERTKSEIQLNRAPIISVDRTDWHWKVFLPNGSDRDHEAVNVSGPNAVDISGLDYPNTIVFMGGFDPLRDWQRKYYEWLRESGKEVELVDYPNTFHAFYFFSELPETSLFVYDVKEFMAKQMANVN

SEQ ID NO: 180502 - protein, 209 aa, Glycine max
  Clone ID: PAT_MRT3847_134007C.1.pep
MSVKECEHHKGKKRKIFRQVFWCLVVFLFIVLVTILLIWAILRPTKPTFTLQDVTVYAFNATVANFLTSNFQVTLISRNPNDRIGVYYDRLETFVTYRSQQVTYRTAIPPTYQGHKEINVWSPFVYGTNIPVAPFNFLGLSQDQSNGNVLVTIRAEGRVRWKVGTFISGRYHLYVRCPAFISFGPRSNGIVVGENAIKFQIIQRCSVSV

SEQ ID NO: 180503 - protein, 156 aa, Glycine max
  unsure (1)..(156): unsure at all Xaa locations
  Clone ID: PAT_MRT3847_134008C.1.pep
PWEIAPGEHFVAQRVLGHPPLKMEVRIKILYTSNCHFFFNGXQGDNEAQSAYPRTFYHEASRSGNSELEXEYDMIXRDLMMTMCCEECGDCKYCKCEKTNMXERFVADPMKNGMATDGSPRVSTMDGKPNFHFLNTSTITGVTAGGPTMRPPTFPL

SEQ ID NO: 180504 - protein, 192 aa, Glycine max
  Clone ID: PAT_MRT3847_134009C.1.pep
GQKEVRVLSDADASVLIQAAYRGHQVRKWEALKKLKQIDEVRKEVTDVRDRVQAFERSSDLQNDDKQKIAIGETIMRLLLKLDTIQGLHPSIREIRKSLARELTILQERLDYIMAKKPQQQVQDFNVQEHVEVTPMNMQNEEQVAVPADSAEGISDDAKGPCANVGGSESQSPVDPTSDRGAEFVCASEWLA

SEQ ID NO: 180505 - protein, 113 aa, Glycine max
  unsure (1)..(113): unsure at all Xaa locations
  Clone ID: PAT_MRT3847_13400C.1.pep
RDVRNCGQDFIHELTCMITVSHIPGIXTSRTDGYNKTTEGNENGPIMCCRGVNDSMDYIXAPNGEVYNYSRCGNTFNCYHAVARQFIAGCLRYRVTKMHVDGCCFEPASIMTR

SEQ ID NO: 180506 - protein, 100 aa, Glycine max
  Clone ID: PAT_MRT3847_134010C.1.pep
RSLTCSDETTTNRGSVTLTVAVESCRRVKADEMRRKKFERSSCGIDINEDEMKKEVQENVRRRKGVKQCMNAGGVRQLCERMQHLHRDPRSLVFSLLFGR

SEQ ID NO: 180507 - protein, 48 aa, Glycine max
  Clone ID: PAT_MRT3847_134011C.1.pep
HSSGILIHCFTLSTFIINCKVFNQVLSIYKTYYPLNTNTVHYLLLLNP

SEQ ID NO: 180508 - protein, 187 aa, Glycine max
  Clone ID: PAT_MRT3847_134012C.1.pep
MILPSSSLLFTLTILLCSFLSFVCANRLIQQTCKNCSKNDPNISYKFCVTSFQSDHRSHYAKNLQELGLISIKITRHNVTDTNAHINELLKKNKSLDPFIKECLDDCVEVYSDTISTFREAIRDYKAKRYADCNVKLSSIIDASTTCEDGFKQKNDAISPLTKRNKDTFQLSAIALSIVNMLINTDK

SEQ ID NO: 180509 - protein, 88 aa, Glycine max
  Clone ID: PAT_MRT3847_134013C.1.pep
ESEIEPAKECLKMTRRMGPSPTKNAANLAITLSKFVPYRAEIEWYKAWCDQQVDQMGYYDLFKRRRSTSRMTMKVNMNRPKLARFWNN

SEQ ID NO: 180510 - protein, 57 aa, Glycine max
  unsure (1)..(57): unsure at all Xaa locations
  Clone ID: PAT_MRT3847_134014C.1.pep
VAFFVSISRLLACTMFYSFQLNHLTLXCSVCEDLKRGVIFIFIICXYSCLTKMSACM

SEQ ID NO: 180511 - protein, 138 aa, Glycine max
  unsure (1)..(138): unsure at all Xaa locations
  Clone ID: PAT_MRT3847_134015C.1.pep
FLFSDRNSVLDLTKQSRFRSPKLNRHTIGHPIQNIKNSTLVYASELLRRAYNLFDFVDKYKGKSGKKIRGAQPFXNSLLVQWKNPFCAADRLXPAPNNRYYLXDGLRRKRKSLAGTGRNMTETLWDVNIAVVQTFYTK

SEQ ID NO: 180512 - protein, 85 aa, Glycine max
  Clone ID: PAT_MRT3847_134016C.1.pep
LIKLGNNNNNKNQANVCGFWFHFIKMIRLSLFFLLKIKVFVFWMERCKIMIIRWGMCWVMGQWYPLLLRWKRPHSCVKDGWEWGI

SEQ ID NO: 180513 - protein, 72 aa, Glycine max
  unsure (1)..(72): unsure at all Xaa locations
  Clone ID: PAT_MRT3847_134017C.1.pep
MARERHRDRNSSGGKGLRIQLATKDARNSAPATGXCXKPYRFMPGCVSLREIRRYXKMTELLNRNLPFQRSC

SEQ ID NO: 180514 - protein, 51 aa, Glycine max
  Clone ID: PAT_MRT3847_134018C.1.pep
PNQAVCSFPIEAMDRLLCSCSSALNTSLKPFSLVPRFDSVRFNPYSATRCS

SEQ ID NO: 180515 - protein, 79 aa, Glycine max
  Clone ID: PAT_MRT3847_134019C.1.pep
YQYYTCLKNKNNNISSGTTIHVRIVVSTSTVYSIDHTTYHAHTQTVFIISSSLNLILTLLPSHLIHSHSCWLKLKEETC

SEQ ID NO: 180516 - protein, 75 aa, Glycine max
  Clone ID: PAT_MRT3847_13401C.1.pep
DMILRTRIIVSGGEFTSGGRLIWRTWESQAFVHHPLINLFFNFNFYNSNNIYLCCKLQLMMITYIFTLVIFLSVQ

SEQ ID NO: 180517 - protein, 95 aa, Glycine max
  Clone ID: PAT_MRT3847_134020C.1.pep
IFFFVFSPPFIFYRCIPPVFRGEQKIPFPVRLFFPLPHPNFVFWAKNFWFFRRGLLGLPYATLQFLKLFPQKNRKENINPYLLGKKTFGRIPGLR

SEQ ID NO: 180518 - protein, 39 aa, Glycine max
  Clone ID: PAT_MRT3847_134021C.1.pep
RVAYNPMISTTSHLATDISQASGNDVYVAHLLEPKSPSG

SEQ ID NO: 180519 - protein, 63 aa, Glycine max
  unsure (1)..(63): unsure at all Xaa locations
  Clone ID: PAT_MRT3847_134022C.1.pep
VXXSSGIRPRXXSFQKLXXFXYFDNLIXXGLPYLGLEYPRDVFKDLYGGIFLFFXRQKKKXKK

SEQ ID NO: 180520 - protein, 104 aa, Glycine max
  unsure (1)..(104): unsure at all Xaa locations
  Clone ID: PAT_MRT3847_134023C.1.pep
VFFPKKPLLAPATKRFMIPPLGRLVFSSLAAIAIPDIWDFFQFLGSSSPVCLAFIFPGFFVLRGVXGFSPRKAKIFALIMIILAVVPSVLALSPPIYNAFSSKS

SEQ ID NO: 180521 - protein, 151 aa, Glycine max
  Clone ID: PAT_MRT3847_134024C.1.pep
MELKDENQIIGCRGRPLICSRGEFPPRSMCCGDRCVDVTSDRENCGLCGVRCTFNRQCCNRLCLNTNLNLFNCGRCGRVCPFGRLCVFGSCAFEQAVPSPPPVSPVSPSRPVSPSLRPPVSVSPSPLFPPVFPPVPPAKSPQPLDYQPAMD

SEQ ID NO: 180522 - protein, 38 aa, Glycine max
  Clone ID: PAT_MRT3847_134025C.1.pep
LVLASIIGLSWLRACFWISSSDPRANGSTAERRAELEL

SEQ ID NO: 180523 - protein, 103 aa, Glycine max
  Clone ID: PAT_MRT3847_134026C.1.pep
SLKRLLTVKQYTLGHIEQKWRRNITEWQSQRQFILCITELNGKIYRKLILFTQATFSHIVTLPQIWDHHQNISRTASSETASYGLIKAYYLHIHDARMVMARD

SEQ ID NO: 180524 - protein, 131 aa, Glycine max
  Clone ID: PAT_MRT3847_134027C.1.pep
MLALHPAKKLSFNRPINNGDLVIVYERHDIMKAVTVSEGSVLQNRFGVFKHSEWIGKPFGSKVVSSKGGFVYLLAPTPELWTLVLNHRTQILYIADISFVIMYLEIVPGCVVLESGTGSGSLTSSLARAVA

SEQ ID NO: 180525 - protein, 62 aa, Glycine max
  Clone ID: PAT_MRT3847_134028C.1.pep
KETTSAWVLEPRLKSYGCFNSFFSVNIIHSHSLTLVWWCIIVHDCYLVSILFYEYVHSYVWI

SEQ ID NO: 180526 - protein, 63 aa, Glycine max
  Clone ID: PAT_MRT3847_134029C.1.pep
KRKKKDHWKSFIFFFFFFYRKCFGGFCLVLGEHATNIITTPISFIFHYLKLLAYQVELISRVK

SEQ ID NO: 180527 - protein, 59 aa, Glycine max
  unsure (1)..(59): unsure at all Xaa locations
  Clone ID: PAT_MRT3847_13402C.1.pep
ALSSHVPMATAVDVVLFSMRVLKNLWLGLAQMSVVIRLPSNEFAVLVSEAXSGSDSDPQ

SEQ ID NO: 180528 - protein, 100 aa, Glycine max
  unsure (1)..(100): unsure at all Xaa locations
  Clone ID: PAT_MRT3847_134030C.1.pep
WGFQINLGEAQQSKDVYYLFKKAWMSRXYFASVHGIYSREHNRLPVYYDCRFCTTCKLPMLACPDAFHVXMSSXQAQTASPNGFIRLFGYLNIRLVHCIT

SEQ ID NO: 180529 - protein, 105 aa, Glycine max
  Clone ID: PAT_MRT3847_134031C.1.pep
IPEKIAGAAMLAPMINPYDPHMPKEEMKRTWEKWLPRRKMMYSLARRFPKLLSFFYRKSFLPEQHDEIDKLLSVSPGKKLVGCPCYHVNSKLMLYQLDTVDTESH

SEQ ID NO: 180530 - protein, 66 aa, Glycine max
  Clone ID: PAT_MRT3847_134032C.1.pep
ADSYGLKWFFIISTPNPVFTPLAGSIGAWKALSPTVVQASFNVEAGLEQFFRSKKKAKAIFFPPPN

SEQ ID NO: 180531 - protein, 142 aa, Glycine max
  Clone ID: PAT_MRT3847_134033C.1.pep
MAVEYQCCETQFFIRLLIILLLVLFAGLMSGLTLGLMSLSLVDLEVLAKSGTPQGRKHAAKILPVVRNQHLLLCTLLICNAAAMEALPIFLDGLVVAWGAVLISVTLILLFGEIIPQSICSRYGLAIGATVAPFVPVLVWIC

SEQ ID NO: 180532 - protein, 35 aa, Glycine max
  Clone ID: PAT_MRT3847_134034C.1.pep
GSRLQKERGSVTHGGGDTRKHLNIRGWNWGYLHFK

SEQ ID NO: 180533 - protein, 208 aa, Glycine max
  unsure (1)..(208): unsure at all Xaa locations
  Clone ID: PAT_MRT3847_134035C.1.pep
MAVEYQCCETQFFLRLLIILLLVLFAGLMSGLTLGLMSLSLVDLEVLAKSGTPQDRKHAAKILPVVRNQHLLLCTLLICNAAAMEALPIFLDSLVVAWGAVLISVTLILLFGEIIPQSICSRYGLAIGATVAPFVRVLVWICFPVAYPISKAGKGGELTHDETTIIAGALELSEKTASDAMTPITDIXSIDINSXLDRDLMNLILEKG

SEQ ID NO: 180534 - protein, 46 aa, Glycine max
  Clone ID: PAT_MRT3847_134036C.1.pep
NKNKFRLVNTLSPVLFSGATSRKRGLVTQEEVYISDFFPYRRENKP

SEQ ID NO: 180535 - protein, 49 aa, Glycine max
  Clone ID: PAT_MRT3847_134037C.1.pep
AVNFVFLQRGQEGRELLEECLWITERYKGKEHPSLVTHMINLATSRTRG

SEQ ID NO: 180536 - protein, 61 aa, Glycine max
  unsure (1)..(61): unsure at all Xaa locations
  Clone ID: PAT_MRT3847_134038C.1.pep
KKLLLIMKKVVMMITLAINIFSCXWCVAFLGXGKPFQLSFGFNFKNLPKKKNYGFGNKYLN

SEQ ID NO: 180537 - protein, 48 aa, Glycine max
  Clone ID: PAT_MRT3847_134039C.1.pep
HRGMFLHFKYNNHHLVVFIEATKNKYRHCDADHPYCLNYAPPLPSANF

SEQ ID NO: 180538 - protein, 100 aa, Glycine max
  Clone ID: PAT_MRT3847_13403C.1.pep
HLYCKWLLTLTLARLLIIRSSGRIAVAAATASSIMISRFLVIAAMKCRVRFSLYRFWILLARFRYCFDQLCVFPFRFVQNCPCTLVRFGAKHLMLANLEP

SEQ ID NO: 180539 - protein, 70 aa, Glycine max
  Clone ID: PAT_MRT3847_134040C.1.pep
LGMRISVIAVQPPPFWCSFKQKHPERLSRRSPRFWKLNGVSMGVACQAFSLLILHYYPDPALTPICLMRY

SEQ ID NO: 180540 - protein, 214 aa, Glycine max
  Clone ID: PAT_MRT3847_134041C.1.pep
MAVVEKEKLQEESVIRRFYQIILSWDYFALLKESKKLKNKEKKGTAVSTLVKVKQRYKDVDDYIATYEPLVFEEAKSQIIKEKEEEEVTEWKLGVVKSWSEADDFHFIEFPCEINEGESISQNDLLLLSKEKFLDDKRLPTVYAFALVEHVRKFFETRLLRVRLYLAGEFSNFNTDNVQSCPRLVNIASHICETERQLYFMKLCSLFTIAREYL

SEQ ID NO: 180541 - protein, 56 aa, Glycine max
  Clone ID: PAT_MRT3847_134042C.1.pep
LVMEKNHYVRRGIGNFPLHPYRKACCALSTFSQTFDQTPLIFNRSHYGLGNMNRLA

SEQ ID NO: 180542 - protein, 93 aa, Glycine max
  Clone ID: PAT_MRT3847_134043C.1.pep
PTKITKTFCVPEHQIKCSFIQMRHLPLITQTIKVGTFVHERRHSISSKPVLSECSSMSNSCQNKQHFFKPQYKRKPSPSAAMTIIHVILCRTS

SEQ ID NO: 180543 - protein, 81 aa, Glycine max
  unsure (1)..(81): unsure at all Xaa locations
  Clone ID: PAT_MRT3847_134044C.1.pep
MTISQWSHNAEAKMEXVPFGGTEPQNQELEYSVHIDHKRGRYCGSTLVPQKLQQMGSKVKKXADLHRHYNISAKGLHTREK

SEQ ID NO: 180544 - protein, 75 aa, Glycine max
  Clone ID: PAT_MRT3847_134045C.1.pep
KKENPDLRKRFFPPVMVRQPNQGPKKTGVNMYFKKNAGVIVNPKEKMKGCATPGPIEKKCVNLCPRIASPPTPMV

SEQ ID NO: 180545 - protein, 127 aa, Glycine max
  unsure (1)..(127): unsure at all Xaa locations
  Clone ID: PAT_MRT3847_134046C.1.pep
MAEEETGSMRAPNESVMQAYRHACISNKGTVQWPSDTIGVNNAYGVERAPVHVTCPXDKHGANDMXSYYASPDDRMNLKNRDRPTGGHPMECLHDRCXENGEDCQSWIMTGDPAGLTGHAMKRLGSD

SEQ ID NO: 180546 - protein, 52 aa, Glycine max
  Clone ID: PAT_MRT3847_134047C.1.pep
ACTLSLHLKSIFNFKHQTSIQRFRNANWQQTSLGLSSSIRLMNDKHSVNCST

SEQ ID NO: 180547 - protein, 72 aa, Glycine max
  Clone ID: PAT_MRT3847_134048C.1.pep
VYNLFTYVCRFGQFIISLIYAFSPYHNKEPNPSVVSLINFHYRVNCHIPCFVTAMGRPAQDSSPRLIPNSLL

SEQ ID NO: 180548 - protein, 77 aa, Glycine max
  unsure (1)..(77): unsure at all Xaa locations
  Clone ID: PAT_MRT3847_134049C.1.pep
VSLVLLLAALMGSPQVLANYENPPVYKPSTEIPPFYMPPLEMPPVYKPPLENPPIYXPPVEKPPLYKPTVEKPPVYK

SEQ ID NO: 180549 - protein, 327 aa, Glycine max
  Clone ID: PAT_MRT3847_13404C.1.pep
MVNCCLVVWRSWAQILEITSACRGLDKGFVDTGYYLKSITIYPIKSCGGFSASSWPLSNNGLTHDREWILKSLTGEILTQKKVPEMGFISTFIDLSQGMLFVESPRCEERLQIRLESDVYGVIEEIELYGQRYEVYSYDNETNSWFSEAIGKTCSLLRYSSFDQDFMLNKIKGAATCRDPKNKLNFANEAQFLLVSEESVSDLNRRLSSDVQKGIYGKVMQVSASRFRPNLVVSGGRPYAEDGWRYIRIGNKYFSSLGGCNRCQIINLTINAGQVQKSNEPLATLASYRRVKQGKILFGILLKHVSIDGEQQKGDFWLHVGQDVHPD

SEQ ID NO: 180550 - protein, 77 aa, Glycine max
  Clone ID: PAT_MRT3847_134050C.1.pep
YKEHDTTPYLLLRQMESDDQNVRTSNFYGIDTRCRITYGASYLKDTGSMSIAPNCNDKSGCNLPSQITKYYYEATNF

SEQ ID NO: 180551 - protein, 91 aa, Glycine max
  Clone ID: PAT_MRT3847_134051C.1.pep
QFDDLLLDFNIDGNGLVRYGLHEEGFAYYWSGARAKVGITRGRYCFACKVVSAQTVNMEDTAPEQQHICCLGISRGDNAVGNLGESRQSFG

SEQ ID NO: 180552 - protein, 50 aa, Glycine max
  Clone ID: PAT_MRT3847_134052C.1.pep
FINKKHYLFIIFEPLLHLSFGPLWGHPHTKRKTCWVERITQYTGARANTL

SEQ ID NO: 180553 - protein, 85 aa, Glycine max
  Clone ID: PAT_MRT3847_134053C.1.pep
TPPPQAYIGMLDQFASRYLKRQVHRPSTKVGPRNFGTAEPRYLGDCTHKGTPLKQGATKNTIRSCMISERPLGSTKTKPLGRGRR

SEQ ID NO: 180554 - protein, 83 aa, Glycine max
  Clone ID: PAT_MRT3847_134054C.1.pep
GECSVVQGDDISLHHTHIFTNSSDSDVIIICNICILCLLGPGFIPFNYSFHHLNQYKSVFFSSLSAFNRSISFMYIKHFPGQL

SEQ ID NO: 180555 - protein, 36 aa, Glycine max
  Clone ID: PAT_MRT3847_134055C.1.pep
FNTHFFNKAKPKFWPPFSKMYRPLTINLSSLTPNII

SEQ ID NO: 180556 - protein, 156 aa, Glycine max
  unsure (1)..(156): unsure at all Xaa locations
  Clone ID: PAT_MRT3847_134056C.1.pep
ITKRNNVDRFSFFTPLSSSSKSIPSFSLSTPTPPLRFRLTPLRRPTDRFYPLRSSTGVPDGGSFGGHGGHGHGGHGGHGGGGGHDNEDNGRKNEALLESVPADLAAAIKAGKIPASVVTRFLELEKSPFFRXWVLQFAGFRERLLAEDLFLAKVAM

SEQ ID NO: 180557 - protein, 79 aa, Glycine max
  Clone ID: PAT_MRT3847_134057C.1.pep
SALLASGITGPERSLVLNYDLPAAPVKFLFSPMPNWAFLKKRGCHKLCCIDVCEDSVCNSGVFQWLFIGDSQERGGFGV

SEQ ID NO: 180558 - protein, 221 aa, Glycine max
  unsure (1)..(221): unsure at all Xaa locations
  Clone ID: PAT_MRT3847_134058C.1.pep
MSIAFSFFTPLSSSSKSIPSFSLSTPTPPLRFRLTPLRRPTDRFYPLRSSTGVPDGGSFGGHGGHGHGGHGGHGGGGGHDNEDNGRKNEALLVVAEAGRSLESVPADLAAAIKAGKIPASVVTRFLELEKSPFFRWLLQFAGFRERLLADDLFLAKVAMECGVGVFTKTAAEYEKRXENFXNEIEIVFADVAMAIIADFMXLVYLSAPTVALRPALALTAG

SEQ ID NO: 180559 - protein, 58 aa, Glycine max
  Clone ID: PAT_MRT3847_134059C.1.pep
RAVYTTRTDTHTQQNPCPAETLLVSLEQPSVPSEMVTVTSCRLMPLNSETLRAFIDMI

SEQ ID NO: 180560 - protein, 83 aa, Glycine max
  Clone ID: PAT_MRT3847_13405C.1.pep
GKVMQVSASRFRPNLVVSGGRPYAEDGWRYIRIGNKYFSSLGGCNRCQIINLTINAGQVQKSNEPLATLASYRRVKVGQVVFN

SEQ ID NO: 180561 - protein, 438 aa, Glycine max
  Clone ID: PAT_MRT3847_134060C.1.pep
CLYLWEEVICHFCFKSNVPLKLTFQMFAFAGMAPRKLASKRSRKDKAAEGTSSAPEYDSHRFRSAVHQQRFEAIKGWSFLRERRVQLRDDEYTDFQEEIGRRRWASLVTPMAKFDPEIVLEFYANAWPTEEGVRDMRSWVRGQWIPFDADAIGQLLGYPLVLEEGQECEYGQRRNRSDGFDEEAITQLLCIPGQDFARTAVGRRVRIMRTNMTTLTQIWMMLLLSNILPSDHNSDLPLPKCQLVYAILTQMSVHVAQLIADAIYIFAGMAPTRHPLDPDKSNRALGFPSLITGLFQSFGVPVAPTKVIWPPITRAFIEKYCTQRQAQGDAPQAAGAPPPPHQAGQAGALDMEQYLRHLVRQQAANHRAHVQTHDFLYQMSLSMQKPGLRFFFMPYSRPGQGRGRMARRLARGPSRRGTPRSSRRWRRGPRGRGDGRFA

SEQ ID NO: 180562 - protein, 153 aa, Glycine max
  unsure (1)..(153): unsure at all Xaa locations
  Clone ID: PAT_MRT3847_134061C.1.pep
HASAESNKLVGNLSWRIRTPDAGFITRSAEQRFVQDPSYPGILYNHDNEYLHYQDDXNDAWDGYGGAVVYTRSAVLPESIVPELEKASKSVGRDFSKFIRTDNTCGPEPSLVERLEKKVEEGEETIVREVEQIEEEVEKVGKTEATLFQKLAE

SEQ ID NO: 180563 - protein, 62 aa, Glycine max
  Clone ID: PAT_MRT3847_134062C.1.pep
QPFTIVFRSSQIYTNLPSSLFLWTPCLGVLLVQSLAVQGINQWIQWQISARTKVRWFLTETP

SEQ ID NO: 180564 - protein, 388 aa, Glycine max
  unsure (1)..(388): unsure at all Xaa locations
  Clone ID: PAT_MRT3847_134063C.1.pep
MLKFEADRMLVFLKDWSNIRITAVAAILVSILMIIPPADAVDALKTCACLLKDCRIELAKCLSNPSCAANIACLQTCNNRPDETECQIKCGDLFENSVVDEFNECAVSRKKCVPKKSDVGEFPAPNPDVLVNSFNIADFSGKWFITSGLNPTFDTFDCQLHEFHTESNKLVGNLSWRIRTPDAGFITRSAEQRFVQDPSYPGILYNHDNEYLHYQDDWYNLAIKVENKSDDYVFVYYRGRNDAWDGYGGAVVYTRSAVLPESIVPELEKASKSVGRDFSKFIRTDNTCGPEPSLVERLEKKVEEGEETIVREVEQIEEEVEKVGKTEATLXSTLFQKLAEGFKVFQEDEENFLRGLSKEEMEILDGLKMEAGEVEKLFGRALPIRKLR

SEQ ID NO: 180565 - protein, 137 aa, Glycine max
  Clone ID: PAT_MRT3847_134064C.1.pep
YIYIYRYILPSKIENKSDDYVFVYYRGKNHAWDGYGGAVVYTRSAVLPESIVPELEKASKSGGRDFSKFIRTDNTCGPKPSLVERLEKKVEEGEKTIVREVEQIEKEVEKVGKTEATLFQKLAEGFKMFQEDEENFL

SEQ ID NO: 180566 - protein, 60 aa, Glycine max
  Clone ID: PAT_MRT3847_134065C.1.pep
NSCGIVLSTNPAKCLNRLFRHSNKLGHSQGISLGPTNKFHPISGICLRLEKTNKDIAFVS

SEQ ID NO: 180567 - protein, 66 aa, Glycine max
  Clone ID: PAT_MRT3847_134066C.1.pep
TSNNSHVKHFVPPSIFQARCHKCAFPLQIRQPAPSVISIEQLLPTVYQQLVSQAYVLWCFSIQCFK

SEQ ID NO: 180568 - protein, 188 aa, Glycine max
  Clone ID: PAT_MRT3847_134067C.1.pep
EHIEELTLEWGSEPQDSQIEKDVLQNLQPSTNLKKLSIRYYSGTSFLKWLSYYSYSYVIVLCITDCNYCFSLPPFGQLPSLKELVIERMKMVKTVGEEFYCNNGGSLSFQPFPLLQSIQFEEMSEWEEWLPFEGEGRKFPFPCLKRLSLSECPKLRGNLPNHLPSLTEVSISECNQLADAWVDAGIPA

SEQ ID NO: 180569 - protein, 109 aa, Glycine max
  unsure (1)..(109): unsure at all Xaa locations
  Clone ID: PAT_MRT3847_134068C.1.pep
CHQMQIVVSFYDMEAGCGAAEPDTTLALLTITRHLSXKSDAITGQIHVTQRSLEEQEXIHSIHYVDQYLRQQMALHQLGVMRQARKPMRXLAESSVSILRAWLYKHLFH

SEQ ID NO: 180570 - protein, 143 aa, Glycine max
  unsure (1)..(143): unsure at all Xaa locations
  Clone ID: PAT_MRT3847_134069C.1.pep
VYVYALPREIGENGKRXCVSGDGEDMTLITGTSVEEADNTLIXELEKRVTTLVGIECPKDEKQARHKILDIPKTHXLTILPMELNLEVRQKYLNVVRIITKKRDTLICQDGINPYTMKWTVLANIXLRKGNHILRRDYAHVDR

SEQ ID NO: 180571 - protein, 36 aa, Glycine max
  Clone ID: PAT_MRT3847_13406C.1.pep
GSRVEFKRYYLSAAPNCPASLTAREAHWCCSSSSID

SEQ ID NO: 180572 - protein, 162 aa, Glycine max
  Clone ID: PAT_MRT3847_134070C.1.pep
MALLFNSKLLRWRLSLHPNPISAFSTAEALSDHDHPPLPSPQPQPPPIVPPREHNLELTICKMMSNRAWTTRLQNSIRSLVPEFDPSLVYNVLHGAASPEHALQFYRWVERAGLFTHTPETTLKIVQILGRYSKLNHARCILFTTRASSHAPSPETSSSLTA

SEQ ID NO: 180573 - protein, 38 aa, Glycine max
  Clone ID: PAT_MRT3847_134071C.1.pep
LLCANLFMALSVMCDRIINCGIVDRLRTVHRKPYYRNR

SEQ ID NO: 180574 - protein, 90 aa, Glycine max
  Clone ID: PAT_MRT3847_134072C.1.pep
TNLIMGRLNLLVDFTIRCFMHSFNFSFLKGAVPSCRCYYPSTIYYAHSCQCDQKNIKPTLTNQIQPHLFLSHWKEDPYWEGYLLFFLLET

SEQ ID NO: 180575 - protein, 231 aa, Glycine max
  Clone ID: PAT_MRT3847_134073C.1.pep
HAYVEVPAACIILIGLFALQHYGTHRVGFLFAPVIITWLFCLSTIGIYNIFYWNPHVYKALSPYYAFQLLRKTQKGGWMALGGILLSFTGSEAMFADLGHFTQLSIKIAFTSVVYPSLILAYMGQAAYLSKHHNIAQDYHFGFYESVPEKLRWPVLVIAILAAVVGSQAIITGTFSIIKQCSSLSCFPRVKVIHTSSKIHGQIYIPEINWLLMMLCLAVTICFRDTKRLGH

SEQ ID NO: 180576 - protein, 42 aa, Glycine max
  Clone ID: PAT_MRT3847_134074C.1.pep
HSQRQHTLTIHIYNILTFLTAEACLLLKTFIFSTHAYLPTSR

SEQ ID NO: 180577 - protein, 58 aa, Glycine max
  unsure (1)..(58): unsure at all Xaa locations
  Clone ID: PAT_MRT3847_134075C.1.pep
SKNTIHXFPYHISHIENPTILIPKSNSKTLHILYTQSPSAIYNIIKLGDKYPTSTPNV

SEQ ID NO: 180578 - protein, 56 aa, Glycine max
  Clone ID: PAT_MRT3847_134076C.1.pep
EGNAISFSAVGHFNYYHCVDFTGILTFWLSRLWMQFLDFDPLDGPHHPMKFFNHST

SEQ ID NO: 180579 - protein, 82 aa, Glycine max
  Clone ID: PAT_MRT3847_134077C.1.pep
AWSMILTLAYGRTFIVEGNHVDKLKLQSWAIPKYSQQYFIRSQKMPINKMIEETILDADKKGIKVLSLGLLNQGEDLNSYGG

SEQ ID NO: 180580 - protein, 105 aa, Glycine max
  Clone ID: PAT_MRT3847_134078C.1.pep
YRSQTVTHPLFRRLPRPANLLVASTLAPSITTITFVSCGIFTSRFVFKSRTILHLAHSHDNATPVPYAGYCWCLPFRYPSALSSLSASVSLRSPPPPPKKEDVIQ

SEQ ID NO: 180581 - protein, 114 aa, Glycine max
  unsure (1)..(114): unsure at all Xaa locations
  Clone ID: PAT_MRT3847_134079C.1.pep
SALRKGFFFFLLYRNHIPSEDYHANIFIISLLAMKLQKQHLTLLHNLPYSPLPRGGXKLXEQTTPEVYPKERGRGSQMKSNSLFIIFQEKNANYCISKKTILDTNMSNAPIYSL

SEQ ID NO: 180582 - protein, 132 aa, Glycine max
  unsure (1)..(132): unsure at all Xaa locations
  Clone ID: PAT_MRT3847_13407C.1.pep
MKNGSKSVEYFSIKFTGKLKMLGDGNEGMSTLPGLNQIQFEGFCRFIDRGLPEGLFKFPKIEDTDQEIEFQLFVETYQLLEPLINEKDAVYESLTYSAELYVSAGLIWKSSRDIQEXTIFXGNIPLMNLWEL

SEQ ID NO: 180583 - protein, 45 aa, Glycine max
  Clone ID: PAT_MRT3847_134080C.1.pep
CRPFFVNNQNLTERRSIQFQSGYIPNGKTKYRNIMTHMFENQLQA

SEQ ID NO: 180584 - protein, 99 aa, Glycine max
  Clone ID: PAT_MRT3847_134081C.1.pep
MAKWCMLVLVLALALAVATSARDAPEDVGLKDQKNFISYAGVGGYSGIGSNGLPFGGAGIGGGTTGIGGLGGFGGPIGGGTGGSVGGGVGGGSIPHPTP

SEQ ID NO: 180585 - protein, 100 aa, Glycine max
  unsure (1)..(100): unsure at all Xaa locations
  Clone ID: PAT_MRT3847_134082C.1.pep
PREQTXXXGRDAXEXAAAGDKKXXXTDQAXPXXXXKRGXAXEXPXAPQGXRXXXEDXXXXXXGXEXXXXXKTXXXEXXXXXNPTXAAXQQDXEXQAXXKE

SEQ ID NO: 180586 - protein, 31 aa, Glycine max
  Clone ID: PAT_MRT3847_134083C.1.pep
VVESRRDDTFTPTTQNQLLKQTVLRSRGPTN

SEQ ID NO: 180587 - protein, 83 aa, Glycine max
  Clone ID: PAT_MRT3847_134084C.1.pep
APQEKQIKKKDPDKSLMAAVPMCVILSSCYLGGKIWIQVLYGIHAMTSLKNLSYSLQFGCCSVSGTSLSMTHLLQRHTKLIVS

SEQ ID NO: 180588 - protein, 76 aa, Glycine max
  Clone ID: PAT_MRT3847_134085C.1.pep
RTRGVLISSPFVKTTLEPFTLKVRRPHLLRQLATPLGTIFRGINETLGLNPELGLDLKRADYFILQDFILSRLYLI

SEQ ID NO: 180589 - protein, 173 aa, Glycine max
  unsure (1)..(173): unsure at all Xaa locations
  Clone ID: PAT_MRT3847_134086C.1.pep
ISLKDYYQEGSHVYDELNVLEAFRRAITTWSRWIDANINQSKSMVFSPSAAVXSFAFRDGQWNSGGQCESETEPINNEKYLIEXPHKMKVLEKVLKNMKTHVTYLNVTKMTDFRKDGHPSIYRKQNLSPEERKSPLRYQDCSHWCLPGVPDAWNEILYAELLLKQYQNQQKRP

SEQ ID NO: 180590 - protein, 102 aa, Glycine max
  Clone ID: PAT_MRT3847_134087C.1.pep
TAKSKPRCCGFGFRHMKTNCIPRICRLNMKDAVFCLHRCGIITISWRQGRVMGLCVLRTKVVQRPTFRVRDGSGCVIQYTNSKVTPVVIYSYLFKRNLIKKN

SEQ ID NO: 180591 - protein, 487 aa, Glycine max
  Clone ID: PAT_MRT3847_134088C.1.pep
MDSTQHAVPVPTTNQTTDSHAPSLEVKSPPFLASKEPPGAVKNQTFNSDEAKSASTNQTTNATATATATNVSVSFPVQNVPNLNTSSNSSVKVDLVKGTVVSNDNYTASLARKQNNGKDHAKGNDESMESLMKCDFFDGEWVKDDAYPLYKPDSCSLIDEQFNCIRNGRPDKDYQKYKWKPKGCTLPRLDAHRMLQLLRGKRLVFVGDSLNRNMWESLICILRNAVKNKHNVYEVNGRVNFRGEAAYSFVFEDYHFSVELFVSPFLVQEGEMTDKNGTKKETLRLDLVGKSSSQYKDADILVFNTGHWWTHDKTSKGQDYYQEGSHVYAELNVLEAFRRALTTWSKWVDANINPSKTMVFFRGYSASHFSGGQWNSGGQCDSETDPIDNEKYLTEYPDKMKVLEKVLKNMKTHVTYQNITRMTDFRKDGHPSIYRKQNLSPEERKSPLRFQDCSHWCLPGVPDLWNEVLYAELLLREYQNQHEQKHR

SEQ ID NO: 180592 - protein, 60 aa, Glycine max
  Clone ID: PAT_MRT3847_134089C.1.pep
EDDRRGYRSTKNNTRPAEIAEISMRLPMSGTTEMDLITFTESIHQKYNSHTKHTDVHHPN

SEQ ID NO: 180593 - protein, 151 aa, Glycine max
  Clone ID: PAT_MRT3847_13408C.1.pep
RLLWDRLPTKDNLIKRQIQVDDDLCPFCHNQPESASHLFFTCGKIMPIWWEYLNWVKEDKVFHCRPLDNFIQHFSSASSKVSNTRSTMWWIAATVSIWRLRNDIIFQNQTLDINRMTDNTLFLLWTWLRGWERNFQIPYYSWSSNMSIAFS

SEQ ID NO: 180594 - protein, 156 aa, Glycine max
  Clone ID: PAT_MRT3847_134090C.1.pep
NVLEAFRRAITTWSRWIDANMDQSKSMVFFRGYSASHFSGGQWNSGGQCDSETVPIKNEKYLREYPPKMRVLEKVLKNMKAHVTYLNVTKMTDFRKDGHPSIYRKQNLSPEERKSPLRYQDCSHWCLPGVPDAWNEILYAELLLKEYQNQHQQKQT

SEQ ID NO: 180595 - protein, 128 aa, Glycine max
  Clone ID: PAT_MRT3847_134091C.1.pep
MGTETSSVDISEPLLLDPHGNEEKEEYLREEVPEWKEQITIRGLVVSAVLGSLFCIITHKLNLTVGIIPSLNVAAGLLGFFFVRTWTGLLTKMGFFTKPFTRQENTVIQTCVVACYGLAFSGGFGSSL

SEQ ID NO: 180596 - protein, 210 aa, Glycine max
  Clone ID: PAT_MRT3847_134092C.1.pep
LPSRPPTRPPTRPPTRPSQYKDADILVFNTGHWWTHDKTSKGQDYYQEGSHVYAELNVLEAFRRALTTWSKWVDANINPSKTMVFFRGYSASHFSGGQWNSGGQCDSETDPIDNEKYLTEYPDKMKVLEKVLKNMKTHVTYQNITRMTDFRKDGHPSIYRKQNLSPEERKSPLRYQDCSHWCLPGVPNAWNEILYAELLLKQYQNQQKRP

SEQ ID NO: 180597 - protein, 136 aa, Glycine max
  Clone ID: PAT_MRT3847_134093C.1.pep
MGSSPVGMKTPIGRARGLWNLSTDQEWKTPETEQECLEYYQEKIAHGQNKRLLPLQEDLADWLNTTLNLDHITGTNLLDILDNGVILCHLAMVIQERAKDAVSTGLAAGPVPVIKGPFFEKASRRSFFSRDNLEKF

SEQ ID NO: 180598 - protein, 68 aa, Glycine max
  Clone ID: PAT_MRT3847_134094C.1.pep
PNINTRKRMEKKMQPWKEKIGMHKKITCSDTKKSSKKLYNNKKTDSIRVYALMNPKEIVVLTQTSIQL

SEQ ID NO: 180599 - protein, 145 aa, Glycine max
  Clone ID: PAT_MRT3847_134095C.1.pep
MSHLEKENLKAVLDFSSGEWPLFQTEQLAYLALRCCEKTWLNRPDLVSEIWSVLEPFKATCIDTPPHLISKKLRRIPSHFVCPIVQEVMEDPYIAADGFTYEEEAIRGWLNSGHDTSPMTNLKLDHTDLVPNYALHNAILEWQQQ

SEQ ID NO: 180600 - protein, 67 aa, Glycine max
  Clone ID: PAT_MRT3847_134096C.1.pep
KGSLRVYIRFRKYTIKGYDALSALNLWHKLHIHMLVNYLTSSICKPLPIYWKCLYTYVQLDLKSRQN

SEQ ID NO: 180601 - protein, 53 aa, Glycine max
  Clone ID: PAT_MRT3847_134097C.1.pep
AKTQQKGSHHCWNMGTTNSFNAILKLFIYNYIHIMKITYYNNENYNYNFVIIR

SEQ ID NO: 180602 - protein, 351 aa, Glycine max
  Clone ID: PAT_MRT3847_134098C.1.pep
MGEQTLGQAQPLPAPDAATAHSELNNVPQPTTSPATKIPLRPRKIRKVSPDPSTSEAPIKPAKPVGRNTTSKAAPPRALTVVPRIVARSLSCDGEVEISLRYLRNADPLLSPLIDIHQPPTFDNFHTPFLALTRSILYQQLAFKAGTSIYTRFIGLCGGENGVVPETVLALTPQQLRQIGVSGRKASYLHDLARKYQNGILSDSAIVNMDDKSLFTMLTMVNGIGSWSVHMFMIFSLHRPDVLPINDLGVRKGVQLLYNLEDLPRPSQMDQLCDKWRPYRSVASWYMWRFVEAKGTPSSAVTVATGAGLQQQRHHQHQQQEQQQQQHAPQPQLLDPINSMFNLGAACAWGQ

SEQ ID NO: 180603 - protein, 114 aa, Glycine max
  unsure (1)..(114): unsure at all Xaa locations
  Clone ID: PAT_MRT3847_134099C.1.pep
HWGWNSPLKPVTAGVPRVPGPIFPDQFFNKKLVIEALKIGGPVGVKTWLGMQGNSFSFYPVEKPVKRIIPGEKPFXMRNKPKGLSHQNRGAMKKGGSPTSVFKALIEGLSLLSP

SEQ ID NO: 180604 - protein, 44 aa, Glycine max
  Clone ID: PAT_MRT3847_13409C.1.pep
RLEKTISGKSGNGFKKIMLSFVGVLYKKEGEIATRDSINQKQDM

SEQ ID NO: 180605 - protein, 160 aa, Glycine max
  Clone ID: PAT_MRT3847_1340C.1.pep
MSELLFDDIFKVEKVDPDGKKYDKVSRIVARSEKCDMNMLLDVNTEIYPMGEKERFLMALSPSLVLNTKDGSVSIQDKFEYIMHGRLYNITKPQLEKKEKKEKRSESQPEENEECSKPQLEVEVYASFGGLQLMLKGHASHCVKFAVDQKLFLLIRKVES

SEQ ID NO: 180606 - protein, 41 aa, Glycine max
  Clone ID: PAT_MRT3847_134100C.1.pep
FWISKCKGLWVASQKVVLGRNNPDQYIYIYILNQLITSTNP

SEQ ID NO: 180607 - protein, 82 aa, Glycine max
  unsure (1)..(82): unsure at all Xaa locations
  Clone ID: PAT_MRT3847_134101C.1.pep
MATGEQLSSRGQAWFCTTGLPNDIGIEVDDMYFHLHKASFPYHTHSIFLSEHETXHPSEAEEKEKHRHLVFTDFPGGSETFE

SEQ ID NO: 180608 - protein, 107 aa, Glycine max
  Clone ID: PAT_MRT3847_134102C.1.pep
PFFTVGLLSHLYICILGGGIVSIFCLRIWVSAFLSFLFNLKSLPISFSYSLCSKALLGGGLCGNLAFSLHIFPGVNYHSSLVCSNVFFFFLMFVPPPNNIILAYFLL

SEQ ID NO: 180609 - protein, 52 aa, Glycine max
  unsure (1)..(52): unsure at all Xaa locations
  Clone ID: PAT_MRT3847_134103C.1.pep
GGXRGGXAARRWLLGSGVDGGVCGCAARVAETRGPFTAGLRGGTKLRQKRXR

SEQ ID NO: 180610 - protein, 46 aa, Glycine max
  Clone ID: PAT_MRT3847_134104C.1.pep
LEKPLMYLTKMDLSGEGLNYDIIMRSTPLPLNALLNQDTKLDIELL

SEQ ID NO: 180611 - protein, 109 aa, Glycine max
  unsure (1)..(109): unsure at all Xaa locations
  Clone ID: PAT_MRT3847_134105C.1.pep
WGLLFPIGNSKVLGFLANPRVDFILGPPVLGVKNGGVRDFFGGFPLAXGEAVSTPFLGPGKKIPPRPFAERGGPIVRSFGLGFGGGPPKTGAWYDEAGVILGPPFFWFF

SEQ ID NO: 180612 - protein, 104 aa, Glycine max
  Clone ID: PAT_MRT3847_134106C.1.pep
MKTRIWILIASHLATALVAFAAGIYVLPILTASEGASAVALQVAAENTRHTGRFERNLPGSDALHWANGKLTITDSSIAFEGDIAPGPDYKIYLVPEFVDPGIP

SEQ ID NO: 180613 - protein, 169 aa, Glycine max
  Clone ID: PAT_MRT3847_134107C.1.pep
PGSMHMQLPSLKELRIDDCPRVESFPEGGLPSNLKEMRLYKCSSGLMASLKGALGDNPSLETLSIREQDAESFPDEGLLPLSLTCLTISGFRNLKKLDYKGLCQLSSLKKLILENCPNLQQLPEEGLPGSISYFTIGYSCPKLKQRCQNPGGEDWPKIAHIPTLHISTG

SEQ ID NO: 180614 - protein, 72 aa, Glycine max
  Clone ID: PAT_MRT3847_134108C.1.pep
RCYWICRLKTLIHPKTWGARSITLEVEYFITMGIGYTEMHDKEGILPDQPRLIMVGQQIEDGGTLDAYNMPK

SEQ ID NO: 180615 - protein, 67 aa, Glycine max
  unsure (1)..(67): unsure at all Xaa locations
  Clone ID: PAT_MRT3847_134109C.1.pep
PSLDKGYTLTLLTLPLMVICTKLSEANSHXHLSGRSPIIICDSSSIWYETHFASIIWRRXSILIICE

SEQ ID NO: 180616 - protein, 63 aa, Glycine max
  Clone ID: PAT_MRT3847_13410C.1.pep
GLSEMGYIENQITVGRDPDLSNSLRHSVFPIFMLFLYRVRKSSTNYVQTCHCYWYTLYIYSTI

SEQ ID NO: 180617 - protein, 95 aa, Glycine max
  Clone ID: PAT_MRT3847_134110C.1.pep
PRVREKPVSLKPEHIRNEKLRVLESVLPIKDDEVVLGQYERYKDDPTVPDNSNTPTFATVILRVHNERWEGAPFILKAVNALNARKADIPLQFKD

SEQ ID NO: 180618 - protein, 101 aa, Glycine max
  unsure (1)..(101): unsure at all Xaa locations
  Clone ID: PAT_MRT3847_134111C.1.pep
TQVPFWRAGNHSHFDLESHPIITSPLHPEDHARSIFLEKRDGELGSGKIAIHTIENSTNRRDTYSMRTNVILENAXGVTVLCDAHLHAYHRLPSLERGRTT

SEQ ID NO: 180619 - protein, 50 aa, Glycine max
  Clone ID: PAT_MRT3847_134112C.1.pep
QGWENKTFCLTTNLQLCIQGKNGAYEKTKCPWTQGVLIQAIPYSSRGREN

SEQ ID NO: 180620 - protein, 41 aa, Glycine max
  Clone ID: PAT_MRT3847_134113C.1.pep
VRKVMLQLSKKKKKKKKKKKKKKKKKKKKKKKKKKKKKKKK

SEQ ID NO: 180621 - protein, 200 aa, Glycine max
  Clone ID: PAT_MRT3847_134114C.1.pep
MGMIVDFENDQNDAVLVPPPNFAMVEDCVFRSSFPTPSNFPFLQTLNLRSIIYLCPEPYPEENLEFLRSQNIRLFQFGIEGKTDVSMPVLKDSIMDALKVLIDVRNHPILVHCKRGKHRTGCLVGCLRKLQNWCWYSSNTEDKRFAGAKSRTTDLTFIEMFDVLSLSQCLYSIIYQYHGSKKRRLLYKDENLQKPRLTSF

SEQ ID NO: 180622 - protein, 64 aa, Glycine max
  Clone ID: PAT_MRT3847_134115C.1.pep
TRTRNITSKPYVQVIERMPVSPRKNTFMSQFHQINKKGFFFQVLRPTKVKVLERNNNKEKGFRV

SEQ ID NO: 180623 - protein, 95 aa, Glycine max
  Clone ID: PAT_MRT3847_134116C.1.pep
ARAVNGTLTDSSGRSYSIYKNVMGVGVCIIFPEGVLRFTKPQLEVLEVSYEVQWEWESVVVQFVHAFPSGAPQGRGYIPARARGEECGKTEASPL

SEQ ID NO: 180624 - protein, 117 aa, Glycine max
  unsure (1)..(117): unsure at all Xaa locations
  Clone ID: PAT_MRT3847_134117C.1.pep
HSLIRVLQDAFLVFMEEFKKAFNKEHPDNKALSAVFKSXMDQRWKTMSDAEKAPYVAKSEKRKVEYEKNMKAYNKKHAEGPTDGDETRXEKSVSEXNDEDDXEECIVEEEDDDYRMH

SEQ ID NO: 180625 - protein, 86 aa, Glycine max
  unsure (1)..(86): unsure at all Xaa locations
  Clone ID: PAT_MRT3847_134118C.1.pep
CIPIHICQACIQDPNSCXYLYCLKHRIQPDGQIPNDNTVGGGDDAFNTFYNETNAGKHVPXTIFLNLHPTMTDELRTGTYQQLFHS

SEQ ID NO: 180626 - protein, 108 aa, Glycine max
  Clone ID: PAT_MRT3847_134119C.1.pep
LKLQPKYLHTKQRRASREHFEKESPTKKQRPRRARITPVARTTTHHAQPARPTTLTKTRKTDTKDHRKAPSLTKKRKRRQCRRTNQDHACRAQARRQWVRMGIAVCRV

SEQ ID NO: 180627 - protein, 47 aa, Glycine max
  Clone ID: PAT_MRT3847_13411C.1.pep
QKILTNKTLTHKSHRGSLVAIPPTYNRRPKVFFLPVSRHSFIGGRQY

SEQ ID NO: 180628 - protein, 54 aa, Glycine max
  Clone ID: PAT_MRT3847_134120C.1.pep
EPKRKLPLTQTRNTYFSMSSTIHSQTKRCVKSYTKTQSKDRHNLIHPLCKTLLD

SEQ ID NO: 180629 - protein, 70 aa, Glycine max
  Clone ID: PAT_MRT3847_134121C.1.pep
KLLRGTSYCVPFEFMKFTFRTKIICQRKISLPSSLERPNPKEKKRSALMKLLKCRWMSMMLQIIVWRIHK

SEQ ID NO: 180630 - protein, 71 aa, Glycine max
  Clone ID: PAT_MRT3847_134122C.1.pep
MACGISLALLITTCVVAASAKYFNQDCEITLGDGRSNILISGELFTLSLGKTYGSGFRPRHEFLYGKIDMQ

SEQ ID NO: 180631 - protein, 75 aa, Glycine max
  Clone ID: PAT_MRT3847_134123C.1.pep
CARHFLRYPQMIYHLGATNELDNNMNQKANTLPHDVGDSTNHAREGSHSTARPPPFRWFKCLHHENLRSMGTALS

SEQ ID NO: 180632 - protein, 74 aa, Glycine max
  Clone ID: PAT_MRT3847_134124C.1.pep
CSIFFFFCFGVYAKKHSWLFPKKKKKKGAALKETQLTTPVKRKNKFTLGERKINRAAGFFQPMGGENPSWTKFN

SEQ ID NO: 180633 - protein, 104 aa, Glycine max
  unsure (1)..(104): unsure at all Xaa locations
  Clone ID: PAT_MRT3847_134125C.1.pep
RKTEGVPGGINFXVEMAGPKGAVGWIGSPPANHFHKGSGPGFTTWLVNFEGGGWGTTVPTGLSRRDTRLGPSKKWVTXLSFSGFLSTSKKSIPDFFXWDRFKVR

SEQ ID NO: 180634 - protein, 334 aa, Glycine max
  Clone ID: PAT_MRT3847_134126C.1.pep
KFLELKRHLQVPSERSLFIDDQIHWNRSYQMLVAASELKEVFSCLDTSDPDYKGAPPSMQDWKLVEILCSYLKPLFDAANILTTTTHPTTIAFFHEVWKLQLDAARAVTSEDPFISNLNKIMSEKIDKYWRECSLVLALAVVMDPRFKMKLVEFSFTKIYGEDAHFYIRTVDDGIQELFHEYVAHPLPLRPVYSENGSAESHSKMEESPGGAVLSDNGLTDFDAYIMETTSQQTKSELDQYLEESLLPRVPDFDVLAWWKLNKIKYPTLSKMARDILSIPVSTVAPDSVFYSKSKEIDEYRSSLRPETLEALVCTKDWMLYGTTAESINALQHL

SEQ ID NO: 180635 - protein, 66 aa, Glycine max
  Clone ID: PAT_MRT3847_134127C.1.pep
RSRPVISPTHPQNASPKLSEENREGVQIFIPPINCITRLVTLPEFHYYYILPDLISIYICSVCWDL

SEQ ID NO: 180636 - protein, 45 aa, Glycine max
  Clone ID: PAT_MRT3847_134128C.1.pep
KGFSGGINLNGSSGESKMSMNREIHGVEVMNDGLVKNNKVCVVSG

SEQ ID NO: 180637 - protein, 60 aa, Glycine max
  Clone ID: PAT_MRT3847_134129C.1.pep
SQSKPLQDRVVIDTYLVPRNLAREIALNLVILGSRLIVNYTFNSVQADFSRGADQRRFHH

SEQ ID NO: 180638 - protein, 339 aa, Glycine max
  Clone ID: PAT_MRT3847_13412C.1.pep
MARSAKGHQDEFDEDDEEELLTGNISSKVKVDEPSTGKRVNPHRSKHSETEQRRRSKINERFQVLRDLIPQNDQKRDKASFLLEVIEYIQFLQEKLQIYEQTYEGWNQEPTKLTPWRNNHGPAENTTDPSQATQNGSVDEKNNNVSPLLPKNVQNPIESDFSMTTIQKGNIPGSTTEAVPLPMQMRLDMFDPVVSSSMATQHLLEPVSNVNMLSHTQPQLWLDKRNKGNYILPHNDTMKEQEELVNESGSDSISSAYSQGILDSLTQALHSSGVDMSQTNVSVQIDVGRQENAGLIPSASTSKGHENQSVSNPAIARSGVDYCNIDSEQSSKRLRQEAS

SEQ ID NO: 180639 - protein, 169 aa, Glycine max
  Clone ID: PAT_MRT3847_134130C.1.pep
VDKAILLKRYFSKEIRGGTQLPESDIVKSCRRLLDERQSLNVRRCREVINERPDISEGLRKLHCRSLIFVGDMSPFHSEAVHMTSKLDRRFSALVEVQACGSMVTEEQPHAMLIPMEYFLMGYGLYKPSKLSVSPRSPLSPSCISPELYSPESMGLKLKPIKTRISLEI

SEQ ID NO: 180640 - protein, 92 aa, Glycine max
  unsure (1)..(92): unsure at all Xaa locations
  Clone ID: PAT_MRT3847_134131C.1.pep
XMCASMVMVGLPACLGIESDSDALKLGTHFRDTFGVEVPIYYRPPKEGEVGVVTGYARISHQVYNKVDDYYKFRDAVNQLVQNGFTCAVLSD

SEQ ID NO: 180641 - protein, 141 aa, Glycine max
  Clone ID: PAT_MRT3847_134132C.1.pep
GGQDPKTRDDPRDPIHKPTTEAKAGGDKEDNARNTTKREKITNGTEDEAKAKEKTPKMGYDNKATGAEEQRTTKENRNADTRIQYRTRRHDDVSKEDQTATAEGNKKTRPTKKAPTATQKKADPEGEKATGRAATAAGTKH

SEQ ID NO: 180642 - protein, 53 aa, Glycine max
  Clone ID: PAT_MRT3847_134133C.1.pep
SLIFRSTQPTQGNRPILTTPSPVPPLNTIPSSRSTTITNYDHSLTKPSHRMSS

SEQ ID NO: 180643 - protein, 91 aa, Glycine max
  unsure (1)..(91): unsure at all Xaa locations
  Clone ID: PAT_MRT3847_134134C.1.pep
NMDSYITEASCDDTPGPGQYIGEFLAVCYWGVELALHTGPGGTHTXAGYTQGHVPYSAYEDVLPGSINHSKVARIEYDAHDCNYETVLDMC

SEQ ID NO: 180644 - protein, 74 aa, Glycine max
  Clone ID: PAT_MRT3847_134135C.1.pep
EKGLVHSDKEGAPPVKLAPAKVVVVRHVIGQQPTSETHAFPGPQIGDTEPITTKGQTAAAAAAAAFILVPGVVP

SEQ ID NO: 180645 - protein, 252 aa, Glycine max
  Clone ID: PAT_MRT3847_134136C.1.pep
WGTTTTTNFPISHYEKELEEMKHMTRQEYVASLRRKSSGFSRGASIYRGVTRHHQHGRWQARIGRVAGNKDLYLGTFSTQEEAAEAYDVAAIKFRGLSAVTNFDMSRYDVKSILESTTLPIGGAAKRLKDMEQVELSVDNGHRADQVDHSIIMSSHLTQGINNNYAGGGTATHHNWHNAHAFHQPQPCTTMHYPYGQRINWCKQEQQDNSDAPHSLSYSDIHQLQLGNNGTHNFFHTNSGLHPNVEHGFCFH

SEQ ID NO: 180646 - protein, 57 aa, Glycine max
  Clone ID: PAT_MRT3847_134137C.1.pep
MGKDKTHINIAVIGHVDCGTSTTTAHLTYSLGGIAARGTERFEIAAAEKNKRTFKNA

SEQ ID NO: 180647 - protein, 46 aa, Glycine max
  Clone ID: PAT_MRT3847_134138C.1.pep
HPTFTQGRAYHISRDHDNALMESNYNAQQGSQRTDCSHQCVHALYS

SEQ ID NO: 180648 - protein, 116 aa, Glycine max
  unsure (1)..(116): unsure at all Xaa locations
  Clone ID: PAT_MRT3847_134139C.1.pep
TATTXGRFLKPGAYFFPTXXQESLNFFLLLCVQFLQGMNITLCAGPRLPESFSFPLLVYLFNTLLFDFLLSVYLKLLLSFFQPLFPILFFLLFPLFLSYSPIFLFFLSLLRFSPPF

SEQ ID NO: 180649 - protein, 141 aa, Glycine max
  unsure (1)..(141): unsure at all Xaa locations
  Clone ID: PAT_MRT3847_13413C.1.pep
LEEEWNQRRGAATVWNRGRVKAGPSGDWKGIEAIYNTRPGPMPEPTMTISSLIAPRLARKGGEDEPLXWESREYLRNLCVRNEETFKAXYNGPTITRDYATRCSLGQRXVAVPVVSHGWDKDMEHGHQQRQVMPYLTELKL

SEQ ID NO: 180650 - protein, 72 aa, Glycine max
  unsure (1)..(72): unsure at all Xaa locations
  Clone ID: PAT_MRT3847_134140C.1.pep
IAAAEALAMGKFVSCXADHPXDEFFRSFPNXIDXKTSEDFVTXVIEAVEHEPYPLTPEQRYRVSWEAATQRI

SEQ ID NO: 180651 - protein, 66 aa, Glycine max
  Clone ID: PAT_MRT3847_134141C.1.pep
CNSSFYFIISKRLSLSSYIITLQKVNVRNRSLSHLVNKVNVYQHTLRIEEYITLLTKQNGSTQQPS

SEQ ID NO: 180652 - protein, 72 aa, Glycine max
  Clone ID: PAT_MRT3847_134142C.1.pep
LYLVPYKGKINSYDAITPGLMIWRSNAKYQIGVSCIAKSTRWLRDPQMMNILDLRITYYYGLGANHTINTES

SEQ ID NO: 180653 - protein, 162 aa, Glycine max
  Clone ID: PAT_MRT3847_134143C.1.pep
MDETFELNVQEHRLQEDMQSDYSLPSDSESSDDSIMGESFEMDHIGNQNEDIISESLNSDDDYEEDEDEEEEDTLIEINLPSSHFPDLIEDPKQKLQTKLPDFLPDSIFKQQGLMELLEEINDMNEDENLIEIDISMGSINNPDFRLKQGLAYFQDECVLSD

SEQ ID NO: 180654 - protein, 80 aa, Glycine max
  unsure (1)..(80): unsure at all Xaa locations
  Clone ID: PAT_MRT3847_134144C.1.pep
NSLYLTSFPHXLLSLSLPHGINKEHVHVXXXXXXXXXXXAPCRSGSPTRSDAESXQSXSLVXVWVCVSCXSDDDSSRYGL

SEQ ID NO: 180655 - protein, 266 aa, Glycine max
  unsure (1)..(266): unsure at all Xaa locations
  Clone ID: PAT_MRT3847_134146C.1.pep
QFENEGRRVGYGTPENATAARKLLDRQMSINSVPKKVIAHLLKPRGWKPPVRRQFFLDCNEIADLCDSAERIFSSEPSVLQLMAPIKIFGDLHGQFGDLMRLFXQVEYPNNVHLIRGNHEAADINALFGFRIECIERMGERDGIWTWHRINKLFNWLPLAALIEKKIICMHGGIGRSINHVEQIENIQRPIPMEAGSIVLMDLLWSDPTENDSVEGLRPNARGPGLVTFGPDRVMEFCNNNDLQLIVRAHEMLMDGXFERFAQGHL

SEQ ID NO: 180656 - protein, 126 aa, Glycine max
  Clone ID: PAT_MRT3847_134147C.1.pep
ACFIWSRPAQQQALSGALSGLQAIYPPDINALSNAINAQVQQGDNDPQVLLAQLLMTVLSQAQVPATAPVTGAIASQIPAPTSMAGPSYEPQLLQTNSSGETKTELPGSSVSTQIEGGGSETKQQV

SEQ ID NO: 180657 - protein, 72 aa, Glycine max
  unsure (1)..(72): unsure at all Xaa locations
  Clone ID: PAT_MRT3847_134148C.1.pep
MNMSFLELLEVATMPLIQVLLIRASLALMATHLFDNILSPYIQKAFNXIVYAISTPSIEFSNYSKNVLLDDI

SEQ ID NO: 180658 - protein, 88 aa, Glycine max
  unsure (1)..(88): unsure at all Xaa locations
  Clone ID: PAT_MRT3847_134149C.1.pep
IGTGSDQNDIRGGAGDLMQDGIASLVISLDSWELFVEQSXAYKESVFPAAASARVSFVAXSTFGWEKIVGANGKAIGIVRFVASAPSG

SEQ ID NO: 180659 - protein, 330 aa, Glycine max
  Clone ID: PAT_MRT3847_13414C.1.pep
MARSAKGHQDEFDDDDEEELLTANNTSFKVKVDEPSTGKRVNPQRSKHSETEQRRRSKINERQALKKRRRKNSFSRFQVLRDLIPQNDQKRDKASFLLEVIEYIQFLQEKLQIYEQTYEGWNQEPTKLTPWKNNNVSPLLPKNVQNPIESDFSMTTIQKGNIPGSTTEAVPLPMQMRLDMFDPVVSSSMATQHLLEPVSNVNMLSHTQPQLWLDKRNKGNYILPHNDTMKEQEELVNESGSDSISSAYSQGILDSLTQALHSSGVDMSQTNVSVQIDVGRQENAGLIPSASTSKGHENQSVSNPAIARSGVDYCNIDSEQSSKRLRQEAS

SEQ ID NO: 180660 - protein, 88 aa, Glycine max
  Clone ID: PAT_MRT3847_134150C.1.pep
IEPVGYKIKVMDVRVAIFLIIFYKFFLLIVPRLLFFFFFSFYIFKSRGQGFLFSFSVMVRYINQKIFLGGPCIIGVLLCVIPIHALYN

SEQ ID NO: 180661 - protein, 82 aa, Glycine max
  unsure (1)..(82): unsure at all Xaa locations
  Clone ID: PAT_MRT3847_134151C.1.pep
QTTEVLLLGYSYSLLRMALLFMPDGLCYCLNFRCYVYSMMPXTGYSSLPAESFKDQAFICPGSHRSIIWPVDDTSSRSKQSW

SEQ ID NO: 180662 - protein, 119 aa, Glycine max
  Clone ID: PAT_MRT3847_134152C.1.pep
PPPQPGFFPPVGETGGSPWGTLSWARPVRATNLWPGPGGKKKPPGGPKSKPPPPGGGRVLKKRGGPRFPPWQGGRGGPPLKGGGPPPWGPRGFPFLVPGQMFWEIGHGKPFSPGEKVCP

SEQ ID NO: 180663 - protein, 102 aa, Glycine max
  Clone ID: PAT_MRT3847_134153C.1.pep
MSTPYYTLVLLLLLLIVLISPSSSSLHPTDLNALLSIKNTLTEVSPTKPFFSTWNLTAPDPCSSFSGVTCFLSRVSILSLGTPLPTRRHPPRRVNLPTHRVD

SEQ ID NO: 180664 - protein, 71 aa, Glycine max
  Clone ID: PAT_MRT3847_134154C.1.pep
DAALDAPGDGHMANVHDDVLNLTRSLLQQYSGYCHSRLIQVMSKPFKEILQFSVWVYYLGGISRFGALMID

SEQ ID NO: 180665 - protein, 123 aa, Glycine max
  Clone ID: PAT_MRT3847_134155C.1.pep
DRTIRLYNPQKAPTTCVAPTASNVYPPGLVNKYSAHGYEVLSIDVNTDNDKFVSTGGDKTVFVWDVQTAQTVRRFTGHSGRINRGVFGGEGDSIIASGSFDGTVKIWDLKSNAYKPIMTLDDA

SEQ ID NO: 180666 - protein, 129 aa, Glycine max
  Clone ID: PAT_MRT3847_134156C.1.pep
KTPQFSPLGFCNPVAILPPPGVGRTLSQAPRCWWRFSGRAHGPCPLCGPFLFCPGSPFFGLFRASPIPFLVVSPAPPGGGPPNPSVGPKPRGSKLRSIVFLLEIGFGSQKMTIPPWVLSPAKKKIDFNP

SEQ ID NO: 180667 - protein, 61 aa, Glycine max
  Clone ID: PAT_MRT3847_134157C.1.pep
VSNLPPQIDPNITIYPILMLFPSCYIHYKDLFNRPPFKKIFSSFSTLLQISRNQKNVPNFN

SEQ ID NO: 180668 - protein, 68 aa, Glycine max
  Clone ID: PAT_MRT3847_134158C.1.pep
RMNQIIETESKMIETKTNMQRLEEKLSDMETENQVLRQQALLSSSSRRMSGKLAPATTPVNTKQLLIK

SEQ ID NO: 180669 - protein, 215 aa, Glycine max
  Clone ID: PAT_MRT3847_134159C.1.pep
MASPSSLPISSQSSASAAGASQSQPPIATPAFRAFISRISSSLRHAFAQRRPWTELIDRSSMSRPDTLAEAYSRIRKNFAYFRVNYLTLIVLALAVSLITHPFSLFVLFGLLASWSFLYLFRPSDQPVVLFGRTFADRETLGILVVLTVFVIFLTSVGSLLISALMVGLAIVCAHGAFRVPEDLFLDDQEPNSSGFLSFLGGAAASAAAPAVARV

SEQ ID NO: 180670 - protein, 64 aa, Glycine max
  Clone ID: PAT_MRT3847_13415C.1.pep
LNRTGDLFLDWLTVRQGVRTLSPRTKRMRLNRVEPITSVNSKAVGRTVPSTLRGGSMVRPYSSF

SEQ ID NO: 180671 - protein, 47 aa, Glycine max
  Clone ID: PAT_MRT3847_134160C.1.pep
LTKDPLKGWGAPLNLKGFPVFLKTKGAPGLKNFGGPFSLKKTGRKPR

SEQ ID NO: 180672 - protein, 69 aa, Glycine max
  unsure (1)..(69): unsure at all Xaa locations
  Clone ID: PAT_MRT3847_134161C.1.pep
TIGNALLFEIVMTFSLVYTMYATAADPMKGYLXIIATIRIDFIGGANILLSGAFSGARMNPAVTFVPAV

SEQ ID NO: 180673 - protein, 43 aa, Glycine max
  unsure (1)..(43): unsure at all Xaa locations
  Clone ID: PAT_MRT3847_134162C.1.pep
WFFWFFVKNDIYGFVLFNVLKFKRRNFYSXXGLGGLFIIINAA

SEQ ID NO: 180674 - protein, 69 aa, Glycine max
  Clone ID: PAT_MRT3847_134163C.1.pep
KNNIPITVKFFYYQYKTLKIYHLNNRKKSQKIGKTIINIIILFRLHNIIQLLFYYFLSTFRYDYFIIIH

SEQ ID NO: 180675 - protein, 138 aa, Glycine max
  Clone ID: PAT_MRT3847_134164C.1.pep
FSYFILMQKSLNDALMGILRVHDLKSPPYISANPSLNVHRISNSDQFVIVGSDGLFDFFSNDEAVKLVESYILNNPFGDPAKFLIEQLVARAADSAGLSMEELMNIPAGRRRKYHDDVTVIVIMLGMNQRTSKASTCI

SEQ ID NO: 180676 - protein, 102 aa, Glycine max
  Clone ID: PAT_MRT3847_134165C.1.pep
TGEKEPLPHKGGAFAHTRPKKPWFLRVNFKKNVLFKAPPPQSWELAFGGWVFMPKSGFLTSLRGDWGVGHGFHPLIRIGVWDPFFFFSERRVIQISKGGPCP

SEQ ID NO: 180677 - protein, 84 aa, Glycine max
  unsure (1)..(84): unsure at all Xaa locations
  Clone ID: PAT_MRT3847_134166C.1.pep
QLAAEDHEWSSRSFVCGGSSRSFMYTYCLHQYYARXHMSGLKQASCFYGHMASTRYRIIFKAATAGHRYALLSARHLHRSIKCQ

SEQ ID NO: 180678 - protein, 83 aa, Glycine max
  Clone ID: PAT_MRT3847_134167C.1.pep
MYKGRLGGKAQLGYVETDPLGRYGRFRDILSKGAVKVVYRAFDEVLGIEVAWNQVKLGDVFHSPDLLPRLYSEGHLLKNLEHD

SEQ ID NO: 180679 - protein, 97 aa, Glycine max
  Clone ID: PAT_MRT3847_134168C.1.pep
ITHKTSSYPSTSLQLKKPCSYITPLQHQTHFSETWPILLTYLPRKEAATTVTTRSCEAHTWNGLMRGRDLVLFRSGAGWIQCRHNETLPSSMCEGGR

SEQ ID NO: 180680 - protein, 89 aa, Glycine max
  unsure (1)..(89): unsure at all Xaa locations
  Clone ID: PAT_MRT3847_134169C.1.pep
GGTXXGGXNNXRDCDWWITMGRIXTGGLTTGTVGXFGVLPGLCFLGVCHSTTTENGXXXXXXXXXKGRGKHRSLRXPCLQVTKREKVVI

SEQ ID NO: 180681 - protein, 47 aa, Glycine max
  Clone ID: PAT_MRT3847_13416C.1.pep
EGNQVADVLANFDLSLHNQLKKFPVVSHFITNVVKTNVIFTGFSRVF

SEQ ID NO: 180682 - protein, 95 aa, Glycine max
  unsure (1)..(95): unsure at all Xaa locations
  Clone ID: PAT_MRT3847_134170C.1.pep
GISMIFAGINSTVYPAGSGMFAAFSGLHYLDGFPTRYTTYLLFYIASNRGRVQCLQVXTSVGKEKCDTLLYLSHLDDSQLPYEFQCFLRRGWIPY

SEQ ID NO: 180683 - protein, 112 aa, Glycine max
  unsure (1)..(112): unsure at all Xaa locations
  Clone ID: PAT_MRT3847_134171C.1.pep
SCTYEISSNPAVSVEIIEQSESPDSDACLGGQLFSYMVARKPGHLFLYKRCVAYDEQKDYGVIXHAALFTYTIMSRLVARPNVKLLNAVAADDLIVKERMVVRCRTNRTFVW

SEQ ID NO: 180684 - protein, 180 aa, Glycine max
  Clone ID: PAT_MRT3847_134172C.1.pep
IASGRSRSRPTRPDKDGRVTFEELKAGLRKVGSQLAEPEIKMLMEVADVDGNGVLDYGEFVAVTIHLQRMENDEHFRKAFMYFDKDGSGYIELGELEKALTDESGDTDTAVLNDIMREVDTDKDGRISYEEFVAMMKTGTDWRKASRQYSRERFKSLSINLMKDGSLQLHDDISGQAEVV

SEQ ID NO: 180685 - protein, 536 aa, Glycine max
  unsure (1)..(536): unsure at all Xaa locations
  Clone ID: PAT_MRT3847_134173C.1.pep
MGNCNACVRVDDVADSNRGKKNKKTKPNPYAEEEIRSGVPIRVLKDVTSRSLIGDKYVIGRELGRGEFGITYLCTDRETKQELACKSISKRKLRTAIDVEDVRREVAIMSTLPEHANVVKLKATYEDEENVHLVMELCAGGELFDRIVARGHYSERAAANVARTIAEVVRMCHANGVMHRDLKPENFLFANKKENSVLKAIDFGLCVFFIPGERFLEIVGSPYYMAPEVLKRNYGPEVDVWSAGVILYILLCGVPPFWAEAEQGVALAILRGVIDFKREPWPQISESAKSLVRRMLEPDPKKRLTAEQVLEHPWLQNAKKAPNVPLGDIVRTRLKQFSMMNRFKKRALRVIAEHLSVEEVEIIKDMFTLMDTDKDGRVTFEELKVGLRKVGSQLAEPEIKMLMEVADVDGNGVLDYGEFVAVTIHLQRMENDEHFRKAFMYFDKDGSGYIELGELEKALTDESGDXILNDIMREVDTDKDGRMVVYGCEKMTEGGTDWRKASRQYSRERFKSLSLNLMKDGSLQLHDEITGQAVVV

SEQ ID NO: 180686 - protein, 162 aa, Glycine max
  Clone ID: PAT_MRT3847_134174C.1.pep
VHIKRSVLENEDIVSSQNGDASHLTKPSKPLVRKSKLVVVDLAGSERVHKSGSEGHMLEEAKSINLSLSSLGKCINALAENNAHVPFRDSKLTRMLRDSFGGTARTSLIVTVGPSKSHRGETSSTILFGQRAMKVENMLKIKEEFDYKSLSRKLEIQLDKLI

SEQ ID NO: 180687 - protein, 144 aa, Glycine max
  unsure (1)..(144): unsure at all Xaa locations
  Clone ID: PAT_MRT3847_134175C.1.pep
LIDGETLISSSQWWKDTVPNAFGWELNLGRQTSMSISLAQSMDPTKLAISAVXKNLKLMMXRSLTCLNWNALSYMKHLLLIAETLGCXVARMLILXCVCIITIVDYGRIGYANRWKQHXYTSDDCLNGGEWKATGXLKSLKQIF

SEQ ID NO: 180688 - protein, 134 aa, Glycine max
  unsure (1)..(134): unsure at all Xaa locations
  Clone ID: PAT_MRT3847_134176C.1.pep
MTSSSSSSNAYDVPWVEKYRPSKVADIVGNEDAVSRLQIIARDGNMPNLILFGPSRTGKTTSILALAHELLGGPNCKEAGLELNASDDKGIDVVRNKNKXFAHKKKTLTPGRRQIMILDETDSMTTGAPQALRK

SEQ ID NO: 180689 - protein, 79 aa, Glycine max
  Clone ID: PAT_MRT3847_134177C.1.pep
TQLVDTYLSTTSTLKIRRRKNKNKISWSLHETITYFLYAFAFWLCQKTDNKRSYCMIKKTCGKEIMFIPHLCHKISRYC

SEQ ID NO: 180690 - protein, 204 aa, Glycine max
  Clone ID: PAT_MRT3847_134178C.1.pep
MVAKIRQSAANSPNPTKPVVGEIDTSPPFQSVKDAVSLFGEGAFSGETPPNAPIKKAKSYFAESVWAKERQLHLAQKDLKKLKEQLKNAETTKAQVLVELEKAKRVVEDLSQKLKVLSESRESAIQATEASKSQAKQLKEEKCGDPDGTNHAWKEELETAVNNFASVITELDVAKQELSKIRQGYDLSLEARVSALKQTAEAED

SEQ ID NO: 180691 - protein, 88 aa, Glycine max
  unsure (1)..(88): unsure at all Xaa locations
  Clone ID: PAT_MRT3847_134179C.1.pep
GCVSEEADGVSALKMQIFVKTLIGKTITLDVXSSYTIDNVNANIHDKERIPPVXQPLIFPVKHLDYXTTLADYNIHNESTLHLVLRLR

SEQ ID NO: 180692 - protein, 54 aa, Glycine max
  Clone ID: PAT_MRT3847_13417C.1.pep
SLPDLLDELGGLHVTHVIPCGSPYSHPRNISCFSITMRNPNEWVESVIPVRCCG

SEQ ID NO: 180693 - protein, 110 aa, Glycine max
  Clone ID: PAT_MRT3847_134180C.1.pep
GRAPFFPKQERAKYGIQNSPALTSFMAAPYFAKAKLKAQGSPSFGQHGSEKTFHSGGHFWPSSTNGKISWHSPRTLRQVLSGGKGGPKSDRPVSFSRDGNGKVLPAKWSR

SEQ ID NO: 180694 - protein, 83 aa, Glycine max
  unsure (1)..(83): unsure at all Xaa locations
  Clone ID: PAT_MRT3847_134181C.1.pep
SXXRXLXSXFXSIKRLXXHXPXXVXIFXXXXLXGTCXXCXANNVSYRXTVXFLXSXVMIXKPLLXELVXLEHPGHQIDXLXXL

SEQ ID NO: 180695 - protein, 54 aa, Glycine max
  Clone ID: PAT_MRT3847_134182C.1.pep
RYLHITYIQLNHPLSTTSRLLLTSKYPSKFSCNITTFNHIPHYPLFPHLSYFPT

SEQ ID NO: 180696 - protein, 77 aa, Glycine max
  Clone ID: PAT_MRT3847_134183C.1.pep
KVYFCFAFLCLALSKLNLSTLVYYNNMDDELGNLIMILFSSITFELTLVREIIHSGTMTPCVLDLIFKLHIILFRAI

SEQ ID NO: 180697 - protein, 113 aa, Glycine max
  Clone ID: PAT_MRT3847_134184C.1.pep
MSGIIHKIGETLHVGGHKKEEEHKGEHHAGEYKGEHHGEHSSEYKGEHHGEHKAGEYHGEHKPEHKEGFLDKVKDKIHGEGGAAEGEKKKKEKKKKEHGHEHGHDSSSSSDSD

SEQ ID NO: 180698 - protein, 77 aa, Glycine max
  unsure (1)..(77): unsure at all Xaa locations
  Clone ID: PAT_MRT3847_134185C.1.pep
LLQQGPNFIPSVGVFVLXYKNSPKALKLGRVFFSFLFLFFSWKPLFSSIGIHLIPKYEIKIKILNNIYLDQNPFSII

SEQ ID NO: 180699 - protein, 221 aa, Glycine max
  Clone ID: PAT_MRT3847_134186C.1.pep
MTQNLKHTVDLECSDNSRPSKISKIEYPSDSDIDEEEEGMSQNPRNGIQRYLVAIEYIGTLFSGSQKQLNVRTVVGALEEAFSKFVGQPVSVSCSSRTDAGVHALSNVCHVDIQRISKRRPGEVLPPHEPAVVGRAVNHFLQKHDSDLMVIDVRCVPSDFHARFKAQERTYFYRLLSGPEPLSTFEKDRAWHVPEELSLPAMQVTCQLLIRTRDSILQRAE

SEQ ID NO: 180700 - protein, 151 aa, Glycine max
  Clone ID: PAT_MRT3847_134187C.1.pep
CRIPPQAKSPIRTLDELSVNEVIESPYFPSLMDREQHNKVSGDLRSCSNNTETDIPPISNPSIDKVITSSQDAGFGKRRRHRCLVVTARARSFLYHQVRLLVGVLKAAGTGNLTIPDVERILNAKTVTAASPMAPACGLYLGEVKYDLPTT

SEQ ID NO: 180701 - protein, 95 aa, Glycine max
  Clone ID: PAT_MRT3847_134188C.1.pep
KKTLYKIPRENNPLNFLIQNPIHLSPFDYHNVFNLRLNVLLSRLLRQSKSAIRGRREYNNKPFTKSLLCFSFYPSSTLTSLSALILTTFFALLLK

SEQ ID NO: 180702 - protein, 86 aa, Glycine max
  unsure (1)..(86): unsure at all Xaa locations
  Clone ID: PAT_MRT3847_134189C.1.pep
HCXPSCXYNRXNNXAFSHLVRLARWIXRHHNVYQXISINKRLTSXSXLMSSHIVLLSFLRTLAIRLFFDYWGFYPPFHMPKPPKMI

SEQ ID NO: 180703 - protein, 79 aa, Glycine max
  Clone ID: PAT_MRT3847_13418C.1.pep
ENIKALDTRVSRRDKSKVFHIVTGGMSGPAMCCCFKFGSKRCDCLSGPRFCLMVGTSTRANMEGNLLLLRGRKKSLPLV

SEQ ID NO: 180704 - protein, 109 aa, Glycine max
  Clone ID: PAT_MRT3847_134190C.1.pep
KKGFKKAPIFSLPSPRGFFLWCAHLIAQGSRGESLGSPQATFLIFSPLGPDQFFFVFFTPPPGIGGFPLDNPPIYGGLATPSPQVECYCRGGITFCGLVPQTRGGVFFL

SEQ ID NO: 180705 - protein, 81 aa, Glycine max
  Clone ID: PAT_MRT3847_134191C.1.pep
TQINSLGNKGGDPYQCTKLLGSHFIPYIRGSKEIYAAFFLGLHVPSTFFPHNPGHFRGTRQKRTRLGHHPRGHQGGGRHPC

SEQ ID NO: 180706 - protein, 206 aa, Glycine max
  Clone ID: PAT_MRT3847_134192C.1.pep
MGVPQPPPPSQHLYPQEIQLKLYQAFIFSIPILFSIILVLLFYLFYLKRRASSLSSPPLHILPSTTNSQTTYPYPSQPCRLDLTVQFLDKLPRILFHEDLRTGDSVCCVCLGEFELKEELLQIPYCKHVFHISCISNWLQSNSTCPLCRCSIIPSTKFLNPAPPIISDPTRQGGVSGSSSHILSLPHQQEEVGASTNTTIFQGNDV

SEQ ID NO: 180707 - protein, 125 aa, Glycine max
  Clone ID: PAT_MRT3847_134193C.1.pep
LKCSSPPLPSYEPLFFLLSATTQIPFSLTQFLNPNPPFSNQIPIPLPNPKNIHLFVKIPPFLRFSPTHPPSQFFTSRFRCAFFPLLFFSSWVPFPFMKCLILRGHDFFNSLQRAPSLRCPENLGA

SEQ ID NO: 180708 - protein, 61 aa, Glycine max
  Clone ID: PAT_MRT3847_134194C.1.pep
IIFNHEQACKSLILLPCLFLSHVTSSLIPHIFSLSTCSIFSIFASHFTGIAKSGQYDNQNN

SEQ ID NO: 180709 - protein, 548 aa, Glycine max
  unsure (1)..(548): unsure at all Xaa locations
  Clone ID: PAT_MRT3847_134195C.1.pep
MTMNGHHTVNIANSNRHPNDDDHHALPPSSDHDDDEQELVDPDDPFDITQTKNVSHDTLRRWRQAALVLNASRRFRYTLDLRKEEEKEQKKHLIRAHAQVIRAALLFRLAGERELVISTAVSPPTPVGDYDIGLEQLVSMSKDQNISALQQYGGIRGLSNLIKSNPDKGVSXDDADLLKRKNAFGTNTYPRKKGRSFWRFLWXAWQDLTLIILIIAAMVSLALGINXXGLAEGWYDGGSIAFAVLLVIVVTAVSDYRQSLQFQNLNAEKQNIQLEVIRGGRTIKISIFDIVVGDVIPLKIGDQVPADGVLITGHSLAIDESSMTGESKICSXVHKDHKTPFFMSGCKVADGVGVMLVTGVGINTEWGLLMASISEDTGEETPLQVRLNGVATFIGVVGLTVAVLVLAVLLGRYFSGHTKDIDGNVEFVAGKTSVSNAVDDVIKIFTIAVTIVVVAVPEGLPLAVTLTLAYSMRKMMADKALVRRLSACETMGSPTTICTDKTGTFTLNQMTVVEAYVGSTKVNPPDDSSKLHPKALSLINEGIAQNTT

SEQ ID NO: 180710 - protein, 55 aa, Glycine max
  Clone ID: PAT_MRT3847_134196C.1.pep
IGKRDPTQGKGKKVVYKNTKTPLKHNLGKTTLTKTLKSPYPPHGKNNKFGWGITG

SEQ ID NO: 180711 - protein, 76 aa, Glycine max
  Clone ID: PAT_MRT3847_134197C.1.pep
PIDTWIDLQCMFFVSLFFDGKKFNMIAIETWYIINKISIGSNSQEVQYHVLKCSDIVSCRSSLYCHQSLLLHIWYL

SEQ ID NO: 180712 - protein, 56 aa, Glycine max
  Clone ID: PAT_MRT3847_134198C.1.pep
FTNLCALTQRIIFFPLKNRPHINYIQNCPFLVFRSPLQLVTGFKVHHPVITVFLNL

SEQ ID NO: 180713 - protein, 315 aa, Glycine max
  Clone ID: PAT_MRT3847_134199C.1.pep
PACDKLSENKGNMAGLRVKKIMKRVSDDGESSLVVQNLRQEIREAVRNKSSINFEDNHFDPKLLEAFRAAIQGPKTELVNKLSPAAIKAKKSMLQKGKVRENLTKKIFGTSNGRRKRAWDRDCEIEFWKYRCMRATKPEKIETLKSVLDLLRKGSNNPVSKQASECQAKNPILSRLYLADTSVFPRKKDVKPLSVLKTIANSEQTKHSLSEKVPNLSVDNNTIKATDINNLLSKNSVCSSEKKVDKKLVRGPVGDSSTSGKVRSDNHSERTSVSSAGAKTSTKELDLKSGCMKSDKRKWALEVLARKTAATSGNT

SEQ ID NO: 180714 - protein, 346 aa, Glycine max
  Clone ID: PAT_MRT3847_13419C.1.pep
MRAPALLAQCLPGLVPHDRGSLSISSVPEKDFHLPSPAVEILPSKTVHTEKDNGENIDHFKGLVSVADIVGFSGSETISLKPDGYLKSWTSSIDLVSVLKHEIRDGQLTFRGKRVLELSCNYGLPGIFACLKGASVVHFQDQSAETVRCTTIPNVLANLKQARDRQSRQPESPLTPSRQTLAPSVNFYAGDWEELPSVLSIAKSDGYEVMPGMSLSFSEEDFMDGCSSQDGSIIGHESHSRRSRKLSGSRAWERGSEADQGEGGYDIILMTEIPYSVTSLKKLYALIKKCLRPPYGVVYLAPTKRHYVGFSNGVRQLRSLVDEEGIFGAHLVKDLADRDVWKFFHK

SEQ ID NO: 180715 - protein, 50 aa, Glycine max
  Clone ID: PAT_MRT3847_1341C.1.pep
FGRVPKKSDNTRYYKILGVSKNAPQDDLKMAYKKASIKIHPDKGGDPEKF

SEQ ID NO: 180716 - protein, 447 aa, Glycine max
  unsure (1)..(447): unsure at all Xaa locations
  Clone ID: PAT_MRT3847_134200C.1.pep
VLRKLKFGLRRSNSGWPRFKSKYMTTEEIENILRMQLVATHSNDPYVDDYYHQGCLAKKSSGAKLRHHFSPAQIKELPLRPSSNAEPHAFLQVDALGRVPFSSIRRPRPLLEVDPPNSSHAGSXEQCISEKPLEHEPMLAARVTIEDGIYLLLDVDDIDRFLRFNHLQEXVCLVLKWKLQGLLEGLATSLQXALSLVKNGRTDTLAAKDDFVFLQGVSLXTGRKLLSKLVRLLSXGLGVPSWIVCMAIFRHLRLLFGGLPSDPAAAETISNLARVVSRCIREMDLGAVSACLAAVVYTSEPPPLRPLGSSAGDGASLILVSVLERATELLTDPHAASNYNIANRSLWQATFDEFFGLLTKYCVNKYDSVMQSFLIQGTPNMASIGSDVARAISREMPVELLRASLPHTDDRQKKQLLHFAQRSIPVVGFNSNSGDQGHHVNSESVLS

SEQ ID NO: 180717 - protein, 40 aa, Glycine max
  Clone ID: PAT_MRT3847_134201C.1.pep
NIFLKKKKHFKLVNPCSFYRRATRENHAIVGCASNFARCT

SEQ ID NO: 180718 - protein, 32 aa, Glycine max
  Clone ID: PAT_MRT3847_134202C.1.pep
SYIWSKVETLTRLLLRRKMQLRHKQLKKDRAC

SEQ ID NO: 180719 - protein, 216 aa, Glycine max
  Clone ID: PAT_MRT3847_134203C.1.pep
TTHASGVCCTLQWCSLPTWFRYFHHKVGYSVSLAVKNNKGDPITAREINDAVWKNFFLGKLTYLLWNKGEEMAPTIDGKAVTLVRKLPAVDPTSVFVGDVVVMKDPEKPDNYLLRRLTAIEGYEVVSTDEKDEPFILEKDQCWVEAENEKLNAKEAKDSRTFGPVQMTDIVGRVIYCLRSAVDHGRVQNSDFGMRNDTPVLEVELDVDEMAKSHKA

SEQ ID NO: 180720 - protein, 204 aa, Glycine max
  Clone ID: PAT_MRT3847_134204C.1.pep
MVSLSTWFRYIAHKLEYSFSLSWKNYKGGQITDREVRDVVWKNFFQGKLTYLHWNKGEEMAPTIDGKAVTLVRKLPVVDPTRVFVGDVVVVKDPEKPDNYLLRRLTAVEGYEMVSTDEKDEAFVLEKDQCWVVAENEKLKAKEAKDSRTFGPVQMTDIVGRVIYCLRSAVDHGRVQNSYFGMRKDTPVLEVELDVDEMAKSHKA

SEQ ID NO: 180721 - protein, 79 aa, Glycine max
  unsure (1)..(79): unsure at all Xaa locations
  Clone ID: PAT_MRT3847_134205C.1.pep
XPIXSXSLSAAXXDDVVFDEAADXXXPLLALXPXXTAQXXXXSRQXPXXXSNXXRXXXRAGEGLGFXTRAEFRAVRTRX

SEQ ID NO: 180722 - protein, 69 aa, Glycine max
  Clone ID: PAT_MRT3847_134206C.1.pep
KIFPRGPFLKLNSHKKENKGPFLKLRLALDPHWAIKKKGKWGFLKALIFGKELVSLRKGPHPIQIFYPF

SEQ ID NO: 180723 - protein, 132 aa, Glycine max
  Clone ID: PAT_MRT3847_134207C.1.pep
MARQVIVIAALLMVAIVGVALADEAPSASPKSAPTPSSLPKAPTSSPKAPAPSSSKASPPTSSPPTTSPVVGQEPASPPAPGSEEIELGAPVPAPANEVAVEEPVPAETTTSIASTLRVPAIIVVIASFFAF

SEQ ID NO: 180724 - protein, 38 aa, Glycine max
  Clone ID: PAT_MRT3847_134208C.1.pep
DRYDLQHVFERFFYFSQRKDIGSYVLYSKLIPVHSLNL

SEQ ID NO: 180725 - protein, 43 aa, Glycine max
  Clone ID: PAT_MRT3847_134209C.1.pep
MVSLQKTLNRMAWIYGSATEDVLTGLTIHIKGWRSEFCMPSPT

SEQ ID NO: 180726 - protein, 52 aa, Glycine max
  Clone ID: PAT_MRT3847_13420C.1.pep
AESERRFDGERNTTRGFKGERGILTLQRVRARGSFNYAALEGALTKSESKRS

SEQ ID NO: 180727 - protein, 107 aa, Glycine max
  Clone ID: PAT_MRT3847_134210C.1.pep
MKLPAHCFLASTLKSLVRLTVLLLVVSSNKTKGAVKLPPNISVPAVLVFGDSIMDTGNNNNNLITSARSNFPPYGQDFKGGIPTGRFCNGKVPSDILGLLASRTLIN

SEQ ID NO: 180728 - protein, 367 aa, Glycine max
  Clone ID: PAT_MRT3847_134211C.1.pep
MKLPAHCFLASTFKSLVRLTVLLLVVSSNKTKGAVKLPPNVSVPAVLVFGDSIMDTGNNNNNLITSARSNFSPYGQDFMGGIPTGRFCNGKVPSDILVEELGIKEFLPAYLDPNLQLSELATGVCFASGGSGYDPLTSQTATAIPLSGQLDMFKEYIVKLKGHVGEDRTNFILANGLFFVVLRSNDISNTYFLTHLRELQYDVPTYSDFMLNLASNFFKEIYQLGARRIAVVSAPPVGCVPFHRTLSGGIARKCVQKYNDAVLLFNDKLSKKINSLNLKLPNSRIVYFDVYNPLLDVTVNHQKYGSKVGDRGCCGTGNLEVALTCNHLDATCSNVLDYVFWDGFHPSESVYKQLVPPLLQKYIHRFA

SEQ ID NO: 180729 - protein, 40 aa, Glycine max
  Clone ID: PAT_MRT3847_134212C.1.pep
QFENVSHVLLISVTKICFLKLILSMTTFFVYPSTGVLLIQ

SEQ ID NO: 180730 - protein, 32 aa, Glycine max
  Clone ID: PAT_MRT3847_134213C.1.pep
HPIFVNLYFLHQFFGQTLKNNGMISLSYKCYK

SEQ ID NO: 180731 - protein, 52 aa, Glycine max
  Clone ID: PAT_MRT3847_134214C.1.pep
YCSFRSVVSSCGSRMKVSLEIMMFLVVFLWILNQAAIVPLWFNELFYHIGFM

SEQ ID NO: 180732 - protein, 776 aa, Glycine max
  Clone ID: PAT_MRT3847_134215C.1.pep
MSSLQLLQLTRRGQSFLASRRKTLLLASGILIAGGTAAYVQSRFRVNNHDLFGHCNGHSNDKEVAEEVVKDVSTPKNKQKKGLKSLQVLAAILLSGMGKFGASDLLGLVAIAVLRTALSNRLAKVQGFLFRAAFLRRVPLFLRLISENILLCFLLSTIHSTSKYITGTLSLHFRKILTKLIHSHYFENMVYYKISHVDGRITNPEQRIASDVPRFCSELSEIVQDDLTAVTDGLLYTWRLCSYASPKYVVWILAYVLGAGAAIRNFSPSFGKLMSKEQQLEGEYRQLHARLRTHSESIAFYGGERKEEAHIQQKFKTLDLLLKYLGATVAVILIIEPFFSGHLRPDSSTLGRAEMLSNLRYHTSVIISLFQSLGTLSISARRLNRLSGYADRIYELMAVSRELSLVNEKSSLQRNASRNCIREANYIEFDGVKVVTPTGNVLVDDLTLRVESGSNLLITGPNGSGKSSLFRVLGGLWPLISGHIVKPGIGSDLNKEIFYVPQRPYTAVGTLRDQLIYPLTEDQEIELLTDRGMVELLKNVDLEYLLDRYPPEKEVNWGDELSLGEQQRLGMARLFYHKPKFAILDECTSAVTTDMEERFCAKVRAMGTSCITISHRPALVAFHDVVLSLDGEGGWSVHYKREGSSTEMGIDTMKASEKKRQSDAKAVQRAFSMSKKDSAFSSPKAQSYFAEVISSSPSINHTISPSAVPQLHGNTRVLPLRAAAMCKVLKGSIVVVAVMRVFVGQGGGGYGSDGSGGGQLNGDWAGDNNAGDDGGK

SEQ ID NO: 180733 - protein, 278 aa, Glycine max
  Clone ID: PAT_MRT3847_134216C.1.pep
MSIFCLFLFFSFISCMTNSSEECTMLDIDVVQRIVEYFLMHEQQQIQQQQKTRKFNISRLLDNYLAEIARDPNLSITKFQVFAELLPENTRSYDDGLYRAIDTYLKTQPSLTEHDRKRLCKIMNCEKLSLDACLHAAQNERLPLRTVVQVNMQVLFSEQVKMRAAMHEKEPAQIGIQSEQEENQTSATMDIKALKAELENVKSQMVELQNDYCELQQEYEKLSNKPKNSSGWSLNWRKIKNSLHTKPAGVEIGDRQDAPKSPNTILRRLNPRRRLSMS

SEQ ID NO: 180734 - protein, 72 aa, Glycine max
  Clone ID: PAT_MRT3847_134217C.1.pep
TPMCCWSVSLDTSSPSSPINKFQHREPNKATQELTNVLLTAHWSLRILYQSSSHTEEGLGERERECFGSSAR

SEQ ID NO: 180735 - protein, 88 aa, Glycine max
  Clone ID: PAT_MRT3847_134218C.1.pep
MEACTGLFAGTPNSNELVVIQGHDEPKPVKNLDGQLCEICGDSVGLTVDGDLFVACEECGFPVCMPCYEYERREGTQVCPQCHTRYKR

SEQ ID NO: 180736 - protein, 44 aa, Glycine max
  Clone ID: PAT_MRT3847_134219C.1.pep
LKLPYQWQPTPLCYPDHYEVTKPSTTLTCHPCHTSVYSCPVLTP

SEQ ID NO: 180737 - protein, 312 aa, Glycine max
  unsure (1)..(312): unsure at all Xaa locations
  Clone ID: PAT_MRT3847_13421C.1.pep
MRAPALLAQCLPGLVPHDRGSLSMSSVPEKDFHLPSPAVEILPSKAVHTDKDNGENIDHFKGLISVADIVGFSGSETISLKPDGYLKYWTWFVDLAXILCLLGVNGKSFNISFGGASVVHSIDHSAETVRCTTIPNVLANLKQARDRQSRQPESPLTPSRQTLAPSVNFYAGDWEELPSVLSIAKSDGYEVMPGMSLSFSEEDFMDGCSSQDGSIIGHESHSRRSRKLSGSRAWERGSEADQGEGGYDIILMTEIPYSVTSLKKLYALIKKCLRPPYGXVGYLASTKRHYVGFSNGVRQLRSLVDEEGIFGA

SEQ ID NO: 180738 - protein, 110 aa, Glycine max
  unsure (1)..(110): unsure at all Xaa locations
  Clone ID: PAT_MRT3847_134220C.1.pep
SLDQVFLTSSHSAEHFYASKWTKWXPHSWELIFPREECGPNNGYEMWGFEWANXSSGRLSFLNDNPXRLTVFDVLLGSSPDFESAGNSLRPAFSVPQARARFFENAESFA

SEQ ID NO: 180739 - protein, 30 aa, Glycine max
  Clone ID: PAT_MRT3847_134221C.1.pep
LWKGVVVSVMIGLDRLASYDFKRGKMLGGV

SEQ ID NO: 180740 - protein, 56 aa, Glycine max
  Clone ID: PAT_MRT3847_134222C.1.pep
HSRQAPSHGRQCRDIILWCVVHQLSFDAPVREFHLSARVGVPFKCLGMRSRNHALS

SEQ ID NO: 180741 - protein, 58 aa, Glycine max
  Clone ID: PAT_MRT3847_134223C.1.pep
DVFKLEIDASSVAISAILSQHGHLLDFFSKQIHALFFRVCSRALALTILLQMLCQENS

SEQ ID NO: 180742 - protein, 146 aa, Glycine max
  Clone ID: PAT_MRT3847_134224C.1.pep
HVLGANNNPFLIFLKGTCVNNHYSVMFKKGAFELGCTICPVAIKYNKIFVDAFWNSRKQSFTTHLLQLMTSWAVVCDVWYLEPQNLKPGETPIEFAERVRDIISHRAGLKKVPWDGYLKYSRPSPKHREGKQQIFAESVLRRFEEK

SEQ ID NO: 180743 - protein, 100 aa, Glycine max
  Clone ID: PAT_MRT3847_134225C.1.pep
ACLLLCMRFLFSSTSILGSRYCSKPPKKHKPNKTPNTPTVLLVKPPLTIPPIINSPLTIPPIVNSPDTIPSIVNPPITIPSIFNPPFTIPHPLLSPINNP

SEQ ID NO: 180744 - protein, 60 aa, Glycine max
  Clone ID: PAT_MRT3847_134226C.1.pep
LLLFAYRCTLGYSTLLDASCSDRAEIRSRAERGRTSIYLNSLNMVLAYYLLLAQFPVLAL

SEQ ID NO: 180745 - protein, 272 aa, Glycine max
  Clone ID: PAT_MRT3847_134227C.1.pep
VDFSTHEAAVACVDGVNKSELGDGASKIKVRARLSNPLPKTQAVKGGMSGGFRISHARSGAFSRPGRGFGRGRQPFNNRGNFNRGRSFYRGGHSQIGRMGFRDDHDFSMHPDFRQRQFGPQGAVRGGHYAGSRGAAFAGPSRPYHDRAWYGIPDGGPSEPIPPRRPYSPGGQFDMPFMGRHFDDPYLYDDNMQGMKRPFYMTDPEPDYMGPTRLRPRLDYADPPIFPGTHHHDSFGAGSRQYPPDYYGSDYGRGSYSSYYGGDGSHGHGYYY

SEQ ID NO: 180746 - protein, 244 aa, Glycine max
  Clone ID: PAT_MRT3847_134228C.1.pep
LEAYCDGAYYQFGFPSLDFGGHNSWLFFPFHRWYLYFYEKILGSLIKDLDPNFALPFWNWDFPNGMPMPAMYTDPKSPLYDSLRNANHKPPKLVDLDYNGVEDQSSTQEQISTNLNTMYRQLVSSSKTPTLFFGSPYRAGEDSDPGGGTVENIPHGPVHIWTGDNTQPNFEDMGTLYSAARDPIFYSHHANVDRMWSIWKTLGGKRSDIKDPDWLESGFLFYDENKNLVRVKVKDCLDTRKLGY

SEQ ID NO: 180747 - protein, 66 aa, Glycine max
  unsure (1)..(66): unsure at all Xaa locations
  Clone ID: PAT_MRT3847_134229C.1.pep
CDCECILISNKNKNKCMVRHSDEKKKKKKKKKKKKKKKKKKKKKKKKNKKKKPKLKNXNXQKHPPL

SEQ ID NO: 180748 - protein, 37 aa, Glycine max
  Clone ID: PAT_MRT3847_13422C.1.pep
LESARKPSTKTNKPTLKIIPSLFFCQNRGEFLLNQKN

SEQ ID NO: 180749 - protein, 43 aa, Glycine max
  Clone ID: PAT_MRT3847_134230C.1.pep
SLTQAMKSSDIKGNNDPKSSRTIHMVLNSLQANVSISLPNYKC

SEQ ID NO: 180750 - protein, 148 aa, Glycine max
  Clone ID: PAT_MRT3847_134231C.1.pep
NLSRKTPSLMQLVYGESTINSTTINRDNDNSGDEESDDDFFKPIEEVKKQNVRDGLNDDGMVNTEDCSKCTQFVDQRWDENDNEEIRNRFVTGNLAKAALRNALPAANTEEENDDVYGDFEDLETGEKHENHQTDDALAATTHKGDDL

SEQ ID NO: 180751 - protein, 191 aa, Glycine max
  Clone ID: PAT_MRT3847_134232C.1.pep
MANQDKQHKRAFMYIYKGGTVNQRKGELEHGVGQDKKSKSRSWLHRISRTRIFNDGHRDLDIGARGEGEFVEARKSMSCLELGSPAGGYVEGRKSVSFIEAAASPAAIGSIVEERRKSVSHIEKNFAVAGMVEARKSVSHIETLSSVIAYLQVKVLVSDMPSFMQVHAFRCARRTYDSLEKFSAKHIAHNL

SEQ ID NO: 180752 - protein, 135 aa, Glycine max
  Clone ID: PAT_MRT3847_134233C.1.pep
KPLPPPQSQPTTKNPPPPLMAQNLSTKWEGKKTLRFKLKTKGKPQVQNHKSPLAPKPPKKTPGTLAPQKHCQKRPKFPGSSNWGKTFLTPPKLAPQGQKSISRGPPSLKAKKTLPNFFRFLLGHLIPNSSLTNKP

SEQ ID NO: 180753 - protein, 49 aa, Glycine max
  unsure (1)..(49): unsure at all Xaa locations
  Clone ID: PAT_MRT3847_134234C.1.pep
DHFKHYYRLSLHKSKLKEILVFQKSXLVTIDVIKLIDIEGCRQGLSYSV

SEQ ID NO: 180754 - protein, 57 aa, Glycine max
  Clone ID: PAT_MRT3847_134235C.1.pep
CIKLFARASLILFPRIPNEETLGEPPTPTTVHVRSILDLTNCPSYLLYVLDSPSLSQ

SEQ ID NO: 180755 - protein, 153 aa, Glycine max
  Clone ID: PAT_MRT3847_134236C.1.pep
MNVFRLSADLAHLVAIFILLWKIWKTRSVAGISGRSQVIFLLVFICRYLDLFTNFVSIYNSVMKVFFIGSSIATVFFIYFKFKATYDRNHDTLRIEFLVLPCLCLALLINHEFSLFEILWTFSIYLESVAIMPQLFMLSKTGSAETITAHYLF

SEQ ID NO: 180756 - protein, 143 aa, Glycine max
  Clone ID: PAT_MRT3847_134237C.1.pep
HASALSLKNCPSLREIFSNGAIQHFSELQNLKLEDCSKIEILISKDIEPEKDVLPKLEMLLLVNLPNFNTICSTHTLAWSSLELLRIHNCPKLKTLPLDSDNAVNLKSIKGQQEWWDELEWTNNDEVYQRLQPIFAASNEYFS

SEQ ID NO: 180757 - protein, 126 aa, Glycine max
  Clone ID: PAT_MRT3847_134238C.1.pep
MMAMEGQQPQSSSENGRESEDYGEEGREKGPHPLAQAGTGSFPGGFIGKHRLQAAITNLNNQISILQEELKKVETIGESSTVCKDLISSVESTPDPLLPFTKGSVDAGWDRWFGGAHHSRNHKRWI

SEQ ID NO: 180758 - protein, 37 aa, Glycine max
  Clone ID: PAT_MRT3847_134239C.1.pep
MKMNVLVFFVTTIMVAWQCHAYYMFSLLMNTVYRART

SEQ ID NO: 180759 - protein, 228 aa, Glycine max
  unsure (1)..(228): unsure at all Xaa locations
  Clone ID: PAT_MRT3847_13423C.1.pep
FSGSESEESASPNNLIPSLPDDVALNCLGRIPRSQHPTLSLVSKPIRTLLSSPILFTARTLLQCTQPLLYLTLRSRASSLLQFFTLHRTNPNNPLLAPLPPIPSPAVGSAYAVLGPTIYVLGGSIHDVPSPNVWLLDCRFNRWLRGPSMRVGREFAAAGVLHGKIYVLGGCVADTWARSGNWAEVLDPATGQWERVASATEVREKWMRAMSRRRGXIYAMGRGGGVGY

SEQ ID NO: 180760 - protein, 48 aa, Glycine max
  unsure (1)..(48): unsure at all Xaa locations
  Clone ID: PAT_MRT3847_134240C.1.pep
PPLKNWVVKFPPSKKSFYAVFSQSMIKMINIICAPCVPRXGEFLIKNS

SEQ ID NO: 180761 - protein, 81 aa, Glycine max
  Clone ID: PAT_MRT3847_134241C.1.pep
RRPVSAWDTPPGSKNNFVLPHQLPRNTPSFPSLRQPWFSAASPSALPPQHVVNPRIRTLVAIVVCRCRFTRRRRGSRCGFP

SEQ ID NO: 180762 - protein, 121 aa, Glycine max
  Clone ID: PAT_MRT3847_134242C.1.pep
ARNAARGNHANAYTPPQAAAHGGGDQAAIGRGEPPQEGGGARAAGRDAPQTRDRDRQPAKRQAKNTKNTTIPTKRESVTPTTTDNQTRALNKAHKGEHAQTEDNHPTREARANRTQLQRQG

SEQ ID NO: 180763 - protein, 56 aa, Glycine max
  Clone ID: PAT_MRT3847_134243C.1.pep
KGVLPPSIKNPFLGTKVPFMMEETSNYVRKTSYLETKTQGQKTNIYCDHKKTTFPD

SEQ ID NO: 180764 - protein, 62 aa, Glycine max
  Clone ID: PAT_MRT3847_134244C.1.pep
VKPVYVCHIMVLPTWRARAFGLSISSVAPLYLVNFFYWALGWNPRNIIVIFLRPNIIELFSC

SEQ ID NO: 180765 - protein, 48 aa, Glycine max
  Clone ID: PAT_MRT3847_134245C.1.pep
NKSWQAIVHTHPYVTPKCNHLTHAAIIRQDSNDWAQSTHYPQFKPEEI

SEQ ID NO: 180766 - protein, 189 aa, Glycine max
  unsure (1)..(189): unsure at all Xaa locations
  Clone ID: PAT_MRT3847_134246C.1.pep
MDIEQKQSELIDHFVKRASAASDAAALSSVLVEATSHPSLFAFSEILALPNLLQLEATENSAYLDMLRLFAHGTWNDYKSNADRLPQLIPDQILKLKQLTVLTLAETYKVLPYDQLMQELDVTNVRKLEDFLINECMYAVIVXGNDGSVAXCFEVHLRAGMDFIPXKLGNMIQTLSLELFRILNLHLSK

SEQ ID NO: 180767 - protein, 122 aa, Glycine max
  unsure (1)..(122): unsure at all Xaa locations
  Clone ID: PAT_MRT3847_134247C.1.pep
LVTQEPALLSLSIRDNIAYGRDTTMDQIEEAAKIAHAHTFISSLDKGYDTQVGRAGLALTEEHKIKLSIARAVLLNPSILLLDEGTGGLDFEAXRAVQEALDLLMLGRSTIIIGRRLKLIKN

SEQ ID NO: 180768 - protein, 62 aa, Glycine max
  Clone ID: PAT_MRT3847_134248C.1.pep
YCAYLLKTMYPIHFHINFFYYIHNQIELRELKVLLSQDDEQHHFYFSQLPCLAKIFPTAFSS

SEQ ID NO: 180769 - protein, 117 aa, Glycine max
  Clone ID: PAT_MRT3847_134249C.1.pep
RMLLEEKKKTSESSFTPERHILIGQHLDSLRNGILARDMRRARGDMGLFALLLRVLDLDGELAALGETHVGRIRRVRDPAGRLARRADLLHHAVDLFEGEALGLPHKEVGVDEAQDA

SEQ ID NO: 180770 - protein, 109 aa, Glycine max
  Clone ID: PAT_MRT3847_13424C.1.pep
MFYLSPQLVNLPHWLQGSVNTLVSLMLDNCDNLEVLPDWLPKLTCLKVRYVADCPKLQSLPYGIHCVSALEHLEIADCPELCRKYKPRAGECWNQISHIKKIRTVERNI

SEQ ID NO: 180771 - protein, 75 aa, Glycine max
  Clone ID: PAT_MRT3847_134250C.1.pep
VTRSPLCRVGSIIPYLQLVSWGCVPPHVRLGIPTPPPPPPPTLPPPLPTPPPPKASEDRHTADDRETLPWNGIVA

SEQ ID NO: 180772 - protein, 371 aa, Glycine max
  Clone ID: PAT_MRT3847_134251C.1.pep
MVVCDFWELSLAQSQRKTPKSNIIMEPSLDLRLGFVPKPLSLFFGDVSGNRDKCDKVVTLDGFVQRLEEELTKVEAFKRELPLCILLLNDAIARLKEEKVKCSGMQDPPLKTSSGGNENENSARQKGNWMSSAQLWSTQKTKSRNEEDDRSVPANPINGNSCVLEKEGSQVPRFGLMARASELSHSNSKSVGGDISSGSSLLRVEVQSQPQPPQHMQQNPRKQRRCWSPELHRRFVDALQQLGGAQVATPKQIREPMQVEGLTNDEVKSHLQKYRLHVRRFPVSSTGQADNGSWMSQDESGDKSKGNNMSQSGSPQGPLTPLILGGAGGGSAKGLSSPGQNSVDGEDEQSDCRNWKGGLHHHQLEADNQCL

SEQ ID NO: 180773 - protein, 76 aa, Glycine max
  unsure (1)..(76): unsure at all Xaa locations
  Clone ID: PAT_MRT3847_134252C.1.pep
MGARTHRQEHGPQTGTWNPMDEDMGSLDPIXMTFXHDPCKDRIDPYQRKPGLTDAVQTGTGQLNGIPVAIGIMDSQ

SEQ ID NO: 180774 - protein, 80 aa, Glycine max
  Clone ID: PAT_MRT3847_134253C.1.pep
ILILDEGAPWFLYMCPLRGNSEESSSHLIPYVEKYLFVYSLISWVHNSSTATTILVFRLPRVLRPFHPHKHQNIEMRMQT

SEQ ID NO: 180775 - protein, 45 aa, Glycine max
  unsure (1)..(45): unsure at all Xaa locations
  Clone ID: PAT_MRT3847_134254C.1.pep
MSRITHKIGETLHVGGHKKEEVHKGXHHAGEYXGDHHGEHSIEYK

SEQ ID NO: 180776 - protein, 131 aa, Glycine max
  Clone ID: PAT_MRT3847_134255C.1.pep
GFCGFEGKWTWRGKLGGFLIQFLKPNPCLCPPPTPFFFVFSTLNGPCGTGCSMGGRNPRQRNFKFAGNFPFPVFLSLLLLGGFGGLGPPVPCPFFCSPACGVKKENSSPLFFFAPPPRWGGVLPPPFLASP

SEQ ID NO: 180777 - protein, 57 aa, Glycine max
  Clone ID: PAT_MRT3847_134256C.1.pep
KRFTKWRDNKRKKFDFFLLQKLNFQTSGSYWLLKSINLIIFLPLKKDYLKHFRNFNN

SEQ ID NO: 180778 - protein, 62 aa, Glycine max
  Clone ID: PAT_MRT3847_134257C.1.pep
VLSLLLWILQSRACDDILFLALSAHPQDATFKRTSACHYHCHCFEMRRTEDADRRTTDVTLQ

SEQ ID NO: 180779 - protein, 58 aa, Glycine max
  Clone ID: PAT_MRT3847_134258C.1.pep
SEYTHLKKIIFLYYLINLKVLQTPFPILNLNFKRYQKIPFNLSTSIPKHTPTSILFFF

SEQ ID NO: 180780 - protein, 141 aa, Glycine max
  Clone ID: PAT_MRT3847_134259C.1.pep
PPKKNKGGEAPGEGLPRWKNYCFHPRAVGFGEGKYFYFWRPPFIFGTKIKLPRGCYSLLLWAPLRELIIPPSVAIMLYIRASYYRKRNVFKTKKPSIYSSPLFSPPFSYFLPSSPCFCSDCELKGPFQYLSKERLFSLVLI

SEQ ID NO: 180781 - protein, 74 aa, Glycine max
  Clone ID: PAT_MRT3847_13425C.1.pep
LTRVLDHSSRGVGATLAPVGLGSAVCAVASAGDPLAWFANSARRSRDGTRSLPGAGSRRGSSTFNAESSAGSSL

SEQ ID NO: 180782 - protein, 52 aa, Glycine max
  Clone ID: PAT_MRT3847_134260C.1.pep
KTGTVVFMYMMKQSKTMLDNPSKLYHISSITILNLVLPPRKMPDKFNKLQCS

SEQ ID NO: 180783 - protein, 165 aa, Glycine max
  Clone ID: PAT_MRT3847_134261C.1.pep
MGRLNLLLVWSLSLTLSLYYLHPISAQLSPNHYAKTCPNLESIVRQAVTKKFQQTFVTVPATLRLFFHDCFVQGCDASVLIASTGNNQAEKDHPDNLSLAGDGFDTVIKAKAAVDAIPQCRNKVSCADILALATRDVIALVRTPLDSPTAASSPVEYTVPQWTQH

SEQ ID NO: 180784 - protein, 88 aa, Glycine max
  Clone ID: PAT_MRT3847_134262C.1.pep
MNNATMAPYNMSDRSLICYTPLMTTTNGLWQGDNPLDYSLPLFILQLTMVVCATRFFVFILKPLHQPRVIAEILGGLLLGPSIFGRKS

SEQ ID NO: 180785 - protein, 424 aa, Glycine max
  Clone ID: PAT_MRT3847_134263C.1.pep
MKSRRLSICWAGKWHMGVQRRPLLRIMIRKFLTITFLCSPVDKRFLENYLLPHLRGCQWHPQVAEGSVPIIFNIRLTLIIHYYSLPLNFYLQSLSKTQQMGRLNLLLVWSLSLTLSLYYLHPISAQLSPNHYAKTCPNLESIVRQAVAKKFQQTFVTVPATLRLFFHDCFVQGCDASVLIASTGNNQAEKDHPDNLSLAGDGFDTVIKAKAAVDAIPQCRNKVSCADILALATRDVIALSGGPSYTVELGRFDGLVSRTSDVNGRLPQPTNNLNQLNSLFAANGLTQTDMIALSGAHTLGFSHCSKFASRIYSTPVDPTLNKQYVAQLQQMCPRNVDPRIAINMDPTTPRKFDNVYYQNLQQGKGLFTSDQILFTDPRSRNTVNSFASSSNVFNSNFVAAMTKLGRVGVKTARNGKIRTDCSVL

SEQ ID NO: 180786 - protein, 325 aa, Glycine max
  Clone ID: PAT_MRT3847_134264C.1.pep
MGRLNLLLVWSLSLTLFLNYLHPTSAQLSPNHYANICPNLESIVRQAVTNKFQQTFVTVPATLRLFFHDCFVQGCDASVLIASTGNNQAEKDHQDNLSLAGDGFDTVIKAKAAVDAVPQCRNKVSCADILALATRDVIALSGGPSYTVELGRFDGLVSRASDVNGRLPQPTNNLNQLNSLFAANGLTQTDMIALSGAHTLGFSHCSKFASRIYSTPVDPTLNKQYVAQLQQMCPRNVDPRIAINMDPTTPRKFDNVYYQNLQQGKGLFTSDQILFTDPRSRNTVNSFASSTNVFNSNFVAAMTKLGRVGVKTARNGKIRTDCSVL

SEQ ID NO: 180787 - protein, 104 aa, Glycine max
  Clone ID: PAT_MRT3847_134265C.1.pep
MQAKPIHNTPTYIPPPIRPSPPVHQTPPSIPSIKPRAISISAPNIPIAVPIPPIVEPDDSNAAYYDYQFLFMSQRSEATRPVTLSTVEGAIPADFPSGTYYLTG

SEQ ID NO: 180788 - protein, 202 aa, Glycine max
  Clone ID: PAT_MRT3847_134266C.1.pep
MEGQSKGSFNVMEGSEGKGREFVVEKSASSIVGTCDLVLRILAFLLTLVAAVVIGTDKQTAIVPIKLVDSMPTLYVPVAAKWHYLSAFVYYVGANAIACAYAILSLLLTLANRRKGKGTMETLITVLDTVMVALLFSGNGAAMAVGLLGLQGNSHVHWNKVCNEFGKFCDQVAASLFISLLGSIAFLLLLIVPPVLRLKQTT

SEQ ID NO: 180789 - protein, 34 aa, Glycine max
  Clone ID: PAT_MRT3847_134267C.1.pep
ALLLRKGCAKNYKTWRDLEDAQSNPLCATIVVHD

SEQ ID NO: 180790 - protein, 93 aa, Glycine max
  unsure (1)..(93): unsure at all Xaa locations
  Clone ID: PAT_MRT3847_134268C.1.pep
SXXSCVRXXGAXAXXPGXPGVTPGTXRCAXXFXPXXSGXAXXXEGCGXCXCXGCHXXGLPXXWXDXVXXPPXXNXPPPDXSGXXEKXXKXRXP

SEQ ID NO: 180791 - protein, 65 aa, Glycine max
  Clone ID: PAT_MRT3847_134269C.1.pep
GWIHVRKVLPPVQGAIGWLHARVPMCALNHTCIQGYSSGVPVPAVILIIDRISRCDKIIDDALLL

SEQ ID NO: 180792 - protein, 72 aa, Glycine max
  Clone ID: PAT_MRT3847_13426C.1.pep
HLSLCSGQTFNEFFIRELKPGSRPIASAERDDVAVCAADCRLTAFKSVDDSTRFWIKVFFFFLTIQLNMEGF

SEQ ID NO: 180793 - protein, 93 aa, Glycine max
  Clone ID: PAT_MRT3847_134270C.1.pep
CSSKRPTMTLPALLSTVSKLTSSCIRRHISSIRSPIFNTLATFLQHTYWKKHNTSLRRDRSLDWNLTSSTNTYNASTNRPYQPMLNPTGPCDT

SEQ ID NO: 180794 - protein, 86 aa, Glycine max
  unsure (1)..(86): unsure at all Xaa locations
  Clone ID: PAT_MRT3847_134271C.1.pep
HASAHSCTASFALNCLCVYGLSANRTCHRQRVLQAQRELQHTFTKLVNLLFSYXAMRIITGGLHHGGIPPILSSSNYRDRYDIAYH

SEQ ID NO: 180795 - protein, 122 aa, Glycine max
  unsure (1)..(122): unsure at all Xaa locations
  Clone ID: PAT_MRT3847_134272C.1.pep
XKXXFXKEIXXXGXNXXXXXXXGXXXXXXXFXLRGVFXXXXXXGXNIXXKVKXXVCYXKTRRXVXXXXXXVGXVXXCGXXXXMIXGGMKXNMXXWXXXSNYXXXXEXXXEXLXXXXXNVWXC

SEQ ID NO: 180796 - protein, 81 aa, Glycine max
  Clone ID: PAT_MRT3847_134273C.1.pep
IVDWFVKIWPKFKTIGPNVPSFFLDKQCEDDQDYGVTQFKSEECVEWLDDKPKGSVVYVSFGSMATMSEEQMEEVACCLRE

SEQ ID NO: 180797 - protein, 52 aa, Glycine max
  Clone ID: PAT_MRT3847_134274C.1.pep
ISAWMKSIPMSVIPGQPRKSSCVNMLLINESNHSKFRSSYNIRWNKNCKSMI

SEQ ID NO: 180798 - protein, 42 aa, Glycine max
  Clone ID: PAT_MRT3847_134275C.1.pep
YPPDSTADLSRSNSYSLDSQKLDICIGEKYKGRQYIPTVVIV

SEQ ID NO: 180799 - protein, 96 aa, Glycine max
  Clone ID: PAT_MRT3847_134276C.1.pep
ETNVSDHSTYANRYDRTYIARDKNAEETILEEAAYHIIHDQLMLYGISRLNLASFETTCMEPVFDKVIMVYMDKNDVHMDEDAVWIEFQKRSVRHV

SEQ ID NO: 180800 - protein, 80 aa, Glycine max
  unsure (1)..(80): unsure at all Xaa locations
  Clone ID: PAT_MRT3847_134277C.1.pep
VQGSRSFNEAFALHLKKPCGGGNHSSWFMTLILXFAILKICFAXNQSFCTILGFGPNLSPRLNSNKRAKDPEFYSXSKXX

SEQ ID NO: 180801 - protein, 80 aa, Glycine max
  Clone ID: PAT_MRT3847_134278C.1.pep
TQKLSTCPQWSTLYHVHWQDKSCHFLKGQKWMFLLILKNKGLANWYGIPLPVVCDWQKNQDDGIQKIRGQLWGPTEHLSH

SEQ ID NO: 180802 - protein, 237 aa, Glycine max
  unsure (1)..(237): unsure at all Xaa locations
  Clone ID: PAT_MRT3847_134279C.1.pep
MDSQRSPLLSWAFYCHGKSMEELKQSLMYTTLELEQTRATVQEELRKRDDQLLTLKELLNKVIRERDEAQEKCQRLVLEKMVFQHQTAPASGVSSIEDEPRRGINDSSNNGLSSSDCEESIVSSPVMEHLPPQQQQLPESMIELISPDKPLPEKGKLLQAVMKAGPTLQRKGQAFASSQXRRSFPPLESFEIPTSSMPSPSQPQLPHQDSFTSNCGRATTTTTSSRFLHHLKLRESK

SEQ ID NO: 180803 - protein, 71 aa, Glycine max
  Clone ID: PAT_MRT3847_13427C.1.pep
GLQLRGLFTQRVEYKGFGSSRVYNPKTSGGTGVPLNPGANVSVCDREGLPLHTKNGGHPTVLMLRRSDRSR

SEQ ID NO: 180804 - protein, 42 aa, Glycine max
  Clone ID: PAT_MRT3847_134280C.1.pep
YLYLASVNETELYPFQDPFLGPHSEKRRYALIQNLSLQIKHS

SEQ ID NO: 180805 - protein, 65 aa, Glycine max
  Clone ID: PAT_MRT3847_134281C.1.pep
HPLNRPCPYLRSAKTQSIQTHLRATASRWTWHSESESPQMMYGLPFEHSSSLHKGCPNLKVQSIS

SEQ ID NO: 180806 - protein, 139 aa, Glycine max
  unsure (1)..(139): unsure at all Xaa locations
  Clone ID: PAT_MRT3847_134282C.1.pep
AKQPGRAVRNGGAKKALCRALGVXHVTHKYGLIXMPPRLVRKLPRSKGEFIGHMMQRRLLDWRGMVLGDAQKVPVGVDNRGQLDARLRVLRGKTLGRYXGLPKAQPRTEAYDEVREKEAVSLIAPAKADARSADGVSGR

SEQ ID NO: 180807 - protein, 54 aa, Glycine max
  Clone ID: PAT_MRT3847_134283C.1.pep
SLENLRFYNSVFFLLKVPFLQKLFSTSEESRKTDFFILGFCSFFQKHCIFILNF

SEQ ID NO: 180808 - protein, 126 aa, Glycine max
  Clone ID: PAT_MRT3847_134284C.1.pep
RSWIEVQGEVHVFVAGDWKHERSKEIYQKLAELMGDIEKLGYVPVWDEVLHNVGEEKRKEALWYHSEKLAVAFGVLCGPAPPGKPLRIVKNLRICKDCHEAFKYMTRVIEREIIVRDVNRYHRFVN

SEQ ID NO: 180809 - protein, 50 aa, Glycine max
  Clone ID: PAT_MRT3847_134285C.1.pep
HMILFCFLHFSCSPRSNKSIVLTELVFIISVLVDCENFQIRKRGLLSLSV

SEQ ID NO: 180810 - protein, 248 aa, Glycine max
  Clone ID: PAT_MRT3847_134286C.1.pep
MYTLRGASDQITRQKISNKLFDSLVLLFTPYRVVFILSYIFHLLIKDVHLADGNGECYKWSNICRISIGIAKGLEHLHTSQEKPIIHGNLKSKNILLDRSYQPYISDSGLHLLLNPTAGQEMLENSAAQGYKAPELIKMKDASEVTDIYSLGVILLELLSGKEPINEHPTPDEDFYLPNFMRNAVLGHRIADLYQPAFLLRNSRDDNIPVTEECILKVFQLAMACCSPSPSVRPNIKQVLKKLEEIMF

SEQ ID NO: 180811 - protein, 59 aa, Glycine max
  unsure (1)..(59): unsure at all Xaa locations
  Clone ID: PAT_MRT3847_134287C.1.pep
NPKNKEQKEICKXSLPQLSYNNGPHNLIGLHITLQELQFIDVVSSYAKNGILLQFSLVP

SEQ ID NO: 180812 - protein, 59 aa, Glycine max
  unsure (1)..(59): unsure at all Xaa locations
  Clone ID: PAT_MRT3847_134288C.1.pep
VQGILISNCPQLCSEILDKLNHPFLLAXLYASFQTKTHVCLITNYCPGGELFQLLDRQF

SEQ ID NO: 180813 - protein, 54 aa, Glycine max
  Clone ID: PAT_MRT3847_134289C.1.pep
RKQVRGQVLLSNAFGMKHSELRNTYGEGSITYAIAMNIKTAYPIVGTRVFRCCY

SEQ ID NO: 180814 - protein, 53 aa, Glycine max
  Clone ID: PAT_MRT3847_13428C.1.pep
YGCEKTTEGCPNYWPPFLPLYSCPTSLFFFFPSIQMFIISEMLGTFTLTFLYA

SEQ ID NO: 180815 - protein, 194 aa, Glycine max
  Clone ID: PAT_MRT3847_134290C.1.pep
MRSPQPLRSGGDNSCSPSHNPRFHSTVAEHKLRRFNLLILVFRLTSFSFSLASSVFMLTNTRGSYSPHWNHYDTFRFFLAANAIVAVYSVFEMGASVWEISRGVTLFPEVLQIWFDFGHDQVFAYLLLSASAAGTSMARTLKEMETCRASNAFCVQTDIAIALGYAAFLFLGFTSLLTGFRVVSFIINGSRFHL

SEQ ID NO: 180816 - protein, 131 aa, Glycine max
  unsure (1)..(131): unsure at all Xaa locations
  Clone ID: PAT_MRT3847_134291C.1.pep
TISIPGATGDNRAGAGMXVLTCTRLKSMAGVLTRKTXHDITYIASNGGTLQYMQIGPLIDTMKYSTLPYLPDMKSXQQVKESDIXKRKGWIPCXNYEXEHGRENAQHSMSPRYXDGHYSTENKQTMNGSTD

SEQ ID NO: 180817 - protein, 75 aa, Glycine max
  unsure (1)..(75): unsure at all Xaa locations
  Clone ID: PAT_MRT3847_134292C.1.pep
SXAXXXXXAQPKIHLRRGXXXXXSVVRRXXXXXXXRXXMXRXPXXXLEFDSDXXXSXXXVXRXCSSRIPXLRTRX

SEQ ID NO: 180818 - protein, 182 aa, Glycine max
  Clone ID: PAT_MRT3847_134293C.1.pep
MKFTVGDSRVRKMGGSRLSKPKSGSASGSTNCFMLYARALSITWGDTPEYWIWVQQKETSGTIVELAKLKRVCWLEVHGKFDTRKLSLGILYQVSFLIMLEESSQGWEVPINVRFVLPGGKRQQHKVNLNEKLRESWMEILVGEFVASEKDAGEMEISMYEYEGGMWKTGLVIQGVVIKPKN

SEQ ID NO: 180819 - protein, 63 aa, Glycine max
  Clone ID: PAT_MRT3847_134294C.1.pep
ARLVERFASCSSSHGTYCSLSSCHCISMSFSMHSLLMELVIALLTEQRFPSSLFQSNINKLRL

SEQ ID NO: 180820 - protein, 394 aa, Glycine max
  Clone ID: PAT_MRT3847_134295C.1.pep
MLLSPNEAGSLGPVTDGAILQFLAGFANIHQVLQPLKVPAFSFAWLKLFSHRSFFPKMLTDNVQKGWPYFQRLRVYLFQFMVPILMHDEHTDTVRVFYNLTLRVLLVLLHDIPEFLSKYHFTFLIVNPPSCIQMRITFIELIKNPMYNPGPPTPHMMCAWLRETTQSPRILSEVDAALKAKQMKVDVDEYLKTRQQSSPFLSELKDKLLLSPNEAASAGTRYNVPLINSLVLYVGMQAIHQLQGRTPHTQTSANAFPLAVFSVGAALDIFQTLIVDLDTEGRYLFLNAIANQLRYPNTNTHYFSFILLYLFAESNQEVIQEQITRVLLERLIVNRPHPWGLLITFIELIKNPRYNFWNRSFIRCAPEIEKLFESVSRSCGGPKPVDDSMVSGWV

SEQ ID NO: 180821 - protein, 84 aa, Glycine max
  Clone ID: PAT_MRT3847_134296C.1.pep
LDACAVWVFLTVNFSSSALPTPLWIELLLWTDSRCNSSYNTPPTPLLIEPNVAGEPDLQFLSQHASYISMGVTTPVWGGSTFYL

SEQ ID NO: 180822 - protein, 102 aa, Glycine max
  unsure (1)..(102): unsure at all Xaa locations
  Clone ID: PAT_MRT3847_134297C.1.pep
IIHLLVDFYSGLFTWAFLCINLGGILCRAESCIIXVASKVPKALMGIGTGTGGMAFMMMPSETLRSLTDIPKMLWSYTMCYITFADWARHGHYKNAMLGEDI

SEQ ID NO: 180823 - protein, 67 aa, Glycine max
  unsure (1)..(67): unsure at all Xaa locations
  Clone ID: PAT_MRT3847_134298C.1.pep
MEKDEEGTKSTSGQLSRLFHHAGSVYDAXFSCAHNXVAQVLLTLPYSLSQLPDELCHHKYFQIFTQI

SEQ ID NO: 180824 - protein, 65 aa, Glycine max
  unsure (1)..(65): unsure at all Xaa locations
  Clone ID: PAT_MRT3847_134299C.1.pep
MLPYLYAMVHDSSVXSIPGDSVIGVKSTTINKMCAYGLNSGISGSXILGTIPQSILQPICLEPNG

SEQ ID NO: 180825 - protein, 58 aa, Glycine max
  unsure (1)..(58): unsure at all Xaa locations
  Clone ID: PAT_MRT3847_13429C.1.pep
DKNEKMDLGTRKKNIFSVPKIFSETPPFIGGKISQYLPTLLRLYYTLFFXASVKRTPF

SEQ ID NO: 180826 - protein, 72 aa, Glycine max
  Clone ID: PAT_MRT3847_1342C.1.pep
MHPTLSYACGSSSSRFGSSRLREDDRMVVHWELLILAIDSPFHSIYFFNFSNVILYFYIEKKNQQHFITSLN

SEQ ID NO: 180827 - protein, 36 aa, Glycine max
  Clone ID: PAT_MRT3847_134300C.1.pep
IRNLIVVKKTLILEMCTKIGFPDVRSYVASAEKASD

SEQ ID NO: 180828 - protein, 45 aa, Glycine max
  Clone ID: PAT_MRT3847_134301C.1.pep
TKSNPHFKNKTISRFFSSHIQNKIKYLTGAVIETLVFQKIKLLSI

SEQ ID NO: 180829 - protein, 138 aa, Glycine max
  Clone ID: PAT_MRT3847_134302C.1.pep
MASKTCSSLALFLTLNLLFFSLVSACGSYSCPSPKPKPKPKPKPNPNPSPSGASCPRDALKLGVCANVLKGLLNVTLGQPPVTPCCTLLDGLVDLEAAVCLCTALKANVLGINLNLPISLSLLLNVCSRQVPRDFQCA

SEQ ID NO: 180830 - protein, 83 aa, Glycine max
  Clone ID: PAT_MRT3847_134303C.1.pep
SIKFLLINYNTSFIPNSPFSSKIFSPTPNTFPISIPTNSLHKLIQIFHFLNHNYSFLLTFHITLSFKFFHLSHPLKIPYYKFI

SEQ ID NO: 180831 - protein, 63 aa, Glycine max
  Clone ID: PAT_MRT3847_134304C.1.pep
KLIMRSRNSQPGQSLVSKSICASYRRYHGRYRRHGYIRRASPNHVNGLYCDSNCWKKSSGISP

SEQ ID NO: 180832 - protein, 50 aa, Glycine max
  Clone ID: PAT_MRT3847_134305C.1.pep
SSMRTDTRPLEETYKTMADKTDTNTIGLKLHDYSQVGPNDSTENSNSLTG

SEQ ID NO: 180833 - protein, 390 aa, Glycine max
  unsure (1)..(390): unsure at all Xaa locations
  Clone ID: PAT_MRT3847_134306C.1.pep
QFPPGLSVPNSQMVCRLQHSLYGLKQASRQWFTKLLGLLTSHCFKQSHSDHSLFLCFTGSITTILXYMDDIILTGNSDSEIQDVIMLLDQTFKIKDLGNLKYFLGLEIARSSSGIHLCQRKYALDILSDSGMLGCRPNATPMDYSTKLQAATGTPLSAEASSSYQRLVGRLIYLTNTRPDITYAVQQLSQYMSSPTGAHLQAAYRVLWYLKGTPGSGIFLSATGTPQLRAFSDSDWVGCQDSRKSTTXFVVYLGSSLISWQSKKQSTVLRSSSKAEYRALASTTCELQWLTYLLQDFRLKFTKPATIYCDNQSAIQISINPVFHERTKHIEIDCHIVRQKVTMGLLKLLPVSSSLQLADIFTKALPPTVFQNLCNKLGMMNIHSSLRGGS

SEQ ID NO: 180834 - protein, 75 aa, Glycine max
  Clone ID: PAT_MRT3847_134307C.1.pep
IKGGLFPPIFFFSQVYHKPEGPTPRFRNLPPGPGEPPLFFFFLKKKKLFLETDPQWVLTPENFLGRGGEVKIFCS

SEQ ID NO: 180835 - protein, 47 aa, Glycine max
  Clone ID: PAT_MRT3847_134308C.1.pep
QQTSFTQFLVTFISYLLKTFANGSPNKKCRLINHSQGKAWLLGFTKR

SEQ ID NO: 180836 - protein, 94 aa, Glycine max
  unsure (1)..(94): unsure at all Xaa locations
  Clone ID: PAT_MRT3847_134309C.1.pep
DTLGIAKVKMAMHLQALTISLNTARSPPPSLAPATNAGLRPHFNPLALKSSFFSGSLNLLLHXXQQLTSGAAXXSMRVASKQAYICRDCGLASS

SEQ ID NO: 180837 - protein, 36 aa, Glycine max
  Clone ID: PAT_MRT3847_13430C.1.pep
LMFECFYFASRLAIKLSIMLPRVVSTQPILDRESIP

SEQ ID NO: 180838 - protein, 90 aa, Glycine max
  Clone ID: PAT_MRT3847_134310C.1.pep
PSRSGHSIMAAQRVLAPAIHSVLLTVALAFARETLTLHLDPPAPTPDSREPTAAGNYIGWITGSRPWATTLQPYLWPRRPRLLHFSGNYS

SEQ ID NO: 180839 - protein, 95 aa, Glycine max
  Clone ID: PAT_MRT3847_134311C.1.pep
KFNFSALSFPSFWFLSTCQWLVHGAPLVRMVLNFSSLFSSILEASVVFSLVDAICLFCFCCCLLFLFFAFPFFFFGALFVLFFFSLSSFVELVCL

SEQ ID NO: 180840 - protein, 54 aa, Glycine max
  Clone ID: PAT_MRT3847_134312C.1.pep
KHLLPILTLASSITRQTLNWFSFTVRNLLLKSSFTSIFFHFPPNPIQVYNFQLT

SEQ ID NO: 180841 - protein, 68 aa, Glycine max
  Clone ID: PAT_MRT3847_134313C.1.pep
WTMQGLKLNYTGKFPFFMDMETHFLLKMIASSAVVAVFVDLCIVSFMMIVLGNSRDKNCWLCYHCLLF

SEQ ID NO: 180842 - protein, 77 aa, Glycine max
  Clone ID: PAT_MRT3847_134314C.1.pep
NIHYCFLKIPIRWLYCDSYFISANWVGRARRTLQDPKPEREEEKQNRQRCLCWAGCGGWWFSGWWHAAVHDVVSYGF

SEQ ID NO: 180843 - protein, 140 aa, Glycine max
  Clone ID: PAT_MRT3847_134315C.1.pep
DNHFFLVCWLVFFTWGSVGFVRLSCRLRSVWTWGLLLLAGSVSSVEVEGDSVVLRRGVLVIEGFPGALNGNVTLNGPRRTHTSGGKRFPGDILGEIPPGRTRDTTDVLALARDRIGRRRRSAPSIIFSRPCKHINQPKGS

SEQ ID NO: 180844 - protein, 204 aa, Glycine max
  unsure (1)..(204): unsure at all Xaa locations
  Clone ID: PAT_MRT3847_134316C.1.pep
AKFQSIILPDKDTSLCDKDIFNGYLVLFFTKKGLPLPCSLNLPMQIDFKHQVYIQDLKPWYFPLPSNTCSVSPGSNLDFLNMVYRVVLSSPVMPDLIVDYDMSRHTCSIVHQEEVNCHSVGQSCIPTFVLNKNKSKIQEAHSDNKECATNXNSQRWKDFSHVYWCQRAEVIFHDGERGSLTIAYSRESWKKGQSPGLLVGYGAL

SEQ ID NO: 180845 - protein, 66 aa, Glycine max
  Clone ID: PAT_MRT3847_134317C.1.pep
SNHLNHIHTYPPPSFSFLTQIHITSLLFNYYHISFPLLTYHLKNSLIYFPQQHIHHLILNPIIKLT

SEQ ID NO: 180846 - protein, 65 aa, Glycine max
  Clone ID: PAT_MRT3847_134318C.1.pep
LCMVSLFTCNYEHLLASSPATCLENLHFPAEDHLNMPRPLNFSFLRHLFPRENRYMLPEHCYPQG

SEQ ID NO: 180847 - protein, 49 aa, Glycine max
  Clone ID: PAT_MRT3847_134319C.1.pep
YLCKYPTLLAAPDLQLDSDLLLWCSFPLAITSKERLVHGASDGSDPTGI

SEQ ID NO: 180848 - protein, 129 aa, Glycine max
  Clone ID: PAT_MRT3847_13431C.1.pep
MAMATAMVAERERSKPLHNFSMPCLKWGNQRFLRCVKDSTMIDLKPWTLRTKAPHPHHTNQLQKKMEERAKFSVSLSKEQVEQDFWAFLGTRPPRRPKKRPRIVQKNLDTLFPGLWLTDVTAESYKVPE

SEQ ID NO: 180849 - protein, 387 aa, Glycine max
  Clone ID: PAT_MRT3847_134320C.1.pep
SCACKVLWIVWREDDRKGSGKIVICDRGLSPRVQKGNVVRSAGGVGMILTNTEANGEELVVDSHLLPAVAIGEKEGKELKSYVLSSKSSTATLAFKGTRLGIKPSPIVAAFSSRGPNFLTLDILKPDLVAPGVNILAAWSEAIGPSGLKIDNRKVKFNIVSGTSMSCPHVSGIAALVKSRHPEWSPAAIKSALMTTAYVLDNTIKTLRDASTAKPSSPYDHGAGHIDPIRALDPGLVYDIVPQDYFEFLCSQNLTPTQLKVFAKYSNRTCRHSLASPGDLNYPAISLVFTLKTSTSFPSPVIVHRTVTNVGPPDSKYHVVVSPFKGASIKVEPETLNFTGKHQKLSYKITFKPKVRQTSPEFGSMEWKDGLHTVRSPIMITWLPPPM

SEQ ID NO: 180850 - protein, 78 aa, Glycine max
  Clone ID: PAT_MRT3847_134321C.1.pep
FRASRSRSSVLGRMVLFFCFFWKAREPNRRCETVKSGEENKIEEDWKEILMVAGREAKQRGEEEEKRFLEPRQRCERA

SEQ ID NO: 180851 - protein, 60 aa, Glycine max
  Clone ID: PAT_MRT3847_134322C.1.pep
QKPCNLILRGSIASTYDCVISYYLGHMITCFEGMSIKVTVVVLNPHFPLLLLPRDSNIEV

SEQ ID NO: 180852 - protein, 59 aa, Glycine max
  unsure (1)..(59): unsure at all Xaa locations
  Clone ID: PAT_MRT3847_134323C.1.pep
SRRLGIRLEXRXVGXFXPKIXXKXXNXVDPVXRNXIXVPAGGXTAFXFRAGXPGVXFMX

SEQ ID NO: 180853 - protein, 93 aa, Glycine max
  Clone ID: PAT_MRT3847_134324C.1.pep
ELNWQKQDPHSWDVIFPKKGGGPKKGFKKGSFKGANQNSGHLSFLIDNPQQFTVFDIFLGIFQNFENAGKTFKPAFFVPQGTAKFFENAESSA

SEQ ID NO: 180854 - protein, 65 aa, Glycine max
  Clone ID: PAT_MRT3847_134325C.1.pep
KKNFFGRGNKIVGIIGAQWGVLFGAPKGENRPFKFPNPMGPIGGALPLFQQLRKGLPPSKWKKGW

SEQ ID NO: 180855 - protein, 44 aa, Glycine max
  Clone ID: PAT_MRT3847_134326C.1.pep
RIGIVYFYIVLVFLFLYFFFFILSFFFFFFFFYYIFFYFFFFFF

SEQ ID NO: 180856 - protein, 85 aa, Glycine max
  unsure (1)..(85): unsure at all Xaa locations
  Clone ID: PAT_MRT3847_134327C.1.pep
CQTSFNLIYAQCRNFYQXCPNLRSHGLAYSKYLAKLNISISRCFCNIILPRRRKRNFAHKILCTRDLKGCFFDIVQNNNNLMSIY

SEQ ID NO: 180857 - protein, 126 aa, Glycine max
  unsure (1)..(126): unsure at all Xaa locations
  Clone ID: PAT_MRT3847_134328C.1.pep
KKGGGVFPFPPFKHPPPKGAQKIPKTPWVKRGKPWNLHRETGGPPPPRGFSPXKIKGPKTPPPGPGALEPEPECFCPGLAPLLNPPLGWGGTQFNPKKTGGGVPKTENPPPGGPHTPRGPRKFFPK

SEQ ID NO: 180858 - protein, 59 aa, Glycine max
  Clone ID: PAT_MRT3847_134329C.1.pep
KQQLNPPLFINFLFHVNEKLLIKLRMLFGKSSTQLNIQIDQLYINLPKKQQNLFLEILV

SEQ ID NO: 180859 - protein, 170 aa, Glycine max
  unsure (1)..(170): unsure at all Xaa locations
  Clone ID: PAT_MRT3847_13432C.1.pep
PLIGIXKAVLTTXKHHKDXXXGXXEXAKRNPFXIKRAYFXXVTREKGSFEWFKGVMNXXXENAKKGVIDLPTYGPSVSKKGDVRSAWIPMLRFFPHAKNGVDIVSGPRVKPLFASPTGRKVFNHAAFNPLAQRVGVFSCGAHGWVGDLKKLSLAFSRKPSPKFVFPKENF

SEQ ID NO: 180860 - protein, 147 aa, Glycine max
  Clone ID: PAT_MRT3847_134330C.1.pep
MEGEEGGIATKKRGKEGETETTRYKGIRMRKWGKWVAEIREPNKRSRIWLGSYSTPVAAARAYDTAVFHLRGPSARLNFPELVAAEGPAADMSAASIRKKATEVGARVDALHRQHPHALPAGEFADRVDLNKMPEPENSDCDYWDRD

SEQ ID NO: 180861 - protein, 57 aa, Glycine max
  Clone ID: PAT_MRT3847_134331C.1.pep
SKVTYLEISLEHKVHQSQECHTILNHCLLDVAKDFLLMEILSKICQQGDLSYQMMRT

SEQ ID NO: 180862 - protein, 245 aa, Glycine max
  Clone ID: PAT_MRT3847_134332C.1.pep
FPVHQLSGQKVCFVMFTDGISARPLSSEGHVPDRMGFIGFWKLVVVKNLPYDDMRRVGKIPKLLPHRLFPFARYSIWLDSKLRLQLDPLLILEYFLWRKGYEFAISNHYDRHCVWEEVARNKKLNKYNHTVIDEQFAFYRADGLEKFDASDPNKLLPSNVPEGSFIIRAHTPMSNLFSCLWFNEVDRFTPRDQLSFAHTYQKLRRMNPDKPFHLNMFKDCERRHIAKLFRHRLDEKRINRQKTTE

SEQ ID NO: 180863 - protein, 52 aa, Glycine max
  Clone ID: PAT_MRT3847_134333C.1.pep
WLKVNLEQEETLLSLVSLVCRSMMGYRNRVGIHLMPSLSLDSPASFALLHGI

SEQ ID NO: 180864 - protein, 85 aa, Glycine max
  Clone ID: PAT_MRT3847_134334C.1.pep
QNHIVFGDSHMLQEMWNSETLPDWYFRNLTSMVVEGCGFLIDGILPSHLLHFLSNLKKLQVRKCNSLKAIFSMGPQGSLSHLEQL

SEQ ID NO: 180865 - protein, 67 aa, Glycine max
  Clone ID: PAT_MRT3847_134335C.1.pep
ARGHLFVEPQSKVYPGMGIGEHSRDSDLEVNPTKARALFYMRTTSTEVQVRMSPKQQFSLDKVIAYV

SEQ ID NO: 180866 - protein, 158 aa, Glycine max
  Clone ID: PAT_MRT3847_134336C.1.pep
MARVKHTPASRKSAKKQAPRASTSTQPPPQSQSPATRERRRAQQVEPQQEPEAQGRKKRRNRSGTVALREIRHFQRSCELLIPAAPFIRCVKQITNQFSTEVSRWTPEAVVALQEAAEEYLVHLFEDGMLCAIHARRITLMKKDIELARRLGGIGRPW

SEQ ID NO: 180867 - protein, 96 aa, Glycine max
  unsure (1)..(96): unsure at all Xaa locations
  Clone ID: PAT_MRT3847_134337C.1.pep
AAAKAMLFVSGITIGSAYFDCLNMTEMPVDCSGNMRHLIVEXCIARNLLDXSAYLWPGYVNGRINQIPQCMPAQVPGWSSFMKGTPLTSVMVNALV

SEQ ID NO: 180868 - protein, 49 aa, Glycine max
  Clone ID: PAT_MRT3847_134338C.1.pep
MNCSVPFDKKYCLAIKFLVEFGPNRVGIVQIIDFNGQTHSKPSLYLEQP

SEQ ID NO: 180869 - protein, 114 aa, Glycine max
  unsure (1)..(114): unsure at all Xaa locations
  Clone ID: PAT_MRT3847_134339C.1.pep
EALNWNYKNFQSKRDSQAMMXDVGCPATIAQRFQQFQVLLQRYVENEPYEHGRRPEIYARVRHLAPKLLLVPEYRESDDDQRDDNGIHSKISSASFLVIMEDGIRTFMNFLKAD

SEQ ID NO: 180870 - protein, 94 aa, Glycine max
  Clone ID: PAT_MRT3847_13433C.1.pep
YPCGATALSTDVVTDPDVVCAPSERPPRAHYPPRAGATYRVHTQRGHIARASHPRAPNCVAAKNTSPLIHHTVFRDLEHPQTHVRPPVSSSSQQ

SEQ ID NO: 180871 - protein, 296 aa, Glycine max
  Clone ID: PAT_MRT3847_134340C.1.pep
MILKPCSLESQSLNLNIWDYSDSESGPASSWSTLANKSLICRPLPLDIGSCTCFIVNEPPPQGLSGGTFFSLYTNEGHGRQNRKLAVAHHKRRNGRSHFILAQNLRGLLSHSDDSFLGTVTANLIGSKYHIWDQGYLHNSRAKQPKPPLAVVTYIPTVTTCTGSHRSMRAYIPKHQTMSLKSTTQVQHIKGLPSNWMGKPDKVHQLFSKVPLYNKISKQYELDFRDNKGKAGGGFRIQRSVKNFQLTLEENGRQTILQLGRVEKSKFVMDYSYPLTGYQAFCICLASMDAKLCCTL

SEQ ID NO: 180872 - protein, 44 aa, Glycine max
  Clone ID: PAT_MRT3847_134341C.1.pep
ISRFHFLAHNHHPLSPSTGPHGLSPLSFPLLTTIWIPTFTTPIP

SEQ ID NO: 180873 - protein, 66 aa, Glycine max
  Clone ID: PAT_MRT3847_134342C.1.pep
THMSASSGNLDPSASAISFTNFTFTTSPFRTTSFYGIGASALDQRNPRHGGLSDRSGASVPTLIPE

SEQ ID NO: 180874 - protein, 318 aa, Glycine max
  Clone ID: PAT_MRT3847_134343C.1.pep
MAYYRDDRFATFEQFYRCYPVSFIEKPDLEKGDKIIMPPSALDRLASLHIEYPMLFQIKNPSAERVTHCGVLEFVSDEGIIYIPYWMMENMLLQEGDIVKVKNTNLAKGTYVKLQPHTKDFLDISNPKAILETTLNSYSCLTTGDTIMVPYNNKKYYIDIVETKPSPAVSIIEPDCEVDFAPPLDYKEPEKQAKPVVFDRKRPKVEDEPPTKIARLTPFTGSGRRLDGKPSAPSVEQTSSPELKQRQTDKEIKGSDSKSSNTVSRRHSGKLVFGSNATTSDIQTTPKVSQENTSQEKSQKEEEPKFKAFTGKKYSLKS

SEQ ID NO: 180875 - protein, 75 aa, Glycine max
  Clone ID: PAT_MRT3847_134344C.1.pep
SAPSVEQTSSPELKQRLTDKEIKGSDSKSSNTVSRRHSGKLVFGSNATTFDIQTTPKVVLSSGNLLERQRKALNL

SEQ ID NO: 180876 - protein, 55 aa, Glycine max
  Clone ID: PAT_MRT3847_134345C.1.pep
NQGTIYPKMCDMIKIFKFLNLQWRHFNYILWMNVNIYHISLLKLIPFCGFLAAVP

SEQ ID NO: 180877 - protein, 75 aa, Glycine max
  Clone ID: PAT_MRT3847_134346C.1.pep
RTVINFLSSYLFYFAIEIRRKLSPISITYVLYFLTTPPIISYFLPFFLLVPPPPPPKEGGRHTVMTGNLPWNGYR

SEQ ID NO: 180878 - protein, 50 aa, Glycine max
  Clone ID: PAT_MRT3847_134347C.1.pep
SRLSSSRRVSPCPDIPERSIASSLACSHIRFYAALKPPHVNLDKHLFASS

SEQ ID NO: 180879 - protein, 66 aa, Glycine max
  Clone ID: PAT_MRT3847_134348C.1.pep
LAGIWPLCGFCRGCSRVGTDCSCRIAICTCMCQGILCVRSVMWSDYAVFDGSPLHVKNPPFSFGPV

SEQ ID NO: 180880 - protein, 56 aa, Glycine max
  Clone ID: PAT_MRT3847_134349C.1.pep
SILTEFHLPHLMDFRMLIHANSVMEVFRVESLVPSFCVLSISCKSVTFSCCRCICD

SEQ ID NO: 180881 - protein, 144 aa, Glycine max
  unsure (1)..(144): unsure at all Xaa locations
  Clone ID: PAT_MRT3847_13434C.1.pep
TKKPSITRGKEKGHVNVXVIGHVDSGKSTTTGHLIYKCGGIDKRTIEKFEKEAAELGKSSFKYAWVLDKLKAERERGITIDIALWKFETPKYNVTVIDAPGHRDFIKNMITGTSQADCAILIIATGIGEFEAGISKDGQTREHA

SEQ ID NO: 180882 - protein, 111 aa, Glycine max
  Clone ID: PAT_MRT3847_134350C.1.pep
KKNPPGGQKTKPPSPGVCHFLNLIGPPRFPPCKRAVGAPPLNWVWSLLLPPQVYPFIFPLVFFLEFLGEKNFSPETPFSLFFPKFYYSPHKKKLNAPKDPAGISRLTPPPL

SEQ ID NO: 180883 - protein, 78 aa, Glycine max
  unsure (1)..(78): unsure at all Xaa locations
  Clone ID: PAT_MRT3847_134351C.1.pep
LSXRWGKEKVYCLCEGACSMEYRTPSYSCVRAKHYRGNPCWLALSLRSVFSVYEALECIPIGWSYDSSRVQALVLFSG

SEQ ID NO: 180884 - protein, 71 aa, Glycine max
  Clone ID: PAT_MRT3847_134352C.1.pep
LYPLSKAVYFSQKLFFFFKGLPSGPQLVKPNGALFPKLIPLPELGNVGPWSLKPFFFRVFPFNPVADHFLV

SEQ ID NO: 180885 - protein, 92 aa, Glycine max
  Clone ID: PAT_MRT3847_134353C.1.pep
AENPIYLWSWIFLPSMAGVFCTPLFSPFMEIKCQKLLIRRVVMEPPTKNRLKAYGKFIFSGSERRSRGQYIGFFYRVPFWELKALVFGGFLV

SEQ ID NO: 180886 - protein, 71 aa, Glycine max
  Clone ID: PAT_MRT3847_134354C.1.pep
KLPIEIHSSHTVWDVCELIGRDPIPFPDVPPNTPWPHPCDSMTCFQRPRRRRLFSILNASPSSRSLQFSSS

SEQ ID NO: 180887 - protein, 109 aa, Glycine max
  unsure (1)..(109): unsure at all Xaa locations
  Clone ID: PAT_MRT3847_134355C.1.pep
AAAKTLAKNPALARDPRQLQFEADINRLFLYTGYNLLGKNADEAYAEEIIVIANKACFADQQTQVKENXHSEIKAFWTYMDEMLLPNEKRVNDPMALSQHENSSPHHSG

SEQ ID NO: 180888 - protein, 78 aa, Glycine max
  Clone ID: PAT_MRT3847_134356C.1.pep
LGRTSHRRWNRWPGLLGCLYQQHPRCSFPPLFSRGGQIKIKNKLCIIEFIWNLVLCKDVLPGVFIQIHPPGMDWFLGS

SEQ ID NO: 180889 - protein, 93 aa, Glycine max
  Clone ID: PAT_MRT3847_134357C.1.pep
LVTNLNNSNGTPFAVSCWILWKSSNALIFWDIRWSVWQIINQVHILHSDVIKVLGHPKQATTTRLVSWEPLSLPFVKLNTNNNLGDSGFGGII

SEQ ID NO: 180890 - protein, 51 aa, Glycine max
  Clone ID: PAT_MRT3847_134358C.1.pep
AAQYGVSAPQVLATLQSLVEGEKITQIVEGGRRFALVLKLPDSARSLDGLS

SEQ ID NO: 180891 - protein, 34 aa, Glycine max
  Clone ID: PAT_MRT3847_134359C.1.pep
NLVQSFNIYIAFEIWNFISFKMLFDKLFIYRRMK

SEQ ID NO: 180892 - protein, 95 aa, Glycine max
  Clone ID: PAT_MRT3847_13435C.1.pep
PQHIYIYVSVSIEEHNHFQFPPVVAITDVYMLELTHCSLRKVTLDYNNALTFSAEIYRGLTDISGHYIRVPACNSTYKMDPQRMTSATDYTDNVI

SEQ ID NO: 180893 - protein, 89 aa, Glycine max
  Clone ID: PAT_MRT3847_134360C.1.pep
QTAIINSITLHSCLQAPTSFYSLLLFFSLAPNSPSPIHSLSPHLLPNFRQILDRNRRSEANATPCRSLLEGGLDFHNFNEYLLASSKIT

SEQ ID NO: 180894 - protein, 41 aa, Glycine max
  Clone ID: PAT_MRT3847_134361C.1.pep
FGPGPVLCDSARWQVGTLAGPLVALPLTRPEDGQAHHHGML

SEQ ID NO: 180895 - protein, 83 aa, Glycine max
  Clone ID: PAT_MRT3847_134362C.1.pep
LPSSEPEANMGTLFFFHSPIPQFSLPSMPKPIALPPLSCLRNNGDVNSLHEQKSEGNKNVDMSQSMCDDDQNVKQDNIWQLFK

SEQ ID NO: 180896 - protein, 41 aa, Glycine max
  Clone ID: PAT_MRT3847_134363C.1.pep
FHLQVSILLFTPVSSDSPLSILLVPAIIFLGLQTGFLAKKR

SEQ ID NO: 180897 - protein, 65 aa, Glycine max
  Clone ID: PAT_MRT3847_134364C.1.pep
CLHVGCGSLLDHVYLMHSALVVRSIGYVNVCYNNVRYMSVCELCEYRYDAGTGSVSSAYTWAIYD

SEQ ID NO: 180898 - protein, 100 aa, Glycine max
  Clone ID: PAT_MRT3847_134365C.1.pep
NSARAATRRRQKGGFDINRYAERMKEDDKKTPSLWTRENSPSSVPTHAPLDSTRLESDTDASDNEKIDSSPDPVMDTGIINPDQKILVNEGEKNASADIH

SEQ ID NO: 180899 - protein, 316 aa, Glycine max
  unsure (1)..(316): unsure at all Xaa locations
  Clone ID: PAT_MRT3847_134366C.1.pep
MSVDPKRSASNGQEKMLPSLEQQALINEVRKLIGPQSGKASIFWIDXISRYLRARNWNVKKAVKMLKLTLKWREEYKLVXHRRTVLVMRRSRQNSKSTPXTRNSAKGQIKYLVYCMENAILNLPPEQEQMVWLIDFQGFNMSHISIKVTRETAHVLQEHYPERLGLAILYNAPKFFEPFFTMVKPLLETKTYNKVKFGYSDDQNTKKIMEDLFDFDHLESAFGGNDDTGFDINRYAERMKEDDKKTYSLWTRENSPPSVPNLALSLDSTRLESDTDASDSEKIDSSPDLVMDTGIINPDQKSLVNEGEKNASADIH

SEQ ID NO: 180900 - protein, 46 aa, Glycine max
  Clone ID: PAT_MRT3847_134367C.1.pep
RRSESLKVGSKFQTRSLIHGFRPLLTRRTKMPLDELMNKKQKRSSP

SEQ ID NO: 180901 - protein, 137 aa, Glycine max
  unsure (1)..(137): unsure at all Xaa locations
  Clone ID: PAT_MRT3847_134368C.1.pep
RRRRNRAGWPHAPPFCSVTRVDPSYIILLIRKXLLPLDSASRSSLSEVASLGPNQEGEEEGASPSASVSSDENVKSSKNKSENMDVDVSAEFSRGECQDTGDGIEHSGVSVGEDAWEEYGCILWDLAASKTHAGTHG

SEQ ID NO: 180902 - protein, 164 aa, Glycine max
  Clone ID: PAT_MRT3847_134369C.1.pep
MSVDSKKSASNGQEKMLLSQEQQALINEVRKLIGPQSGKASIFCSDACISRYLRARNWNVKKAVKMLKLTLKWREEYKPEEIRWEDIAHEAETGKIYRTNYIDKHGRTVLVMRPSRQNSKSTKGQIKYLVYCMENAILNLPPEQEQMVWLIDFQGFNMSHISIK

SEQ ID NO: 180903 - protein, 38 aa, Glycine max
  unsure (1)..(38): unsure at all Xaa locations
  Clone ID: PAT_MRT3847_13436C.1.pep
GDSKVPFPAALWKVKGIKNAKLGMFPMHGFXVQAYITG

SEQ ID NO: 180904 - protein, 87 aa, Glycine max
  unsure (1)..(87): unsure at all Xaa locations
  Clone ID: PAT_MRT3847_134370C.1.pep
NEPRNVVVACEFDTSTVHFIKNADHEELRXLRSGTSGTGYHGKWTGSNDAFKXIKKCCFAGRSXEQEILTIELXWGKHDILSKLNHP

SEQ ID NO: 180905 - protein, 23 aa, Glycine max
  Clone ID: PAT_MRT3847_134371C.1.pep
STDQLLKQLSVLLSPFCSLLTAV

SEQ ID NO: 180906 - protein, 181 aa, Glycine max
  Clone ID: PAT_MRT3847_134372C.1.pep
MNSNTTGAAAMNDQLSNTTSIFGLRLWVVLGVCVGAAIVLILFLISVWLAFKRSSKTNPVSIPDVSKEIQEIRLDTNPTLQPEPYPEPDPVPPTEEETNSLGYHRIQFEIGKNHRISYPERALLRSSSNDPSSGEVQLPSVIPEVSHLGWGHWYTLRDLEDATNGFTPENDIGEGGYGIAH

SEQ ID NO: 180907 - protein, 68 aa, Glycine max
  Clone ID: PAT_MRT3847_134373C.1.pep
PLSLERVQSHINLTLESHRIQVPYLEIGPQHSTTLHRPQPLLPCIAPVKHCNAIIATSTTCLQLGDIV

SEQ ID NO: 180908 - protein, 65 aa, Glycine max
  Clone ID: PAT_MRT3847_134374C.1.pep
RRMSYLHISLAADGPGTCSCIHAYRHGCSSASHGITRCTAPTCQMCCLSWRHAPCSLSLQLGASQ

SEQ ID NO: 180909 - protein, 59 aa, Glycine max
  Clone ID: PAT_MRT3847_134375C.1.pep
MCVCLFVVVVTLNGCMFKRTKKYILLMQSQTINQSVKRHDSGLECIGICANQEPDTALI

SEQ ID NO: 180910 - protein, 149 aa, Glycine max
  Clone ID: PAT_MRT3847_134376C.1.pep
GKKKKKSLFGGNFPAIKGAPGLGFYKGGPFPLTGVFVPNFPLGLAAPFLGPWGWAPPPISWGGPEFFRYPRRGAKLKAGPLKTPPPRALGPPKKGPRGATGGALFPKTGRPKMGGAFFLAPLGSNSSTPWVLGGASKRPGFWVGPRGFF

SEQ ID NO: 180911 - protein, 45 aa, Glycine max
  Clone ID: PAT_MRT3847_134377C.1.pep
PRAIRLRTSQPLSDKWPPNDASRDQPPSESESAHLSNTQFRIRVI

SEQ ID NO: 180912 - protein, 163 aa, Glycine max
  unsure (1)..(163): unsure at all Xaa locations
  Clone ID: PAT_MRT3847_134378C.1.pep
MLKQILSKLPRKSLKPDSDELTRGDSARSADSPRAAGRSYKLHGVSSSTAKRASSSAVFPASMVSGIEPLVPFKDVPNAEKMNLFVSKLSLCCVTFDFTDPGKSIADKDVKRKTXVELVDFVACGTLRFSEPAILAMCRMCAINLFRVFPPNYRARGGGENDD

SEQ ID NO: 180913 - protein, 108 aa, Glycine max
  Clone ID: PAT_MRT3847_134379C.1.pep
GSPPPRKTRSGSPFPKTPLFYVFTDAKEKLPPDKAVPRKNAEGVIGVEFRNKLGMRPPPGGVAAPMGAPPPLFQTPPVVGGGRFQVSRHPGGPPPHPWGGGGTHGERG

SEQ ID NO: 180914 - protein, 100 aa, Glycine max
  Clone ID: PAT_MRT3847_13437C.1.pep
IFNIIVYVELELKVTYQIKIILCQLINKLRDQIKPFKNKIIKLYLQNKLKDLVIKPSFSKDTNTILILIGKHVSLTLTQTYAKLFQLQQNVLVFENVILS

SEQ ID NO: 180915 - protein, 73 aa, Glycine max
  Clone ID: PAT_MRT3847_134380C.1.pep
PTRPYGCEKTTEGVHSIPSPSVQHSFYFTFPRKYPWLFPSPALFLCCYSSFINHTLTRVAPGGVKYTSQTAML

SEQ ID NO: 180916 - protein, 88 aa, Glycine max
  unsure (1)..(88): unsure at all Xaa locations
  Clone ID: PAT_MRT3847_134381C.1.pep
GEKELIKISLVHNRVALKVCLLLPSLVGVRCVVMDMSFLINDESATYDDDEYXNQCSDFCLYKRTMNTECTCHNIRLNSCDAHSCNCL

SEQ ID NO: 180917 - protein, 80 aa, Glycine max
  Clone ID: PAT_MRT3847_134382C.1.pep
MSYYDHQQQPPIGVPPPQGYPGKDAYPPPGYPAQGYPPPGYPPQSYAPQYAQQPPPRQEVGFLEGCLAALCCCCMLDACF

SEQ ID NO: 180918 - protein, 158 aa, Glycine max
  unsure (1)..(158): unsure at all Xaa locations
  Clone ID: PAT_MRT3847_134383C.1.pep
CFAKLTNTYCLVAIGGSENFYSVFEGELSDTIPVVHASIAGCRIIGRMCVGNRHGLLVPNNTTDQELQHIRNSLPDTVQIRRVEERLSSLGNVTTCNDYVALVHPDLDRETEEILADVLKVEVFRQTVADQVLVGSYXVFSNQGGLVHPKTCIEDQDE

SEQ ID NO: 180919 - protein, 38 aa, Glycine max
  Clone ID: PAT_MRT3847_134384C.1.pep
PKEPPERISVFRKGSSKKVRAWSPQKKSLGVWELGTFD

SEQ ID NO: 180920 - protein, 63 aa, Glycine max
  Clone ID: PAT_MRT3847_134385C.1.pep
SRDVLSPSDLIRRSPLEKEIDRSPGPRNPKHTEITKEVPERERFGAALRVDTSGSPARDGTAL

SEQ ID NO: 180921 - protein, 57 aa, Glycine max
  Clone ID: PAT_MRT3847_134386C.1.pep
LFEFKPPYINGRDWQHRDSMLGFFRVQPYLFESLVPHQRNQQKVLCVGKQRQWCWKV

SEQ ID NO: 180922 - protein, 108 aa, Glycine max
  unsure (1)..(108): unsure at all Xaa locations
  Clone ID: PAT_MRT3847_134387C.1.pep
EARQSHAYDMDALIMNTGYGACTWEVKGAXXMLAAEAHXVFDSETIPDECEVSTEEYMHDQQYKSDSKTVNQQAYFYAGDLXHHPKDAFALRLHGTCLSRIPYYKTHA

SEQ ID NO: 180923 - protein, 66 aa, Glycine max
  Clone ID: PAT_MRT3847_134388C.1.pep
EKLLHVHSVADRNNDPQLGDFIESEFLYEQVKSIKKIAEYVTQLRLVGKGHGVWHFDQRLLHDEDL

SEQ ID NO: 180924 - protein, 82 aa, Glycine max
  Clone ID: PAT_MRT3847_134389C.1.pep
MGTGAIRQRMGIQALVNKDPSILHVLRAKGSSTASKANNLLKQWDMVLAINIEPVTCSRDIENACQSLHKFDSHDGKLHLTI

SEQ ID NO: 180925 - protein, 350 aa, Glycine max
  Clone ID: PAT_MRT3847_13438C.1.pep
MSRAQDANRSFFPFGNPFRMISPKGPKISSQLLLILHAFEATLEERLKKLIPKSKDEILSLSWMTLAMQALCESHNDIKTLITELELPVHDWDEKWIDVYLDISVKLLDICIAFSSELSRLNQGHLLLHCALHNLGSSSSEQYVRACSSLDGWKQHIGSGNPRVEKCGSILDDLLRSLDLPKVKKSAKGKVLMQAMYGVKVQTVFLCSVFAAAFSGSTKNMSDLDVADVYSWAPTFKSLQDLVNGEIRVRSGRFTILNELEVVDSSVKELYPIIQGVSDAIETESLAKIVGELGRATEKLSQGLDLLTKEVDSFFQVVLTGRDALLSSLRSGATFIDSIQAGNRDAQIVN

SEQ ID NO: 180926 - protein, 110 aa, Glycine max
  unsure (1)..(110): unsure at all Xaa locations
  Clone ID: PAT_MRT3847_134390C.1.pep
FSNFFKSIHKEGAESGDRQYAERGAAPEAPCCCSATRNGGLXVKNYIATLDPVTGEAEREYWTLLRGNQGKIRGCTKNRGRGGKHGRGGKYSRSRENESAVDRPNKVRKS

SEQ ID NO: 180927 - protein, 24 aa, Glycine max
  Clone ID: PAT_MRT3847_134391C.1.pep
IKTLNDHLFCTVTGIQPCKSTVSQ

SEQ ID NO: 180928 - protein, 186 aa, Glycine max
  Clone ID: PAT_MRT3847_134392C.1.pep
MAEAEHNDPTSPEREDQTKSNKKKLRKRKRPQKTEQKQEEEKNDANIDSAQTQTEDEGENQEDTNVNNNVSSGIMSTESFSSLGLSEPTSKAIADMSFHRMTQIQAKAIPTLLTGNDVLGAARTGAGKTLAFLVPAVELLYNVQFTPRNGTGVVVICPTRELAIQTHAVAKELLKYHSLTLGLVIG

SEQ ID NO: 180929 - protein, 171 aa, Glycine max
  Clone ID: PAT_MRT3847_134393C.1.pep
PARARPVGRQDTVQLLITLMLLADLSVTLLMLLQFYWIALAAFLSVLLILPLSLLSPFPAGLNALFSKEPSRASLSRVYALWNATSLSNIGVAFICCLLHYSLSHFYHPDEASTRNVKREDDKCWLLPIILFLFKSVQARFVNWHIANLEMEDYSLFCPDPDAFWAHEPGL

SEQ ID NO: 180930 - protein, 86 aa, Glycine max
  Clone ID: PAT_MRT3847_134394C.1.pep
SLSNIGVAFICCLLHYALSHFHHPDETSTRNVKREDDKCWLLPIILFLFKSIQARFVNWHIANLEIEDFSLFCPDPDAFWAHEPGL

SEQ ID NO: 180931 - protein, 355 aa, Glycine max
  Clone ID: PAT_MRT3847_134395C.1.pep
MATQSEDYATKFLQAYTQIDDHSLRFIHSMSLKCAIDLSIPDIIHKYGQPMPLSQLIASLPIHPSKTCYIHRLMRLFTHSGFFSRHDLVENEQEVITYELTDASRLLLKDHPFSLRPLLLVTLDPSVIKSWCQFSTWLTSEDRTPFQTENGVTYFDYAKRDPKFGHFYNDAMAKDTRFASSVVIENYKEVFEGLKSIVDVGGGIGTMAKAIAKAFPQVKCTVFDLPHVVDGLQGTENIEYVGGDMFEVIPAADCIMLKWVLHCWNDEECMKILKKCKEAIPSDGKVIIMELVMEHNKEDNKLIEMQLCCDMLMMSLFAGKDRTEKEWAHLIASAGFSNYKITHIFDLYHIIVVYP

SEQ ID NO: 180932 - protein, 68 aa, Glycine max
  Clone ID: PAT_MRT3847_134396C.1.pep
ASKTAIPGCHDRQNHRRSSLSCEQLQCLGSLIILQRLEWTMQRRSVLAQSSNTVSVIILLHRSHVKCE

SEQ ID NO: 180933 - protein, 74 aa, Glycine max
  Clone ID: PAT_MRT3847_134397C.1.pep
NLTKPAKNAPLWLAIRYYAFQSLCQHEGILPPSLLLKTQLLSFAWTHYFFALVQGMFKILHLLDQQPFFEGLSH

SEQ ID NO: 180934 - protein, 140 aa, Glycine max
  unsure (1)..(140): unsure at all Xaa locations
  Clone ID: PAT_MRT3847_134398C.1.pep
QQRDVAHTVGPAHHECICTVSXGIGAIEHVLYHSVTYEVTTIXASSPRFLMSRKTXSLGVXWVIFAEGLDQIFGGYMYLYEAPHKALFHQMTIGMVXALAKHDCLRDNRSTSAWGLEARVPMLVKQCVRVAMIFGPEYNM

SEQ ID NO: 180935 - protein, 65 aa, Glycine max
  Clone ID: PAT_MRT3847_134399C.1.pep
VLDRERPPFLFLFLVYIETHSSHELMHMSPPYLPIELQDLSAELAFLELSHDTCTNPLKLSKLQA

SEQ ID NO: 180936 - protein, 352 aa, Glycine max
  Clone ID: PAT_MRT3847_13439C.1.pep
MSRAQDANRSFFPFGNPFRMISPKSPKISSQLLLILHAFEATLEERLKKLIPKSKDEILSLSWMTLAMQSLCESHNDIKTIITELELPVHDWDEKWIDVYLDISVKLLDICIAFSSELSRLNQGHLLLQCALHNLGSSSSEQYVRACSSLDGWKQHIGSGNPRIEKCGSILDDLLRSLDLPKVKKSAKGKVLMQAMYGVKVQTVFVCSVFAAAFSGSTKNMSDLNVADVYSWAPTFKSLQDLVNEEIRVRFSSGRFTILNELEVVDSSVKELYPIIQGIADTIETESLAKIVGELSRATEKLSQGLDLLTKEVDSFFQVVLTGRDTLLSSLRSGATFIDSIQAGNRDAQIVN

SEQ ID NO: 180937 - protein, 52 aa, Glycine max
  Clone ID: PAT_MRT3847_1343C.1.pep
KVGIANCVGCKNGGVLRRYKWSWLFFNGLKKRILCLEIGLCYKKSKKRTTAK

SEQ ID NO: 180938 - protein, 120 aa, Glycine max
  Clone ID: PAT_MRT3847_134400C.1.pep
THAYECGSSTAARRRQKGDRIEVSICQQKNLMSHRDSDSKRRHSKFDREASPKRYRRDSNRVTSDGGDRRNPPHHSRREPFDAAPKKSNSNDHHENPPQHLSQPPRSRSYHQYMQTIFLG

SEQ ID NO: 180939 - protein, 59 aa, Glycine max
  unsure (1)..(59): unsure at all Xaa locations
  Clone ID: PAT_MRT3847_134401C.1.pep
LWLLQKATVRXLITPPSGFLRQVLTCVRLHYCSISLINSCFSTTAKSLDHYRMTNPVKY

SEQ ID NO: 180940 - protein, 82 aa, Glycine max
  unsure (1)..(82): unsure at all Xaa locations
  Clone ID: PAT_MRT3847_134402C.1.pep
VGFGSPFPYGVLDNGFSYALPVXISLLFAGRAIFHATFFYRPSGGVASLFFLGPNVLYKFSRDNVLFFLYLFFPVSPSPFYP

SEQ ID NO: 180941 - protein, 82 aa, Glycine max
  Clone ID: PAT_MRT3847_134403C.1.pep
MPPLFFFKGPTLVFPFFFAPPSPVYRGNPFFFQGGGNYPPLIFFLFFPPMKNAPFFFFFKGFACFRDSSPPIFFLIVKKCRL

SEQ ID NO: 180942 - protein, 80 aa, Glycine max
  Clone ID: PAT_MRT3847_134404C.1.pep
KEGVKRGSFPDPQDSYFKVIHGKGSRNFKTGILTKNLLHHFFQVNNGKCLVQRKKKICLLFKWDQLPEGVSPKSGSCFVK

SEQ ID NO: 180943 - protein, 73 aa, Glycine max
  unsure (1)..(73): unsure at all Xaa locations
  Clone ID: PAT_MRT3847_134405C.1.pep
FVSKELRCTYALKWKHRLTYIDVGDEQELTDVLXGIAANHEYDSTLSADSYTTMYAEWLFGLMCCVGLLMYGL

SEQ ID NO: 180944 - protein, 45 aa, Glycine max
  Clone ID: PAT_MRT3847_134406C.1.pep
VPGGVGFHPSSEAGSVTACDRRSRLVGPAWGDWVVEGLGKDIICA

SEQ ID NO: 180945 - protein, 258 aa, Glycine max
  Clone ID: PAT_MRT3847_134407C.1.pep
STPSLTNSVDLFFPVKFKNPNPDSLSPTLTFGFVTENRMERSVDYSSEEECTEDYRRGGYHAVRVGDAFNNGRYIVQSKLGWGHFSTVWLAWDTLNSHYVALKIQKSAQHYTEAAMDEIKILKQIAEGDPDDKKCVVKLLDHFKHSGPNGQHVCMVFEFLGDNLLTLIKYSGYRGLPLPMVKEICFHILVGLDYLHRELSVIHTDLKPENVLLLSLINPSKDPRKSGAPLILPNTKDKAVSNNGTNQDNKILNGDPMK

SEQ ID NO: 180946 - protein, 102 aa, Glycine max
  unsure (1)..(102): unsure at all Xaa locations
  Clone ID: PAT_MRT3847_134408C.1.pep
RKNGTCVRHVWGLSLTSLFLTLTTPKTRNPFSKFFNPCSNLNWLTRRTLTLGFCITTTRVGFHRRFPNLRSLNXKGKPPTRIVNLIPRDWGRTLISLVKKNF

SEQ ID NO: 180947 - protein, 93 aa, Glycine max
  unsure (1)..(93): unsure at all Xaa locations
  Clone ID: PAT_MRT3847_134409C.1.pep
MSCCNLLTLSCILTDKKKIVLSSCHISVYVRLTEQIQSEVQRQREFIXLLLKEVESATYADISEVEAFVKWLDGELSSLVDERSVLKHFPHWP

SEQ ID NO: 180948 - protein, 81 aa, Glycine max
  unsure (1)..(81): unsure at all Xaa locations
  Clone ID: PAT_MRT3847_13440C.1.pep
DLEGVTHKVYFDIQIHGKVAGRINMGLFGNTVPKTAKNFRALXTGEKGVGRTGKALHYKGSTFHKIMPSFMVQGGEITRGD

SEQ ID NO: 180949 - protein, 40 aa, Glycine max
  Clone ID: PAT_MRT3847_134410C.1.pep
RAIAGTSSQLYSYVICCLFPTLNAIIGHFDLSGIGDKRSM

SEQ ID NO: 180950 - protein, 74 aa, Glycine max
  Clone ID: PAT_MRT3847_134411C.1.pep
LLRYTKIVVTYKIYIFKVLKQVHPDIGISCKAMGIMNSFINDIFDMLAQVSSRLARYNKKPTITSREIQTAVRL

SEQ ID NO: 180951 - protein, 210 aa, Glycine max
  Clone ID: PAT_MRT3847_134412C.1.pep
MVGGNHPKSSHHKKPPPSASHRKSRWEPNSSSSAKSPADPKSSTAPSPKPNPNSNPNPSPKHLPFPFPFPDPAPAPLGTPPPPAYGFHMLERRTIVLADGSVRSYFALPSDYQDFAPRPLDLPPRFPPPLSPGRFRLPDYSHAAAAAAAKRKYGDDNGGPRDDLARQREQLLRNANGLSREQFSAGPSELRPSKHSRLDGSNSTRHSQVD

SEQ ID NO: 180952 - protein, 55 aa, Glycine max
  Clone ID: PAT_MRT3847_134413C.1.pep
RILDAEPLIFVPSLEGGIFKCIFLNFHFALFVSRKELCHLVVNNQTITATYFVNP

SEQ ID NO: 180953 - protein, 241 aa, Glycine max
  unsure (1)..(241): unsure at all Xaa locations
  Clone ID: PAT_MRT3847_134414C.1.pep
RREQPRIKRPPSPVVLCVPRAPRPPPPSPVSDSRKHRGFPTVRSGSSSPRHWGMRGWYHDGSNFEEACLRMDGAEVVWPWRSNNLAVRPLIQPLPAALLQDRLIALSQIARDQEHPDVTFPLQPPDLQSCSAQSASLTLMHGILHDEIDSFCKQVAAENMARRPYINWAVKRVTRFLQVLWPRSRTNIFGSNATGMSLPTSDVDLVVGLPPVRNLXPIKEAGILEGRNGIKETCLQHAARY

SEQ ID NO: 180954 - protein, 86 aa, Glycine max
  Clone ID: PAT_MRT3847_134415C.1.pep
RPRVRFDFSTSVSGPDHWVDMELIYCLTLDGMNAWIPCGDEMMEHAAMEYEAGNDINDFQLCYGVFLEQQYRETNYLAQGPCDAVF

SEQ ID NO: 180955 - protein, 97 aa, Glycine max
  Clone ID: PAT_MRT3847_134416C.1.pep
MASRRGGVSLPDRPSNNSSSVLAKISRSSIVTRGKEAAGDAAFVAKKLLRSTGKAAWIAGTTFLVLVVPLIVEMDREQQLNDLELQQASLLGTPAPK

SEQ ID NO: 180956 - protein, 206 aa, Glycine max
  Clone ID: PAT_MRT3847_134417C.1.pep
RCPPYMKPLLQFFSQIGTPFFINAYPFLAYKNDPQHIDLNYALFLKNPGIYDAKTKLHYSNMFEAQVDAAYAALEKVGFDKMDVIVSETGWASHGDDNEAGATIKNARTYNGNLRKRLLKKKGTPYRPKKVVKAYVFALFNENLKPGSTSERNFGLFKADGSIAYDIGFTGLVPSSATSSFLSFKGIGSSFMMAFTSFAAFLFVAL

SEQ ID NO: 180957 - protein, 50 aa, Glycine max
  Clone ID: PAT_MRT3847_134418C.1.pep
PCSAHIFLALYYNTSRPHSLIVRRWGLAAALMFMPQTGSHRLTLRSRLQL

SEQ ID NO: 180958 - protein, 48 aa, Glycine max
  Clone ID: PAT_MRT3847_134419C.1.pep
SLILSKQPLSNTAKSTRRKQSHFRCKSNDNIVVYFTYTLSCPNTQNCA

SEQ ID NO: 180959 - protein, 85 aa, Glycine max
  Clone ID: PAT_MRT3847_13441C.1.pep
KSNIFDFYYLTENCVQFFFSFIYLICIDSNESEIIKKQLLFFGFFLQSRYHIKKRKRGAGMGITRSPIFDIYKTWLSVSSSKEKF

SEQ ID NO: 180960 - protein, 46 aa, Glycine max
  Clone ID: PAT_MRT3847_134420C.1.pep
CPLMRSYLRFKPRLLLRLVLLLCEVVRKMEADGPVIANKLRDVLRL

SEQ ID NO: 180961 - protein, 133 aa, Glycine max
  Clone ID: PAT_MRT3847_134421C.1.pep
VAKNAILMNMPNAVLSMWRYSAGYLVFEVAKMTSSYIKSTASFFIAFANSVDDTINFEAVPHKLVQFGEIQEKVVLEFSQEECLTAWSTEVRPATTLWAHGCPYMYAIGRDNSQTTVPADFDIGVTLTTMNNM

SEQ ID NO: 180962 - protein, 95 aa, Glycine max
  Clone ID: PAT_MRT3847_134422C.1.pep
YTESKEPTVIEIIISDTIVCLFMLRMAMLWHFYHIINEYRTRCLLNAVRMDALQCMGCMSRLPYYPSVTIMLQVMHLSNRAIQTACIVKNHGIIM

SEQ ID NO: 180963 - protein, 152 aa, Glycine max
  Clone ID: PAT_MRT3847_134423C.1.pep
PPRGSPGKGGERDAPNRKERAMRGGQGGGACCGLPSRAPRFMRGFRGGPPGLPGCPPVGQALPRGPFRGLFRWAPGAARQVGYKGGRQGGPRGFAVSARPKHGHWGAPRRAINPPGRGPEPGPHPGPPHPPPLDNRGSPAPCFLSLFVFFFF

SEQ ID NO: 180964 - protein, 58 aa, Glycine max
  Clone ID: PAT_MRT3847_134424C.1.pep
LVASMDGLRLFDRRLNIGAFVPKWNDYMLDSWCMNLFLIYDFTKLVWHLVGSFHGNSI

SEQ ID NO: 180965 - protein, 54 aa, Glycine max
  unsure (1)..(54): unsure at all Xaa locations
  Clone ID: PAT_MRT3847_134425C.1.pep
FISXXXKXXKKKKKKKKXXKKGGGXANGHLIPDSYFGAETCWGAGRPYKVGDKR

SEQ ID NO: 180966 - protein, 86 aa, Glycine max
  Clone ID: PAT_MRT3847_134426C.1.pep
WPFYPSPWGFPFPFPGFLLFYRAIPIRLLGFTPVGKSDLCCPLIYFGNSRVLPCPAILFSWVTTWFLQSHRCKYDVHSIVFKCLFF

SEQ ID NO: 180967 - protein, 121 aa, Glycine max
  Clone ID: PAT_MRT3847_134427C.1.pep
YKSKVLCVARNAIVLAKSNDSQSQKMHPTFSVHLRHLTTQRTFTFHPTWFSILSFITLLFIPIKKMMTSSSLNLYQGRELKQALKREPFELRNSCHRINKFQVRQSHLLAHTTYLKRHPIH

SEQ ID NO: 180968 - protein, 253 aa, Glycine max
  Clone ID: PAT_MRT3847_134428C.1.pep
MKMNCYWWHALIMSGCVLGLCVGIGGCVCVVENENGRIIIDISHRYHPDMPAWESKDSLGQFLWLTRSMANGSLANFSQFKLPAHSGTHVDAPGHVFDHYFHSGFDVDSLDLLLLNGPALLVDVPRDTNISAGVMKSLNIPRGVRRVLFRTLNTYRRLMYQKEFDTSYVGFTEDGANWLVENTDIKLVGIDYLSVAAYDHLIPAHLVFLKGREIILVEGLKLDDVAAGIYTVHCLPLRLAGAEGSPIRCILIK

SEQ ID NO: 180969 - protein, 47 aa, Glycine max
  Clone ID: PAT_MRT3847_134429C.1.pep
FRTKHELCSLSFSTFIECNSWACWWFSVVMVVCVYICIIEYVHKCAR

SEQ ID NO: 180970 - protein, 66 aa, Glycine max
  Clone ID: PAT_MRT3847_13442C.1.pep
GSLSVWFGLVRGKNGAIYNINHHTLVLLDGLGFKTLFFHWGIFIITHLNFGAPQKQLPEPTALTLF

SEQ ID NO: 180971 - protein, 116 aa, Glycine max
  Clone ID: PAT_MRT3847_134430C.1.pep
SHCRYEPRVFSFGVVGLSAPTVLESACCIWSFRSVYSANDWTTWPSSSLNGRNLWGISSLCMMDMPVIHGDIRLCPIAVPLASADSQLQCYLVGAFMCITDLYASPQHVLFTLGFF

SEQ ID NO: 180972 - protein, 106 aa, Glycine max
  Clone ID: PAT_MRT3847_134431C.1.pep
LFKRQGNKKTPLSCNGNCNPHQNEESIYKAPLTTPVPFPYPQPNFHIVTLHPPSATGSMDRVKDHETPANRGKSLYRAPCLSTCTAYITSVHMTTMASKNALPVTN

SEQ ID NO: 180973 - protein, 79 aa, Glycine max
  unsure (1)..(79): unsure at all Xaa locations
  Clone ID: PAT_MRT3847_134432C.1.pep
EIAGVVVSVEPKPIMGAWTXARAHTNYSTKSMSEDGGYAVIRAAXITSWGRSAKTHIAAYGERNQRAATGRHETADINT

SEQ ID NO: 180974 - protein, 337 aa, Glycine max
  Clone ID: PAT_MRT3847_134433C.1.pep
ERAVPARVGSSELEPATTPEEEEIMTKLKNPQHSVIEEALISLRKLTRIREETRLQLCTPRLLSALRSLVLSKHVNVQVNALASVVNLSLEKSNKVRIVRSGMVPPLIEVLKFGSSEAQEHGAGALFSLAMDDDNKTAIGVLGGLAPLLHMLRSESERTRHDSALALYHLSLVQSNRSKMVKLGSVPVLLNMVKSGHMTGRVLLILGNLGSGSDGRATMLDAGMVECLVGLLSGAESRSGSTRESCVSVMYALSHGGLRFKAVAKVAGVMEVMQKVEKVGSERARNKVRKILEIMRAKEVEEEDVDWEELLDSGLPCRTRSRLGGGLDESTPNSAQF

SEQ ID NO: 180975 - protein, 473 aa, Glycine max
  Clone ID: PAT_MRT3847_134434C.1.pep
PGFEGSSSVNSSPLQFFSMMSLSPSLGSPNNLLFREMKSEERGLYLIHLLLTCANHVAAGVPENANTTLEQISMLASPDGDTMQRIATYFMESLADRILKTWPGIHRALNSTRMTLISDEILVQKLFFELFPFLKVAFVLTNQAIIEAMEGEKVIHIIDLNAAEAAQWIALLRVLSAHPEGPPHLRITGVHQKKEILDEVAHRLTEEAEKLDIPFQFNPVASKLENLDFDKLRVKTGEALAISSILQLHTLLAWDDEAMQRKSPLLLKSSNGIHLQRVLPMGQSTLGDLLEKDMVNGYTPSPDSTSSSPSSLTTSNSMKRERFLNALWGLSPKVMVVTEQDCNHNGPTLMDRLLEALYSYAALFDCLESTVSRTSLERLRVEKMLFGEEIKNIIACEGSERKERHEKLEKWFQRFDLAGFGNVPLSYFGMVQARRFLQSYGCEGYRMRDENGCVLICWEDRPMYSISAWRSRK

SEQ ID NO: 180976 - protein, 91 aa, Glycine max
  Clone ID: PAT_MRT3847_134435C.1.pep
NPSSTNAERWKKKKNPLEGLSLFNRKPRRVYVSNPPEGEYVELYKKPLGFSRPITCSCLPGGAGLVFCGLMFPGSPVKGVSIYVLFYPHNK

SEQ ID NO: 180977 - protein, 63 aa, Glycine max
  Clone ID: PAT_MRT3847_134436C.1.pep
PSDPAPLCSADVLSVSVWRQPCWVCPAPPLPYPLGANVGQLVLNSFFCRCPPLQFAPLSLSPF

SEQ ID NO: 180978 - protein, 71 aa, Glycine max
  Clone ID: PAT_MRT3847_134437C.1.pep
LPPPPPFLVLAGKLFFSLGLNFFVLHNKKTGVGYINGGVKTPVEKTGRLLAFRALFSCPPALKIALICFFF

SEQ ID NO: 180979 - protein, 105 aa, Glycine max
  Clone ID: PAT_MRT3847_134438C.1.pep
PGFPPSERTCPPPRSRRRLTTTTLLCDAMAHCIDLLSNAGDDMHQSFRNLDHSELDKSSNYAYDLNVRIAGTLAHEKTCLDEFENINTEAGSDKVRVRNTSLDLT

SEQ ID NO: 180980 - protein, 62 aa, Glycine max
  Clone ID: PAT_MRT3847_134439C.1.pep
PTYLCLLLSVSKTILYKIGSNSKRVNPPFHIPTSDAYQHSTFIYNASFEDTISHSYINTAPK

SEQ ID NO: 180981 - protein, 217 aa, Glycine max
  Clone ID: PAT_MRT3847_13443C.1.pep
LAKCVEIGLPEIVLLIVFSQYIPHVMKAEKPIFDRFAVIFSVTIVWIYAHLLTVGGAYKNVPQTTQSTCRTDRAGIISGAPWIRIPYPFQWGAPTFDAGEAFATMAASFVALVESTGAFIAVSRYASATPLPPSGLSRGVGWQGVGILLSGIFGTGNGSSVSVENAGLLALTRVGSRRVVQISAGFMIFFSILGKFGAVFASIPAPIVAALYCLFFA

SEQ ID NO: 180982 - protein, 79 aa, Glycine max
  Clone ID: PAT_MRT3847_134440C.1.pep
LPLDAGAQIRLQNVSVDISSFTIVYKHILVDFSSNSSLPCFQNGESQSPSTRVDQCHESPCLAFQICTLSPGRPLTYVE

SEQ ID NO: 180983 - protein, 187 aa, Glycine max
  unsure (1)..(187): unsure at all Xaa locations
  Clone ID: PAT_MRT3847_134441C.1.pep
ARGVGEAAKMLGEMIQIGLVPDAVCYNEIIKGLCDVGLLDRARSLQLEISEHQGFHNVCTHTIIICDLCKRGMAEKAQEIFNKMEKLGCFPSIVTFNALMDGLCKAGKLEEAHLLLYKMEIGRSPSLFFRLSQGSDQVLDSVALHKKVEQMCEAGQXLDAYQLFIQLACSGVMPDIWTYNVLINGFC

SEQ ID NO: 180984 - protein, 182 aa, Glycine max
  Clone ID: PAT_MRT3847_134442C.1.pep
STQQYFFSLSLKVDPKGFARVVENMPQVVSLHQHVIMKPVEFLLGRTILAQDVASMVVKCPQLVALRVELMKNSYYFFKSEMGRPLQELVEFPEYFTYSLESRIKPRYQRLKSKGIRCSLNWMLNCSDQRFEERLQGHYIETESVGPRFCMGGKLGLPGNALVSDEEEESDDELLYRRTVSL

SEQ ID NO: 180985 - protein, 139 aa, Glycine max
  Clone ID: PAT_MRT3847_134443C.1.pep
MAPAKAEKKPAEKKPAAEKAPAEKKPKAEKKISKEGGSEKKKKRTKKSVETYKIYIFKVLKQVHPDIGISSKAMGIMNSFINDIFEKLAQEASRLARYNKKPTITSREIQTAVRLVLPGELAKHAVSEGTKAVTKFTSS

SEQ ID NO: 180986 - protein, 82 aa, Glycine max
  unsure (1)..(82): unsure at all Xaa locations
  Clone ID: PAT_MRT3847_134444C.1.pep
LTETPXXXXKGWXXGXXAXGXQPRRSEKXSSSXHXSCXAXXRPXFTPXKSEMIAPPHMLXQNFFFFXIDXESYYNXXALWXS

SEQ ID NO: 180987 - protein, 105 aa, Glycine max
  Clone ID: PAT_MRT3847_134445C.1.pep
STEGKSIRYTPNNIMCNNTTILRLQDTYRIQPLYKITDCNLQNNFVFSTFQKILLLTTACSIFFPQSSQLFLQLFALFKVSLPLQSLQARASDILQTILSAITLF

SEQ ID NO: 180988 - protein, 42 aa, Glycine max
  Clone ID: PAT_MRT3847_134446C.1.pep
CKKLTDDHALFYELHAGMSEERDYKTCGLIYDNPTVQEAFKS

SEQ ID NO: 180989 - protein, 218 aa, Glycine max
  Clone ID: PAT_MRT3847_134447C.1.pep
HARPAASQAHSMVPGKVDIQSCLTLTSTGPSRKRKFPLDEVLRPASMCNEVLNSEGNEKTADTVLDTRSNFKDVPTGLGLQDVAKGHWSKTETERSHIIGKKKYKKIQVVDNCLIPEQPQGHQRENEDTVDTTDKVYASKTNSSRLAPCAFTGKGMDNFPIRPLRIENEFNLSKEKGKMLQTDRELDSLSWHKNNMLVQDSCAYSGEKARSNMPVTIP

SEQ ID NO: 180990 - protein, 67 aa, Glycine max
  unsure (1)..(67): unsure at all Xaa locations
  Clone ID: PAT_MRT3847_134448C.1.pep
DLXXCHSLXFXXCXGTXRHFIXLASCLGRIXLPIXXXLSSSSXCXXFXXXNWAVXEKHTLSXXXASR

SEQ ID NO: 180991 - protein, 44 aa, Glycine max
  Clone ID: PAT_MRT3847_134449C.1.pep
MVKLQLIASQSYTRVDSSFLFQFLSIVLIDTLQTPNMSLELYFH

SEQ ID NO: 180992 - protein, 55 aa, Glycine max
  Clone ID: PAT_MRT3847_13444C.1.pep
SKSSLLHKKFLSIFILNQSVSFLFSTTFALKTNYTTGLGSCFLNFYDLLYIMSVL

SEQ ID NO: 180993 - protein, 71 aa, Glycine max
  Clone ID: PAT_MRT3847_134450C.1.pep
IILLAAKCHPYTITPTPPLAKYYSFSFSFENPVGSLSTAHPALTNPKVISCTVVFESSSIFCYVSKHGFSF

SEQ ID NO: 180994 - protein, 56 aa, Glycine max
  unsure (1)..(56): unsure at all Xaa locations
  Clone ID: PAT_MRT3847_134451C.1.pep
IVIAMTTPGFTGAYLANLLIXAAIFAGRCAKTPFSSKDIADSIDRIVAGMDGSVLT

SEQ ID NO: 180995 - protein, 90 aa, Glycine max
  Clone ID: PAT_MRT3847_134452C.1.pep
GYRYRVLGVLLGWLSGLLLWLYYFLGVILYAGLLCQQLSPQHQPNLCCARSHNLPLIGIPLRHKTRDICQSFLICFPKMLYPWVTCPKHS

SEQ ID NO: 180996 - protein, 57 aa, Glycine max
  unsure (1)..(57): unsure at all Xaa locations
  Clone ID: PAT_MRT3847_134453C.1.pep
HLPQARAKALCNGSYYPSYYHHHLFSSVCTSIHSXDLCLGILVITVCMTPDIQHTVF

SEQ ID NO: 180997 - protein, 410 aa, Glycine max
  Clone ID: PAT_MRT3847_134454C.1.pep
LRYRNFKTFTTPSPRQFVSLTADISGEVICAGTSDSFEVFVWSMKTGRLMDVLSGHEAPVHGLVFSPTNTVLASSSYDKTVRLWNVFDGKGAVETFPHTHDVLTVVYRPDGRQLACSTLDGQIHFWDPIDGLLMYTIEGSRDIAGGRLMTDRRSAANSTSGKFFTTLCYSADGSYILAGGSSRYICMYDVADQVLLRRFQITHNLSLDGVLDILNSKNMTEAGPLDLIDDDSSDIEEGVDKQTRGKLGLDLPGSMPNRGRPIIQTKSLRIASTGRSFVAATTEGVLVYSVDESFIFDPTDLDINVTPEAVEEALRENQPSKALILSLRLNEDSFVKKCIFAVSPADIPAVATSIPYKYIQRLVEALADLLENCPHLEFILRWSQELCKAHGNSIQQNSRNLLPSLKSLQK

SEQ ID NO: 180998 - protein, 54 aa, Glycine max
  Clone ID: PAT_MRT3847_134455C.1.pep
MDISPFGKFPILIVSTIIKALLINALVLHDSFNLKFSNYKPSITIINSTINLHV

SEQ ID NO: 180999 - protein, 548 aa, Glycine max
  Clone ID: PAT_MRT3847_134456C.1.pep
MGTKVQSLPGFYSMSDLNEESSSCGWPLYYGDKTLANGQYYHNYLSSGAADACSTHDKDNVKQTMLEHEAIFKNQVFELHRLYRIQRDLMDEVKMKDLYRNHISVEKSFSTGPLASQLTSEDGKKWHVPGFPIVGSSTCARPSISGVEGIHSPLSSNKGISKQAGLFPSPNGSSSSKDVEILGFRPSKVRRKMFDLHLPADEYIDTEENEKPGDEKISGTTNFLSDRSYKHEKGGDMDLFSGNGGKTGGQEDISRPKQSLRSRNSLADLNEPVHVEETHDVAYVPPQNHNSYQGATECSDLSAKQKLRFFGLSKEDLLNSHHGTDSWARNNGYLDNDRNGKMWISSIESGQAKSNPKTIPQLLKQDQSLLSSQTMQDELSKSHEPTSDYLTNGSKTDLLREKTPSGLDISERNHESSANKLSESVASSHRHGLFAIAPSSDLARSWSHSSWDMASSTLNQKFISVQTPPSPCLNASGSLSRSSQSHQSNGMLGDSWPLNINSKLNPGFRCEASGKNGFYPTLSGSKELSVNISSISYLNHECDCKKFS

SEQ ID NO: 181000 - protein, 79 aa, Glycine max
  Clone ID: PAT_MRT3847_134457C.1.pep
SFFEKNANYIISKIISKKMQIILYPKCKLYLKLYYSYIIFFQFSRFILFYLFLLDHLFSLFFIDLIAFFIFLLSLFYKF

SEQ ID NO: 181001 - protein, 85 aa, Glycine max
  Clone ID: PAT_MRT3847_134458C.1.pep
VCISMMSGGGPVFELESLPGFYSTSVPSPYNADIRFGGCMQPVGLYVKCVQGVIASLCAGCIFAIKVYVSNIKVPQGHFCFERIL

SEQ ID NO: 181002 - protein, 240 aa, Glycine max
  Clone ID: PAT_MRT3847_134459C.1.pep
MTDPHLCRWQPIRPAIHHHPHLHLFYPPQVPSLPFHHPSPFSLLEPLPSTMPAHNSHETTMDCLEEALSHLTQNISTMTAKSLEMAAKLDVILDWLSALQPTPSSPKSLAPPDAPMPNLPPMVGINSGTTYSCVKVWQHHHVEIIATDQRNRSSASYFAFTERLIGDAAKYYVTINPINTIFNAKRLCGRRFSAASIRSDRQLWLYKVFPGPPDKPMIVVNYKGEDKKFAAEEMSSMVLM

SEQ ID NO: 181003 - protein, 48 aa, Glycine max
  Clone ID: PAT_MRT3847_13445C.1.pep
ITKAPFFRRRKHFWRTVRVSFDAPTLMSSRSWGLLERDGWVEPAPPVR

SEQ ID NO: 181004 - protein, 69 aa, Glycine max
  unsure (1)..(69): unsure at all Xaa locations
  Clone ID: PAT_MRT3847_134460C.1.pep
TSESKNEGHPGMLCEHMSHANLEAGSQHDPRTQGAXETXAKTNKAMDFGETTIKACVNYEQDVRATGRN

SEQ ID NO: 181005 - protein, 171 aa, Glycine max
  unsure (1)..(171): unsure at all Xaa locations
  Clone ID: PAT_MRT3847_134461C.1.pep
SAHSSADAWVLGVLGSLYSAVAARPGCFRTAEGRVAGAADIEKTHNLASAAHQLADNDAMRAESMYHLARCYHKKQDYHHAFQFYYQATTLSHPKFVLPYFGLGQIYIYREEYENAIVAFEKVLKMVPNDIDTXAVLGSLYTNVPHKDPKIVVERREKAREYLTKLVDSQT

SEQ ID NO: 181006 - protein, 109 aa, Glycine max
  Clone ID: PAT_MRT3847_134462C.1.pep
PRQKTTERSCWLYTSDWAFSELYLPSAIADCGLSKECNLTDAGGPYYISSVVAPFGSLLAAPSQHEGCHIPVVPSLNELDKHTASVIWRTYEKRCIDERHPLSLKLNAF

SEQ ID NO: 181007 - protein, 182 aa, Glycine max
  Clone ID: PAT_MRT3847_134463C.1.pep
MPEDVACVGEVGLFPIYMGATDRLLNADNEEVYFKGMPIYKGKVLRRHGDIIKRTAGGRFIGQGRADDTMNLGGIKTSSVEIEHVCDRANKGILETAAISVSPANGGPEQLVIFAVLKKGYNSNAETLKRKFSKAIQSNLNPLFKVSLVKIVPDFPRTASNKLLRRVLRDQMKRELSIQSRL

SEQ ID NO: 181008 - protein, 72 aa, Glycine max
  unsure (1)..(72): unsure at all Xaa locations
  Clone ID: PAT_MRT3847_134464C.1.pep
SPQNQWSLSFVTTHFPRVPHASFHTAFIRSGINDSRKRTFLPSSHHYILPLKTNNKNGLGFPGSYGFXNHLN

SEQ ID NO: 181009 - protein, 75 aa, Glycine max
  Clone ID: PAT_MRT3847_134465C.1.pep
TRLGRLVTSRLTQMLRTKAHIPTRTFYSGVSISYNIIYSHSFKISNSPLSFLTHLPFPLTASCRKLTFLPDRCHF

SEQ ID NO: 181010 - protein, 59 aa, Glycine max
  Clone ID: PAT_MRT3847_134466C.1.pep
LYRNDEFCQWVTRLEHQLTALSWFTIGGKTFDYSAWKKLDCIPKKGSGVGFGSFRFAAQ

SEQ ID NO: 181011 - protein, 197 aa, Glycine max
  Clone ID: PAT_MRT3847_134467C.1.pep
MEEEKEAVMVTPGEVLGRTSDVKAGRGAYAALHNNTVYASLTGFRHTVPPAPDSSDLRPTVEVTGHKAHGPVPQPGSVVIARVTKVMARSASADIMCVGPKSVREKFTGIIRQQDVRATEIDKVDMHLSFHPGDIVRALVLSLGDARAYFLSTAKNELGVVSAESIAGATMVPVSWTEMQCPLTGQIEQRKVAKAAS

SEQ ID NO: 181012 - protein, 100 aa, Glycine max
  unsure (1)..(100): unsure at all Xaa locations
  Clone ID: PAT_MRT3847_134468C.1.pep
SLYSTLLLSLLILPLLKTVETSSSYIQMASSWTPRQNKQFERALAKYDFXTPDRWQNVANEVGKSVEEVKRHYEILKEDIRRIERGQVAFPYRTNNSNSN

SEQ ID NO: 181013 - protein, 63 aa, Glycine max
  Clone ID: PAT_MRT3847_134469C.1.pep
QCIKIELLIEEICEKRLPSSWIFMYSIIPQRCKHCALDKQSSNSNLSPSLKPTGNRYQATHLL

SEQ ID NO: 181014 - protein, 37 aa, Glycine max
  Clone ID: PAT_MRT3847_13446C.1.pep
SLQTVGPSSLADKNFSQKMVLSKLILPVRCRKEVSDP

SEQ ID NO: 181015 - protein, 37 aa, Glycine max
  Clone ID: PAT_MRT3847_134470C.1.pep
KETEEYYCINVDHLRYIRVVFESVKLLMVNLSFKSYI

SEQ ID NO: 181016 - protein, 83 aa, Glycine max
  Clone ID: PAT_MRT3847_134471C.1.pep
IFSMEEQVISRAHRMGASRPIYVETLAMRGTIEEQMLDFLQDADNFRRSPIKDATESVDDSGGRGYRSLHDFAESSYLLKLRS

SEQ ID NO: 181017 - protein, 58 aa, Glycine max
  unsure (1)..(58): unsure at all Xaa locations
  Clone ID: PAT_MRT3847_134472C.1.pep
LGXXKVXNXDEXEXXXEETLTVSXGHGWLLIYXKXLMXXDSXSDTSXNXXLIREXPLX

SEQ ID NO: 181018 - protein, 54 aa, Glycine max
  Clone ID: PAT_MRT3847_134473C.1.pep
CALSPVDAWAKQPTGFDILSGVPQDYEMAGDTLMPGVAVPQATARSGVNAESSA

SEQ ID NO: 181019 - protein, 62 aa, Glycine max
  Clone ID: PAT_MRT3847_134474C.1.pep
ELRGFFMLKKEGFGIIFLLLKDLRSKGLCVIQRNHLFSKKFPLLGAKLGIELVFLLKGKQNA

SEQ ID NO: 181020 - protein, 140 aa, Glycine max
  Clone ID: PAT_MRT3847_134475C.1.pep
KQHFLQTFLIIQHERYTSTIPLSLMITFPPFDSTTITLSLTNHPSSSSYKWNTFTNTFSIKHIELFFIFKIRYYPRWINTQNFYTQNLNPLIQRLLHRHNKGTCDSMLPIRPNYEATLHTRTTARKLNSPNLNPDKKVEL

SEQ ID NO: 181021 - protein, 110 aa, Glycine max
  Clone ID: PAT_MRT3847_134476C.1.pep
EDKDRPPKGKSKNDGGHTPKNSRETRTKYNKTKTPTKNTTHKDPDKPKNKRPRETPNRETLAKPTEPSNHKPMRRRTTQPNPSGSPKNTTRKKPRDQNKPRTTPKDKPPK

SEQ ID NO: 181022 - protein, 187 aa, Glycine max
  unsure (1)..(187): unsure at all Xaa locations
  Clone ID: PAT_MRT3847_134477C.1.pep
MRRRAAEYRRPVRRRFSHWIWLLLGAFSLAGLVLFFVQYNHSEDRVHHPLLEKNAIVEHFAKRYNFTEEILSATSFSRQLAEQMVLAKAYVIIAKEHNNLHLAWELSSKIRXSCQLLLSKAAMTGEPVTMEEAEPIIKSLSSLIXKAQDVHYDIATTIATMKSHIQALEERANTATIQSTCVCSNIS

SEQ ID NO: 181023 - protein, 46 aa, Glycine max
  Clone ID: PAT_MRT3847_134478C.1.pep
IQRRRHALHPLTGENIVKTYLVYDVSLQCLMRDKHVLVHSIAHQNP

SEQ ID NO: 181024 - protein, 139 aa, Glycine max
  unsure (1)..(139): unsure at all Xaa locations
  Clone ID: PAT_MRT3847_134479C.1.pep
VTPMAETLIFSVPTGEPSFLIFLNRTFLSIKRRLLARILRYQNDAVAHSRIFREVDDSATEKKCELNAGDCLSNDGGNGRHAVFNALDTMLKDSLERLKMMRENLCLVKTGLTIGYACESKYAEDTATIRRXCLDGKLG

SEQ ID NO: 181025 - protein, 506 aa, Glycine max
  Clone ID: PAT_MRT3847_13447C.1.pep
MVSLTPLCFFITLLIAGADAAAEPQTVRFDTGGLSRDTFPKGFLFGTATSAYQVEGMAHKDGRGPSIWDVFIKKPGIVANNGTGEVSVDQYHRYKEDIDLMASLNFDAYRFSISWSRIFPNGTGQVNWKGVAYYNRLINYLLEKGITPYANLYHYDLPLALEERYNGLLSRQVVKDFADYAEFCFKTFGDRVKNWMTFNEPRVVAALGYDNGFFAPGRCSKEYGNCTAGNSGTEPYIVAHNLILSHAAAVQRYRAKYQEKQKGRIGILLDFVWYEPLTRSKADNFAAQRARDFHIGWFIHPLVYGEYPKTIQNIVGNRLPKFTSEEVKIVKGSIDFVGINQYTTFFIYDPHQSKPKVPGYQMDWNAGFAYAKNGVPIGPRANSYWLYNVPWGMYKSLMYIKERYGNPTVFLSENGMDDPGNVTLPKGLHDTTRINYYKGYLTQLKKAVDDGANVVGYFAWSLLDNFEWRLGYTSRFGIVYVDFKTLKRYPKMSAYWFKQLITKKKY

SEQ ID NO: 181026 - protein, 85 aa, Glycine max
  Clone ID: PAT_MRT3847_134480C.1.pep
FRFQFLEQYGEVSMLDLKGADATKVVLVIGIMTLHSFGDGSGVGVSFAGSKGFTQGLFVTLAIAVHNIPEGLAVSMVLASRGVSP

SEQ ID NO: 181027 - protein, 94 aa, Glycine max
  unsure (1)..(94): unsure at all Xaa locations
  Clone ID: PAT_MRT3847_134481C.1.pep
MSMCYKTSISTVLIKLAYREGKHLSRFEWLHNADIPTLSHIVEFPSIHKIMNAPCVNDNXIDLLLCIYXMSLQRAGYAFPNXLLDDDNFVLTDT

SEQ ID NO: 181028 - protein, 99 aa, Glycine max
  Clone ID: PAT_MRT3847_134482C.1.pep
SEQTSEDDTMVIRVDLCVLSLMTYMFGEPGKSVQCEWSFGVSFNMNGIILSYMIILNVYLVLGCPIGCKLMYTFMLRHSASIMSPNFNSHAVVLNGLVW

SEQ ID NO: 181029 - protein, 66 aa, Glycine max
  Clone ID: PAT_MRT3847_134483C.1.pep
QNQNFLHSMEGSGDVYSPNPSIVVLIFTPLRLLFLVQNIFIMPNVFLKKNGPVHFESEDKSSTVLD

SEQ ID NO: 181030 - protein, 113 aa, Glycine max
  Clone ID: PAT_MRT3847_134484C.1.pep
NPKEKKSHIGGSFLLAYEGFVVLLNKKAFAFASPALATTTMFPLVLDSAVSAVVVLLIDFEGNAHPKFDVIINAQDYNLIRPDHTDFLQDDDDDDTVVVTLVPRDIKTQLLPD

SEQ ID NO: 181031 - protein, 41 aa, Glycine max
  unsure (1)..(41): unsure at all Xaa locations
  Clone ID: PAT_MRT3847_134485C.1.pep
LXFNNPXXXLWQXXLKGGNNNGXVYKLSPXXGLELXLXPLX

SEQ ID NO: 181032 - protein, 79 aa, Glycine max
  unsure (1)..(79): unsure at all Xaa locations
  Clone ID: PAT_MRT3847_134486C.1.pep
TQNILSQRGSFVVESLQKRLEXEIESYQKHCIQVREKSKQSLKTRLPKLFRASKDYAQACAEACEKLKLIAQLPRWCGI

SEQ ID NO: 181033 - protein, 112 aa, Glycine max
  unsure (1)..(112): unsure at all Xaa locations
  Clone ID: PAT_MRT3847_134487C.1.pep
TRTDDHVISEHXLTVMDINGLVEQNVQSRSPVSTISGQMASLEVDSIEKLAMELWXQPEKSGSKVSTVLHRSVKLRHMIXTLHASVSMXNKLYEEEQFLQFTQTHSSQTLAA

SEQ ID NO: 181034 - protein, 79 aa, Glycine max
  Clone ID: PAT_MRT3847_134488C.1.pep
LIRHIKNCSPSVTKNQEFYLFNEKIPFLSITIGGTLKLFISTLANIPQNIKSNNTLPPKKSPLPYEELRSREEQMNHLT

SEQ ID NO: 181035 - protein, 76 aa, Glycine max
  Clone ID: PAT_MRT3847_134489C.1.pep
NPNLTKEPSKFIQKIPKSFPTTKKKHTFLHNSSNANITTPVTLLIHTLPQYSGEIPDFFFFFKPPFANFHHFPNIT

SEQ ID NO: 181036 - protein, 114 aa, Glycine max
  Clone ID: PAT_MRT3847_13448C.1.pep
KLFSKVWLFLNNFHRGAVFYVPAMHGASADGAFDRDELRGMSPLRLATKDCISQLLLTRPKVHGSASLTSDFSTCTWVCRVAGIGCSTCSCSGRSWKAPLEQLQWDLKTQVQRD

SEQ ID NO: 181037 - protein, 54 aa, Glycine max
  Clone ID: PAT_MRT3847_134490C.1.pep
KYAYNMCKMRSKERMALSVSQSSFAIKRERALDFRLGCTCHSCNSHPNINQRSD

SEQ ID NO: 181038 - protein, 42 aa, Glycine max
  Clone ID: PAT_MRT3847_134491C.1.pep
HANSKLGSGPFTGGPNPVYHQEKSPGLLPDNPSPKLELPMPT

SEQ ID NO: 181039 - protein, 72 aa, Glycine max
  unsure (1)..(72): unsure at all Xaa locations
  Clone ID: PAT_MRT3847_134492C.1.pep
CPPSLAWILLNRPPXFFFFFFFFSPNQPISYSIFLKKKIPPFGLGGEGKLNPLIKPLFFPKNPNFFPIFILT

SEQ ID NO: 181040 - protein, 150 aa, Glycine max
  Clone ID: PAT_MRT3847_134493C.1.pep
GKLVNLEKLYLSNNNFSGEIPPEIGSLKQLSSLHLEENSLTGSIPAELGHCAMLVDLNLAWNSLSGNIPQSVSLMSSLNSLNISGNKLSGSIPENLEAIKLSSVDFSENQLSGRIPSGLFIVGGEKAFLGNKGLCVEGNLKPSMNSDLKI

SEQ ID NO: 181041 - protein, 92 aa, Glycine max
  Clone ID: PAT_MRT3847_134496C.1.pep
HASDAVVQLRPTLQHLNSGGSKRKNAASTGANATVKIEGSNEEKSVATSKKQNKQTGPSIIEQKSDGDECWVPLKYHSCKSDISSRYLQQMV

SEQ ID NO: 181042 - protein, 58 aa, Glycine max
  Clone ID: PAT_MRT3847_134497C.1.pep
EILRQEARLSDQVFCEDILRPLNGDLKRFNAYVQELMGIAFLYGLRPHQSANGCVNGQ

SEQ ID NO: 181043 - protein, 41 aa, Glycine max
  Clone ID: PAT_MRT3847_134498C.1.pep
SHLCIEASPSSCRYIRLMNQQALSRHLTDDIGDRLSKPAPS

SEQ ID NO: 181044 - protein, 69 aa, Glycine max
  Clone ID: PAT_MRT3847_134499C.1.pep
CRSDVGYRCLVVRYSRRSISWYGSQIKVLSLPAVGLKWTRRNSMDVFMCLWIYLLGTNRILSPRFSQCQ

SEQ ID NO: 181045 - protein, 54 aa, Glycine max
  unsure (1)..(54): unsure at all Xaa locations
  Clone ID: PAT_MRT3847_13449C.1.pep
GALLXXXXXXVLVXGFXXAPXLGGWXXLXPXXXAVALGGPCVLPLLXFAPLFYQ

SEQ ID NO: 181046 - protein, 58 aa, Glycine max
  Clone ID: PAT_MRT3847_1344C.1.pep
ATKKMVKVKMKKKMLDVRFNGVPMTLLCFLYPFFFLPGVNLIVVSCVPINQDSYRLLI

SEQ ID NO: 181047 - protein, 303 aa, Glycine max
  Clone ID: PAT_MRT3847_134500C.1.pep
MTLETLQSNEFSNFIIYDTISATPFSSHGSPEASFLESFVNYQEQHDHPTFDNCAMRTRKREASEPESIGRRQNSVAVQGRKKRRRKPRVCKNTEEAETQRITHITVERNRRKQMNEHLAVLRSLMPESYVQRGDQASIVGGAIEFVKELEHLLQSLEARKLQLLHQEVAQTNENTAISKLMQPPFAHCFSYPQYTWSQTPNKYTSKTKAAIADIEVTLIETHANLRILTRRSSHGQLTKLVAGFQTLCLTVLHLNVTTIDPLVFYSFSAKVEEGFQLGSVDGIATAVHHLLARIEEEASLCC

SEQ ID NO: 181048 - protein, 129 aa, Glycine max
  Clone ID: PAT_MRT3847_134501C.1.pep
RRPSLLPPPRDLNHPARALRSCPLLRLSSSGVFEGLNSENGAEAETASAAALSRSKWHSDDEDDGDAEHEASAFQEVKEAKQKKSKKPKVTVAEAASRISADDLDAFLAEITVSVSFSQLICCLVQVWW

SEQ ID NO: 181049 - protein, 131 aa, Glycine max
  Clone ID: PAT_MRT3847_134502C.1.pep
MKIRPFPKLMHPPFAQFFSYPQYTWSQTPNKYTSKTKAAIADIEVTLIETHANLRILTRRNSPGQLTKLVAGFQTLCLTVLHLNVTTIDPLVFYSISAKVEEGFQLCSVDGIATAIHHLLARIEEEASLCS

SEQ ID NO: 181050 - protein, 68 aa, Glycine max
  Clone ID: PAT_MRT3847_134503C.1.pep
SQLPLQLHEPWPTNDCCATQLIDGDGEFNIVGLDNFIRTLNLTSCGLSYTVVAIMEPQSSGAFIPRLL

SEQ ID NO: 181051 - protein, 137 aa, Glycine max
  unsure (1)..(137): unsure at all Xaa locations
  Clone ID: PAT_MRT3847_134504C.1.pep
IYFFFFFFFYCXXXEGXKNFLMGTPPPLPPGEKTIWGKKILAGKKYRPLIMGIGHFPPPKKPPEFLNFLFFSPLFPLSFPFFFFPTTYKPPWGGFLGGGFLQGFTFPGAAAPGAQIKKGAPPLWAPALGPKHFFHLF

SEQ ID NO: 181052 - protein, 81 aa, Glycine max
  Clone ID: PAT_MRT3847_134505C.1.pep
GLPLQRRMSPRALSKRVFFLTATRAWPPMIGWPFPRGLCFPGGLLGGLGAPGQCRSLTIQIYSGIFCGEAGHSKLPSVWGF

SEQ ID NO: 181053 - protein, 97 aa, Glycine max
  Clone ID: PAT_MRT3847_134506C.1.pep
NPRSLLFLKWNTTNWNSSTTTGVGSNTTPFSFTPHLLLPPSPTNRRRKNSIYILTNKPYSISNPTIIKTFFNGNHSQTPCAQCNNYTPLHNNIPNQT

SEQ ID NO: 181054 - protein, 159 aa, Glycine max
  unsure (1)..(159): unsure at all Xaa locations
  Clone ID: PAT_MRT3847_134507C.1.pep
MASLHANVTSVVYNSGNRVSQSKFASSSFLSGFDVVGRASSAWKKELVPSSISLVPRATLTFDPPTTNSDITKQKKHTLDPASPDFLPLPSFEQCFPKSTKEHXEVTHEETGHVLQVXPFRRVHLSGEAGHFDTYDTXRSQNVNPRTGLPKLRGGWVDR

SEQ ID NO: 181055 - protein, 68 aa, Glycine max
  Clone ID: PAT_MRT3847_134508C.1.pep
HASDLFLVPLFLNMLVVSSHVKLFMSPITIDIKNCDNIYMHAQLLNVASIISSMIDQHPCLKSFGNYI

SEQ ID NO: 181056 - protein, 110 aa, Glycine max
  unsure (1)..(110): unsure at all Xaa locations
  Clone ID: PAT_MRT3847_134509C.1.pep
MSLLSDLINLNLSDTTEKGIPKVHMIRGSRIDPKNQTRTFPRPSSHPSXLPQWNYXGSNTSQAPGEYSEANLYPQAIFKDPFPRGNNILDIXEAYTPDXKPIPTYKRPAS

SEQ ID NO: 181057 - protein, 79 aa, Glycine max
  unsure (1)..(79): unsure at all Xaa locations
  Clone ID: PAT_MRT3847_13450C.1.pep
PRRSSDRFGWLPRYDHLMSQDLXFPLLLWMEGGEKVLTLGHRHFPSTGNPTVSPPAFADLDGAPDFAAASDNVFTQPEI

SEQ ID NO: 181058 - protein, 647 aa, Glycine max
  Clone ID: PAT_MRT3847_134510C.1.pep
MASLHANVTSVVCKSGNHASQSKFTSSSFLPGFDVVGRASNAWKKELVPSSISLVPRATLTFDPPTTNSDKTKQRKHTVDPASPDFLALPSFEQCFPKSTKEHREVTHEETGHVLKVPFRRVHLSGEEGHFDTYDTSGPQNVNPRTGLPQLRKEWVDRREKLGYPRFTQMYYAKQGIITEEMLYCATRENLDPEFVRSEVARGRAIIPSNKKHLELEPMIVGRNFLVKVNANIGNSAVASSIEEEVYKVQWATMWGADTAMDLSTGRHIHETREWILRNSAVPVGTVPIYQALEKVNGIAEDLNWEVFRDTLIEQAEQGVDYFTIHAGVLLRYVPLTARRMTGIVSRGGSIHAKWCLAYHKENFAYEHWDEILDICNQYDVALSIGDGLRPGSIYDANDTAQFAELLTQGELTRRAWEKDVQVMNEGPGHIPMHKIPENMQKQLEWCSEAPFYTLGPLTTDIAPGYDHITSAIGAANIGALGTALLCYVTPKEHLGLPNRDDVKAGVIAYKIAAHAADLAKGHPYAQAWDDALSKARFEFRWMDQFALSLDPMTAMSFHDETLPADGAKVAHFCSMCGPKFCSMKITEDVRKYAEEHGYGTDEALQHGMDAMSAEFQAAKKTISGEQHGEAGGEIYLPEEYVSSKRT

SEQ ID NO: 181059 - protein, 218 aa, Glycine max
  unsure (1)..(218): unsure at all Xaa locations
  Clone ID: PAT_MRT3847_134511C.1.pep
MASLHANVTSVVCKSGNHASQSKFTSSSFLPGFDVVGRASNAWKKELVPSSISLVPRATLTFDPPTTNSDKTKQRKHTVDPASPDFLALPSFEQCFPKSTKEHREVTHEETGHVLKVPFRRVHLSGEEGHFDTYDTSGPQNVNPRTGLPQLRKEWVDRREKLGYPRFTQMYYAKQGIITEEMLYCATRENLDPEFVRSEVARGRAIIPXNKKHLELEP

SEQ ID NO: 181060 - protein, 83 aa, Glycine max
  Clone ID: PAT_MRT3847_134512C.1.pep
MASLHANVTSVVCKSGNHASQSKFTSSSFLPGFDVVGRASNAWKKELVPSSISLVPRATLTFDPPTTNSDKTKQRKHTVDPAS

SEQ ID NO: 181061 - protein, 67 aa, Glycine max
  Clone ID: PAT_MRT3847_134513C.1.pep
LSTANTSAPATASGSTSPSALAGTTPYSRTTGMVHHSVVVFNLSLLTVGVDLAANLCVRALFPICSR

SEQ ID NO: 181062 - protein, 61 aa, Glycine max
  Clone ID: PAT_MRT3847_134514C.1.pep
LDCQISDSVMKWKFRPSFSVLEQMVPIYFNASFVFLLPRIRPLEVCCHIAHPISWSLLLVV

SEQ ID NO: 181063 - protein, 77 aa, Glycine max
  unsure (1)..(77): unsure at all Xaa locations
  Clone ID: PAT_MRT3847_134515C.1.pep
ARDDVALFIGDGLRPGSIYDANDTAQFAELLTQGELTRRAWEKDVXVMNEGPGHIPMHKIPENMQKQLEWCSEAPFY

SEQ ID NO: 181064 - protein, 55 aa, Glycine max
  Clone ID: PAT_MRT3847_134516C.1.pep
RVSYPKSLRCQVETSKWFCITSMGFLDGQENLIYDKICYQILLKIFHLLFGESIG

SEQ ID NO: 181065 - protein, 294 aa, Glycine max
  Clone ID: PAT_MRT3847_134517C.1.pep
MASLHANVTSVVYNSGNRVSQSKFASSSFLSGFDVVGRASSAWKKELVPSSISLVPRATLTFDPPTTNSDITKQKKHTLDPASPDFLPLPSFEQCFPKSTKEHREVTHEETGHVLKVPFRRVHLSGEAGHFDTYDTSGPQNVNPRTGLPKLRGGWVDRREKLGYPRFTQMYYAKQGIITEEMLYCATRENLDPEFVRSEVARGRAIIPSNKKHLELEPMIVGRNFLVKVNANIGNSAVASSIEEEVYKVQWATMWGADTAMDLSTGRHIHETREWILRNSAVPIGTVPIYQALE

SEQ ID NO: 181066 - protein, 101 aa, Glycine max
  unsure (1)..(101): unsure at all Xaa locations
  Clone ID: PAT_MRT3847_134518C.1.pep
MGDETQNKYESSEVEGQNRGDFDFLGXKKEEKNKPLPQEEVIATEFKKVTVSDQGENKHSLLKKLNRSDRSFSFSFKEEGEDGEKRMKNRRGPKGLKEKIQ

SEQ ID NO: 181067 - protein, 48 aa, Glycine max
  Clone ID: PAT_MRT3847_134519C.1.pep
MFSPCIRQAQPSDSISAMLLSAEVIRQWCIDIWGVPCMLCNAVLYVQC

SEQ ID NO: 181068 - protein, 80 aa, Glycine max
  unsure (1)..(80): unsure at all Xaa locations
  Clone ID: PAT_MRT3847_13451C.1.pep
ADDCTCEICTNTNGFCNLCMYVSGNKLGGXVNTCLLIGCDLCSHWTHTYCAVGEQLICMGPSSKSGAXLVKWFFMCLACN

SEQ ID NO: 181069 - protein, 69 aa, Glycine max
  Clone ID: PAT_MRT3847_134520C.1.pep
SSCSRNITLRLFPINMNFFWVFETQISSIVLRSTKDLWFDTYQIVYCFIHTCELDLTRHFCLPQSARII

SEQ ID NO: 181070 - protein, 38 aa, Glycine max
  unsure (1)..(38): unsure at all Xaa locations
  Clone ID: PAT_MRT3847_134521C.1.pep
ARSWGNFMRLKISLTSXFSLFMVCPHFLPVSISSPSPR

SEQ ID NO: 181071 - protein, 46 aa, Glycine max
  Clone ID: PAT_MRT3847_134522C.1.pep
AGPKGSLTFPIKRPPWDGIGDGLSGSPANLSRVSSRITAFAMTDHS

SEQ ID NO: 181072 - protein, 66 aa, Glycine max
  unsure (1)..(66): unsure at all Xaa locations
  Clone ID: PAT_MRT3847_134523C.1.pep
KYQLIKECQIMKLKTQKSYKIIIKEKSANKIKKTFXQCQPNWKFILDLLNNKWEQSNQISIKKLIN

SEQ ID NO: 181073 - protein, 44 aa, Glycine max
  unsure (1)..(44): unsure at all Xaa locations
  Clone ID: PAT_MRT3847_134524C.1.pep
ESSAYLRINTPLLIVEVIFDVCVVXXKKKKXKARGRTVRLSTGN

SEQ ID NO: 181074 - protein, 79 aa, Glycine max
  unsure (1)..(79): unsure at all Xaa locations
  Clone ID: PAT_MRT3847_134525C.1.pep
LRATISSAFPCLNFQLCPFHNTIISNLISSSIRATLDYPLNYTHSYXANLIPPYINHIRYLNSDLRLVNNITKLTTTSL

SEQ ID NO: 181075 - protein, 356 aa, Glycine max
  unsure (1)..(356): unsure at all Xaa locations
  Clone ID: PAT_MRT3847_134526C.1.pep
MDGPAGRGGAGLDMFLPNYKLGKTLGIGSFGKVKIAEHVLTGHKVAIKILNRRKIKNMEMEEKVRREIKILRLFMHPHIIRLYEVIETPTDIYVVMEYVKSGELFDYIVEKGRLQEDEARNFFQQIISGVEYCHRNMVVHRDLKPENLLLDSKCNVKIADFGLSNIMRDGHFLKTSCGSPNYAAPEVISGKLYAGPEVDVWSCGVILYALLCGTLPFDDENIPNLFKKIKGGIYTLPSHLSPGARDLIPGMLVVDPMRRMTIPEIRQHPWFQARLPRYLAVPPPDTMQQAKKIDEEILQEVXKGFARNKWVXSLGDKIQNEGTVAYYXVLDNRFRVSSGYLGAEFQETMDCRFNQM

SEQ ID NO: 181076 - protein, 134 aa, Glycine max
  Clone ID: PAT_MRT3847_134527C.1.pep
TRYFGKGREDGGPGLEEVEHVNTIFTLLKHVYAFSVSDYIPCLRILDLDGHKSKVKKGMRTMKKYHDPIIEKRMKQWNDGSKTVEEDLLDVLISLKDVNNNPTLTLKEIKALTIVIHSLSVTQSSPCMITSSPI

SEQ ID NO: 181077 - protein, 63 aa, Glycine max
  unsure (1)..(63): unsure at all Xaa locations
  Clone ID: PAT_MRT3847_134528C.1.pep
VKLEFVIGIGKSYGINIECSSRGGSKVCVDRKFLYLMKVILWLGFSKKKSLPWCXXVPENSIL

SEQ ID NO: 181078 - protein, 190 aa, Glycine max
  Clone ID: PAT_MRT3847_134529C.1.pep
MEDKYSLGRQHSGIWKSLRDGDFDEEEVWDVFKNRSSDYGTSGVSKFKDKDQSSSVPVPARPSSARMIPRSSNSSSASSSNEDTVLQQSAPVNIPDWSKIYRTKLPKNSANSRFDGDGVANYGGGSDEDGEENDESDSKFPPHEFIARRLERSQISSFSVLEGAGRTLKGRDLSKVRNAVLSKTGFLESL

SEQ ID NO: 181079 - protein, 72 aa, Glycine max
  Clone ID: PAT_MRT3847_13452C.1.pep
TLGFHILQSSPIRFKFTDSVKDFQQNQNFMGSNDSFGDRIFKTRSHLADVTNRAAKRAVSLVSGDGGDLQFT

SEQ ID NO: 181080 - protein, 62 aa, Glycine max
  unsure (1)..(62): unsure at all Xaa locations
  Clone ID: PAT_MRT3847_134530C.1.pep
FXKKNLLCSLFALLLLPIISLQTCSARNHFRISIKLGYFKLLIPGRQQQQQQQKVVPFIFPQ

SEQ ID NO: 181081 - protein, 111 aa, Glycine max
  unsure (1)..(111): unsure at all Xaa locations
  Clone ID: PAT_MRT3847_134531C.1.pep
DASSVFNVHGVNYSHAXPVFLXVDATTNVNTSPYLDLELLQKIAPVIKDHLVILNEDSLRKNSVLVYHLLDELIDFGYVQTASTEXMLSYVFDEPLPMDAARLLTPGPAAI

SEQ ID NO: 181082 - protein, 69 aa, Glycine max
  Clone ID: PAT_MRT3847_134532C.1.pep
IYRIHIHTQSLWCRCVLRPELSLDRYTDPLYTFASESNEPKMVNDAFDQTRIAHMHSNCVEDGMQTSDA

SEQ ID NO: 181083 - protein, 235 aa, Glycine max
  unsure (1)..(235): unsure at all Xaa locations
  Clone ID: PAT_MRT3847_134533C.1.pep
FSFWNFTGKFDCSVSKTVPLRLEMEEPLQEEHAPPNKRFKSSSASQDEQWNASNGASSSSSPSQYNILDEPSPLGLRLRKSPSLLDLIQMKLSQGNVIIANTQDENFISSGLKKESRGAAASGSVEKLKASNFPASLLRIGSWEVYPRLLLHATSILGKKKFQXVLLSLRFSLWQYKSKHEGDLVAKCYFAKQKLVWEVIEGELKSKMEIQWPDIMGLKANCADTEPSSVAGGGD

SEQ ID NO: 181084 - protein, 212 aa, Glycine max
  Clone ID: PAT_MRT3847_134534C.1.pep
PQTVKMSLGHYSNEKKVEPNCVIKNVSSTLSSPSKASRRSSSPSSEDENFLFSDLDKSVINDRFERSFSPEHVDKEDHVSYGNDTEKLTAISNPIVIPRTIAAVEEVVQLSGSLPNISSGSDIMVEYDVHYPLSQSLDSNSTSLPWAFPGKDDLECLKSDEDKRNQLPHEEQGAKDYNDSGEFKGTVLKLPLAKRTYISCLSTELKTIHVFR

SEQ ID NO: 181085 - protein, 54 aa, Glycine max
  Clone ID: PAT_MRT3847_134535C.1.pep
FSLKFSYSFLNKFPWGILITFIMSVKYRNIPTKKYKTKRVVLFYFPQIHDRQSY

SEQ ID NO: 181086 - protein, 189 aa, Glycine max
  Clone ID: PAT_MRT3847_134536C.1.pep
MARQVCDDKLSTGFCYSDVSSGNPTMLVNQIQGFVSDPEMYNLTTGMEMIGFPKSDTNAVMWRSFIPEPGPSSSKTINDSSTTFYHHDYNNKNADFTPAGNISETSAENLIVGNHDSAPWQDNNNNRFDDSSLRCVFPCETNERPSQGLSLSLSSTNPSTIGLQSFELRQTGHHPDFVSSSSREGFFGK

SEQ ID NO: 181087 - protein, 37 aa, Glycine max
  unsure (1)..(37): unsure at all Xaa locations
  Clone ID: PAT_MRT3847_134537C.1.pep
KAIVTSAHSDHEAFLWELXAADSFTVTSDSSREVFGR

SEQ ID NO: 181088 - protein, 63 aa, Glycine max
  Clone ID: PAT_MRT3847_134538C.1.pep
PISTIRNLGVSLTIFHRSASTMTISFTEVTYPNSYLYQHLLLSGHIICIELTLDQVLSYLIFS

SEQ ID NO: 181089 - protein, 111 aa, Glycine max
  unsure (1)..(111): unsure at all Xaa locations
  Clone ID: PAT_MRT3847_134539C.1.pep
KIGTTPYRCVIYMISSLVGNAAALVFLMSLMTHALPASAGSTMCVEYHRGMIEFYHDXTSALSRIAHRRMSLYTANGIIMSPRXGATLNNLLLEMCRILRPDRAFIFRDYL

SEQ ID NO: 181090 - protein, 478 aa, Glycine max
  unsure (1)..(478): unsure at all Xaa locations
  Clone ID: PAT_MRT3847_13453C.1.pep
KIKAFIGGLDLCVGRYDTPNHSIFRTLQTTHKDDYHNPNFEGPVTGCPRQPWHDLHSQVDGPAAYDILTNFEERWLRALKMHRFQKMKSSHDDSLLKIDRIPDIVGIDEVPCQNENNRETWHAQVFRSIDSNSVKGFPKEPQDAIRRNLVCGKNVLIDMSIHSAYVKAIRAAQKFIYIENQYFLGSSYNWDSYKDLGANNLIPMEIALKIANKIKQHERFSVYIVIPMWPEGVPTSTATQRILFWQFKTMQMMYETIYKALQEAGLDNKYEPQDYLNFFCLGNREIPDNENVLNDVKTTGENKPQALTKKNRRFMIYVHSKGMIVDDEYVLLGSANINQRSMEGTRDTEIAMGAYQPNHTWAKKQSKPHGQVHGYRMSLWSEHIGAVEECFEEPESLECVRRIRSLSEFNWRQYAAEEVTEMKSHLLKYPLEVDSKGKVKPLFGCEAFPXRWWEHKWHFHTTQRKSHHLIIYVSSLTQ

SEQ ID NO: 181091 - protein, 38 aa, Glycine max
  Clone ID: PAT_MRT3847_134540C.1.pep
RNPANLSCKDLGIDLVIEGTGVFGYRESALKHINAGAQ

SEQ ID NO: 181092 - protein, 528 aa, Glycine max
  unsure (1)..(528): unsure at all Xaa locations
  Clone ID: PAT_MRT3847_134541C.1.pep
MGLSLSLLSSAWEEIVRHSLFGLSLNFTFGSKDGAMILRSGSFKIRESETTSKGASTTNFSSKLTDCRPEHMVLEPNLSCIKDMEIMESKSSEQQLQHQPVPVLSLPKEVVFSSPRPVSELDAAATKLQKVYKSYRTRRNLADCAVVVEELWWKALDFASLKRSSVSFFDVEKHETAVSRWTRAKTRAAKVGKGLSKDDKAQKLALQHWLEAIDPRHRYGHNLHMYYDIWFENQSTHQHSSFLAGAATTAVGRLMAQQGVLDAIALYSGHYHHTEENFKXIEKGKLVYKQDGRFVDTNGNSKWIFVLSTTRSLYVGRKQKGAFQHSSFLSGAATTAAGRLVAQQGVLEAIWPYSGHYHPTEENFKEFISFLDEHKVDLSNVKKCAVDDDAPSIVGSNSFIDINESQQINEGPTVSSSNNVNNNGITINATFNKEIEKKVVATVFDVPKRLTCKWSTGAGPRIGCVRDYPGHLQIRALEHVNLSPRPASARPYSYGPIPSPRPSPKVRMSPRLAYMGLPSPRPSIPATS

SEQ ID NO: 181093 - protein, 140 aa, Glycine max
  unsure (1)..(140): unsure at all Xaa locations
  Clone ID: PAT_MRT3847_134542C.1.pep
SXFSXXSPXXXXXLPSPSXSFLXACLFXLAXLXFXLPXLFSPSFRVXXXSRXXXXXSXFVSXXAXXXLXLXSLLLXLTXXXWAXCLRCXXPXFFXSLXXXAPSSXLXXAXSLPXACFXPLXAXXSSXVXLRXXLLSAXVS

SEQ ID NO: 181094 - protein, 142 aa, Glycine max
  Clone ID: PAT_MRT3847_134543C.1.pep
CRLYVGDGKEINLEKCPRSILQRQCIKYLGPKEREEYEVIVEKGKLVYKQDGRLVDTDGKSKWIFVLSTTRSLYVGRKQKGAFQHSSFLAGAATTAAGRLVAQQGVLEAIWPYSGHYHPTEENFKEFISFSDEHNVDLSNVK

SEQ ID NO: 181095 - protein, 115 aa, Glycine max
  Clone ID: PAT_MRT3847_134544C.1.pep
MGTENPGRPTFPPSRPASSPFAAAQTVSPFSSTGPVAGSEPPSFRPSPSAPPPQGAMRFSSAGPAAVRPGAPSFRPAPPGRFNDPSVPPPVGPSNAPPAAGPFQQFPPPPFPPTM

SEQ ID NO: 181096 - protein, 68 aa, Glycine max
  Clone ID: PAT_MRT3847_134545C.1.pep
PAQLLKVNLCPCMDFVSNVCLIFSVTAQDLVDIIKAQLQRYNLFYVQKSFTILYNYSLCLFSNVAKIC

SEQ ID NO: 181097 - protein, 208 aa, Glycine max
  Clone ID: PAT_MRT3847_134546C.1.pep
MGTENPGRPTFPPSRPASSPFAAAQTVSPFSSSGPVAGSEPPSFRPSPPAPPPQGAMRFSSAGPAAVRPGAPSFRPAPPGRFNDPSVPPPVGPSNAPPAAGPFQQFPPPPFPPTMQPRGPPQPMLPPSIQSPPSQALPFPTSLPAQPQMPSVPMGSPPPPPQSAAPAHLGSNFPPPPPTIQPSFPGYPSKHASPEMQAPPMHSCVPAN

SEQ ID NO: 181098 - protein, 287 aa, Glycine max
  Clone ID: PAT_MRT3847_134547C.1.pep
RAARADSARVFSFSEIKSLTGDLKDQIGPNMFKGVLPNNHLIAVKDLNASIEERKFRSAVMKLGNIHHKNLVKLEGYCCEFNHRFLVYEYVKIGSLHKYINDCTLCKRLTWRKRIEICSSVAKAICYLHTGCREFVSHGNLKCENVMLDENSVAKVCEYGFAIADGEATYRGFSAEKDVGDFGKLALTLFTGCLVHEQLYEWAYTEWMEGRAVNVVDKRLDGVVNSEELERALRISFWCLQMDERRRPSMEEVVRVLDGTLNVDPPPPPFVLHRPLQEDDPQENGSD

SEQ ID NO: 181099 - protein, 62 aa, Glycine max
  Clone ID: PAT_MRT3847_134548C.1.pep
GKRDPHRVLQMGLCGSYDFDSFFMNGVDTVSQGPTLLGPHKVLSCWGCVYPFHFMNVVRGIQ

SEQ ID NO: 181100 - protein, 87 aa, Glycine max
  unsure (1)..(87): unsure at all Xaa locations
  Clone ID: PAT_MRT3847_134549C.1.pep
MVERGGGHKCLAEPAKLGSMESRVLKRVQKEFETXKDWKGLKLEVDETSFDFVTLYEIECESFDPKRAKCLLEDFTLSSSPRVRGRV

SEQ ID NO: 181101 - protein, 65 aa, Glycine max
  Clone ID: PAT_MRT3847_13454C.1.pep
FDSPNYLHSGLLEFLCNKTNFLRKNQHVGSLFTLLCIYGSLCFGILVGMDEKLRNKPCVMSKYTF

SEQ ID NO: 181102 - protein, 51 aa, Glycine max
  Clone ID: PAT_MRT3847_134550C.1.pep
VYNRLSVYIQCDVWEMIVLIEDDISVSVDPTLLYRYNCRGMYDMYDEEECS

SEQ ID NO: 181103 - protein, 139 aa, Glycine max
  unsure (1)..(139): unsure at all Xaa locations
  Clone ID: PAT_MRT3847_134551C.1.pep
FLNGLCYDREGCLLLTNPRRAYASHLKRFDLNQLPDGTDIAEPALVIETAPSDSDCYFFLAALHGQKDLLEXGLGVGALQRIYCGLNRNGSLTPHFCLSTDALARRILQQTQNMXIGEIDTEXGRNITSSGHEDLDQRC

SEQ ID NO: 181104 - protein, 44 aa, Glycine max
  Clone ID: PAT_MRT3847_134552C.1.pep
VFWLVSKLFLVTCLGVLFSNQNMAQEQRHQICFYQLHFRINAFY

SEQ ID NO: 181105 - protein, 75 aa, Glycine max
  Clone ID: PAT_MRT3847_134553C.1.pep
GGLDPSSLYNTQKMKSNGYQKPIQLYIRISTESYKKTNIIPIKLLIMDDDHATFYFPGCPETNVHKNPSGLTIQV

SEQ ID NO: 181106 - protein, 68 aa, Glycine max
  unsure (1)..(68): unsure at all Xaa locations
  Clone ID: PAT_MRT3847_134554C.1.pep
QLLSLXXFIXMYLVHDLIXKPQYXXLFSYXTPRXXXXPXXTVYXYPXXIXXNMXSRAEFRAYVRXXST

SEQ ID NO: 181107 - protein, 68 aa, Glycine max
  Clone ID: PAT_MRT3847_134555C.1.pep
YLDCPAFKVGEHHHVSESLCLTRAHTHMNEGVFPHQKKGKNIPLALIFHANSNHMHFKFMYNKLIPFP

SEQ ID NO: 181108 - protein, 128 aa, Glycine max
  unsure (1)..(128): unsure at all Xaa locations
  Clone ID: PAT_MRT3847_134556C.1.pep
AYPGKDHTTADXDGSYIVRPAEHGVQEHGLYRTSISQLYYPMVVHQPLSPYGGPYRTANKHLLGLLYKHNEQFHCLPXLITINLDLPSDXTSFLRTAAHGHYXRDDPDSTWEDTNPHPCVKPKPIDWG

SEQ ID NO: 181109 - protein, 33 aa, Glycine max
  Clone ID: PAT_MRT3847_134557C.1.pep
EEEDIGVIEIVTGGLRVTAPIMRNPQQEQNEDD

SEQ ID NO: 181110 - protein, 39 aa, Glycine max
  Clone ID: PAT_MRT3847_134558C.1.pep
YPSLGAYHCEYSRANNGCSLALLYFLIYLMLMLELAATS

SEQ ID NO: 181111 - protein, 122 aa, Glycine max
  unsure (1)..(122): unsure at all Xaa locations
  Clone ID: PAT_MRT3847_134559C.1.pep
TGGGSAPKRXAXXERSKGXXARRXAXGAKAPEXXGKXXQTXQETAXPTARTXETPGAGTNIFFXDAXTXXXXEXARRGXAEHRRNQDRAKPGXXGKQXAQGPEKXXGGXXEPXNPGGXXGNP

SEQ ID NO: 181112 - protein, 41 aa, Glycine max
  Clone ID: PAT_MRT3847_13455C.1.pep
KGFGFVNFVNREDAQRAIGKLNGYGYDNLILRVEWATPRAN

SEQ ID NO: 181113 - protein, 518 aa, Glycine max
  unsure (1)..(518): unsure at all Xaa locations
  Clone ID: PAT_MRT3847_134560C.1.pep
MASNNHSPSLEILVRGPEDFSLWTGPPFANDQPSIKLEKVKCINAKFSDDGSKLMVTKSNSLISVYDCRIAEEIRAFEVPNVVAAXFSPNGTYLQTFQKPSAPQEKNVTLWSIETGAAVHQQSQKNMTKANWPAIQFSSDEATACRLATNEVQFFDTGDFSKGVVCRLRVPGVAAAELSSLPGSHVAALAPESKGVPASVQIFACGNASQSQPVARRSFFRCSTTQLKWNHGSTGLLVVVQSDVDKTNQSYYGESKLCYLTTDGMHEGLVPLRKDGPIHDAQWSYSGLEFAVVYGFMPAKATLFDKKCNPLLELGTGPYNTIRWNPKGKFLCLAGFGNLPGDMVFWDYIDKKQLGATKAEWSVTSEWSPDGCYFMTATTAPRLQVDNGIKIFHYNGSLYFKKMFDKLYQVDWKPESPGKFGDIAELIKSLNLVQLEDKKPSGQGPPKSTQTSTKASSANPTTQKPAAYRPPHAKNASAIQAELFGETTAETLSKNALRNKKKREKQKEKKAASDASSS

SEQ ID NO: 181114 - protein, 94 aa, Glycine max
  Clone ID: PAT_MRT3847_134561C.1.pep
AELIKSLNLVQLEDKKPSGQGPPKSTQTSTKASSTNPPTQKPAAYRPPHAKNASAIQAELFGETPAEPLSKNALRNKKKREKQKEKKASDASSS

SEQ ID NO: 181115 - protein, 54 aa, Glycine max
  Clone ID: PAT_MRT3847_134562C.1.pep
NTRILENRIRHKILTSGLHVTKIRYIFEYYKSSPPTQDALVYYVYITNMIMLIH

SEQ ID NO: 181116 - protein, 60 aa, Glycine max
  Clone ID: PAT_MRT3847_134563C.1.pep
DRKRHLLLNINQKSNVYMDTDFNRSLSEIKFSPFIFLSFSLNIKGSPPSVVFSQPYGRVG

SEQ ID NO: 181117 - protein, 166 aa, Glycine max
  Clone ID: PAT_MRT3847_134564C.1.pep
MAFVTTAEVCDANPQLILSGELRALQPVFQIYGRRQVFSGPIVTLKVFEDNVLVREFLEEKGNGRVLVVDGGASLRCAILGGNPVVQAQNNGWAGIIVNGCIRDVDEINGCDIGVRALASHPMKANKKGMGEKQVPINIAGTRISDGEWLYADTDGILISRTELSV

SEQ ID NO: 181118 - protein, 47 aa, Glycine max
  Clone ID: PAT_MRT3847_134565C.1.pep
LEPMKANKKGMGEKHVPVNIAGTRISDGDWLYADTDGILISRTELSV

SEQ ID NO: 181119 - protein, 40 aa, Glycine max
  Clone ID: PAT_MRT3847_134566C.1.pep
SSRIGSRRLRDTDDERPIDSSIPHLLLATHFFQVEPSMSL

SEQ ID NO: 181120 - protein, 70 aa, Glycine max
  Clone ID: PAT_MRT3847_134567C.1.pep
TNSVGDPPPQASKIAQINFFLDKGRGLFVSVKFVIPLEHICHMLDLWPHNYLGVLSAPLIFLNKNPKEGF

SEQ ID NO: 181121 - protein, 41 aa, Glycine max
  Clone ID: PAT_MRT3847_134568C.1.pep
TQAHQCHFKTSRLGIQKGSITMKRRRLENERVSYESHHNYY

SEQ ID NO: 181122 - protein, 118 aa, Glycine max
  Clone ID: PAT_MRT3847_134569C.1.pep
VFGVRFRPADATRFGVAGRAWRERSAPISCGQRLAGWWGYGSWPYVHSILNWWFPFEREPERRALPRRRRRRGRLFLSGVGAGVLKIERNLPPAFMARHEVLNASHKACFGLAPGSAD

SEQ ID NO: 181123 - protein, 198 aa, Glycine max
  unsure (1)..(198): unsure at all Xaa locations
  Clone ID: PAT_MRT3847_13456C.1.pep
NDSVLSLAFFVTLCTCLLCGNSYDDHLSLPSQLYDYDSVSCTDTDPNLNYMPVIGILTHPADSASGRLNNATGVSHIATSYIKYVESGGARVIPLIYNESPDNLNKKLHLVNGVLVSGGWAASGTYXDTLGSIIKKVSEYYDAGDHLLVIALHLGGYLMMKIVXEHTDMLEPCTATSLPSTLXIVEDSDAXGSLLXRF

SEQ ID NO: 181124 - protein, 52 aa, Glycine max
  Clone ID: PAT_MRT3847_134570C.1.pep
NSRANPRVRVCQEGGRPVNHLAPSDEIKEGIFLDKSIGSSPTSGSDLVGTAA

SEQ ID NO: 181125 - protein, 56 aa, Glycine max
  Clone ID: PAT_MRT3847_134571C.1.pep
DHVQPPVLPFVRIQQHWGRKAAIQTGQYCPSKHRQILSPCIPFIRITNSHRSQGPG

SEQ ID NO: 181126 - protein, 366 aa, Glycine max
  unsure (1)..(366): unsure at all Xaa locations
  Clone ID: PAT_MRT3847_134572C.1.pep
MLNNNCSSSLLFRGPGLAFSHSIATTCNKRNTCWKAPQAAVRNDFCLPMSSSAVKNRTSIGDIRSLRLITAVKTPYLPNGKFDLEAYDNLVNMQIANGVEGILVAGTTGEGQLMTWDEQIMLIAHTVNSFGNKVKVVGNAGSNCTSEAIKATERGFAVGMNAALHINPYYGKTSLDGLVAHYNSVLSIGPIIIYNIPTRTNQDIPPSVVQNLAXKNPNLVGLKECXGNERIKHYTDQGIVVWTGIDKTSHDARWDFGAVGVQSVASNLIPGLMRELMFEGKNATLNSKVIPLFDWLSQEPVPIALNTALAQLGVIKPVFRLPLLPLLVEKRIEFVMLVKEIGREHFVGDKDVQVLDDDDFITVGRY

SEQ ID NO: 181127 - protein, 223 aa, Glycine max
  unsure (1)..(223): unsure at all Xaa locations
  Clone ID: PAT_MRT3847_134573C.1.pep
MKHVHRIFVDGSNSLQVRLYGMSAQRRPXLSFHFRETPIKALPEDIXGKSIYVGNGSGDMASVDIRTGKMLGCFSGKCSGSIRSIVRHPELPVIASCGLDSYLRLWDTKTRQLLSAVFLKQHIMHVLFDSNFDVKGVDSLPCKEQTPTEILVSEEVEESPLKRKKSSRNKEHIPDGGERKKRTKQSKERKKSEGNDGGEKIASRDEGSRSASKKRNKRSIPVL

SEQ ID NO: 181128 - protein, 76 aa, Glycine max
  Clone ID: PAT_MRT3847_134574C.1.pep
FNHYFSHILSISLLFPPSLYITLITNYLLRIKQSITTLTLLSFKNIKALFPCLLHQDNIFNTSLCHLTFLPHNFIY

SEQ ID NO: 181129 - protein, 205 aa, Glycine max
  Clone ID: PAT_MRT3847_134575C.1.pep
MHFPMKIQPIDSQVPSEGTRLELAKPVVKSRLKRLLERQFSGVLRNSAPEKIAGGDEPLNGSNDFEPSSACLAKMVQSFIEESHEKHSASHHRNRCNCFNRNYDDSSDEDSNSFGDSNFSSGEACETLKGLVACASVRDRSLLADTAKIVEKNKICKRKDSFCRKIVTDGLLALGYDASICKSRWEKSPSYPAGGYEYIDVMMGE

SEQ ID NO: 181130 - protein, 116 aa, Glycine max
  unsure (1)..(116): unsure at all Xaa locations
  Clone ID: PAT_MRT3847_134576C.1.pep
NKYIEEPKRRLQETKQRLGRVRPKTVQMSSRQVIKPHQSVMNLHFXTMKMLLDEVAILPSEMLMNTITRFSTHLMKLIKNGTVRSNTVNLHDDELKLHKDVLDHLIDIITDHIDVN

SEQ ID NO: 181131 - protein, 374 aa, Glycine max
  Clone ID: PAT_MRT3847_134577C.1.pep
DSVLSHLCVVIAELFPMKIQPIDSEVLAEGTRLELTKPVVKSRLKRLLERQFSGVLRNSAPEKIAGDDETLNGSNDFEPSSACLAKMVQSFIEESHEKHSASHHRNRCNCFNRNYDDSSDEDSNSFGVQDDSNFSSGEACETLKGLVACASVRERNLLADTAKIVEKNKICKRKDNFCRKILTDELLTLGYDASICKSRWEKSPSYPAGEYEYIDVMMGKERILIDIDFRSEFEIARSTKAYKTILQNLPYIFVGTCERLQSIVALVSEAAKQSLKKKGMHVPPWRRTEYVKAKWLSPYTRTPNSDDIKEEKKKEEEQQQLFKDNLNTAESESSGEDNTAVVEWKPPELKPKGSLSGVKVVTGLAVVFHDDNNP

SEQ ID NO: 181132 - protein, 130 aa, Glycine max
  unsure (1)..(130): unsure at all Xaa locations
  Clone ID: PAT_MRT3847_134578C.1.pep
WRKWASCVGVLAMQELSRRAKMISRMLRGGERELRERSQLVSAGLSGTEMGQSDGWRXVRMPILKGFPVTVMWHLIEAERLFRCRHEQILRRAKDPTLIQRSSKRVPLPRVNGDEDKIWDWEKVKPYVQG

SEQ ID NO: 181133 - protein, 76 aa, Glycine max
  Clone ID: PAT_MRT3847_134579C.1.pep
MASLATLAAVQPATINGLAGRSLSGTKLSFKPSRHSVKSENFRSGAVVAKYGDQSVYFDLDDLGDTTGLWDLSSSD

SEQ ID NO: 181134 - protein, 109 aa, Glycine max
  Clone ID: PAT_MRT3847_13457C.1.pep
SKRTTRSTIRFPFPAQHGRQHIVPVKGPRRRRAPLQRQADTGLRNYGNHKAVMRGILPLRRLRLTNPTPTGPVPAITLPRGGGPLPVLRAVQHGVPNSTDRPLHPDWSR

SEQ ID NO: 181135 - protein, 61 aa, Glycine max
  unsure (1)..(61): unsure at all Xaa locations
  Clone ID: PAT_MRT3847_134580C.1.pep
EPPPAPMIDADXLTQWPFYRALSAEPIAPMLFLYIRELSEIGYKSQSDVEDGADVCGGDEI

SEQ ID NO: 181136 - protein, 52 aa, Glycine max
  Clone ID: PAT_MRT3847_134581C.1.pep
YYGMIFDLMQYPASVFCGKNSVYGDTLRKIGFKGYSSGKPLDPWLADMHDAA

SEQ ID NO: 181137 - protein, 29 aa, Glycine max
  Clone ID: PAT_MRT3847_134582C.1.pep
IFSLNNSFMHNVHESWKGIPHLLNFKKLL

SEQ ID NO: 181138 - protein, 102 aa, Glycine max
  Clone ID: PAT_MRT3847_134583C.1.pep
DSLDWKLMGMEYVRARRLALHKVYADSFVDAEIGSFEQYKFKISKPLSVPGSPKIRGSNGIESGGDNNSIKISNEIINGLSFFDDDEEWISIPHKYQIQQYH

SEQ ID NO: 181139 - protein, 99 aa, Glycine max
  Clone ID: PAT_MRT3847_134584C.1.pep
SNSSSAMIGRFYGNSYSHQQLQPINGSPLGSWRIPTAATTAHAQSNPIFNRECSLHPLPLFSGEEMVNARMGFSGSQNRFGNYDPKSSVNDHLSLDLHL

SEQ ID NO: 181140 - protein, 156 aa, Glycine max
  Clone ID: PAT_MRT3847_134585C.1.pep
VVIYLMLNCLPRFRCISFLYSLPKLSYNIKQIHAQLITNGLKSPTFWAKLIEHYCGSPDQHIASNAHLVFQYFDKPDLFLFNTLIRCVQPNDCILIFQNEFSRGLMYFDEYTYNFVLGACARSPSASTLWVGRQLHARIVKHGFESNILVPTTKIY

SEQ ID NO: 181141 - protein, 38 aa, Glycine max
  unsure (1)..(38): unsure at all Xaa locations
  Clone ID: PAT_MRT3847_134586C.1.pep
IXVLXTXKEYKXXSLRYVFSIGSYEAIILXSIYFFNPN

SEQ ID NO: 181142 - protein, 90 aa, Glycine max
  Clone ID: PAT_MRT3847_134587C.1.pep
SKKALANCSPSRRVDSMILKFATLLFESRFMNGMAKRVGGASACVSTPLEATELAMPTCVLSTPLLPLMCSTGPSDGAQSAHGAGDVAAR

SEQ ID NO: 181143 - protein, 66 aa, Glycine max
  Clone ID: PAT_MRT3847_134588C.1.pep
MEEICCANNFGKNYFTKAKPYFLTVALQFGFAGGYIFTVASFNSGMCRFVFIVYRNAFAALALAPF

SEQ ID NO: 181144 - protein, 122 aa, Glycine max
  Clone ID: PAT_MRT3847_134589C.1.pep
MAVENPEDGLKKLEYLSLVSKVCTELESHTGTGDKVLAEFITELGRSSENVEEFDEKLKENGAEMPDYFVRTLLTIIHAILPPKPMDSKKEKDSVNGKTTKFKALAIADDRDPAKELQKELE

SEQ ID NO: 181145 - protein, 60 aa, Glycine max
  unsure (1)..(60): unsure at all Xaa locations
  Clone ID: PAT_MRT3847_13458C.1.pep
FAYXXRFKXFPXNFXNQQEMFDXKASXSVXSIINKKWELVLHFXDXIRPIQLNCLLIQFQ

SEQ ID NO: 181146 - protein, 42 aa, Glycine max
  Clone ID: PAT_MRT3847_134590C.1.pep
HKPDKCFKDQLPIQILYFNKKLYKRRYMLKHSLTGFCLKNHF

SEQ ID NO: 181147 - protein, 62 aa, Glycine max
  unsure (1)..(62): unsure at all Xaa locations
  Clone ID: PAT_MRT3847_134591C.1.pep
SYLLCKXMXLQXISMGGSLTXIEVAEXVLTSXGGFXSREGSASKXRRGLNPXGAGKWKDSGX

SEQ ID NO: 181148 - protein, 53 aa, Glycine max
  unsure (1)..(53): unsure at all Xaa locations
  Clone ID: PAT_MRT3847_134592C.1.pep
PVWXXLMVQQXRVVVTVCMQSRFXLIXXDXSXXFXVEXLXXIISVCIHXPXXD

SEQ ID NO: 181149 - protein, 90 aa, Glycine max
  Clone ID: PAT_MRT3847_134593C.1.pep
HTLHTSFGQLKEVWKFSNSQSILNKRAMPNSFYEFNQRTKEKKPQFQVHPKNPPFQKNWQEPGEPKKAGIKEYPPFPNPPQPKSEPTDGG

SEQ ID NO: 181150 - protein, 112 aa, Glycine max
  Clone ID: PAT_MRT3847_134594C.1.pep
IHNTLQLSDKQFLDEIHYRKPFTNTGNQICFQCMKLINDDDVNTMLMCNDQFSCVGLIELLCTVGRTPDGIINLLQRIMPRTHDAILYYNGKWNMPPQNKFLGCAFTGKNPK

SEQ ID NO: 181151 - protein, 61 aa, Glycine max
  Clone ID: PAT_MRT3847_134595C.1.pep
SANQRDIKMLNAYLMADEPYVILDISLRLNFTSCGQHTFAIKEHSETLVITREQLVPLYAP

SEQ ID NO: 181152 - protein, 33 aa, Glycine max
  unsure (1)..(33): unsure at all Xaa locations
  Clone ID: PAT_MRT3847_134596C.1.pep
FLGLYTFXLVRNNGXVVGAIPAXAXTLEXLRVL

SEQ ID NO: 181153 - protein, 165 aa, Glycine max
  unsure (1)..(165): unsure at all Xaa locations
  Clone ID: PAT_MRT3847_134597C.1.pep
SPERVLSDCIYDDPDTSADKPNALIFMWRKHSVLIDQTSVPDNRXPCKRHEGLLHXHLITXCLKDKQEHWLQKGYRLFLDAIEKKAEICELXDSKRAWVKPPKQLGSXMETMVQTGRVGTHTALDAHHXAGYTAQAERLTGTRRGHSCRPVIRGPNXAGLCTTTV

SEQ ID NO: 181154 - protein, 97 aa, Glycine max
  Clone ID: PAT_MRT3847_134598C.1.pep
SSLGVNVYRFSISWTRILPRGIYGDINPNGIMFYNKIIDNLLLRGEVTMSMSTWFSIMLLCLDHSHIYNSLNLVENRELICVYQFTVHLRTGAEISG

SEQ ID NO: 181155 - protein, 229 aa, Glycine max
  unsure (1)..(229): unsure at all Xaa locations
  Clone ID: PAT_MRT3847_134599C.1.pep
METNYTLKLASYKVLTIVAFILLAISNIISACDNSTIPTNSTQTKNDYAATNYRNKTIIPSKSNYTQTFKNYIKTSCNFTTYPSICYKTLSPYATKIEADPLKLCNVSLSLALKAAKSASSAISKILKKQXTEIAEQVVQDCFGNVKDSIGELKDSLDAMGDLGGVDRKFQISNVQTWVSASITNDQTCSDGFDEMNVDSTLTDKMRKIVLDVARKTSNALYFINNNAY

SEQ ID NO: 181156 - protein, 68 aa, Glycine max
  Clone ID: PAT_MRT3847_13459C.1.pep
RHLFQWRLKSLHASPMLVGAFVYLPLSEGWVSPHLTTLFPSQSFQTYVIKDVHISGIFMTQFNPFILN

SEQ ID NO: 181157 - protein, 77 aa, Glycine max
  Clone ID: PAT_MRT3847_1345C.1.pep
RRILPSYQCQHIVFINSNRHGTKMQWKAFQGGLPIPVGLPTSAKNSHQIVGQLKSQAAMTSYQLQDLHVGRQVQCEQ

SEQ ID NO: 181158 - protein, 373 aa, Glycine max
  Clone ID: PAT_MRT3847_134600C.1.pep
MSSSRESSPDWLRSFQVPSHSRLTLSSDSGSSRDGGSWNEDKTDVEGASPKSPRFLKVTKSNGKTPEAASPKVEEQTPSKRKKVDKKKPKEGNKEEKETANESNIDKHIDHKHEISGEGECVDGLVLGKSPSKKGSKEKSSQKQIDIEDHTPVKGKEIKASAKGKGIGDLKVEEEEPCEKPAEPNLQVSSARLPLMLSEKVQRTKALIECQGDSIDLSGDMGAVGRIIISDSPSGDQEMCLDLKGTIYKTSIVPCRTFCVVSFGQSEAKVEAIMNDFIQLKPHSNVYEAETMVEGTLDGFFFDSDEESGKIQKSTNQTDQNENAEEQANGKSKGKADKTSGAGKKRGRSTGGKPQAKIAKKKTPGSKKAKTKK

SEQ ID NO: 181159 - protein, 98 aa, Glycine max
  unsure (1)..(98): unsure at all Xaa locations
  Clone ID: PAT_MRT3847_134601C.1.pep
PSNYSADILCLQRSHHVTDHNQPENAAPDRFARPYILLLLIRLDTLGHTIHHNDPDLSLSVQLLTSTHDGDFVQGKTLPMVKXNVTCAAVGLTSSYTP

SEQ ID NO: 181160 - protein, 231 aa, Glycine max
  Clone ID: PAT_MRT3847_134602C.1.pep
RDQSGFRLAFLSLIMSSSRESSPDWLRSFQAPSHSLLTLSSDSGSSRGGGSWNEDKTDDEGFSPKSSRFLKVTKSTRKTPEAASPKVEEQTPSKRKKLDKKKAKGNKEEKEAVNESNIDKHIDHKESIHSIWTLSSDSESFHDHSPKRDHIDQVETSQHEISDEGECGDGLVFGNDGKFPSKKGSKEKSSQKQIHVEGHTPVKGKEIKASAKGKGSGDLKVEEEETCDKPA

SEQ ID NO: 181161 - protein, 53 aa, Glycine max
  Clone ID: PAT_MRT3847_134603C.1.pep
IATRKYKYSSIRMLKFSGTGLFGRSRGDFLKGHNSKANVCGRLPSNNSHLRGG

SEQ ID NO: 181162 - protein, 180 aa, Glycine max
  Clone ID: PAT_MRT3847_134604C.1.pep
GVQGPPNRPPALSRLFGPQCPVKRPLGATPGWPPFLGPPEGTPPAWPSKCGHQTEGEEGKVVAKFSVPLPQPPPQSRLMGGRQVPPLRPSGLANGRKADLFRPFGPPPKGRKGYGLQGGSTGGFPGFSPREVFKRWSLPPFYGPPLRAPLFACPGRPAWIRETPPPSSPSFFFFFPFKII

SEQ ID NO: 181163 - protein, 191 aa, Glycine max
  Clone ID: PAT_MRT3847_134605C.1.pep
SFEDEIKKLHAEASDVKNEANGCKNIKRKAEIKLEELDKNMNSIKRQCVDADKSLTSKKLVLEQEEMDLYTAKNSATPLSSVDELIEEISEIQKKIKDEKVLLEGLRQKECEAAGKADDLKVKFDKLCESANGEFASYEKAESELVEIEKEMDSAKKAKDHYEGIMKNKVLLDIEEAEEHYLELTKMRKES

SEQ ID NO: 181164 - protein, 75 aa, Glycine max
  Clone ID: PAT_MRT3847_134606C.1.pep
TLIRSRGLSLSTKPWHGSQKCEIMLLPNGLEIARVLLARPTKVGWHSNGANMWYTNTHTPRPVMLPKGIFSKKAW

SEQ ID NO: 181165 - protein, 132 aa, Glycine max
  unsure (1)..(132): unsure at all Xaa locations
  Clone ID: PAT_MRT3847_134607C.1.pep
MRDFMATLREPCWGYGFRHRYRLFTQRITREGHEDLPEDWLQKFSPWEDMRHDILYPIRFLGHVEGNPDGSRRWVGGEVAHALAYAVPHPRYQTKNTIRVGLSEAKASAADLTKDLHHDGQXDADSVLHSQA

SEQ ID NO: 181166 - protein, 106 aa, Glycine max
  unsure (1)..(106): unsure at all Xaa locations
  Clone ID: PAT_MRT3847_134608C.1.pep
SRTHAXXSSEXGXSXXXXTSXHXXXTXQXXAXHRXXXXXDXHXXXXXXXQXXXXXXXXXPAHXXQXXXXXKXXXXXXXXPXXXXXXXXXXXXXXXSXXXGXXXXAG

SEQ ID NO: 181167 - protein, 42 aa, Glycine max
  Clone ID: PAT_MRT3847_134609C.1.pep
ESVASSLRRGASSVNQNPKPLHRLLREGKQVLTSSQFEARIV

SEQ ID NO: 181168 - protein, 97 aa, Glycine max
  unsure (1)..(97): unsure at all Xaa locations
  Clone ID: PAT_MRT3847_13460C.1.pep
GGENGVVPEXVXXLTXQXLRXIGVXGRKASXLHDXGRKYXXGIXSDSAIVXMDDKVAXXMXXMXNGMXSWXXXMFMXFXXXRIXVFXINXIGVRKGV

SEQ ID NO: 181169 - protein, 62 aa, Glycine max
  Clone ID: PAT_MRT3847_134610C.1.pep
CRNHAFVDALLVLCEAQRWRMDCTCSIHQLLRRYRAQTYSMGRVGTTRLRNYYAAACYLDGS

SEQ ID NO: 181170 - protein, 56 aa, Glycine max
  Clone ID: PAT_MRT3847_134611C.1.pep
KELEKLLGSEKEINNKQLGEGHASAEQVLARLIHARDHDVHHRPWRPVLQSIPEVN

SEQ ID NO: 181171 - protein, 72 aa, Glycine max
  Clone ID: PAT_MRT3847_134612C.1.pep
SWVPGTVPYFVMKVSCPRKPFSPRNTRTVDYPQVSRLFYLPTVKRKPQEVIQLVQSMYLFSCLYISLAVWKS

SEQ ID NO: 181172 - protein, 71 aa, Glycine max
  unsure (1)..(71): unsure at all Xaa locations
  Clone ID: PAT_MRT3847_134613C.1.pep
SYXLXNXKNGPXIIKGQSSVXEKVXLEHLFXFPYTGSXXSFXKIXXISTCNXRQVWGIXIXDKXIWHXIXX

SEQ ID NO: 181173 - protein, 107 aa, Glycine max
  Clone ID: PAT_MRT3847_134614C.1.pep
MATQRSHHSPILFSSLILTLFVLYFPRCHHAIPNNPIKTVVVLVMENRSFDHMLGWMKRLNPAIDGVTGSESNPLSVSDPDSKRFFFRDRAHFVDPDPGHSFQAIRE

SEQ ID NO: 181174 - protein, 97 aa, Glycine max
  Clone ID: PAT_MRT3847_134615C.1.pep
SDQTNNGVAFGQESPICQSNLYIGVACYVSEFCRLLLNSLLLPAKRFLRAASFGFVCDLIGLTLFVKLFGWHKQIQVPLNKVTADSWFICTAEARRD

SEQ ID NO: 181175 - protein, 133 aa, Glycine max
  Clone ID: PAT_MRT3847_134616C.1.pep
LQITPPGFCASAIKSLVSFQAQQQQQHAHHQHQIEVPAAWCFEFPKTTTTTDTHMVMNNICQASGDNFTTKQDRPSSQFTSSFLSSSGADCRSSSEKYCKIASYSEEKHSSIQPDSIQYYDLYSQEEDKLLGD

SEQ ID NO: 181176 - protein, 107 aa, Glycine max
  Clone ID: PAT_MRT3847_134617C.1.pep
KGIPMGFFQPVGFQKIWGKASNPPLSPPPPYPVFFFTPPLTLLGKKNLFPPPPPWVQAKFSPGVGKTREIQNFFFIFGTPQNSPPVIRVSQKFPQKKNFFPENFLGN

SEQ ID NO: 181177 - protein, 150 aa, Glycine max
  unsure (1)..(150): unsure at all Xaa locations
  Clone ID: PAT_MRT3847_134618C.1.pep
MKLHSTLIMQDIFAAGTDTSAKVIEWAMSEMMRNPGGREKAQAEIRQTFXGKEAISESNMGELNYLKXLIRETLRLHPPAPLLLPRECREACRIYGYDIPIKTKVIVNAWAIGRDPEHXHDAESFIPERFHGASIDFKGTDFEYIPFGAG

SEQ ID NO: 181178 - protein, 109 aa, Glycine max
  unsure (1)..(109): unsure at all Xaa locations
  Clone ID: PAT_MRT3847_134619C.1.pep
IHYADSIMLKTIMHNWNDEECLKILKNVRXAIANKDKGKVIIIDVVIGNEKGDSELDQTKLFYDIEMMVLVTGKERNEKDWAKLFLSAGFNSYKITPVLGFKSLIEVYP

SEQ ID NO: 181179 - protein, 34 aa, Glycine max
  Clone ID: PAT_MRT3847_13461C.1.pep
TQASHNISSFTEHDGAASDNSHPDWAPSGYGYTR

SEQ ID NO: 181180 - protein, 80 aa, Glycine max
  Clone ID: PAT_MRT3847_134620C.1.pep
RSLGIWISECSVANASSYHHAVLAPRPTGFIAQCALHTDLSVHEHLKPGLFELSLKNELSPAQLGKLPLHPIGFCVCIYQ

SEQ ID NO: 181181 - protein, 153 aa, Glycine max
  Clone ID: PAT_MRT3847_134621C.1.pep
TVARRRQKGSSEADELERVPAGTYCVWRPNSPQASPGKCKKSNSTGSSSSKKWKLLDLLYRSNSEGKESFVFLTPAPAPEKKRANQRWSIEVAEKSKGKGFSGKKKAPVSVHEALYLRNRELRMVDKKKSFLPYKPGLVGFCTSRLGKAFPSF

SEQ ID NO: 181182 - protein, 213 aa, Glycine max
  Clone ID: PAT_MRT3847_134622C.1.pep
MKNTIFSALFLLCAFTTSYLPSTTAVVDTDGDILQNPGTYFILSVFRPGGGVEFAATGNETCPLTVVQTLFGRGFPAILSSRLRIPFIGEGQLFSILFRIVPWCATTPSKWTIVEGLPESPAVKLTGYDNTVPGEFKIEKANPFHNDYTLLFCPAGEESKCGHIGIHFDDDGNRRLVVSEENILRVQFQKFGSSAPDEASLALKKHHVLSVSE

SEQ ID NO: 181183 - protein, 80 aa, Glycine max
  unsure (1)..(80): unsure at all Xaa locations
  Clone ID: PAT_MRT3847_134623C.1.pep
MAGWAPEATQMEGLSYEANAXELIVTAGHEFVNAHDQGSYCYATTLLEHNALAGIYAYGLDRPSEIHHKSIGPFCTGHVW

SEQ ID NO: 181184 - protein, 58 aa, Glycine max
  Clone ID: PAT_MRT3847_134624C.1.pep
AREARRKAIQEMSEEARAAFENMRFYKFYPVQSPDAPDVSNVKSPFINRYYGKAHEVL

SEQ ID NO: 181185 - protein, 135 aa, Glycine max
  unsure (1)..(135): unsure at all Xaa locations
  Clone ID: PAT_MRT3847_134625C.1.pep
QDNNKHLVLIGAAPTGFERCPLTGEQSSIEQNKGLVAMMSSPYAIRYIGKGHPLSLKSKSFAXIRLWDAISTEWSVAEDLPQGPAVEIGENTDAXDGWFTLERASEDECNNYQVVCXPQQADDDTSGAVGSRCDH

SEQ ID NO: 181186 - protein, 63 aa, Glycine max
  Clone ID: PAT_MRT3847_134626C.1.pep
GGCNPRIDDSYSPTFSAQAEIIDDEAVPILDGLTLYGPKWDIVKRWAGRIKKSIMLCDPFIIT

SEQ ID NO: 181187 - protein, 81 aa, Glycine max
  Clone ID: PAT_MRT3847_134627C.1.pep
FLVYIVTFPNVPPITCFIVWVCEQMGERRDKAIKELRDQLAAKQQREVGYGDRQNQNFWDTSGFKIVVSMSMLILVVFSRR

SEQ ID NO: 181188 - protein, 75 aa, Glycine max
  Clone ID: PAT_MRT3847_134628C.1.pep
PDKLLNSIETSTHRVPHFAKHLNSLPNICERAQNTKTAREWSFGPAQIMLWCLQWKHIDALRGDKRRPYQKKFQP

SEQ ID NO: 181189 - protein, 158 aa, Glycine max
  Clone ID: PAT_MRT3847_134629C.1.pep
NIAIGLTDVRKPQPDDINKLFQLIAEEELRRRQPRQYRDMTEESQKDLLFKIFDVDKQRYIYAHVAAFEKSETEKMQNAQQGQSSYSVGIISELRSRGAIDEEELNKISGNNNNNNNNNSSSTTVGSDAEGASMAIADQYDGRIKEFSRAAIQLIEEN

SEQ ID NO: 181190 - protein, 360 aa, Glycine max
  Clone ID: PAT_MRT3847_13462C.1.pep
TRPSYSNSTHSSYPYALLFFLATMTSIRSFQSAISKPLLWKLTGFGSSIVGFSCYALSPSFLCLVKEWSPKKIVAYSVVSSLLSISMLFVKKWSLGRHGKSLLLKGHVVFVVLALTNLWSFWEDRCQQGKVENRFRKIMNLASIGAFALMALSLSRQLQIGFDAGVSNFLVGCFLVTLMKMNLKLAPLAALFCYLLVNNRSISDSLLKLRARAATQYEGEPSLQDIESGDSNGAVISHRSREILDRNLKFLWNEIRSEVWKFFLRMFKDDKDGERLPDLQGHETNSDVSERDTNEVDIQETSNVLACGTDELSSQDPDQTNSGVLEHEKDVVPLQHGEAERFSSSENDIQNTEKSIKKML

SEQ ID NO: 181191 - protein, 60 aa, Glycine max
  unsure (1)..(60): unsure at all Xaa locations
  Clone ID: PAT_MRT3847_134630C.1.pep
PLQPPLXILFFFTFWGIRNPLILNKWAVFPQNILFKKTLFHSLLNYLIPQSPGLDPLFLF

SEQ ID NO: 181192 - protein, 176 aa, Glycine max
  Clone ID: PAT_MRT3847_134631C.1.pep
MECNDQRVSVNLKRKSPENGERVLFNTFSLDDLNEDLFERILSWLPTSTFFRLNSVCKRWKSVAASASFKLACSHIPSRDPWFLMVAPNLNQSVILDSAESTWKRLNHPPLLQEESNQDCVPVAASGGLICYRKSSGNFIVTNPVTGSCRKLPPLQFASQNQPLNAIVMSTSSKDQ

SEQ ID NO: 181193 - protein, 57 aa, Glycine max
  Clone ID: PAT_MRT3847_134632C.1.pep
ILATGKCTSTKNDTAFLRPGKITMQLHGLGFRQVEETGTWFADQAPSDIFFRVNARA

SEQ ID NO: 181194 - protein, 79 aa, Glycine max
  Clone ID: PAT_MRT3847_134633C.1.pep
MSRSGQPPDLKKYMDKKLQIKLNGNRMIVGTLRGFDQFMNLVVDNTVEVNGNEKNDIGMVVIRGNSVVTVEALEPVNRA

SEQ ID NO: 181195 - protein, 66 aa, Glycine max
  Clone ID: PAT_MRT3847_134634C.1.pep
KKKKKKKKKKKKKKKKKKKKKKKKRGRHRLKIFFGPGPCQRTVPLGGCQFFPMFGCPGGLFCFPGP

SEQ ID NO: 181196 - protein, 85 aa, Glycine max
  Clone ID: PAT_MRT3847_134635C.1.pep
SLYDVLLLWGGGGGGGGGEIILVLSKMVLYKKATHEPTERRSRVDRTHISNHKRSSAGHRTRYYMKLRVWGATASYYNGDKRSRQ

SEQ ID NO: 181197 - protein, 53 aa, Glycine max
  unsure (1)..(53): unsure at all Xaa locations
  Clone ID: PAT_MRT3847_134636C.1.pep
RHEYVKPYLAGXMGACLENHNITSTDGIDKTRATLKLRKLADCDFLKRNFKQM

SEQ ID NO: 181198 - protein, 368 aa, Glycine max
  unsure (1)..(368): unsure at all Xaa locations
  Clone ID: PAT_MRT3847_134637C.1.pep
PQKRDSGLQANIQSENAQVENESAITVENSYFGQIISNSLILLCYENELSLHSXNFVIEGSSKYIRKVNLVQRCCWTTTFKKDEKECVLVLLYQSGDIELRSLPALEVLGESSLMSILRWNLETNMVKTICSSSNGKIILVNGNETACISLLNCENEFWTPESFPCLHDEVLAAAVDATASLSPKQNERKGASSIFVNIAKNFKAGNADQNANQSVHTNRLENLKQLFSSPPFLKSSSSTVDKQDPFAIDIDDIQIDEPVVFSSPQKIDIDKRDKGKGTDRQKLLEEASSDLKPKARTAEEIKAKYRKTGTGDASAAAALARDKLVERQEKLQILNERTEELQNGAQDFASMATELAKRMENRKWWQL

SEQ ID NO: 181199 - protein, 83 aa, Glycine max
  Clone ID: PAT_MRT3847_134638C.1.pep
ENKEKLCVKRKIHGFFLQFQNSTIVPSVRGPHYESTIVLAVVGTKYAKLLTVERRNTMILNYLKGYITVKNVCEKLTETETCS

SEQ ID NO: 181200 - protein, 78 aa, Glycine max
  unsure (1)..(78): unsure at all Xaa locations
  Clone ID: PAT_MRT3847_134639C.1.pep
XIXXXSXXXXAXXXGANISXXHVNPAVTFGLALXGXITXLTGXIXGXAQLXXXIVAXLLXNXVTXGLTXXIHSVAXGV

SEQ ID NO: 181201 - protein, 91 aa, Glycine max
  Clone ID: PAT_MRT3847_13463C.1.pep
EVDIHRCSKEILGALTENFDDAASAGDQVTQSLGSAMAQLDRSFKRFKKTVYHSSGLLPSSNGSMTAIPSLAVATPFATQQLIDLMNFLNL

SEQ ID NO: 181202 - protein, 74 aa, Glycine max
  unsure (1)..(74): unsure at all Xaa locations
  Clone ID: PAT_MRT3847_134640C.1.pep
SYXYIPIRASLCQACVTSPLRRSVAGPLTLTPLPCMHGLAQLPTKLISHPLKPVPPQYSVHPNVLHWPFPPTRP

SEQ ID NO: 181203 - protein, 71 aa, Glycine max
  Clone ID: PAT_MRT3847_134641C.1.pep
NLQLVHPYNCLVEVIVNVFNQHLQIDYFLLCKYLCENVRVRHGKPYQLLAKKYELRSRNHQGSLQFLLRKA

SEQ ID NO: 181204 - protein, 205 aa, Glycine max
  Clone ID: PAT_MRT3847_134642C.1.pep
STTGEKEHQGRDRKGWMIMIHDLSGSPVAAASMVTPFVPSPGSDRVSRSNPGAWLILRPNGASESSWKPWGRLEAWRERGPVDGLGYKVELFSDNGPANRIPIAEGTMSVKKGGQFCIDYKVIKDAGLGSRLPGEEGFVMGSTVDGEGKVSKPVVQVGAQHVTCMADAALFIALSAAIDLSMDACRLFSHKLRKELCHHEQDSFS

SEQ ID NO: 181205 - protein, 53 aa, Glycine max
  Clone ID: PAT_MRT3847_134643C.1.pep
VVYTIQEKTSLNCFDKLYVSYPREPSLLWTDHKLFHEPSQTLTQMLIHKHKFK

SEQ ID NO: 181206 - protein, 66 aa, Glycine max
  unsure (1)..(66): unsure at all Xaa locations
  Clone ID: PAT_MRT3847_134644C.1.pep
GPSERXPRYPILQNKSRHFSVTEPEPICRTRIYSQYARVMKRSLPPAPKPRIQAPVSWCARSHTNP

SEQ ID NO: 181207 - protein, 57 aa, Glycine max
  unsure (1)..(57): unsure at all Xaa locations
  Clone ID: PAT_MRT3847_134645C.1.pep
LSTLTSQSECTAKEAYKXSQGRAIFASGSPFPPVEYEGKVFVPGQVYNISPEILTKH

SEQ ID NO: 181208 - protein, 49 aa, Glycine max
  Clone ID: PAT_MRT3847_134646C.1.pep
NWKIICYLLDDFCWYLSGITIYFVGHLFFFAIIWYEVGCVVKILEGQVD

SEQ ID NO: 181209 - protein, 95 aa, Glycine max
  Clone ID: PAT_MRT3847_134647C.1.pep
MERYQLSLHMNDGNKEQSYANNSSMQRRVISKTKTILEETIMRLLHCDSSPSCMKVADLGCSAGPNTLLVISNIIDMVYKASTHLNHEPPTLQFY

SEQ ID NO: 181210 - protein, 40 aa, Glycine max
  Clone ID: PAT_MRT3847_134648C.1.pep
KVQDKLMGSEECYMKDEECISRRMMVEAHLDYIYTQHHKP

SEQ ID NO: 181211 - protein, 66 aa, Glycine max
  Clone ID: PAT_MRT3847_134649C.1.pep
SYPYGHLFVSRVQKYATTKQQSTEHQLRCFQYILEPLVIHHCQNLLHFSTIVSSTPIAVLGCSFGR

SEQ ID NO: 181212 - protein, 128 aa, Glycine max
  Clone ID: PAT_MRT3847_13464C.1.pep
MCQRESIISTFPCMNPEVVEEPNNRPVVLVPNNMTPEYTFNLRFDNINASDFAPGERKSPLLSSSSPFSVRISNYSSEDEENEEQEGGNGNGHVDDQAEDFIRRFYEQLRMQSRMRDVIVKCACARST

SEQ ID NO: 181213 - protein, 92 aa, Glycine max
  Clone ID: PAT_MRT3847_134650C.1.pep
MKQQIGLLFFVLLLSSFLASARLLEPLKGPRQGEKEVEINENAFPQSSHELKDDMEELMGSEECYMKDEECISRRMMVEAHLDYIYTQHHKP

SEQ ID NO: 181214 - protein, 61 aa, Glycine max
  Clone ID: PAT_MRT3847_134651C.1.pep
GEIHHWCGHIISGNLLFAWVNSRLIRFDLLSVDYQGAHPFKYMKPEFLIKQLNGCFLSPPS

SEQ ID NO: 181215 - protein, 40 aa, Glycine max
  Clone ID: PAT_MRT3847_134652C.1.pep
CHFIQLMGSEECYMKDEECISRRMMVEAHLDYIYTQHHKP

SEQ ID NO: 181216 - protein, 48 aa, Glycine max
  Clone ID: PAT_MRT3847_134653C.1.pep
VEQNIRFDNPNAYCPYFFRILSRSRLKPPTQLTAVLVPIGMCVKKKRR

SEQ ID NO: 181217 - protein, 397 aa, Glycine max
  unsure (1)..(397): unsure at all Xaa locations
  Clone ID: PAT_MRT3847_134654C.1.pep
MVEPVELRGEEQLSLLSDSSNGDRSWRLNFDGFQLSSEHTEKQVKPPRGLHDCYGVLGQEDNIAEYYQQQVEVLEGFTEMDALAERGFXIPGMSKEERDKLARSETFAIRVSNAANMVLFVAKVYASIRSGSLAIIASTLDSLLDLLSGFILWFTAFSMQTPNPYQYPIGKKRMQPLGILVFASVMATLGLQIILESTRTLISSENAFNLTKEQERWVVGIMLSVTLVKFLLMIYCRSFTNEIIKAYAQDHFFDVITNIIGLIAALLANYVDDWMDPVGAIILALYTIRTWSMTVLENVNSLVGRSAAPEYLQKLTYLCWNHHKAVRHIDTVRAYTFGSHYFVEVDIVLPSDMPLQEAHDIGESLQEKLELLPEIERAFVHLDYEYSHKPEHAQAHS

SEQ ID NO: 181218 - protein, 85 aa, Glycine max
  Clone ID: PAT_MRT3847_134655C.1.pep
GKIHKLANGDYQNASDKANNTRIGIIDYKICPSLMLRVAWYYGGTHNKSYATVGPYLTIKHSSELPHCTDTGADIDELLSEPLPA

SEQ ID NO: 181219 - protein, 96 aa, Glycine max
  unsure (1)..(96): unsure at all Xaa locations
  Clone ID: PAT_MRT3847_134656C.1.pep
XXHTXXXQHHXKXXXXTXXPXXQQXHXNNXXXHHXDTSXXXXXXXXNXHNXXXHNXXXRARXYXTTHXXTXAGXXXTXXXXXXXXPRXXAEXLXXX

SEQ ID NO: 181220 - protein, 74 aa, Glycine max
  Clone ID: PAT_MRT3847_134657C.1.pep
SESQIIHSLPIFTAKNKQHQISPTKIFPGPIQIVIQNVEPRQNHHKLSRACVLWSVSLHWSSTRRVLGAGLALT

SEQ ID NO: 181221 - protein, 261 aa, Glycine max
  unsure (1)..(261): unsure at all Xaa locations
  Clone ID: PAT_MRT3847_134658C.1.pep
QTSFPSLVGQRNQFNNMNMLGNMSNVTSLLNQSFPNGIPNSGLGGPGSSQRSGGIDAGAEADPLSGVGNGMNFGNQLQSNLMNPGSSGQGQGPQFSNASGSQMLQDQQHSQQLPQNFQQHSQPSMQQFSGPLNAQQQQQQQQHFQSIRGGMGGVGQVKLEPQVNIDQFGQQQQLPSRNLAQVKLEPQQLQTLRNMAPVKMEPQHNDQHFCTSNXQQQQQQQQPQQXQLLHMXGQSSQAAAAQMNHLLQQQRLLQYNNISSS

SEQ ID NO: 181222 - protein, 46 aa, Glycine max
  Clone ID: PAT_MRT3847_134659C.1.pep
IIIVQDLQFSIIHFLRTQSWVRVLYYQKQFFPYKKDAENYVLGCCL

SEQ ID NO: 181223 - protein, 190 aa, Glycine max
  unsure (1)..(190): unsure at all Xaa locations
  Clone ID: PAT_MRT3847_13465C.1.pep
WXWLRITFFMIRKGLVSKRKLIMDMNLMMKKGKLLRKSMSNFMSSHHHHHHHHSKSLARGYGMQEYDXSCSNSPSPVFFHVPKKKHHFNFPCMNTTEVVEEPRPVVLVPNMTPEYTFNHRFDNASDFAPGERISPFTVRISNYSSEDEENEQEGGNGNAQVDDQAEAFIRRFYEQLRMQSRMQLLEYQEM

SEQ ID NO: 181224 - protein, 159 aa, Glycine max
  Clone ID: PAT_MRT3847_134660C.1.pep
MENSDSAQCVRVAVNIRPLITSELMLGCTDCISLVPGEPQVQIGSHAFTYDYVYSSGSPSSTIYDDCVAPLVDALFHGYNATVLAYGQTGSGKTYTMGTNYTGEDNAGGIIPKVMETIFKRVQTMKESSAFWSKYQLTKIKIFCLIGALCHKFCYVPHL

SEQ ID NO: 181225 - protein, 229 aa, Glycine max
  unsure (1)..(229): unsure at all Xaa locations
  Clone ID: PAT_MRT3847_134661C.1.pep
RYMMAKRYYXAMLLEGVDPTRHTFNILLWGMFLSLRLDTAVRFYEDMKSRGILPDVVTYNTLINGYFRFKKVDEAEKLFVEMKGRDIVPNVISFTTMLKGYVAAGRIDDALKVFEEMKGCGVKPNVVTFSTLLPGLCDAEKMAEARDVLGEMVERYIAPKDNALFMKMMSCQCKAGDLDAAADVLKAMVRLSIPTEAGHYGVLIESFCKANVYDKAEKLLDKLIEKEIV

SEQ ID NO: 181226 - protein, 171 aa, Glycine max
  Clone ID: PAT_MRT3847_134662C.1.pep
MASHLLNHSSKMRNASKLLHHERALLVRWFSGDAHSSLNRNRDVWKTQFHESSARSSVFEPASCFNKHSFGMQKRNIFMATIKRGSIIGSEFNGEISRSLQVLSRRCYASASDLPPHQEIGMPSLSPTMTEGNIARWLKKEGDRISPVEVLCEVETDKATVEMDVWREGFS

SEQ ID NO: 181227 - protein, 75 aa, Glycine max
  Clone ID: PAT_MRT3847_134663C.1.pep
LYVQLSHSDGIGDGYVLLSESAKCWKLIHVTVHEASTRASLSLGQLVERATTFTRVTTAAAVQGTVGDSRTTCPP

SEQ ID NO: 181228 - protein, 547 aa, Glycine max
  Clone ID: PAT_MRT3847_134664C.1.pep
MASHLLNHSSKMRNASKLLHHERALLVRWFSGDAQSSLNRNRDVWKTQFHESSTTRSVFEPASSFNKRSFGMQKRNISMATIKRGSIIGSEFNGEISRSLQVLSRRCYASASDLPPHQEIGMPSLSPTMTEGNIARWLKKEGDRISPGEVLCEVETDKATVEMECMEEGFLAKIIRGDGAKEIKVGEVIAVTVEDEGDIAKFKDYQPSASEPSEPPAKETSAPPPPKKEEVVEEPAREPEPKVSKPSAPPSSGDRTFASPLARKLAEEKNVPLSSIKGTGPEGLIVKADIDDYLASGAKEVSASSKAKVAADAALDYTDIPVSQIRKVTASRLLLSKQTIPHYYLTVDTCVDKLMSLRTQLNSLQEASGGSRISVNDLVIKAAALALRKVPQCNSSWANDYIRQYHNVNINVAVQTDNGLFVPVVRDADKKGLSKIGEEVKQLAKKAKENSLKPQEYEGGTFTVTNLGGPFGVKQFCAIINPPQAGILAVGSAERRVVPGSGAEEFKFASFMSVTLSCDHRVIDGAIGAEWLKAFKGYIENPETMLL

SEQ ID NO: 181229 - protein, 305 aa, Glycine max
  Clone ID: PAT_MRT3847_134665C.1.pep
VSTPRAPPSSGDRTFASPLARKLGEEKNVPLSSIKGTGPEGLIVKADIDDYLASGAKEVSASSKAKVATDAALDYTDIPVSQIRKVTASRLLLSKQTIPHYYLTVDTCVDKLTSLRTQLNSLQEASGGSRISVNDLVIKAAALALRKVPQCNSSWANDYIRQYNNVNINVAVQTDNGLFVPVIRDADKKGLSTIGEEVKQLAKKAKENSLKPQDYEGGTFTVSNLGGPFGVRQFCAIINPPQAGILAVGSSERRVVPGSGAEEFKFASFMSVTLSCDHRVIDGAIGAEWLKAFKGYIENPETMLL

SEQ ID NO: 181230 - protein, 31 aa, Glycine max
  Clone ID: PAT_MRT3847_134666C.1.pep
STITAAFDETSTLEDSDDRYKGSAGGKPDTF

SEQ ID NO: 181231 - protein, 137 aa, Glycine max
  unsure (1)..(137): unsure at all Xaa locations
  Clone ID: PAT_MRT3847_134667C.1.pep
ARSMISFPAVTTVNRAGAGMVVPFTGLKPMAGSPTINTNNDITFIASRGGRVQCLHVCPPADKNNLETLSYLPDLDXAQSSKREEYLLTTGWLRCXGIRIKHGFVIREHTTLPGFYNGLLGTMWILPIDSCSHASNV

SEQ ID NO: 181232 - protein, 80 aa, Glycine max
  Clone ID: PAT_MRT3847_134668C.1.pep
LASFGTITIHSHINKFSKELLAKFFTLSNTNPSMIIILGQYVTLKSHSVSIGIIARSHAARNSLMLCLATSRYLPLSPQL

SEQ ID NO: 181233 - protein, 99 aa, Glycine max
  Clone ID: PAT_MRT3847_134669C.1.pep
NSRNSVCSFKKDLMKMLLKHVDKLLDVADLETIDQSEETIDYNNARFGENPVTCATSDTRPRSAPTDNNDAKYFDNTPSQYCPVLITKATESDIRTIDT

SEQ ID NO: 181234 - protein, 213 aa, Glycine max
  Clone ID: PAT_MRT3847_13466C.1.pep
MEAHSPVIAKKLWNVLRITFFMIRKGLVSKRKLIMDMNLMMKKGKLLRKSMSNFMSSHHHHHYSKSLARGYGMQEYEFSCSNSPNPVFFHVPKRKHHFNFPCMNTPEVVEEPNNRPVVLVPNNMTPEYTFNLRFDNINASDFAPGERKSPLLSSSSPFSVRISNYSSEDEENEEQEGGNGNGHVDDQAEDFIRRFYEQLRMQSRMQLLEYQEM

SEQ ID NO: 181235 - protein, 71 aa, Glycine max
  Clone ID: PAT_MRT3847_134670C.1.pep
ASKSDFGAGPNRIIETRNFFKFVLARISNFSSFDSSSFSFPLLCFAAFRYVIHCLCNFVIHRVILGLFSKL

SEQ ID NO: 181236 - protein, 117 aa, Glycine max
  Clone ID: PAT_MRT3847_134671C.1.pep
FHKRGGLAEFLVPPPWGVRGILFFLGFIECFLKKIFVFSLERDKKTPIYFFKGACEEKAVFNVFIGRTPPPVYIINKKTGPPACLRVRILAPPPSLCSIFNINEVCVCRLRKGKYVW

SEQ ID NO: 181237 - protein, 106 aa, Glycine max
  Clone ID: PAT_MRT3847_134672C.1.pep
RPPFFFASQIATYCASFIMAEVVLSPHVLNPGCEGQHTDPLGLPPLQSSTVPNTEFLRVRMQVIPWLMNAMLSHGHGPVIKHIRASYKRVFCSWLRRTHFLPSGRT

SEQ ID NO: 181238 - protein, 100 aa, Glycine max
  unsure (1)..(100): unsure at all Xaa locations
  Clone ID: PAT_MRT3847_134673C.1.pep
PRREGNKGRPKTGAKNTPPKKRPQKSKPNTTQGEEPHQEKXGXXXTKXXSRXXAKKEXXXXXXXXDAAXKTTXXXKXKXGEXXTTXPTXGXXXETXEXKN

SEQ ID NO: 181239 - protein, 93 aa, Glycine max
  unsure (1)..(93): unsure at all Xaa locations
  Clone ID: PAT_MRT3847_134674C.1.pep
EAFYDTKFDEINKVLFSREEWQHQGEQRLQESVIVEISNEQILALSKRARSSSRKTISSEDXPFNLRSRDPIYYNKLVTFFEITPENNAQHRD

SEQ ID NO: 181240 - protein, 40 aa, Glycine max
  Clone ID: PAT_MRT3847_134675C.1.pep
LTDGLLDYVITDACFAVYVNRLCCRTCKCHILSIITIHIY

SEQ ID NO: 181241 - protein, 41 aa, Glycine max
  Clone ID: PAT_MRT3847_134676C.1.pep
MAKEKAQINIVVVGHVDPEEATTINELKKPGGEKEAPRHAI

SEQ ID NO: 181242 - protein, 81 aa, Glycine max
  Clone ID: PAT_MRT3847_134677C.1.pep
TKRQRAKHKKKCLSKKRPPKTKPPLKPPKKASKGRKKFKNRNKKPPRTPPPKKKKKRGGEKKKKQEWAKKSASPKTKIEDV

SEQ ID NO: 181243 - protein, 425 aa, Glycine max
  Clone ID: PAT_MRT3847_134678C.1.pep
MESGVVAVNNNINNYESKATSTITIKGILSLLMESIDDENCDGGGSKKRVISLGMGDPTLTTLFHTPKVVEEAVADALQSRKFHGYAPTAGLLQARIAIAEYLSRDLPYQLSRDDVFITCGCTQAIDVSVAMLARPGANILLPRPGFPIYELCAAFRGVEVRHYDLLPEKGWEVDLDAVEALADQNTVALAIINPGNPCGNVYSYHHLEKIAETAKRVGTIVISDEVYGHLAFGSKPFVPMGVFGSTVPVLTLGSLSKRWIVPGWRLGWFVTNDPSGTFREPKVVERIKKYFDLLGGPATFLQAAVPQIIANTEEIFFEKTIDNLRHTADICCKEIKDIPCIFCPYKPEGSMAMMVKLNLSLLEDISDDIDFCFKLAKEESVIILPGTAVGLKDWLRIIFAADPSALGEGMRRIKSFCERHARKL

SEQ ID NO: 181244 - protein, 95 aa, Glycine max
  Clone ID: PAT_MRT3847_134679C.1.pep
YSCSVGDIACPAGCDYIFDRRRAVLISITLIRAGNEKLSRAFLNNGGGMYNDLHSRSCTAGRSLDIIWSHAEGYKACFVNLNMCMLKRCSRGTLH

SEQ ID NO: 181245 - protein, 191 aa, Glycine max
  unsure (1)..(191): unsure at all Xaa locations
  Clone ID: PAT_MRT3847_13467C.1.pep
MASSSSRTKSSGPVLRSLSPSTRFCSYTTSKTPFSSPSSAFASSTSSGFSSSSFFNQPRQHHAHSHHRAASPTRVNLCSPAPLSSAVRFSIDPRSISPNRSISNQIITTKNNRPISGQKKTCMCSPTTHPVSFRCSLHKNIGSSNHNADSYPSNRLNMRRSAMKNSLVRIXXREGEVVKTALTALISSSSH

SEQ ID NO: 181246 - protein, 52 aa, Glycine max
  unsure (1)..(52): unsure at all Xaa locations
  Clone ID: PAT_MRT3847_134680C.1.pep
MGRRRVEFKRFGNMIYWRVIFAXRKIGLLKKAYELCDLXDAEDALMIFYNRG

SEQ ID NO: 181247 - protein, 60 aa, Glycine max
  Clone ID: PAT_MRT3847_134681C.1.pep
VGKTLPAISNDLRSGLQRPSQLIYIGLVLVSPGVRQSLMFWVIYTRDRWLCVYSNQSIKG

SEQ ID NO: 181248 - protein, 126 aa, Glycine max
  Clone ID: PAT_MRT3847_134682C.1.pep
IPKKDFSFPGGVPGQLPPQGVLFVARAQQVWLAFSAKGAQRGGPIYGGVQQKTKKGGYNVGGGKNGFGAGGPQFYKFTLCFGLVKKKPILIGSRPSKKMGVPFLPRGRTRGPRKKREPQRGGLQIK

SEQ ID NO: 181249 - protein, 89 aa, Glycine max
  Clone ID: PAT_MRT3847_134683C.1.pep
TSDAVLAASLVLSWQATDWSGWIQLMQGTSTVMDAMESWKHESQFVDFIAESSTFPTAPSSPGADNNPSQPGKEDLEAFQRTLEQIQKV

SEQ ID NO: 181250 - protein, 76 aa, Glycine max
  Clone ID: PAT_MRT3847_134684C.1.pep
MPPPPRGIPPLFLNPTKQKPPRTQKKWVIRPPPNFVSNSGPRGVSPVSPPPGLSPTPISTLPPPGGQQKTFYGAPQ

SEQ ID NO: 181251 - protein, 38 aa, Glycine max
  Clone ID: PAT_MRT3847_134685C.1.pep
NVIIKYWCGGLVICQCPHYKSSLEASVRNFDLLKFMPS

SEQ ID NO: 181252 - protein, 89 aa, Glycine max
  Clone ID: PAT_MRT3847_134686C.1.pep
QASGNLVEKACMSIGKDSRNYVQAALTTRFQSNFFFNISMRGLVTWRGKLDALVNLVTQLAMNQKSTPVARVCGLCSSADHHLDLCPSL

SEQ ID NO: 181253 - protein, 64 aa, Glycine max
  Clone ID: PAT_MRT3847_134687C.1.pep
MTLLSLRQTHLPSPRVRASLPSSRSNGGSNGFDLGSGDILCSYEEDNTNHDSSDGTHIDPAKVT

SEQ ID NO: 181254 - protein, 71 aa, Glycine max
  Clone ID: PAT_MRT3847_134688C.1.pep
DIICQLSSTYQSPHSQFESCPSIKCCQSTSFGEFLVHLHSGDWDHPHSLKSLFMHPRLLGGPLHHTLKKAQ

SEQ ID NO: 181255 - protein, 148 aa, Glycine max
  Clone ID: PAT_MRT3847_134689C.1.pep
STLQPKESSSEQDANKTLKRHNASMMTYSDCEEEDAIPMSNVVNKPPEKRQRTPSAYNCFIKEEIKRLKAENPDMAHREAFSTAAKNWANFPPTQCKEDEESCSSQTDQHVDLDSQVDPNAVVNEEEGQGLRGRKVPKKSILERTPFE

SEQ ID NO: 181256 - protein, 90 aa, Glycine max
  unsure (1)..(90): unsure at all Xaa locations
  Clone ID: PAT_MRT3847_13468C.1.pep
VEPSPRFIGRGILHIQGGLRGNQXGAKFWEVVCAEHGLQQFSSKKHASAVPTIXSVNAYYSLGKCERDTPRAVLMDLEPGTMDSVRSGRF

SEQ ID NO: 181257 - protein, 97 aa, Glycine max
  Clone ID: PAT_MRT3847_134690C.1.pep
SVMRVMSCGPSQRDGRILARTLGCNKHGYCVSLRRNISSVRKPMASTRECCKALIHIIYNNSVRWVMPELANDHNHSSVVSPREVISTMDDKDNMIR

SEQ ID NO: 181258 - protein, 58 aa, Glycine max
  Clone ID: PAT_MRT3847_134691C.1.pep
PKTPQPRCRQPPHMPPGRCISRFQCVLFSQVNSTHHNCRPPLTAACCRAIIYSAKPHS

SEQ ID NO: 181259 - protein, 74 aa, Glycine max
  Clone ID: PAT_MRT3847_134692C.1.pep
TRKRIRYQSVNQKGIGHLILTYYLIKPWVKIYEFQISVIYPCCFHVCDELKIAIIRSRRLDCVYCVILLHVNAL

SEQ ID NO: 181260 - protein, 67 aa, Glycine max
  Clone ID: PAT_MRT3847_134693C.1.pep
EIHDMDAVLSMTRIFSLYQLTGRTHLLHIWKCHPILFLLTLYIDLHVHYNKHHSLDMCLLYLFPTEY

SEQ ID NO: 181261 - protein, 85 aa, Glycine max
  Clone ID: PAT_MRT3847_134694C.1.pep
CYRVYPVIRFVPEPQYLSEYPSPSPVVVIPSLPLHNIEQPLDALKIQRHVSPNPPRLESCSPDLVHCHVTRCYVCCQSHWYLMKK

SEQ ID NO: 181262 - protein, 62 aa, Glycine max
  Clone ID: PAT_MRT3847_134695C.1.pep
IFIYLFGIILIGAITFGPKYLEQDLVALKTFHSSLRVYYVGLNPDPFPQIVVTQSQTIRNVN

SEQ ID NO: 181263 - protein, 54 aa, Glycine max
  Clone ID: PAT_MRT3847_134696C.1.pep
HAFDHAYVFFTFLGKSQRRLGKTLNCEKTTAINGNFQGLLSFPDLRQLLKSNRL

SEQ ID NO: 181264 - protein, 50 aa, Glycine max
  Clone ID: PAT_MRT3847_134697C.1.pep
HASVRLREDDRRGPTILFKSLLCDHLVYTNTCVKIIMSLNFIRIKIDLFV

SEQ ID NO: 181265 - protein, 74 aa, Glycine max
  Clone ID: PAT_MRT3847_134698C.1.pep
QRGRSRTCITCKIQSDESDYQGLRNDQACGAIVPFSLLALLANIPGWYHVKHHHRSTCRRTWMRSHWTSSSIYA

SEQ ID NO: 181266 - protein, 151 aa, Glycine max
  unsure (1)..(151): unsure at all Xaa locations
  Clone ID: PAT_MRT3847_134699C.1.pep
GLPATVKHGKSNANLSANLCAAPLDSHLFVYLLRASDDADDDAIFYDPFVEDLEDRXLWSXKMSAAALWKHAKSEGQDDYGLLVXEKAWHYAIPTELDEAASLKDETGDLQFETRLRTGLEWGGAYLIYRRPHEAGWKSKEXDNESPYSIM

SEQ ID NO: 181267 - protein, 364 aa, Glycine max
  unsure (1)..(364): unsure at all Xaa locations
  Clone ID: PAT_MRT3847_13469C.1.pep
MQGEVEMVLSSLAHGKKQDLCCMSSEFGSSDKAQPFIPSEPKSTTSLSYIFPFFKFSISFLIYKFLSSLLPSHTHFPFHSPLIQIMDFLQAPENQILVGVAVAVVAIGLGAVYLYSSKKRKGCLDPLNFKVFKLVKRAQLSHNVAKFTFALPTPTSVLGLPIGQHISCRGKDAQGEDVIKPYTPTTLDSDVGHFELVIKMYPQGRMSHHFREMRVGDYLSVKGPKGRFKYQPGEVRAFGMLAGGSGITPMFQVAXRAILENPNDRTKVHLIYANVTYEDILLKEELDGLASNYPDRFKIYYVLNQPPEVWDGGEGFVSKEMIQTHCPAPAQDIKILRCGPPPMNKAMAAHLEALGYASEMQFQF

SEQ ID NO: 181268 - protein, 47 aa, Glycine max
  Clone ID: PAT_MRT3847_1346C.1.pep
RLREDDRRGWDTNVDYHARTYHWFFHFGSFWIKQVDFLFELMDHNKT

SEQ ID NO: 181269 - protein, 111 aa, Glycine max
  Clone ID: PAT_MRT3847_134700C.1.pep
MGMIVEVENENGDLNDAVLVPPPNFSMVEDCIFRSGLPNPSNFPFLQTLNLRSIIYLCPEPYPEENLDFLRSQNIRLFQFGIEGKTDISMPILKDSIMDALEVLIGTESLQ

SEQ ID NO: 181270 - protein, 131 aa, Glycine max
  Clone ID: PAT_MRT3847_134701C.1.pep
LGIPGSTHASVRWQKKNRGEHTHVSCFHFQSSMPSDHLKHRVTSTIATTSHVNRTSRGSRLLMAARGLKSLARAVVRPLSLSSLSSYRGSSSSSAYCASRISFRFPPSRALDLTCPASSFMMVSLCMDGVS

SEQ ID NO: 181271 - protein, 189 aa, Glycine max
  Clone ID: PAT_MRT3847_134702C.1.pep
MLTFFLYLFLFFLLCALQQLASSQPFFLNRRILHEPFVPLTSTLPPSEAPKPQPLHASPSSQKQKPNPKYPSSTIPTTSTTATAVPTPTTATTTTQSPFFPLYPSSPPPPSPITFASFPANISSLILPHSPKPNSSSNKLLPVALSAVALAVLAIIFPVCTGRRRDHPLAAEGKLIRSDTDRLLRNGET

SEQ ID NO: 181272 - protein, 81 aa, Glycine max
  Clone ID: PAT_MRT3847_134703C.1.pep
YTGRTLHKNLISVTADNISTFLKTAKVPVDSYCPTSFAKLAQKKNLCDFIANSACRDAPVAVAASPIAATAGGATTSASTS

SEQ ID NO: 181273 - protein, 36 aa, Glycine max
  Clone ID: PAT_MRT3847_134704C.1.pep
SGIPVDPASGFLAPYKTNIIEIYNIFYKITRSIWLR

SEQ ID NO: 181274 - protein, 114 aa, Glycine max
  Clone ID: PAT_MRT3847_134705C.1.pep
LGRRESWRCLGDVLCSQVPQIGWVCAPCCLRVHSCLEGASMVSRAFGRLKSYGAFLNSALGFGCGPLLVLGSLEGSGRLFLSFAWVLGSASGERESFFFRVLFVVAVLCMVGVL

SEQ ID NO: 181275 - protein, 94 aa, Glycine max
  unsure (1)..(94): unsure at all Xaa locations
  Clone ID: PAT_MRT3847_134706C.1.pep
ACRGKDIDRIPLPPPVSGAADXTSAKTSRQYSSRPSAPSSRHDVSTNPPATSASDNQVCPICLTDPKDMAFGCGHQVRNPGCSFVFFFLSTYMR

SEQ ID NO: 181276 - protein, 87 aa, Glycine max
  Clone ID: PAT_MRT3847_134707C.1.pep
MSFRSIILERNAFDVRFVYSGTCTSQSHSDSIAHDSLVVLDGLNHICWANMPPELFRDVLMRIDASYDFWPVQKHVFSCAGVCRNFR

SEQ ID NO: 181277 - protein, 91 aa, Glycine max
  Clone ID: PAT_MRT3847_134708C.1.pep
LSDVKNTLITSVDNQPLLRRFTYHDITLFIRVPLYERRDPEHHPYLHFSLTTIYHKVSILFPPPNPSSSTSQSYTCPSTTTYTPILLLLMS

SEQ ID NO: 181278 - protein, 49 aa, Glycine max
  Clone ID: PAT_MRT3847_134709C.1.pep
MAQDGYLDEQLAQLLSNFVHQRESLSNQEEVELRTKNETLVLEVTIDLF

SEQ ID NO: 181279 - protein, 216 aa, Glycine max
  Clone ID: PAT_MRT3847_13470C.1.pep
MASSSSRTKSSGPVLRSLSPSSRFCSYTTSKTPFSSPSSAFASSTSSGFSSSSFFNQPRQHHSQSHHRRAASPTRVNLYSPAPLSSAVRFSIDPRSISPNRSISNQIITTKNNRPISGQKKTCMCSPTTHPGSFRCSLHKNIGSSNHNADSYPSNRLNMRRSAMKNSLVRIGGVEGEWVKRALTALIRPSSHQQRRRAGFEPRPSRLSVMSKAQDL

SEQ ID NO: 181280 - protein, 146 aa, Glycine max
  Clone ID: PAT_MRT3847_134710C.1.pep
MPMRPVTELGSSGSSLDLISSSGRRDPKSVEQPIVLKEGFMIKMAQGRKRFGMKNFKKRWFRLTNHEFTYHKSKGDQPLYSIPIENILAVEKLEEESFKMKNMFQVIQPERALYIQANNCVEAKDWIDILTKVSQCNQKRLTVYHP

SEQ ID NO: 181281 - protein, 72 aa, Glycine max
  Clone ID: PAT_MRT3847_134711C.1.pep
QVNTQYLGQKINGRKNSIHRLGPTIQKHTNRVLLMCSYLNQVFVKILRPQIPLNCQDHCQLPHWQRVPLHFR

SEQ ID NO: 181282 - protein, 75 aa, Glycine max
  Clone ID: PAT_MRT3847_134712C.1.pep
QWAHAQRTLHGLQPPDTKMFTERPHFNELNQMAEEAKRRAEIARLRELHTLKGHVESVLKLKGIDVDTIQQAYTV

SEQ ID NO: 181283 - protein, 44 aa, Glycine max
  Clone ID: PAT_MRT3847_134713C.1.pep
LLYFVSTYMNSSLFLVVLLFICFDVPLFCRRSKHLENKEASRVS

SEQ ID NO: 181284 - protein, 52 aa, Glycine max
  Clone ID: PAT_MRT3847_134714C.1.pep
YHPMTINNLMKNADCHGSLYTSYMGSLMTELKVTNDKCSCGHGGKKTDPLCL

SEQ ID NO: 181285 - protein, 62 aa, Glycine max
  Clone ID: PAT_MRT3847_134715C.1.pep
VYKCQENLKHIATYLGSMSLQSSRKLELGFIEYKFEAHCNLPQIGNQNLKENLPYFLQQKSK

SEQ ID NO: 181286 - protein, 55 aa, Glycine max
  Clone ID: PAT_MRT3847_134716C.1.pep
DRSLGRSIDFALLQILFQGPTHSRNGYSVCLFARWVLVIGAYIYPCVSRLFILRL

SEQ ID NO: 181287 - protein, 84 aa, Glycine max
  unsure (1)..(84): unsure at all Xaa locations
  Clone ID: PAT_MRT3847_134717C.1.pep
MQGNTPGSMEADGKPPEVKEKLPIKRSKGSLGSLNMITGKNNEHGKTPGTSANGIHSKSGESASEGEGTSEGSDANSQNDSQXK

SEQ ID NO: 181288 - protein, 62 aa, Glycine max
  Clone ID: PAT_MRT3847_134718C.1.pep
DYKLKNTLSRLYKLTYAIILLNITAILIPQIISITNHLQNYDYDNSLQTYFNLLILHHSMPS

SEQ ID NO: 181289 - protein, 91 aa, Glycine max
  Clone ID: PAT_MRT3847_134719C.1.pep
SRVWSLSICSCKTVLLNCRYGGAMAVWHNRFFKKCHQIAVALRVSYDSRHSLNDRGRTAEMVEDCFFCFFEIFAMGRVGLTRPNPNPIFAC

SEQ ID NO: 181290 - protein, 130 aa, Glycine max
  Clone ID: PAT_MRT3847_13471C.1.pep
RLRRRAAAATPRPAMDIDKERPLVQVKIENQDLPLDGNNAFTSRHPQIQQFRQQQQQQQIAAMSNFHPQSGTQFRHMGSLQIPSIQSPNTSMVRAPPVKVEGFSELMGGDSTSKHDLEENRLTSPNVLAP

SEQ ID NO: 181291 - protein, 84 aa, Glycine max
  Clone ID: PAT_MRT3847_134720C.1.pep
KLGVLVTILAVPNWKMTLPPTMATSLTLSERGLLPVIVMVLTLSFPCVNVKMNGQQNIQMHLRRGGNQAIGFFVNVGVILGFHS

SEQ ID NO: 181292 - protein, 100 aa, Glycine max
  Clone ID: PAT_MRT3847_134721C.1.pep
YKFLSLYIGVVLDYFYHTHLLICFPRSTITKSFLDHNDCNVSHSTCGNGNKTKHTHHGDWNIRYLPCRLHHSNFAFSFSFGSTLYFFYYSHYKHHHSTLK

SEQ ID NO: 181293 - protein, 167 aa, Glycine max
  unsure (1)..(167): unsure at all Xaa locations
  Clone ID: PAT_MRT3847_134722C.1.pep
MVRRHQHLKIGYYHQHLTDLLDMDLSPLDYMMKCYPGEVEYERMRQIIGKFGITGKAQTTLIRLLSDGQKTRVVFAWLAWQTPHLLLLDEPTNHLDIETIDALADAINEFEGGVVLLSHDFRLINQIADEIXWICEHGGINKWKGDIVGYKEVLRKKVLKEQEALSK

SEQ ID NO: 181294 - protein, 164 aa, Glycine max
  unsure (1)..(164): unsure at all Xaa locations
  Clone ID: PAT_MRT3847_134723C.1.pep
MGLSKVSFPVLCVLGLTNIVSQVANAQDSPADYVNAHNAARSQVGVQNLAWDDTVAAFAQNYANQRKGECLLVHSRGAXVGKMQCNCGSMRNPSTDAITMWVVERCNYDYNSKSCVGGECLHYTQVVWRDSVRLGCAKVSCDNGGTFITCNYAPPGNYVGQRPY

SEQ ID NO: 181295 - protein, 154 aa, Glycine max
  Clone ID: PAT_MRT3847_134724C.1.pep
PRVRLHAAANFGQYPYGGYILNRPTQSRRLLPEPKTKEYDEMVKNPQEAFLRTITPKFQTVIDLTVMEILSSHSSDEIYLGQRDTPNWTSDQNAKDVFETFTKTLAEIEKKISERNNNQELKNRTGPAKFPYTVLLPTSEPGLTFRGIPNSVSI

SEQ ID NO: 181296 - protein, 56 aa, Glycine max
  Clone ID: PAT_MRT3847_134725C.1.pep
RKHIAKYLEAAKTVRNCCLDSVHTKEISVLQHFVKDANLASFCRNKLPDHTLSHVR

SEQ ID NO: 181297 - protein, 110 aa, Glycine max
  unsure (1)..(110): unsure at all Xaa locations
  Clone ID: PAT_MRT3847_134726C.1.pep
CRTGTAGPAHPTRSRLASATESQLWHHYSNIFGNNLVETVCLELEALKGRSVRCGNALVKRSDRASWDKCFKQTASEQSLYDACQWTKXEPHMWELIMPIEACGPNNGFE

SEQ ID NO: 181298 - protein, 174 aa, Glycine max
  Clone ID: PAT_MRT3847_134727C.1.pep
MDTMNSGTAGIANDYYGLDASSASNLGGKNGRFEFPVKTCHYFNKGFCKHGNSCRYYHEQGAPDMFSHMYGNDIFNDDQVISPGSLAQLESEIVELLKLKKGGSISIASLPMAYYDRYKKVLQADGYLTESQRHGKSGYSLTKLLARLINSIRLIDRPHGQHSVVLAEDAPKFN

SEQ ID NO: 181299 - protein, 53 aa, Glycine max
  Clone ID: PAT_MRT3847_134728C.1.pep
AFGLERSQQHFSSCYICTCLLYSFYLISIRSFVCPSNLALTFATIYLYDKVFV

SEQ ID NO: 181300 - protein, 78 aa, Glycine max
  unsure (1)..(78): unsure at all Xaa locations
  Clone ID: PAT_MRT3847_134729C.1.pep
TNXQCAWALXWXLXXAVVXXXLGXXXXVXXLXXTTXXXXPCXLXVXXXXVXXXXXXXXGXXLRCALELXXGXYVRVPA

SEQ ID NO: 181301 - protein, 292 aa, Glycine max
  Clone ID: PAT_MRT3847_13472C.1.pep
FRFFWNGIFKRLFQIRFLFLKSVLKILMDIGFEGTMEGSVEDFSEVLRKRISKIGSNLRVLADSYKKQCSAIELLKMLLKTVGFSNFTPLVDVVKDGSKNNVQQSQQQIHGMQPQLQQQQQSSLRLPQQLQMQRQMHPQMQQMIHSQNMAFHQQQHQQQQQQFERLRRRAAAATPRPAMDIDKERPLVQVKIENQDLPLDGNNAFTSRHPQIQQFRQQQQQQQIAAMSNFHPQSGTQFRHMGSLQIPSIQSPNTSMVRAPPVKVEGFSELMGGDSTSKHDLEENRLTSPNGK

SEQ ID NO: 181302 - protein, 249 aa, Glycine max
  Clone ID: PAT_MRT3847_134730C.1.pep
MVMHLNGTPCALGFHMPAEWETHAQCWMGWPERADNWRDGAVHAQRVFARVASAISRFESVTVCVSSAQWENARSQLPEHIRVVEMNMNDSWFRDIGPTFVVRRSTTPESGDAVSRIAGIDWNFNSWGGLEDGCYCDWTLDLPVAQKILGIEKIPRFSHSMVLEGGSIHVDGEGTCLTTEECLLNMNRNPHSSKNQIEDELKTYFGIRKDIWLPRGLYGDDDTNGHIDNMCCTVRPGADMLPRIDGQTD

SEQ ID NO: 181303 - protein, 151 aa, Glycine max
  Clone ID: PAT_MRT3847_134731C.1.pep
MVMHLNGTPYALGFHMPAEWETHAQCWMGWPERADNWRDGAVHAQRVFARVASAISRFESVTVCVSSAQWENARSQLPEHIRVVEMNMNDSWFRDIGPTFVVRRSTTPESGDAVSRIAGIDWNFNSWGGLEDGCYCDWSLDLLVARRFWEF

SEQ ID NO: 181304 - protein, 66 aa, Glycine max
  Clone ID: PAT_MRT3847_134732C.1.pep
HARVRKLGIRLEETETETETETERGKWELFLHLKHGAKQLGTIPSANSGSVIYNFGVFFVVFIQTL

SEQ ID NO: 181305 - protein, 125 aa, Glycine max
  unsure (1)..(125): unsure at all Xaa locations
  Clone ID: PAT_MRT3847_134733C.1.pep
KKNKDRLPENLYXKSNKSGVQRRDYLTRKSEICVPHSLHSAKXLGWVIGGHDIXAMCLRQRXCLRNLVKXLVAEQEEVXSRKXSSEKXREXPKRFSGIASESDTSFFLFFLTYLKKIIFCQYSQI

SEQ ID NO: 181306 - protein, 42 aa, Glycine max
  Clone ID: PAT_MRT3847_134734C.1.pep
MSQPREHFMILEHNDRTLHSGCLKYPSLRQNAYEPSVAHKGL

SEQ ID NO: 181307 - protein, 109 aa, Glycine max
  Clone ID: PAT_MRT3847_134735C.1.pep
NRAWPKALFQAFFGASKSVWKVPFLANSLPPSLPIFKVEKGVRFFSVSKEEMGGGGGDKAPSNLVPALVKKMLAPGFFFFASPLKCKVLSRALSSCSTKEDKPFTPPPF

SEQ ID NO: 181308 - protein, 64 aa, Glycine max
  Clone ID: PAT_MRT3847_134736C.1.pep
GLRTRHMVFVVLLSSPRHCVVLSYLLPPYSNLYVSTLNLCIAPLLLSLHPLTSNFNQYYIGLWN

SEQ ID NO: 181309 - protein, 115 aa, Glycine max
  unsure (1)..(115): unsure at all Xaa locations
  Clone ID: PAT_MRT3847_134737C.1.pep
NSNKGNLATFCELMMNRGRRLPVCVSHVPPCDFSPWSLILCRSQPGREMPXTSEFHSRHELGGNXTGPIAWCPRVMEXRKKKNHFSPPPFSFGFKRGEPSFVFLLAPNWLREKLE

SEQ ID NO: 181310 - protein, 128 aa, Glycine max
  unsure (1)..(128): unsure at all Xaa locations
  Clone ID: PAT_MRT3847_134738C.1.pep
VTVPGQLVWEIVKKNNSFLVKQFGRGTQSAGSTRASNTLYNLNSFKYSGLGDKNTVTAHPEGXDQAGLFAPPVTKMQNTPAALLSKSGLKKESMTLVSAVVNDAAGHSYRPCLTKAVLARPCAAHSSL

SEQ ID NO: 181311 - protein, 372 aa, Glycine max
  Clone ID: PAT_MRT3847_134739C.1.pep
AVVGDIAIVTNRTMIVDFSQPFASSSLVIVAPINKARSNAWVFLQPFTADMWCATAASFLVVGVVIWILEHRVNNDFRGPPKKQLLTMVMFSLSSLFKKNLEDTVSSLSKMVMIVWLFLLMVITASYTAAWTSILTVEQLSSPITGIDSLIASNWPIGYQVGSFAYNYLTDNLYVSKSRLIPLGSPEEYATALQKGPSGGGVAAIIDELPYVELFLSNETDFGIIGQPFARSSWGFAFQRESPLAYDMSTAILKLSENGDLRKIHEKWFCKMGCAEDRTSNSKPDQLHLISFWGLYLSCGIVLLVALALFLLLMIRQYARFKQRQKDVASSSTEPSGIHCSQVVVNFFNFIDEKEEAIKKMFTQCDNHHNPN

SEQ ID NO: 181312 - protein, 56 aa, Glycine max
  Clone ID: PAT_MRT3847_13473C.1.pep
YVLAVLMVSVRSWVNGSCACFLYRLVLLSIVYVCMLPLWFLHILPFMSFRYLLQLM

SEQ ID NO: 181313 - protein, 180 aa, Glycine max
  unsure (1)..(180): unsure at all Xaa locations
  Clone ID: PAT_MRT3847_134740C.1.pep
GENFGCLLRRINYYLKKSWGKRKIWGCGRYFDKKYLKGFKVKEKKLKKNFFFIEKGKKKGVTFLRRGKKVGKKGXINKXKILCNVKEEMFIDGDKIFGRVIGLMKFKTMEEEIKSVKNTKYGLEEGIVTKNLDIANIMXRSIGEGIVWIKCYLTVGSEVPFGGYKMSGFEKNLGLQALHK

SEQ ID NO: 181314 - protein, 144 aa, Glycine max
  unsure (1)..(144): unsure at all Xaa locations
  Clone ID: PAT_MRT3847_134741C.1.pep
MGTSNLSIVLYVCLAFFLVLLTXAHSTDTVSFTLNKYNPVQPNIMLQKDASISSSGELQLTKDGXHGVPTSGSVSRDLYAAPIQICDSETGXGDSWTTFFRWSIYAPNKVNXYDGLAFLLAPGPCNAQSYNGIRGLFNRPLRDK

SEQ ID NO: 181315 - protein, 339 aa, Glycine max
  Clone ID: PAT_MRT3847_134742C.1.pep
MSTTTIPSSLLSPSLSSFKLSFPSTKLQPLSPQFRRNRIGFSFSSPTFSPWKRFAVNDNNKESDNGDVLTGLDEVEKEARGNSTMPERFRYLAKEVPSLPVRWPWLVVLAFLVYAWRAVLFELSNWKNGAFAIVRFVGYVLKYAFAVVYQFIGSPITFSIRCIEDLFYIVRACYSWIIHNAPVPDLTIIIMLASIVLAIGEATVPNSINDQHNVLTVSGLIGYAAVRGYISELFFWTILLGVYAFSKFVKKRDDVSAAMPVAAVLAGVGEPWVRALVIISYTALAIYQYSKTSTGGKEVGEVETRQMRLPIPLLLASFAIGLRVAAKWVGYRHLTWMSR

SEQ ID NO: 181316 - protein, 188 aa, Glycine max
  Clone ID: PAT_MRT3847_134743C.1.pep
GFYETLKLMKAGGRKIVLTIVEDEDEETTRELIKLLKAAASANRDLIFGYVGVKQMEEFAENFDIDTKLPKMVIWDKSDDYLSVVDSETIEGEDQGTQITKFLEGYREGRTIKKTFSGPSLMRFIHRSFDIRMVYIIVFVVAVLMLIQTFSKGGDEYQSVPNQVQTDHAISSVSEAENKEYKPGDKED

SEQ ID NO: 181317 - protein, 61 aa, Glycine max
  Clone ID: PAT_MRT3847_134744C.1.pep
MGTPQSNNLPPGFRFHPTDEELILHYLRKKVASIPLPVSIIAEVDIYKFDPWELPGLSTFK

SEQ ID NO: 181318 - protein, 85 aa, Glycine max
  Clone ID: PAT_MRT3847_134745C.1.pep
WGPLGFYIGVKLGENKAPQGPPQGGGGEKKKPKTGKKKPPPPKPKKERGGPKSPQTPRVGPPEDKKTPRKKKKNPAPPPALGGGG

SEQ ID NO: 181319 - protein, 89 aa, Glycine max
  Clone ID: PAT_MRT3847_134746C.1.pep
MVDVHKLICQTCNNVGVGDGSDGFFYCLRCGSQCEDVMDTAVDDDDLFNKSAVYLPSHQRQRSVAIKAEPISEYDSFYESHSNFIRNLG

SEQ ID NO: 181320 - protein, 85 aa, Glycine max
  Clone ID: PAT_MRT3847_134747C.1.pep
MENLRRPVGSEQYIYSGGKMSSYVEVIGRCNLVLSNDFILCLEKIFYVPSFSKNLIYVSRLAPLGFSFNFLSFGLSLSNKYGIIG

SEQ ID NO: 181321 - protein, 53 aa, Glycine max
  unsure (1)..(53): unsure at all Xaa locations
  Clone ID: PAT_MRT3847_134748C.1.pep
PELEVXDYWRXGSPTNXXXTXIYNXXRXQXXLISXVXASXXPNSEITXAXXXX

SEQ ID NO: 181322 - protein, 82 aa, Glycine max
  Clone ID: PAT_MRT3847_134749C.1.pep
IWYKKVTIKTGTGEIVRLSHGVENFILFKRGFKKLPFFQHQMDQKYPSRFKFPCWQGHFFFSFYPLKRDIRKLKASSQLDSF

SEQ ID NO: 181323 - protein, 310 aa, Glycine max
  unsure (1)..(310): unsure at all Xaa locations
  Clone ID: PAT_MRT3847_13474C.1.pep
MGIFSTLFSRRTLSLSLLKIPSRPTSSQPAPTPTPTPTLAGPTKKPLHVLFTQALGLSQKPTPSDEEEEEEEETASETLTELKNNLKQLEQEIKTFKDSTKDVTLKSEKKKQKMSLFAVFTNKQREPKPKEESLAAAKKLSPDVAVFVQYLFKKGYFNDANFAKGRKNFNPDWFSNVFALGYIKFAANKFARDHREIAKWLSGSALKQVAVFGCPYPHRSGVFPAKSLRXFFEVPENTVCSGCALQQSCKFANRSVWKCDDTNNLDFLTVMKVITPYALESVHPQLEVPDEVKKSVSQLLKEVVKLSQTT

SEQ ID NO: 181324 - protein, 92 aa, Glycine max
  unsure (1)..(92): unsure at all Xaa locations
  Clone ID: PAT_MRT3847_134750C.1.pep
MAFRLPGIRKASLAAIQGNSKAVDVPKGYLAVYVGDKMKQFMIPVTYLNQPSFQDLLSQAEEEFGXDHPMGGLIIPCREDVFLDMTSRLNKC

SEQ ID NO: 181325 - protein, 326 aa, Glycine max
  unsure (1)..(326): unsure at all Xaa locations
  Clone ID: PAT_MRT3847_134751C.1.pep
GIPGSTHASADAWAWHCRLGHPNVVTMKHVFKLCNLPIIYKTGSDFCSHFCIGKSHRLPSSPSLSVYSTPFELIYNDLWGPSLLVSSTGYIYYVTFVDVHTRFTWLYLLKSKSDTLTIFKQFRSPVKTQFNLPIIAVHSDWGGEYRXSYLADLSIMHRLICPHTHHQNGVVXRKHRHIVETALTMLSQVSMTLDYWDHAVISSVYLVNGLPSAIQNEVPYQRLFHXLPDYKFLKVFGCACFPLLRXPYNQHKLQPRSQECVFLGYSLXTGYKCLAADGRIYISKDVIXSEIRFPFPSLMGESDQTPSDSVDNHNTLTELQSQHFHT

SEQ ID NO: 181326 - protein, 58 aa, Glycine max
  Clone ID: PAT_MRT3847_134752C.1.pep
VQRLTYLERHRYASIVNPCMVSKTLVGKLVYYTTNKRASWPNFLVTGKMIQGIALLGP

SEQ ID NO: 181327 - protein, 52 aa, Glycine max
  unsure (1)..(52): unsure at all Xaa locations
  Clone ID: PAT_MRT3847_134753C.1.pep
GVGCSTLSHVVATKLLTVPXNGANSLLNVGKRSIPWNAAMKLESEKQFRCRV

SEQ ID NO: 181328 - protein, 132 aa, Glycine max
  Clone ID: PAT_MRT3847_134754C.1.pep
MAANSSSRGITALGKRVANQIWTSNPPSAPLTSRRGAIAAAYSSSGGSVYDKNPDDQIHSGAVPDDVIQATQSGKYWAPHPQTGVFGPPGGAGDEAASAPTSTSTSTSDALEEKAWFRPTSLEDFEKPHTLP

SEQ ID NO: 181329 - protein, 62 aa, Glycine max
  unsure (1)..(62): unsure at all Xaa locations
  Clone ID: PAT_MRT3847_134755C.1.pep
LTXXDYXXSIXXFXLLPXFVXXHHXYDXHRNXPFXLLFSXANLXLXLLLSXPXCSSTKLIHX

SEQ ID NO: 181330 - protein, 39 aa, Glycine max
  Clone ID: PAT_MRT3847_134756C.1.pep
FLITGQILGSGTFLIMLLEKPKVLPQINKGKIIKTRHTN

SEQ ID NO: 181331 - protein, 117 aa, Glycine max
  Clone ID: PAT_MRT3847_134757C.1.pep
RAAKKKKKKKKKKKGKKKKKKQKKKKNKKKKIKIEKKKEERKKKKKKGGGPGYYYSSSRKKIYRDGRLGAQSGMRTNGPNSGGRHETIGFSKKEVAGETCANIRVGDPKCKSRGPRE

SEQ ID NO: 181332 - protein, 34 aa, Glycine max
  unsure (1)..(34): unsure at all Xaa locations
  Clone ID: PAT_MRT3847_134758C.1.pep
FRFDIVRTXKIAVDYISAXXSFFQGESRXXXXSK

SEQ ID NO: 181333 - protein, 146 aa, Glycine max
  Clone ID: PAT_MRT3847_134759C.1.pep
KKVSLFRPPPPRGIFQPGYFFNPRKKKRLPEGFYQQSPGLDFKAPQKNRGIIPKGGWGSGGLNAGAGIILSGTPRYPKQNGGEFAFKGMGRERFPKRAEAQKGKTANERESGSGRCSVWGGDCKRGPVKTGGGGWVGHCYVVGWSS

SEQ ID NO: 181334 - protein, 80 aa, Glycine max
  Clone ID: PAT_MRT3847_13475C.1.pep
YEQKYRPSYSKFKLRKRERKREREREEGFPSICTRNHEPRRTLRQTLTLLFLSFPLFSFSTPEKFSFFIVYNIFCIEQHS

SEQ ID NO: 181335 - protein, 53 aa, Glycine max
  Clone ID: PAT_MRT3847_134760C.1.pep
DIEREQLHPKHLMINDYFHFFLSTNNCDSISYSKWERTKYSIKKDGCSQAFLV

SEQ ID NO: 181336 - protein, 91 aa, Glycine max
  Clone ID: PAT_MRT3847_134761C.1.pep
FRKQKMCYEDTEFRTKWEAVRFFSIGRNQKPEPLNNMQPGPPQLFPTGHRRHFRAFFFSTSMLTTAFSTPKTHVGDAIIWGWGIFSVVKLV

SEQ ID NO: 181337 - protein, 77 aa, Glycine max
  Clone ID: PAT_MRT3847_134762C.1.pep
AFFFGGKEFEFYTSKVLVGGKKRVYTHLMGRRKKQLKEEMFPKGAGEILSITLLSSFQIIKDLNRPPLVAKLCFPQF

SEQ ID NO: 181338 - protein, 172 aa, Glycine max
  Clone ID: PAT_MRT3847_134763C.1.pep
MARENPLVIGGVIGDVLNPFTSSVSLTVSINNRAISNGLELRPSQVVNRPRVTVGGEDLRTFYTLVMVDADAPSPSNPVLREYLHWMVTDIPATTNASFGREVVFYESPNPSVGIHRIVFVLFQQLGRDTVITPEWRHNFNSRNFAEINNLAPVAAAYANCQRERGCGGRRY

SEQ ID NO: 181339 - protein, 96 aa, Glycine max
  unsure (1)..(96): unsure at all Xaa locations
  Clone ID: PAT_MRT3847_134764C.1.pep
PCATPSTKQNHQKPQAGSEKLRIMAXGWRRTXRTSNTVPQNTHEPEMGDDDNTIEGGAKSTGNPSWGCEPIRXXHANQGRGGETRGARPTGEGGTP

SEQ ID NO: 181340 - protein, 39 aa, Glycine max
  Clone ID: PAT_MRT3847_134765C.1.pep
TLSLRILFQLRNNCFKTETGKEHYRSSANPRLTRRAALR

SEQ ID NO: 181341 - protein, 37 aa, Glycine max
  Clone ID: PAT_MRT3847_134766C.1.pep
LTQEGAPALIRQQERREHQQEQTIIGAFLSNPFRRLQ

SEQ ID NO: 181342 - protein, 40 aa, Glycine max
  Clone ID: PAT_MRT3847_134767C.1.pep
VSSIGGYIFWYSIWILYLFSPNYHSLINTLLRVGFLNSIF

SEQ ID NO: 181343 - protein, 56 aa, Glycine max
  Clone ID: PAT_MRT3847_134768C.1.pep
QISVVNEKINSKYYMCMHKCITNCGLIEILTVDFFFYQQLRLLTLEEPNAFVRFMT

SEQ ID NO: 181344 - protein, 69 aa, Glycine max
  Clone ID: PAT_MRT3847_134769C.1.pep
PPGPGRDPGVPPGGPFWVSFKKKLGFSGLSPKRGVSPPGFITWALGTPKVLRAKSLLHSIRGVPPEQLK

SEQ ID NO: 181345 - protein, 55 aa, Glycine max
  Clone ID: PAT_MRT3847_13476C.1.pep
FLSTYMHHHSLYSLLFVKNTCIYEAHSCSLTAAFPDISILINISLSSKQRLSTSY

SEQ ID NO: 181346 - protein, 71 aa, Glycine max
  unsure (1)..(71): unsure at all Xaa locations
  Clone ID: PAT_MRT3847_134770C.1.pep
LDSLDHNRANSVAGDILGTSTDLWDVKSTSFHPYSDVLXLHMLRXCQLIHGMCAMLATLXALTVEWFSVAA

SEQ ID NO: 181347 - protein, 108 aa, Glycine max
  unsure (1)..(108): unsure at all Xaa locations
  Clone ID: PAT_MRT3847_134771C.1.pep
AQAEAMFASTSSDGTCLCMWNLXFPMTGSGDCILSCLDSISGGSKSMATLTLXNFPXNSGQILLALAGLYNKIHLYCGGTSXNFVHACELKGHTHWIRNLDFILPISI

SEQ ID NO: 181348 - protein, 58 aa, Glycine max
  unsure (1)..(58): unsure at all Xaa locations
  Clone ID: PAT_MRT3847_134772C.1.pep
WEYRTCQLLAQNSQXYPGFPAAYQDGTCXNINDDSSIPFSTTHTQPPMPTHKPNTXTT

SEQ ID NO: 181349 - protein, 58 aa, Glycine max
  Clone ID: PAT_MRT3847_134773C.1.pep
IETFGERKEEQKQHINLHFGIGLFVLSLFGPIQRLVWLCVCVCVGNNKNSSGNQSATP

SEQ ID NO: 181350 - protein, 105 aa, Glycine max
  Clone ID: PAT_MRT3847_134774C.1.pep
AFQYKYWWTYIESHENGKTGPSQLVCFKSNMNNTGAQVVVGSGRHGMQFRLYILFLHVLHLPLFRNGQGGNSKSSIFLHLPLLSHCGYSRSSVHMSIIVIWPVIE

SEQ ID NO: 181351 - protein, 70 aa, Glycine max
  Clone ID: PAT_MRT3847_134775C.1.pep
SPTIEHHTFSPYQPLFTLSILSLLIIMWGRSGIYCTDYSKSKTPFQAIHQLCGKRLFIFVRLICFFSRCT

SEQ ID NO: 181352 - protein, 46 aa, Glycine max
  Clone ID: PAT_MRT3847_134776C.1.pep
ITKPVSHDPTTEHQFPTQQFHILHSSVETQGIGRRRKAIKAEEYSQ

SEQ ID NO: 181353 - protein, 111 aa, Glycine max
  unsure (1)..(111): unsure at all Xaa locations
  Clone ID: PAT_MRT3847_134777C.1.pep
FKGWAEGKRWATKNKPGCVNPGPFFPXNKVPGTDVGYPGGPGFAPLGWGTGFPPKIKGLGTKGTKKGRRALLAVKGAGFQPIYPAPGPIDNLFAPLADSGPGPLFGAFPPK

SEQ ID NO: 181354 - protein, 95 aa, Glycine max
  Clone ID: PAT_MRT3847_134778C.1.pep
SYTHASSNPLSYAFTLTYLSFKSASYTLNLILYNQHIHQYLQSPSTYLTQSILSIQILQSTTQQYYLINIKESTSNHSLYTLIQIIYSKIPHILI

SEQ ID NO: 181355 - protein, 90 aa, Glycine max
  Clone ID: PAT_MRT3847_134779C.1.pep
QCVVWVQNFYFDLNLIGVATFAEPHLQQDHDTVKGGRGRTQPFCVARSSCGNQATSSHNFSLLTSEISRKLPHHRRLHDEVGRPGIRTDA

SEQ ID NO: 181356 - protein, 74 aa, Glycine max
  Clone ID: PAT_MRT3847_13477C.1.pep
NVQWVRDPASDQFQREDFPLSMRLIALRLYLFSLDSSLIHNLPIQQPQPHTHTYTHLNAYRPSHGFKAHAHRAQ

SEQ ID NO: 181357 - protein, 68 aa, Glycine max
  Clone ID: PAT_MRT3847_134780C.1.pep
SEGEVKHRRKKRMARDSVLTRVATGAAVGGAIGGAVGEIIFTSYSRFGWILFINRQTRHSFRSVLRLV

SEQ ID NO: 181358 - protein, 282 aa, Glycine max
  Clone ID: PAT_MRT3847_134781C.1.pep
MDCSAARKTQKADREKLRRDRLNEQFVELGNILDPDRPKNDKATILCDTIQLLKDLTSQVSKLKDEYAMLNEESRELTLEKTDLREEKASLKSDIDNLNNQYQQQLRTMFPWTAMDHSVMMAPSSYPYPVPMAVPPGPIPMQPYPFFANQHPAVISNPCSTYVPYLAPNTIVEQQSTLYVSPPLHPCARSNVSGKQESKSKSSRESMAEKNEDSNDVTTDLELKTPGSSADQDLSSGQRKSSKLSRRESSCTEGSSLGRCSSSRSVQDSSSSSVAASRKDNE

SEQ ID NO: 181359 - protein, 159 aa, Glycine max
  unsure (1)..(159): unsure at all Xaa locations
  Clone ID: PAT_MRT3847_134782C.1.pep
IRPEVEPMDCSAARKTQKADREKLRRDRINEQFVELGNILDPDRPKNDKATILCDTIQLLKDLISQVSKLRDEYAMLNEESRELTLEKTDLREEKASLKSDIDNLNNQYQQQLRTMFPWTAMEHSVMMAPSSYPYPVPLAVPPGPIXMQPYPFFANILQ

SEQ ID NO: 181360 - protein, 80 aa, Glycine max
  unsure (1)..(80): unsure at all Xaa locations
  Clone ID: PAT_MRT3847_134783C.1.pep
VHPKDTFGFNINGTXLSNIPYYKKHRYWVEKFNSTLYDECVNNGNSPALPETFNNYNKLVSIGFNIIFFFXRTLDKHAVT

SEQ ID NO: 181361 - protein, 55 aa, Glycine max
  Clone ID: PAT_MRT3847_134784C.1.pep
MLTGLFYAPQSGLTGGVRTKNGRTADCLMRALKVGTVWITCVNEFDACISRGCYK

SEQ ID NO: 181362 - protein, 140 aa, Glycine max
  unsure (1)..(140): unsure at all Xaa locations
  Clone ID: PAT_MRT3847_134785C.1.pep
MKFLSLVGNSFGCSASGERLVSAARDGDVQEAKALLEYNPRLXKIVYLLLESGVDINLRNYRGQTALMQACQHGHWEVVQTLVIFNANIHKADYLNGGTALHLAALNGHTRCIRLILADYIPSVPNFWNALQTGDHKSIS

SEQ ID NO: 181363 - protein, 69 aa, Glycine max
  Clone ID: PAT_MRT3847_134786C.1.pep
MLLKWVGPSHNKYFARGFLFLLQWFFQLTFPSLVIRKSFFLSLQEAPWTLVDSIVFPSVFSWLSFLLGS

SEQ ID NO: 181364 - protein, 171 aa, Glycine max
  Clone ID: PAT_MRT3847_134787C.1.pep
RSLLDPVLPSNHAGFYHSAVLNTHDVCGETETLWELAKKSYTAFVNAMNCNKHFTDMSDLNYLMCKAIENPGLTPSSSLRTALISVFEDPVFDDSAEMHGEIGLEDYVGCASAHGVGPSIAVFDTIRNGKLDCACIYPSPLHSREQIQGLVDHMKRILVEGCNSENQQIEP

SEQ ID NO: 181365 - protein, 64 aa, Glycine max
  Clone ID: PAT_MRT3847_134788C.1.pep
GKTNHCVLDFEIQMDDDDEEYPIPVSKKPSTQNDEIMELLWQNGQVVMQNQNQRPFRIQPPTTD

SEQ ID NO: 181366 - protein, 182 aa, Glycine max
  unsure (1)..(182): unsure at all Xaa locations
  Clone ID: PAT_MRT3847_134789C.1.pep
SLLDPVFPSNNAGFYHSAILNTHDXCGETENLMGVGKEKATQPFVNAMNCNKHFTDKNDLNXHMCKAIENPGLTPSSSLRTALISVFEDPVFDDSAEMLGEFGLEDYVGCASAHGVGPSIAVFDTIRNGKLDCACIYPSPLHSREQIQGLVDHMKRILVEGCNSENQQIEPYSTSEAEQMVI

SEQ ID NO: 181367 - protein, 85 aa, Glycine max
  unsure (1)..(85): unsure at all Xaa locations
  Clone ID: PAT_MRT3847_13478C.1.pep
SNLKTPQIXVIRXNILKRADGPISVLETSNPXQXXGSLNAKDXGNHTXXXFXHXYXWFPXXTXKGNVXPXXAWVDPGIRTGLGCT

SEQ ID NO: 181368 - protein, 45 aa, Glycine max
  Clone ID: PAT_MRT3847_134790C.1.pep
ITYMVQCRRKHFLISKFYFSPRHGLKCVVFKWLITLFVYHKIHNT

SEQ ID NO: 181369 - protein, 277 aa, Glycine max
  unsure (1)..(277): unsure at all Xaa locations
  Clone ID: PAT_MRT3847_134791C.1.pep
MTRLFRSKSCGLVEFNAAPPSPLFHDVKSEDEDNEEDEDEDEEEEEEEELDSDDDVSSNPVSTALMNPGSKVENKGWRGGHGCQSNQFAMLDILLAALKKSLVTCSVEREDISSLDISWPTEVRHVSHVTFDRFNGFLGLPSELELEVPKRVPSASAKVFGVSAKSMQCSYDERGNSVPTILLMMQKRLYSEGGLKAEGIFRINADNSQEEFVRDQLNRGLVPLGIDVHCLSGLIKAXFRELPTGVLDSLTPEQVMHCNTEEDCTNLMKLLPSTEAA

SEQ ID NO: 181370 - protein, 106 aa, Glycine max
  unsure (1)..(106): unsure at all Xaa locations
  Clone ID: PAT_MRT3847_134792C.1.pep
SLRPSKVRHKRARPIRAGXSQGKTRGPKRYREQRLEPPDSNRKQTQGAAPPPGYEXARKTEPRERGGGANETRREPSGGRRAQTGNQSPKQATARNKQEAPPPEKT

SEQ ID NO: 181371 - protein, 67 aa, Glycine max
  unsure (1)..(67): unsure at all Xaa locations
  Clone ID: PAT_MRT3847_134793C.1.pep
FSSFLKRKGTIILLISLPQFKGQQQQQPQPXPRPWPLVQDFERWVPPMALPFSNQFGLANQGLEGGP

SEQ ID NO: 181372 - protein, 250 aa, Glycine max
  unsure (1)..(250): unsure at all Xaa locations
  Clone ID: PAT_MRT3847_134794C.1.pep
MTDVVIVSAARTPVGSFNGAFGALSAHELGAVAIKGALDRAKVSPEDVDEVILGQVLSGGEGQNPARQAAMAAGIPQEKTAWGMNQLCGSGLRSVALGLQQIANGDARIIVAGGMESMSMAPHLSHLRNGTKMGDVKFVDSMLKDGLMDALRGYHMGVTAENVAARWQITREEQDAFATSSQNKAEDAQKGGRFKDEIVPVTVKTRKGDVVVDQDEYIRPGTTQESLAKLKPAXXREGSVTAGNASGLND

SEQ ID NO: 181373 - protein, 126 aa, Glycine max
  Clone ID: PAT_MRT3847_134795C.1.pep
RVQEGAGLLSIVIQEAEEVEGDHHNNPFAVLTFRGEKKRTKTMKKTRHPRWNEEFQFMLEEPPLHEKIHIEVMSKRKNFSFLPKESLGHVEINLRDVVHNGRINDKYHLINSRNGVMHVEIRWKVV

SEQ ID NO: 181374 - protein, 71 aa, Glycine max
  Clone ID: PAT_MRT3847_134796C.1.pep
FLQSNSIHGFFFSSTLLKRIPFLKREKDDIPVSYKTHQIQILFGLITSTTCRFDEICGFDYRRIAKRSYLP

SEQ ID NO: 181375 - protein, 50 aa, Glycine max
  unsure (1)..(50): unsure at all Xaa locations
  Clone ID: PAT_MRT3847_134797C.1.pep
SLCLCERCEAYYSYKSLCLFTELMVVWCVSVAMYATLVERGRXRAGHVKK

SEQ ID NO: 181376 - protein, 35 aa, Glycine max
  Clone ID: PAT_MRT3847_134798C.1.pep
KSVLSPTCSYNNLRAYTNSILAASLSFPYDVPDAW

SEQ ID NO: 181377 - protein, 502 aa, Glycine max
  Clone ID: PAT_MRT3847_134799C.1.pep
TRPPVSKSTLSQLLFDSLSLSAWKSTGFSTWSLRVNPSSGNLHPTEAYVVAPPIPGVSDSAFVAHYAPKEHSLELRAEIPSGFFPKFFPPNSFLVGLSSVFWREAWKYGERAFRYCNHDVGHAIGAVAMAAAGLGWDVKVLDSLGCEELKSLMGLHVFPEFEIPSRAVRGKIPEIEFEHPDCVMLVYPSGVGGFDVNWKELSEAILGFDKLDWKGKPNSLSKEHVCWEVIYRTAEAVKKPLTLGERFLVEPFQRSGVCGESAYKGLTVREVVRKRRSAVDMDGVTEIERDAFYQILLHCLPSGCQGGGRQGRELALPFRALPWDAEVHAALFVHRVVGLPQGLYFLVRNEDHFDKLKKAMLPDFLWTKPEGCPDDLPLYELLRLDCRQLSKQLSCHQDIASDGCFSLGMLARMEPTLREKNVWMYPRLFWETGVLGQVLYLEAHAIGISATGIGCFFDNPVHQLLGLKGSTFQSLYHFTVGGPVLDKRIMSLPAYPGPDVDA

SEQ ID NO: 181378 - protein, 61 aa, Glycine max
  Clone ID: PAT_MRT3847_13479C.1.pep
MIESDKRRLREGMPFWPTPMWVPAPTILHLTPKLMTPMTLSSPCSLRVLSHVSWTSDECVP

SEQ ID NO: 181379 - protein, 48 aa, Glycine max
  Clone ID: PAT_MRT3847_1347C.1.pep
DACRPYQYHQTPDHIIHLSHYEPFWSDHPVRLFSRIWSFPLCRLLAAV

SEQ ID NO: 181380 - protein, 99 aa, Glycine max
  Clone ID: PAT_MRT3847_134800C.1.pep
YFFFLLHILCNMVVFISTPLYSWCVAIALVLMIISQCCGCSKKKQKKAKEPLKAMPTQKAEEASTGSEKTGQSVVSVRPPNVPTTAPVRSNPTISAGTE

SEQ ID NO: 181381 - protein, 29 aa, Glycine max
  Clone ID: PAT_MRT3847_134801C.1.pep
EIPSCQPSLGSLSCLLDSIDALGDEHDHA

SEQ ID NO: 181382 - protein, 43 aa, Glycine max
  Clone ID: PAT_MRT3847_134802C.1.pep
YGYPNAIKGRTASRLFKTKIRWAGELAPLKFSDHGNLFLVGAQ

SEQ ID NO: 181383 - protein, 94 aa, Glycine max
  Clone ID: PAT_MRT3847_134803C.1.pep
ISNRRVSPKCAKTASDGHSRSVWPAHRFTFITLRLGTLISYELSDQLHTPTNKRICLRIEGAPSGHHRLSVLLHASAQSNAKAWAWPDPPIRDR

SEQ ID NO: 181384 - protein, 99 aa, Glycine max
  Clone ID: PAT_MRT3847_134804C.1.pep
MMAPSQPPHWAPSPSLTPTPILHKSFFPPPSNSPAVDFSPPLIAMVVVVAAAFLVVTYSRLIGPHLRPPIHRLLRRLRRRRLLPYCDGDLESLPYESAF

SEQ ID NO: 181385 - protein, 556 aa, Glycine max
  Clone ID: PAT_MRT3847_134805C.1.pep
MDLGTYEVPEGVDILGRYDAEFAKILTKDALKFVAELQREFRSDIKHALESRREAKKKYNEGTLPGFDPATSHIRDQEWLCAPVPPAAADRKVEITGPVDRKMVINALNSAAKVFMADLEDALSPTWENLISGQVNLKDAVDGTISFHDKVRNRVYKLNDQTAKLFVRPRGWHLPEAHILIDGEPATGCLVDFGLYFYHNHSAFRRTQGAGFGPFFYLPKMEHSREAKIWNSVFEKAEDVAGIERGSIRATVLIETLPAVFQMDEILYELKEHSVGLNCGRWDYIFSYVKTFQTHPDRLLPDRVQVGMTQHFMKSYSDLLIRTCHRRGVHAMGGMAAQIPIKDDPVANEAALELVRKDKLREVKAGHDGTWAAHPGLIPSCMEVFNNNMGNAPNQIDTVKRDDAANLTEQDLLQIPTGTRTMEGLRLNTRVGIQYLAAWLSGSGCVPLYNLMEDAATAEISRVQNWQWLKYGVELDGDGLGEKVNKDLFHRVVEEEMARIEKEVGTEKFEKGMYKEACKIFTRQCTSLTLDDFLTLDAYNYIVVHHPKEGTVKASN

SEQ ID NO: 181386 - protein, 142 aa, Glycine max
  Clone ID: PAT_MRT3847_134806C.1.pep
LFWMQTPLAVVAGGALYLAVPTQFSAARGNSKESIWKKLGTLGYLGAFTLTGGIGLAFSALSNPRRIPILPIIFSIIAMATFILNEIYLATDPIIPVTLLKSRGMAFTCLSTGGFMMARWSVLFFTPNLHSCGTWLGSRCCW

SEQ ID NO: 181387 - protein, 556 aa, Glycine max
  Clone ID: PAT_MRT3847_134807C.1.pep
MDLGTYDVPEGVDILGRYDAEFAKILAKDALKFVAELQREFRNDIKHALERRREAKKKYNEGSLPGFDPATSDIREQEWVCAPVPPAAADRKVEITGPVDRKMVINALNSAAKVFMADLEDALSPTWENLISGQVNLKDAVDGTISFHDKVRNRIYKLNDQTAKLFVRPRGWHLPEAHILIDGEPATGCLVDFGLYFYHNHSAFRRTQGAGFGPFFYLPKMEHSREAKIWNSVFEKAEDVVGIKRGSIRATVLIETLPAVFQMNEILYELKEHSVGLNCGRWDYIFSYVKTFQAHPDRLLPDRVQVGMTQHFMKSYSDLLIRTCHRRGVHAMGGMAAQIPIKDDPVANEAALELVRKDKLREVKAGHDGTWAAHPGLIPACMEIFNNNMGNASNQIDTVKREDAANLTEQDLLQIPIGTRTMEGLRLNTRVGIQYLAAWLSGSGCVPLYNLMEDAATAEISRVQNWQWLKYGVELDEDGLGEKVNKDLFDRVVEEEMARIEKEVGTEKFEKGMYKAACKIFTRQCTSPTLDDFLTLDAYNYIVVHHAKEGPVKALN

SEQ ID NO: 181388 - protein, 57 aa, Glycine max
  Clone ID: PAT_MRT3847_134808C.1.pep
IKYFYFFLSFHLFFFSQFLPNVFLFKIYKMYFSNFSLVPFVRIRMHPPPLLVLFLLN

SEQ ID NO: 181389 - protein, 74 aa, Glycine max
  Clone ID: PAT_MRT3847_134809C.1.pep
MPTFIKHQKGCECPVYNLLSDNASGQFCYLADHTAQVHTIKSMELCLRIPGWYFLHAVHYKDVHTLGSSLISTE

SEQ ID NO: 181390 - protein, 49 aa, Glycine max
  unsure (1)..(49): unsure at all Xaa locations
  Clone ID: PAT_MRT3847_13480C.1.pep
LRNDRRLKISXGSVENEDATLIYQAFGGGGHQNSSSFMLPAYEFEKWKV

SEQ ID NO: 181391 - protein, 43 aa, Glycine max
  Clone ID: PAT_MRT3847_134810C.1.pep
GKRSSYRTSPISAKMAGPQLKVLVLRPQVSRAGSPYLWHKLHK

SEQ ID NO: 181392 - protein, 227 aa, Glycine max
  Clone ID: PAT_MRT3847_134811C.1.pep
KKSELSVLVDRATGGGSIKDGQVELMLHRRMLFDDGRGVDERLDELVCQNDRCQGLTVRGNYYVGIHKLGAGSHWRRTTGQEVYSPLLLAFAHEDLGNWKAFHVTRGTVIDPNYNLPPNVALITLEVLDNGMVLLRLAHLYEAGEDAQLSTLTKVELKKMFATKMIRGLIEVSLSANQEKEKMKKKTWNVAGDKGQGSKSVRGGPVSHINLVVELGPMEIRSFLLKF

SEQ ID NO: 181393 - protein, 40 aa, Glycine max
  Clone ID: PAT_MRT3847_134812C.1.pep
AHGTFHIMGSCHSVVVVETYVRVPAVAQLFYIDRKVDFAV

SEQ ID NO: 181394 - protein, 75 aa, Glycine max
  Clone ID: PAT_MRT3847_134813C.1.pep
LHLSHLECQPCASVMQALAVRYANHGQVILQARPAAVWARTNALPRSSRAPSLVSSAFVRCGTCFRATRTWVACP

SEQ ID NO: 181395 - protein, 407 aa, Glycine max
  unsure (1)..(407): unsure at all Xaa locations
  Clone ID: PAT_MRT3847_134814C.1.pep
MAFWWPLLVLALAFSICKFLLILIPPKVPSIDVDASDVLDDGSLTQENSFIYVPPRGTAQQSSGKVQCYEPATMKYLGYVPALTPDEVKEQVEKVRKAQKMWAKTSFKKRRHFLRILLKYIIKHQALICEISSRDTGKTMVDASLGEIMTTCEKINWLLSEGEQWLKPEYRSSGRSMLHKRAKVEFHPLGVIGAIXPWNYPFHNIFNPMLAAIFSGNGIVIKISEHASWSGCFYFRIIQSALAAIGAPEDLVEVITGFAETGEALVSSVDKVIFVGSPGVGKMIMNNASNTLIPVTLELGGRDAFIVCEDVDLDHVAQIAVRAVLQSSGQNCAGAERFYVHREIYSSFVSKVTKIVKSVTAGPPLVGKYDMGALCMHEHSEKLEGLVNDALDKGAEIVARGNLGHIX

SEQ ID NO: 181396 - protein, 234 aa, Glycine max
  Clone ID: PAT_MRT3847_134815C.1.pep
EDDRRGGTSQQSGKIVQCYEPATMKYLGYVPALTHEEVKDRVSKVRKAQKMWAKSSFKQRRLFLRILLKYIIKHQALICEISSRDTGKTMVDASLGEIMTTCEKINWLLSEGEQWLKPEYRSSGRSMLHKRAKVEFHPLGVIGAIVSWNYPFHNIFNPMLAAIFSGNGIVIKISEHASWSGCFYFRIIQSALAAIGAPEDLVEVITGFAETGEALVSSADKVIFVGSPGVGKMV

SEQ ID NO: 181397 - protein, 127 aa, Glycine max
  unsure (1)..(127): unsure at all Xaa locations
  Clone ID: PAT_MRT3847_134816C.1.pep
MAFWWPLLVLALAFAICKFLLILIPPKVPSIDVDASDGTLPHSISIARKFVATLKMXCRFFTVTVLDDGSQAQENSFIYXVPPRGTAQQSSGKVQCYEPATMKYLGYVPALTPDEVCEPVLLRKLIV

SEQ ID NO: 181398 - protein, 41 aa, Glycine max
  Clone ID: PAT_MRT3847_134817C.1.pep
CVRDWTGAYDGLCQILYVELRVHRCTFYHGPVPRAKAERVV

SEQ ID NO: 181399 - protein, 56 aa, Glycine max
  Clone ID: PAT_MRT3847_134818C.1.pep
VIIAPPLVKLRGKHVPLPHTLCIEKIMGKGKLLATLLGNVISRKHCYARLLGHAEA

SEQ ID NO: 181400 - protein, 308 aa, Glycine max
  Clone ID: PAT_MRT3847_134819C.1.pep
MAYTLSNTLPLSLAFFPDRTLLHPPSTHLFLSRPLRFKSLCVVNLKRPVPPLKASMAETNNNVAVEVFEKEDLAVSLAKYVADLSNKFTSERGAFTVCLSGGSLINYLRKLLEPPYVDTLEWSKWHVFWVDERVVPKTHEDSNYKLALDGLLSKVPIPPGNVYAINDALSAEGAADDYETCLRHLVKNNVIASSPANEFPKFDLMLLGMGPDGHIASLFPGHPLVEEKQRWVTFIKDSPKPPPERITFTLPVINTSAYAALVVTGKGKADAVHSVLGQSQNSVKLPVGLVSPEGELKWFLDKGAASKL

SEQ ID NO: 181401 - protein, 242 aa, Glycine max
  Clone ID: PAT_MRT3847_13481C.1.pep
MDPLPDAILQYILSRINNARDVAACNCVSKRWKDSMAYIRTLYFPRNSFDNPSLRESPDDIVKRMVSMVVRLEELVVYGPFSPSGLASWLSLVGMSLSQLELRMDNLADNQASHESPSKLDCIGAARNLESLKLWGVLMMHSPKWDVFQNLRTLEIVGARLEEPVLTVVFQSCPYLRRLKLLGCEGVGSISIDLPYLEQCKLDFYGLGNCSLTLSSPKIESLDVLGCSWIRVPETHHLRNLS

SEQ ID NO: 181402 - protein, 110 aa, Glycine max
  Clone ID: PAT_MRT3847_134820C.1.pep
QEAYLANLGNVLRELYLHRPYEARQLRKKALSRTEWLLKADVPTLAQIEEFHSMHTMMNAPDSNDNIDLLTSIHLLGLQRAGKAFSNKIVFDDKLELANTQKIFDGKFST

SEQ ID NO: 181403 - protein, 255 aa, Glycine max
  Clone ID: PAT_MRT3847_134821C.1.pep
MAETNNNVAVEVLEKEDLAVSLAKYVADLSNKFTSERGAFTVCLSGGSLINYLRKLLEPPYVDTLEWSKWHVFWVDERVVPKTHEDSNYKLALDGLLSKVPIPPGNVYAINDALSAEGAANDYETCLRHLVKNSIIASSPANGFSKFDLMLLGMGPDGHIASLFPGHPLVEEKQRWVTFIKDSPKPPPKKITFTLPVINTSAYAALVVTGKGKADAVPSVLGKSQNFAKLPVGLVSPEGELKWFLDKGAASKLAA

SEQ ID NO: 181404 - protein, 77 aa, Glycine max
  Clone ID: PAT_MRT3847_134822C.1.pep
NSNSKAESNNKQVMGLGRLMVTLKSKIRSLKIMKKPDYDKVEKSESMRMEIRSRKARKLIEETLKVADSPKSKAFAF

SEQ ID NO: 181405 - protein, 151 aa, Glycine max
  Clone ID: PAT_MRT3847_134823C.1.pep
PEFSRLVGFILLDHFSLPSFTQALDTLVTANLLAAGTFATQTYSPTGAEVLSDLGIVIRPDGDYRAVEQARFDLLVVCGGLRTPLELDPRLKALLLRAAKQQVTLCGLWNGAWQLGQAGVLDGYRCAIHPEHRGAFSERVRGCKTSAVSHV

SEQ ID NO: 181406 - protein, 78 aa, Glycine max
  Clone ID: PAT_MRT3847_134824C.1.pep
WSNNMSAYLRDGYPTSSPSVQEPQGMWSFYLIHRVSMASSPYDDPPNGPLCLTISKHGFLFCSNKYRCRLLVKKKKKR

SEQ ID NO: 181407 - protein, 68 aa, Glycine max
  Clone ID: PAT_MRT3847_134825C.1.pep
HPFSNRPPLPPNLLPYEIFHLKTKNSPHLQEMSLLNIREPIQSLLHSAPIKQSLLTVHHSTPPCRRYF

SEQ ID NO: 181408 - protein, 65 aa, Glycine max
  Clone ID: PAT_MRT3847_134826C.1.pep
PKPGTENYSESLCPAQRVIFFPLRNRTQKSRKKLRDSWNQVTIAFVSGFKVRQPMLAVSVGRETG

SEQ ID NO: 181409 - protein, 41 aa, Glycine max
  Clone ID: PAT_MRT3847_134827C.1.pep
PLFYYPAAVKMFKIFKLIITSSGLKKETPLGQLRTTHALLT

SEQ ID NO: 181410 - protein, 100 aa, Glycine max
  Clone ID: PAT_MRT3847_134828C.1.pep
ISSFSPLFLSSKNSDHYHQQLPRVLFFTFSSQNPLSSPDLASSAEERQERHHSKHLITARETTKHDDWGWLTLGSLKSWSECCMAKEEGKLMERGAAKIS

SEQ ID NO: 181411 - protein, 100 aa, Glycine max
  Clone ID: PAT_MRT3847_134829C.1.pep
VLTTFGSSLLWMKLQAANPSLHIPSLSISAASHAPFFISYSFTSSPFIAYILLCVSEPTTHLLISDHHQQPNQSGLARHEPPYMREPTAVTSSLTNPCEL

SEQ ID NO: 181412 - protein, 203 aa, Glycine max
  Clone ID: PAT_MRT3847_13482C.1.pep
MQPFTPKSPPTIPTATSSTVDHNHNRPSPAAMSSTPNFDNDRSTVTPQNPFPSLGPEPEPADLATAFASQRFFFTSPGRSNSIIESANTTDADCFTTSSSSLSPALLDRSVAVRKYSPDPYADFRQSMEEMVAARPELMDVAAKWRELHELLLCYLALNPKSTHKFILRAFSDFLLSLISRSYLPPQDPGSGDIAGDGGGCLS

SEQ ID NO: 181413 - protein, 47 aa, Glycine max
  unsure (1)..(47): unsure at all Xaa locations
  Clone ID: PAT_MRT3847_134830C.1.pep
LXNLSIXRXQXXQACKSGXRGSGXPRVDMANDPXTDVNXXLTXLXXX

SEQ ID NO: 181414 - protein, 57 aa, Glycine max
  unsure (1)..(57): unsure at all Xaa locations
  Clone ID: PAT_MRT3847_134831C.1.pep
HIFKNTLLWFILFYFLHWPRVKYKEEVSWXVVHVLHQLWCLKHPLYAYLRIFKNRFR

SEQ ID NO: 181415 - protein, 49 aa, Glycine max
  Clone ID: PAT_MRT3847_134832C.1.pep
MLERIFLIQKPFHFISQITKWSIYTNGGHPNYKIFILIILTNIISLIFM

SEQ ID NO: 181416 - protein, 36 aa, Glycine max
  Clone ID: PAT_MRT3847_134833C.1.pep
HEFFDLSTTADPSYIISLIRKHLPLDSASRRSLREV

SEQ ID NO: 181417 - protein, 54 aa, Glycine max
  Clone ID: PAT_MRT3847_134834C.1.pep
YKNINNFSSSLIHPISFSYYFPQTISHLGYHNPYKLIFQTLTIILEILKRTPER

SEQ ID NO: 181418 - protein, 62 aa, Glycine max
  Clone ID: PAT_MRT3847_134835C.1.pep
NSSIELKREKLLQNPILNSTIVKLNDKHKFQITSFDSQISFPLISPMYIPIQTTKTAEMTLV

SEQ ID NO: 181419 - protein, 60 aa, Glycine max
  Clone ID: PAT_MRT3847_134836C.1.pep
GQLKESIYDASIHNTSFSFSVLQFQHTNLYPSMNEYESRKWCKTTYKQQTEIIAYLKRWA

SEQ ID NO: 181420 - protein, 57 aa, Glycine max
  Clone ID: PAT_MRT3847_134837C.1.pep
LNKPHLTFIFIQQTIGSYTPWSYHTFSTLLKVCTLIIISHQKIFSYNHYAMTHSCFD

SEQ ID NO: 181421 - protein, 62 aa, Glycine max
  Clone ID: PAT_MRT3847_134838C.1.pep
TSSSLHIPIISHDNAHAYSSTRLTDVEVIPIIEKSLLKHDIVFIALSLFDTIVSNQQAHSSH

SEQ ID NO: 181422 - protein, 40 aa, Glycine max
  Clone ID: PAT_MRT3847_134839C.1.pep
GGPRETGETFLYCTLIANSRSEGQIILTTVLFGIVVTLFA

SEQ ID NO: 181423 - protein, 80 aa, Glycine max
  Clone ID: PAT_MRT3847_13483C.1.pep
TKESPFSATTIVLVFFPPHRKRFEYFIWVKGFKPFYPFFFFFFFFKGLLGGVVLWANLKGFMVELASRVQALQRTKGRVF

SEQ ID NO: 181424 - protein, 125 aa, Glycine max
  Clone ID: PAT_MRT3847_134840C.1.pep
KLPGSVYTSLAFLFGEKNPFGASRIHMVHVDDVARAHIFLLEHPNPRGRYNCSPFIATVEEIAELLSAKYPKFQIPTPDEVKKINGPKLPHLNSKKLIDAGFEFKYSLEEMYEDAIECCKEKGHL

SEQ ID NO: 181425 - protein, 82 aa, Glycine max
  unsure (1)..(82): unsure at all Xaa locations
  Clone ID: PAT_MRT3847_134841C.1.pep
MWRTTSNGGFDQGSYLLVVKVKEPCADVRWTXETRRLHXLEYGLQTDRGFIGEDYGMKINRAHNVTHAPERDEREGNGLLLI

SEQ ID NO: 181426 - protein, 73 aa, Glycine max
  Clone ID: PAT_MRT3847_134842C.1.pep
IHSCLLYEEVNLTVFFYKMNQYFDCNLTLFRVCLLTSVLTYIVVDMVNVKFCLYLSISLFYILDGPSVVFSPV

SEQ ID NO: 181427 - protein, 134 aa, Glycine max
  Clone ID: PAT_MRT3847_134843C.1.pep
FQGGGTRFQKTFWGDLWRILDSPQFLFPPLPFLICKNFKPRGPLPGDRVKTRLQNVEKTPSIGGGTPKQKNLPPVVFEGILTLPPLLKTPPPLCLRATPQASQAANPHPIVPPLGAAQAVNWVHPRLKMVEQTP

SEQ ID NO: 181428 - protein, 304 aa, Glycine max
  Clone ID: PAT_MRT3847_134844C.1.pep
LNGTIPKQLGTLNLVNISFLGNRLTGPIPKELGNITTLKALVLEFNQLSGSLPLELGNLTQIEKLHLTSNNFTGELPATLARLTTLKELRIGDNQFSGAIPNFIQSWINLEILVMQGSGLSGPIPSGISILRNLTDLRVTDLNGSDSWFPQLNNMTNLVTLILRSCDTIGSLPDNLGKMTNLEVLDGSYNKSTPENPSIFADLRLLDVSFYRLTGPIPSIFGDLRHLDMFFLEGNHLAGSLPRLIDKPHYVDLSYNNLSIGNNIEELQCRQETVSLFASFSNGNSLGNVSCLSNIPCKSCQRWR

SEQ ID NO: 181429 - protein, 65 aa, Glycine max
  Clone ID: PAT_MRT3847_134845C.1.pep
FQPIHLRPNLSHKWKNRNERKKKLIKAKKKKREKTSKYQNPPLNSFSLTFVQQPQQLLPFFSFSL

SEQ ID NO: 181430 - protein, 128 aa, Glycine max
  Clone ID: PAT_MRT3847_134846C.1.pep
MGRPSKTQVSNEFSSEEEEEEASAAAANHEIEDDDEELEAVARYVSSDDDDNSPDEAAEDDDEDKQDESNVDPEVSKREKARLREMQQLKKQKVQEILDAQNATIDAEMNNRGKGRLNYLLQHTELSA

SEQ ID NO: 181431 - protein, 100 aa, Glycine max
  unsure (1)..(100): unsure at all Xaa locations
  Clone ID: PAT_MRT3847_134847C.1.pep
VRRVLAGLTMSLSVLCNLGFTRESHALDXDIWHAVRANTTIRSPLCDLIKPVLARQVMDDPPMHFVQTHYPLTFFYXKELHPLNTVKEHYSXHLFPQPWG

SEQ ID NO: 181432 - protein, 67 aa, Glycine max
  unsure (1)..(67): unsure at all Xaa locations
  Clone ID: PAT_MRT3847_134848C.1.pep
PSNKTLDMLEKQLKAWMNGGRYNYCNGXHSDHQKTLDNLRTAMNNTGDLWAGNVDNQRFRDLKLSFE

SEQ ID NO: 181433 - protein, 126 aa, Glycine max
  Clone ID: PAT_MRT3847_134849C.1.pep
MEARVGMVVEGGQRTLNADSGGAAKFLVAQNNRQLGTVHQLLAGGISGAFSKTCTAPLARLTILFQVQGMHSDVAALSNPSILREASRIINEEGFRAFWKGNMVTIAHRLPYTAVNFYAYERYKNV

SEQ ID NO: 181434 - protein, 133 aa, Glycine max
  unsure (1)..(133): unsure at all Xaa locations
  Clone ID: PAT_MRT3847_13484C.1.pep
MSDEEHHLEYKDDAGAYKAYNQHAGTIRENGYIENKGRPCKXVVEWPYLPKLEKALGTSKKKLLGELRINCQXLCDICAKTENXDVANVKKTDNQPIDNPGDGKKSLLTEPVYTDDDIRPCTGDTPITPIIDG

SEQ ID NO: 181435 - protein, 100 aa, Glycine max
  unsure (1)..(100): unsure at all Xaa locations
  Clone ID: PAT_MRT3847_134850C.1.pep
EDLXHYADERGGAXXXGKKSEXDGMEKKTXXCLEXIKKNQRQDYLNGAVSGSVQATDRXMXELRDIYRSQSFKGGXXAVEXVNDSLYXXDVXLLXVXQDX

SEQ ID NO: 181436 - protein, 123 aa, Glycine max
  unsure (1)..(123): unsure at all Xaa locations
  Clone ID: PAT_MRT3847_134851C.1.pep
MVEEWFDCVEEVDTFEEVSTSAALNGVEGLDYMDRIPPATSEGYPHVLSRKNGEKGKRRFASGDGDETTLISGTSVKEADNKLILELAKRAPTXPGLESPTDENLSHRKNLDXPTTGCSTTLP

SEQ ID NO: 181437 - protein, 55 aa, Glycine max
  Clone ID: PAT_MRT3847_134852C.1.pep
AQVSLSIEITRTSVLKLKVLVFCVAALLAAWHCHAYHESALRMNTWLSRPSPGGV

SEQ ID NO: 181438 - protein, 111 aa, Glycine max
  unsure (1)..(111): unsure at all Xaa locations
  Clone ID: PAT_MRT3847_134853C.1.pep
DAASITEKTHDSINNWLSLLMKSGIFTLGYNTVLXSLTTSTWKLIIIANNCPPLTNSEIEYYAMISKDGVHHYYGNYVDLGTECGXYYRLCCLTIIDPGDSDIIHTLPGEH

SEQ ID NO: 181439 - protein, 90 aa, Glycine max
  Clone ID: PAT_MRT3847_134854C.1.pep
MNETDKMPKNHIRLVGAFSHQANNPVWYLRPGESKVFFNTLLLLKLTICVWLSREKRCYCTTVFIKILGSLDSDPKQLRPKYLSRCQSPG

SEQ ID NO: 181440 - protein, 149 aa, Glycine max
  unsure (1)..(149): unsure at all Xaa locations
  Clone ID: PAT_MRT3847_134855C.1.pep
TTPTTTTPHKNMHLCTEGLGFESSDDVEDXKNNEVNGSNECWENDVRENECYENTKSLGLEDWCEWRTRSSIRVNNERKNDGVEYPPPISSIGRSGKPCVSFMSYRDNGRFVLKEVRTPIQEFLHAHREDGRLKLHFVQPEDEGKRRRW

SEQ ID NO: 181441 - protein, 660 aa, Glycine max
  Clone ID: PAT_MRT3847_134856C.1.pep
MKAFSVKVEEGREGKNGNLSVGPVYRNLLSENEFPPMDPDFSTTWDIFCVSVKNHPNNRMLGKRKIVDEKIGPYVWKTYKEVYDEVLHMSSALRASGSEPGTKIGIYGSNCPEWIVAMEVCSAQSFICVPLYDTLGPGAVNFIIDHAEVDFVFVQDKKVKELLNPECKSSKRLKAMVCFTTLTEEEKAKATAIGIKPYSWHEFLHLGKENPKSTFPPQAHDICTIMYTSGTSGDPTRVVLTYENVTALVRGMDLFMEQFEDKMTVDDVYLSFLPLAHILDRTIEEYFFRKGASVGYYHGDLNALRDDLMELKPTLFAGVPRVFEKVYEGIKKAVEELNPVRRTVFGMLYNYKLGWMKKGYKHRQASRLADLLAFRKVKARLGGRVRLIISGGAALSPEVEEFLRVTTCAFVCQGYGLTETCGPTTLGFPDEMCMLGTVGAVSIYNEIMLEEVPEMGYNPLETPPCGEICVRGKTVFTGYYKNPELTKEAIKDGWFHTGDIGEMLPNGVIKIIDRKKNLVKLSQGEYIALEHLENVYGITPIVEDIWVYGNSFKSMLVAVVVPNEEVANKWAYSNGHITAFPRLQKGDQLKKYVLSELKLTAERNKLRGFEHIKGVILEPQEFDMERDLVTATLKKKRNKLLKYYQVEIDELYQSLKGKKA

SEQ ID NO: 181442 - protein, 63 aa, Glycine max
  Clone ID: PAT_MRT3847_134857C.1.pep
VFFFFYPLSHLMAPGIGGLQLTSLAGDRRTAAADSDELEDMRLLDSYDEIDGGRGGFRWRSPE

SEQ ID NO: 181443 - protein, 173 aa, Glycine max
  unsure (1)..(173): unsure at all Xaa locations
  Clone ID: PAT_MRT3847_134858C.1.pep
SGGVTRAMLVAASLGGSSGQVKXIILPTGERRNGFGTLVLASLRVLPVPPVESTPPEVIKTRVXNMSVEPQEAPPYPGAVDCALKTVFPEVPLALPKGKSPTISSQGLFPPGLFVVVNKVRKLLGGSPPLGGGMLQSSPIRCVLCLSCAVIKEMLFWNGPSVKKKNKKKHTLI

SEQ ID NO: 181444 - protein, 208 aa, Glycine max
  unsure (1)..(208): unsure at all Xaa locations
  Clone ID: PAT_MRT3847_134859C.1.pep
HSGKLLNHTTDPSTSPEAAMRKARVSVRARSEAPMISDGCQWRKYGQKMAKGNPCPRAYYRCTMAVGCPVRKQVQRCAEDRTILTTTYEGTHNHPLPPAAMAMASTTAAAASMLLSGSMTSADGIMNPNLLTRAILPCSSMATLSASAPFPTVTLDLTHNQNAFQNYQRPQTPLFPSQPQDFIAGSTPPQLPQLIAQALYXQSKFSGL

SEQ ID NO: 181445 - protein, 42 aa, Glycine max
  Clone ID: PAT_MRT3847_13485C.1.pep
LGIRLEGHSPHNQLPADSDCCITCAYDSCAVALSHSHHLNNT

SEQ ID NO: 181446 - protein, 106 aa, Glycine max
  unsure (1)..(106): unsure at all Xaa locations
  Clone ID: PAT_MRT3847_134860C.1.pep
NTKRPSKPPESXTRLAESLMQPPRDQQKSKPLLKTTTPTEIECKTRNRKFPSLQALGGHTASHNKPKPQGEEPKKEATKGPTSGNKPKMHVRSTRGTEPPPAQALG

SEQ ID NO: 181447 - protein, 495 aa, Glycine max
  Clone ID: PAT_MRT3847_134861C.1.pep
MIPPSKFPTRPPKHPFSSMIMDRSSQSSSDSPTREPKVLSIECLKGSSKGDEWTGDMLQTGDIVEELRLGSTANSQIRYQWPFKGGKSGVQKILQDAFKKKETSIVVRVRRGSEELAELQACIVPNEFTAKKNLVLRSISDPNYVVGFVDRTEAECFEIQASRNTRMVNALTRTKLQDGYVSYSWERRMQEMLSVPNSSNFLSILFLPKASDRVASRYNDLEDTLARANAWLNAGQASGVPIVFMNIQTESLLTKISGEASSTVNAGSLSDLSNLANASLYGFEDYHGIDIGVVRAVRLWYAPVAGEFSIEIKLKEEDAKLGFAISRTEEGFIFISSVINQENVPATRSGLSNLYKLATDTCRMLVVSRVSNQKVLPWMVSSTGAIRCYDTVSLSQKLSLHRHTRVPILLHVFLWDRALVSSSGGSSRFRALSSSVLPSHASEIEVARLPDETHVLPLPPPPSEPSEISHSRLERDTAGEFSFRFHDFALSSNWV

SEQ ID NO: 181448 - protein, 49 aa, Glycine max
  Clone ID: PAT_MRT3847_134862C.1.pep
DSSLEGQYANDDATKLVELASKCLQFEARERPEITFLLTAVAPLQRQKR

SEQ ID NO: 181449 - protein, 61 aa, Glycine max
  Clone ID: PAT_MRT3847_134863C.1.pep
NFFSLFECNPLFFSISMSLYICFFFGPAMTSAIFRYAIRHIFMGDFLLSAMNRHPPLTTLI

SEQ ID NO: 181450 - protein, 71 aa, Glycine max
  Clone ID: PAT_MRT3847_134864C.1.pep
FLCEGCLSERQGRIRHFNMPRLRWRLCRPFCPESLMPTVWSLLFSSREPFISVISAPYMLATWYDVPWQCL

SEQ ID NO: 181451 - protein, 94 aa, Glycine max
  Clone ID: PAT_MRT3847_134865C.1.pep
YRCQKTTTWDSHSSFLFTLPPSSTGLPFCFFPLLGVGSGVTLQRTEATQCLTRKHGFHCRCLFDTQCAHVCWTDGFISAQCRGPLRICFCIMPC

SEQ ID NO: 181452 - protein, 49 aa, Glycine max
  Clone ID: PAT_MRT3847_134866C.1.pep
GSRYNPFWRRRFCLNCSQSDSNGGAVCIGHSVAFWIRRSLSVASPTHTL

SEQ ID NO: 181453 - protein, 34 aa, Glycine max
  Clone ID: PAT_MRT3847_134867C.1.pep
ILAGIWHRQAKYAFLTACPFVGKKNLKDKTTAPA

SEQ ID NO: 181454 - protein, 96 aa, Glycine max
  Clone ID: PAT_MRT3847_134868C.1.pep
QNILTTNKMIVNSKSTQSPMIVKIDPYIVFMTTHATPIPFDDHDVITKIATQPTQIRKACTIFKRCCDHRDSGLGFLRNASTNVQIVHLSLDDHLA

SEQ ID NO: 181455 - protein, 89 aa, Glycine max
  Clone ID: PAT_MRT3847_134869C.1.pep
ASYLSCLGVSSWILYFFFFLFLRFQPSQTPLSWFYVLPMEDSRQWATTTERERIVCNLRKLNRWIKCVAEICSLKLTAFLKPELLLIVS

SEQ ID NO: 181456 - protein, 86 aa, Glycine max
  Clone ID: PAT_MRT3847_13486C.1.pep
ILSRHAFYKISLGKRETPNWAPDKKALKAFKRFGTKLAGIEGKINARTSDPSFKNRIGPVQLPNTLFHRSSKEGLTFKGIPTSIFI

SEQ ID NO: 181457 - protein, 386 aa, Glycine max
  unsure (1)..(386): unsure at all Xaa locations
  Clone ID: PAT_MRT3847_134870C.1.pep
ESSEEENDGVSGNHATKELIHLASNGAKFIDEVLNGQNECCLENFRMDKHVFYKLCDILQAKGLLRHTNRIKIEEQLGIFMFIIGHNLRTRAVQELFRYSGETISRHFNNVLNAIMSISLDLFQPPGSGVPSEIFEDPRFYPYFKDCVGXIDGIHVPHASGVDEQGPFRNKNGLLSQNILAACSFDLXFQYVLAGWEGSATDLQVFNSAITRQNKLQVPEGKYYIVDSKYQNVPGFVAPYSSTPYYSKEFLSDYHPQDASELFNQRHSLLRHVIDRTFGILKARFPILMSAPSYPLQTQVKLVVAACALHNYIRREKPDDWLFKMYEEGSFPMEESQPPLEMEVPPKMDVETQTQPSVHTFDSEEIALASQLRDSIATEMWNDFIQ

SEQ ID NO: 181458 - protein, 191 aa, Glycine max
  unsure (1)..(191): unsure at all Xaa locations
  Clone ID: PAT_MRT3847_134871C.1.pep
MESSEEETDGVSGNHAPKELIRLASNGAKFIDEVLNGQNECCLDNFRMDKHVFYKLCDILQAKGLLRHXRIKIEEQLGIFMFIIGHNLRTRAVQELFRYSGETISRHFNNVLNAIMSISLDLFQPPGSGVPSEIIEDPRFYPYFKDCVGVIDGIHVPVTVGVDEQGPFRNXDGLLSQNILAACSFDLKFHY

SEQ ID NO: 181459 - protein, 118 aa, Glycine max
  unsure (1)..(118): unsure at all Xaa locations
  Clone ID: PAT_MRT3847_134872C.1.pep
MDSHFFDFYLPPKYPDVPPAPYYHSAGWRININIDEXGKVFLNLLNTLTGTGNDILHPKSFTILQDLGSLQGLILNSKTYFNEAXIDQQVITTQREKNSMPYNENTFLLNCKTMMYLM

SEQ ID NO: 181460 - protein, 64 aa, Glycine max
  unsure (1)..(64): unsure at all Xaa locations
  Clone ID: PAT_MRT3847_134873C.1.pep
RTRTARNARXDLXHLIKXXVSIXXXLXXNRNXKDSXFXLSLXESRXXRLARYYXKXXKLXXXWK

SEQ ID NO: 181461 - protein, 147 aa, Glycine max
  Clone ID: PAT_MRT3847_134874C.1.pep
MSGVGYIGSKISLISKSDIRYVGILHSINSADSTVALEQVRSYGTEGRRGSPAEEIPPSDNIFEYIVFRGSDVKDLHVCEAPAQQQSLPPQVPNDPAILGTTAPRPPSFQSYAPPPPMGVQPPNFAVNPFYIQQVAAAASFQQQPQY

SEQ ID NO: 181462 - protein, 44 aa, Glycine max
  Clone ID: PAT_MRT3847_134875C.1.pep
AYKGDSIVVCSTSRLAKLSPMLSPCRVFTNHHRRCSSNSIAALW

SEQ ID NO: 181463 - protein, 166 aa, Glycine max
  unsure (1)..(166): unsure at all Xaa locations
  Clone ID: PAT_MRT3847_134876C.1.pep
LNPEDNGSAASSTNRFMLYARALSITWGDTPEYWTWVQQKEEASGTIVELAKLKSVCWLEVHGKFDTRKLSAGIPYQVFFLIMLEESAQGWEVPINFRFVLPGGKRHHPXENFNNSSRIGSRHIPVGEFVASEKDVGNIEISMYEYEGGMWKTGLIIQGIVIKPKN

SEQ ID NO: 181464 - protein, 88 aa, Glycine max
  Clone ID: PAT_MRT3847_134877C.1.pep
PLVFSSSWGLKCLQRGSGVGISTLTWRNSGVGFLSETYVNSASVKEFFSRCLGFVLGHCMHGSVTLQVWVNSFKSVYAFCNVACGMLR

SEQ ID NO: 181465 - protein, 160 aa, Glycine max
  Clone ID: PAT_MRT3847_134878C.1.pep
SEGSSFLLSKILAVTVRFIIKDAEEKKASFNPRPLFRLFINWLLDLGSLEPVTDGANLQILTAFANAFHALQPLKVPAFSFAWLELISHRSFMPKMLTGNGQKGWPYIQRLLVDLFQFMEPFLRHAELGEPVRVLYKGTLRVLLVLLHDFPEFLCDYHFT

SEQ ID NO: 181466 - protein, 97 aa, Glycine max
  Clone ID: PAT_MRT3847_134879C.1.pep
NLLLFATKKTCCFAQAGRLSRIRMRRKLLFFTRLEGLEYHILILIYYFLMSVCICASLIHCHLKQMEAPNRKETQSKFYISSTFFLLFYDHPVGNFS

SEQ ID NO: 181467 - protein, 55 aa, Glycine max
  Clone ID: PAT_MRT3847_13487C.1.pep
NTAREKRSYQRVGIPSQSVVRHISQVHYKKRRPHPYLPFVCQSRRRRNCYISASN

SEQ ID NO: 181468 - protein, 83 aa, Glycine max
  unsure (1)..(83): unsure at all Xaa locations
  Clone ID: PAT_MRT3847_134880C.1.pep
ICGXGXVDCGXILXXVCXXXXTXXLXXVSSVIPILYYCSVNLDIVDNFQFYLDMYMXXSSEFWFLFHPCICALDLGFPQSVSF

SEQ ID NO: 181469 - protein, 48 aa, Glycine max
  unsure (1)..(48): unsure at all Xaa locations
  Clone ID: PAT_MRT3847_134881C.1.pep
SGSHISFFFFLLNISFLAXNKCFMNFYVKLIPLFSLIGHQPKNDFKFP

SEQ ID NO: 181470 - protein, 65 aa, Glycine max
  unsure (1)..(65): unsure at all Xaa locations
  Clone ID: PAT_MRT3847_134882C.1.pep
WSCFIYYYYYHMPNRLFWGGVXAXHXLHATTCMXXAKYSXMRRMLXPKXXXGPKDHRXSRXXVXX

SEQ ID NO: 181471 - protein, 60 aa, Glycine max
  Clone ID: PAT_MRT3847_134883C.1.pep
DTEVPLPSHKPGRARIQQSNYPVNLKGSWLLKRQIPISSLWLQKDNPLLYFCGHIKDTGT

SEQ ID NO: 181472 - protein, 64 aa, Glycine max
  Clone ID: PAT_MRT3847_134884C.1.pep
CRYIILINSPSVDPRLIFHQSSSSASPGIAAAGALICNFIRLKMIPLIQICMASDTKLFIPCMR

SEQ ID NO: 181473 - protein, 389 aa, Glycine max
  Clone ID: PAT_MRT3847_134885C.1.pep
MNTITTTTMTMSVLNIYGYGYGYGYGVAAVVVFLILLLWQRNRFFFASSRSSPSTSLLLSDSINSNSSSRSRTSNFVTDADLKFLMEILDEKLGSDKWEDVLDKRNHHLSYSVKCCRPKNGPLKYLSKTVFNDISSEMLRNFYMDNDYRKQWDKTLVEHNQLQVDKSDGTEVGHTIKKFPLLKPREYVLAWKLWEGSDETFYCFMKECEHPLAPRQRKYVRVEFFRSGWRIREVPGSNACEITMFHQEDAGLNTEMAKLAFRKGIWNYVCKMDNALRRYSVISYHLLSSVSTSVDLMQKVPACLDLISSNISPANATVFHDQVTDESQIRMILRRPSRKLIANGLLLLGGATAICLSRGHSSLGAKVAMAYIITKLSKRGARSNQSKQS

SEQ ID NO: 181474 - protein, 53 aa, Glycine max
  Clone ID: PAT_MRT3847_134886C.1.pep
PFLYFLLKHVPHANELFVRPHVLPLATDDPVDHEVTPHSWSHLTPVRKLSSPR

SEQ ID NO: 181475 - protein, 93 aa, Glycine max
  Clone ID: PAT_MRT3847_134887C.1.pep
AVALLFTSDLMDMEMKSFIVSALILVLFLHLRLLPGTAARPLEIRKLESTSQRMWAMLHSGPSSGGKGHKSETGEAPIPGQLKQSVPSPGVGH

SEQ ID NO: 181476 - protein, 52 aa, Glycine max
  Clone ID: PAT_MRT3847_134888C.1.pep
DASTLTKAEQREREILAKMPAGQGSRSRTKDSLSRRFRKNGTERLITGLRSY

SEQ ID NO: 181477 - protein, 213 aa, Glycine max
  Clone ID: PAT_MRT3847_134889C.1.pep
VWGAPSLMDAGKGLLANALMDLSNQRFVLLSESWIPLFGFRTIYDYLMNSTISFLDFNDDPGYNARGRYCKKMGPIIDITDWRKGSQWFVVHRELAIHIVSDTRYYPIAQHYCTSPCFAEEHYIPTFVHMMYPQLSSNSSITWVDWSRRGPHPRTFGSNDITEAFLNHMRFGSTCVYEGNITNMCFLFARKFHPSALKPLLLLLSPLMLGADT

SEQ ID NO: 181478 - protein, 65 aa, Glycine max
  Clone ID: PAT_MRT3847_13488C.1.pep
EPLRSRIWCQKCLSQKIVRIFCRRVSSQYGVNRTVIMTPITCFKKLLEFNLRFPHPLGILVTLHV

SEQ ID NO: 181479 - protein, 77 aa, Glycine max
  Clone ID: PAT_MRT3847_134890C.1.pep
SIFQQLPSKSKQYPIHQKTHLNYIYIYIYYRIISPNLKKESHKIHLAYFQILTNITKPGRKGKKKHKILLRTLNEIE

SEQ ID NO: 181480 - protein, 85 aa, Glycine max
  Clone ID: PAT_MRT3847_134891C.1.pep
PTCQQNKGNLSSLHCTFIQVQFRGRHLLNWPFFLGFGVVQKKNFGLKTSPRGMAGAFHVPLRKQKTLLMLREKGSRKHALFFYLK

SEQ ID NO: 181481 - protein, 120 aa, Glycine max
  unsure (1)..(120): unsure at all Xaa locations
  Clone ID: PAT_MRT3847_134892C.1.pep
VVARSSAEAEFRVMAXGVCELLXMKFILDDLKIKYEAPMPVCDNKSAISIAHNPIQYDRTKHIEIDRHFIKEKXYSGLIATEYIPSKLXEIDRHFTKGLPTEQLQDLTCKLGMIDIHLLA

SEQ ID NO: 181482 - protein, 165 aa, Glycine max
  Clone ID: PAT_MRT3847_134893C.1.pep
MEKSGSNSPKSALKFVKTTSQSAAQWSSTNSRGMASRRSPPKESYMASRRSPPKESNMAPPRSPPKENTKPQEFKLHTQERAVKRAMFNYAVTTKFYIMELQKKQEEKLQKLIEEEEVRLLKKEMVPRAQLMPYFDKPFLPQRSSRGVPRESCLHMMSSMCWSCS

SEQ ID NO: 181483 - protein, 199 aa, Glycine max
  Clone ID: PAT_MRT3847_134894C.1.pep
MEKSGSNSPKSALKFVKTTSQSAAQWSSTNSRGMTKDVLKDKFYDKTKASRRSPPKESYMASRRSPPKESNMAPPRSPPKENTKPQEFKLHTQERAVKRAMFNYAVTTKFYIMELQKKQEEKLQKLIEEEEVRLLRKEMVPRAQLMPYFDKPFLPQRSSRGVPRESCLHMMSSKCWSCSIANEMYNLHHYGHQALKPIK

SEQ ID NO: 181484 - protein, 138 aa, Glycine max
  unsure (1)..(138): unsure at all Xaa locations
  Clone ID: PAT_MRT3847_134895C.1.pep
SLTRGPDSNDNIDLLLSIDLLGLQGAGQAFSNKIVFDDKLVLANTHEFFDGNFXVDSWIPIFVNCXYPVRQLPSEAVVVXNVTCGSGRGGLPTTAWIRSAVTNRSSDINKRIRTALAKGXKIVSLTRVEPFPVGFTGC

SEQ ID NO: 181485 - protein, 148 aa, Glycine max
  unsure (1)..(148): unsure at all Xaa locations
  Clone ID: PAT_MRT3847_134896C.1.pep
RRFVSGDGEEMTLISGTIVEEAYNKLIVELEKSVPTLIGIEXSTVDKLPRRKIFDKPKTRCFTILPMEFNLVVRQMFLNFARLIMKKRDMLSCQVGINPYSMEWTGLANILLCKGNDFSSCYYASFDGLITKQVMSRRYKMIIVLWWR

SEQ ID NO: 181486 - protein, 76 aa, Glycine max
  Clone ID: PAT_MRT3847_134897C.1.pep
HQTRKLWLWCQKKGDIGLITCREDFYIIIGHAPERNCIYKRILEIPTKMPNQKLPCHQGSNRTGNSKGSRKHGTSK

SEQ ID NO: 181487 - protein, 156 aa, Glycine max
  unsure (1)..(156): unsure at all Xaa locations
  Clone ID: PAT_MRT3847_134898C.1.pep
PGTSVEEAYIKLMVELEKRGPTLDGIEWPKDEKLPRRKIFGKPKTRCLTILPMEFNLVGRQKFLNFGRFIMKKRDTLTCXVGINPYSMEWTGLANRLLRKGNDILCCDYASIDGLITKRVMSXMAEMINSLCGGDEKSMRERTHLLLACCSRMAIC

SEQ ID NO: 181488 - protein, 139 aa, Glycine max
  unsure (1)..(139): unsure at all Xaa locations
  Clone ID: PAT_MRT3847_134899C.1.pep
SVISNKIVFNDKLVLANTQEFFDGNFPVDSWLPIFVNCLYPVSQLPSEAVVVNVTCGSGRGGLPTTAWISSAVNNRSSDINKKIRTALVIRXNIVFLTRADPFTVALLAALFGDKNENLSFNATNPMFARLSENCKSFK

SEQ ID NO: 181489 - protein, 47 aa, Glycine max
  Clone ID: PAT_MRT3847_13489C.1.pep
HLKWVNPNKEGVGIQFGHYDKEACFSCVNRDHSARLESFRPPPLHKI

SEQ ID NO: 181490 - protein, 95 aa, Glycine max
  unsure (1)..(95): unsure at all Xaa locations
  Clone ID: PAT_MRT3847_1348C.1.pep
MFIHNFKVKCPKVKYTDTXIQSVYNYXTTETCSRVTRMAPYQWISQIKSVRYEFKTNIHVPKLRVMHVGWGGNNGSVLTSSVSANREGISWATKD

SEQ ID NO: 181491 - protein, 80 aa, Glycine max
  Clone ID: PAT_MRT3847_134900C.1.pep
PLILSLNAVADLAHHECNTTQLGLPPTLLRMKRTQNQQFRDLQHIHSQIEWGQSGAATLVRDQASWGACCAFSGTGAIVG

SEQ ID NO: 181492 - protein, 108 aa, Glycine max
  unsure (1)..(108): unsure at all Xaa locations
  Clone ID: PAT_MRT3847_134901C.1.pep
VNSFKAVVVNVTCGSGRGGLPTTAWISSAVNNRSSDINXRIRTALGKGNKIVFLTKDDPFPIALLAVLFGGKNEILSSNATNPMLTRLLENCKSLKYLGGEXPFAFVN

SEQ ID NO: 181493 - protein, 109 aa, Glycine max
  unsure (1)..(109): unsure at all Xaa locations
  Clone ID: PAT_MRT3847_134902C.1.pep
SQLPSEADVVNVTCGSGRGGLPTTAWITSAVNNRSXDINIRIRPALGKGKKIVFLTREDPFPVALLAVLFGAKNEILSSDATNPMLTRLLENLKRLKYLVDECPFAFVN

SEQ ID NO: 181494 - protein, 155 aa, Glycine max
  unsure (1)..(155): unsure at all Xaa locations
  Clone ID: PAT_MRT3847_134903C.1.pep
YFEKSVPTLGGIECPKDEKLPRRKNCDKPKTRCFTILPMELNLGDRQKFLNFERFIMNKRDKLSXQVGINPYSMEWTGLANRLLIKXNDILCCDYASCDGLITKQVMSKMAEMMNSLCGGDGKLTRERTHLLLAGCSRMESGKKDIRRVECGIPF

SEQ ID NO: 181495 - protein, 174 aa, Glycine max
  unsure (1)..(174): unsure at all Xaa locations
  Clone ID: PAT_MRT3847_134904C.1.pep
ALSSADAWGHNSTITDGIDKTRATLQFRKLADCDLLKRNFKQMFNVLWVAPEDKASLWSQLHYVSCNNLEMQEAYLVNLVNVLRELYLHSAKEARQLRRKALSRIEWLXKADVPTIAQIVEFHLMQRMMNAPDSNDNIDLLXSIDLMGPQGAXLSFSNKICFDDRLVSAYTQEF

SEQ ID NO: 181496 - protein, 159 aa, Glycine max
  unsure (1)..(159): unsure at all Xaa locations
  Clone ID: PAT_MRT3847_134905C.1.pep
RFFLQGAGKAFPNKIVFDDKLVXNTQEFFDGNFPVDSWLPIFVNCLYPVSQLPSEAVVVNVTCGSGRGGLPTTVWISFAVTNRFSDMIMWIPTALGIGXKIVFLTRADPFPVAVLAVLFGVKNEILSSNATNTMLTRLLETVXSLKYLVDECPLHLKLV

SEQ ID NO: 181497 - protein, 48 aa, Glycine max
  Clone ID: PAT_MRT3847_134906C.1.pep
PPFNKFFFPLWPKLLETLTRDFYFKGETGATATSKFPPNLIIDGVEFP

SEQ ID NO: 181498 - protein, 57 aa, Glycine max
  Clone ID: PAT_MRT3847_134907C.1.pep
RARLGEVQRIIELQIFYGSAPILYELVNVRFHSSPHLVFSAPNPLYLPSSLLRISIT

SEQ ID NO: 181499 - protein, 107 aa, Glycine max
  Clone ID: PAT_MRT3847_134908C.1.pep
ASARILPSQCSFNYHVSTARECYLRGTNLLADSDVATSLPRIGNSKTEEQDYIGLLGRQQTKKDGGPKNSDTNISLLTGTVRTLTKHSEILLSCYLTIEALTLKRGT

SEQ ID NO: 181500 - protein, 91 aa, Glycine max
  unsure (1)..(91): unsure at all Xaa locations
  Clone ID: PAT_MRT3847_134909C.1.pep
VFFSYLQDLVARQVIVELKHDSAIQAILYSVDQSFNIQLAHXSVVNXAKYLYMFSVSNCFIRGLVVRYVXIAXQGVDIELLYDATRREAWG

SEQ ID NO: 181501 - protein, 77 aa, Glycine max
  Clone ID: PAT_MRT3847_13490C.1.pep
SMGDLLKQKPFLLPQRPFPTLKGKRNQETLIGNKSYLRDGGPKPGLPFFGFLRFRVKVNWQWPSQHQKNQRRQPQGP

SEQ ID NO: 181502 - protein, 58 aa, Glycine max
  Clone ID: PAT_MRT3847_134910C.1.pep
GTLFFFFFFFALTRLDGNRKLSSTIPKVAAQPEIKREIKDPKKSNSCQIFNNHTFTVS

SEQ ID NO: 181503 - protein, 68 aa, Glycine max
  Clone ID: PAT_MRT3847_134911C.1.pep
MKHMLSRLYGHVDHVTHLTHHKIKLDTLLFYRHDELTSLKDHFVSEFFPLKNNYYNISPLSAPAIYAI

SEQ ID NO: 181504 - protein, 92 aa, Glycine max
  unsure (1)..(92): unsure at all Xaa locations
  Clone ID: PAT_MRT3847_134912C.1.pep
VEQTEKAFLKQPKVFLNTKKTGKGKRPVKGGNRFWNPIGLGFKTPREALEXTYVDKRCPLTGNVSIPGRILTGTCHSAKINGTXVVGRNYFL

SEQ ID NO: 181505 - protein, 91 aa, Glycine max
  Clone ID: PAT_MRT3847_134913C.1.pep
AWGWFPKEDSIYQLPKVYPMDSEFAQIFRGAIQVFVQDQSILLCSRMKLVASIVYLWPRSPQPTGAIVIPICLYPRAWRFRCTFLLLTRLI

SEQ ID NO: 181506 - protein, 85 aa, Glycine max
  Clone ID: PAT_MRT3847_134914C.1.pep
HPQQKPMPFDIDSMAMKPSENCCYIICTLAKYLYIQIQGCVSVSLYYLGQYLLSAKYLSSRNVCLYLIIIITEVHLSNIYTRTHI

SEQ ID NO: 181507 - protein, 110 aa, Glycine max
  Clone ID: PAT_MRT3847_134915C.1.pep
CRAAGRCACHLGSQGCRSRSDGRFGGGRDAQEDVGGSRGQKSRGSEEPEAPQRGKGQKAISRAREAQCRGEQAARRKVNSLNPFLVAVVKVPSGPQLHLLSILACENFFH

SEQ ID NO: 181508 - protein, 42 aa, Glycine max
  Clone ID: PAT_MRT3847_134916C.1.pep
DTEYFDYHTRSFHRISGCARRSKLTFACLRLHTSSIVSPTLN

SEQ ID NO: 181509 - protein, 54 aa, Glycine max
  Clone ID: PAT_MRT3847_134917C.1.pep
RHQALVSLDETFQKCLNAKWLWLKTNKGPKYWPNPINFPNGNIPKLEDSKTREL

SEQ ID NO: 181510 - protein, 78 aa, Glycine max
  Clone ID: PAT_MRT3847_134918C.1.pep
DDDAFEYYGNFARKNGFSIRKARSRISPQLGIYKRDFVCYRLSFAPVKKKLNGSHHRDRKSVRCGCDAKMYLSKAVVE

SEQ ID NO: 181511 - protein, 108 aa, Glycine max
  unsure (1)..(108): unsure at all Xaa locations
  Clone ID: PAT_MRT3847_134919C.1.pep
HIQQKTVDMNGIQLHVAEXGDGPMVLFLYGLSDLWYSGRHQILXSLSSLGYRAVSRDLRGYCDTDSPRSIFSYRSFHIVDDHVELNDSLVVDXMFLEDQDCRSIIGWY

SEQ ID NO: 181512 - protein, 57 aa, Glycine max
  Clone ID: PAT_MRT3847_13491C.1.pep
IKKGGRLNRKLTVPTLYKRRDWYILCATYNLNHGAAHLKVRQLEKPRRRPTYFFLGN

SEQ ID NO: 181513 - protein, 124 aa, Glycine max
  Clone ID: PAT_MRT3847_134920C.1.pep
KLSLGFEHAQRERERVVEMEEGVGAIFLDSNSETVGLGGTKAKKVKVLKGDSVPVGTEVRANVGASQNKILADISNFPQQPKQHISVDHLLKEKEILIKHLATRDAVIESCKAELHSVKPTFRN

SEQ ID NO: 181514 - protein, 43 aa, Glycine max
  Clone ID: PAT_MRT3847_134921C.1.pep
NRVVLMFDRKRLHHCSLRLFQIHSFPSAYWLLSSFMPMNILIS

SEQ ID NO: 181515 - protein, 95 aa, Glycine max
  unsure (1)..(95): unsure at all Xaa locations
  Clone ID: PAT_MRT3847_134922C.1.pep
VLNDPQNPSTSYAVSYXTRGVRXLIKQGYNIAGIIGDQWSDLLGGHIGESKTFNLXDPLTTFTSSXASQQSSLLSICLSVIRCVQIGALASLDVR

SEQ ID NO: 181516 - protein, 106 aa, Glycine max
  unsure (1)..(106): unsure at all Xaa locations
  Clone ID: PAT_MRT3847_134923C.1.pep
XNPXXXDXXXLXXXXAXXXXRXXXPTXPXMRXXXXXHXXHHXIXXXTXPPXPXTXXXXCSXREXHIXXPXTGNRTXXIXXLXXIKRLYDLXXLXXHEXEFRAYVRV

SEQ ID NO: 181517 - protein, 81 aa, Glycine max
  unsure (1)..(81): unsure at all Xaa locations
  Clone ID: PAT_MRT3847_134924C.1.pep
XPPHRXXXTXXXXXPXXRXXPXXXXXXXXRXXXXXXXXXXXXXXPXTDHXAXXXPXXRXXXXXGXXXPXXXXRTRXRXRRX

SEQ ID NO: 181518 - protein, 105 aa, Glycine max
  unsure (1)..(105): unsure at all Xaa locations
  Clone ID: PAT_MRT3847_134925C.1.pep
YSEYRFKCLKKEKEKGKQKKNLEKTTVMKDKQILLWLNHSKLLKFWLFIFWKHISYASTVMNRSAQQRVALNGIQKTINTIIMVRNQXISNIKWQEPKSRKAKGN

SEQ ID NO: 181519 - protein, 307 aa, Glycine max
  unsure (1)..(307): unsure at all Xaa locations
  Clone ID: PAT_MRT3847_134926C.1.pep
MGELTQAEVYSPRTQQVWRALLSWLAFFFQIFFQIIRALGHYPLLSFSSNSSSSSNASSSSSSFKPLPSVEIAEHDSPPPSALEISPLDYSPADHPVPKLTVVLDLDETLVCAYETSSLPAALRTQAIEGGLNWFELECVSIDKEGEGKKXINYVTVFERPGLKEFLKQLSEFADMVLFTAGLEGYARPLVDRIDVENRFSLRLYRPSTISTEYREHVKDLTCISKDLCRIVIVDNNPFSFVLQPVNGIPCIPFSAGQPHDTQLLDVILPLLKQLSEQNDVRPFLYEKFHMPDWFQKQGIPASSWTL

SEQ ID NO: 181520 - protein, 64 aa, Glycine max
  unsure (1)..(64): unsure at all Xaa locations
  Clone ID: PAT_MRT3847_134927C.1.pep
SGKTWNHDHRMRLHHKDTGGYLHSHDXKYSRNAGGQXEACRVREKRADNAWXAYERVYLPVTES

SEQ ID NO: 181521 - protein, 59 aa, Glycine max
  Clone ID: PAT_MRT3847_134928C.1.pep
YQIHLLSISYNQQTHSETVLKLPKYNTNLPIHLITTTFILISPRKKWSIQYTYLHYYYS

SEQ ID NO: 181522 - protein, 76 aa, Glycine max
  unsure (1)..(76): unsure at all Xaa locations
  Clone ID: PAT_MRT3847_134929C.1.pep
HHFELFPLGGGKRXCPGISFSPQLVHFTLANLFHSFEFLNPSNEPIYMTETLGLTNTKSPPLEILIKPRLSPSCYV

SEQ ID NO: 181523 - protein, 63 aa, Glycine max
  Clone ID: PAT_MRT3847_13492C.1.pep
LRIWSITRHWSPQTHWRYAPISYGARLSKIRSLSSSLLIISKKLSNPSRNISNGPMGPDFLNL

SEQ ID NO: 181524 - protein, 63 aa, Glycine max
  Clone ID: PAT_MRT3847_134930C.1.pep
VVRGRGVLPTTAGIRSAVNNRSSDISRKLHAELGNRKKVVLLTRVEPVPGAILAVVSDVKKEI

SEQ ID NO: 181525 - protein, 25 aa, Glycine max
  Clone ID: PAT_MRT3847_134931C.1.pep
GPSVNYLLAVKDEARAHGPKSPTTG

SEQ ID NO: 181526 - protein, 31 aa, Glycine max
  Clone ID: PAT_MRT3847_134932C.1.pep
KNVGTNTLLIVNVILVHVEAEVRNIMHILTF

SEQ ID NO: 181527 - protein, 44 aa, Glycine max
  Clone ID: PAT_MRT3847_134933C.1.pep
ESCYYLPLTCDHSSSHTFTPLVKKSQTIFLFPSLSLSLSLITAT

SEQ ID NO: 181528 - protein, 49 aa, Glycine max
  Clone ID: PAT_MRT3847_134934C.1.pep
AFLAVVEPCWLGRGCVCWGVVLEYALCCLLRWSLLGIERFVVACVWARA

SEQ ID NO: 181529 - protein, 70 aa, Glycine max
  Clone ID: PAT_MRT3847_134935C.1.pep
QEKRKGSSSGSRDLYQNTTEFRWMPPTPVKLNSYGASNYAPMDQERKVLKLVHLQKFKTEHALYGLGINP

SEQ ID NO: 181530 - protein, 154 aa, Glycine max
  Clone ID: PAT_MRT3847_134936C.1.pep
MIKEFNTQTEVSVRLEALWAVLSKDFVTVAPKVLPNIVKDVQVIEGDGGVGTILIFNFLSDVSPSYQREKITEFDEISHEIGLQVIEGGYLSQGLSYYKTTFQLSAIGEDKTLVNVKISYDHESEIEERVKPTKTSESTLLYLRRLETYLSNGA

SEQ ID NO: 181531 - protein, 95 aa, Glycine max
  Clone ID: PAT_MRT3847_134937C.1.pep
LRSVNSVPFSLGLEISARSIGARTLCDIMQEIIAVYSLKGLLIGSMTRSSPHKVHGDPRINCALLVSYRRSLLSVRRIVYGSKAHKYCATRWIVG

SEQ ID NO: 181532 - protein, 75 aa, Glycine max
  Clone ID: PAT_MRT3847_134938C.1.pep
SLSYAGTVTPAFFTACPRTTYATPLIVTPEYGIYLFGVEDPLLTADHDQDLGFDEGARQAAMHLQHYVDFLAGDK

SEQ ID NO: 181533 - protein, 48 aa, Glycine max
  Clone ID: PAT_MRT3847_134939C.1.pep
KYSTKARNFLQRGGATIYNFFTSFYTLYEENFNQKIGIKHFPYYYLSR

SEQ ID NO: 181534 - protein, 128 aa, Glycine max
  Clone ID: PAT_MRT3847_13493C.1.pep
LLLCQNQLQSSRRRPRRRRPKRWTWWAGRSGNNRRTRRRPWRRRPRRRSWTRWPQSWLSWPWHLRRPWRLSTTIVVMLTRQLVKLKPLCKRYQAQAQATGRGRSRRSGYVCLCGRALTWWVYGTLVHS

SEQ ID NO: 181535 - protein, 84 aa, Glycine max
  Clone ID: PAT_MRT3847_134940C.1.pep
RLELAFAGLPLLAHGRTETPVRVSQSLRRHRFGALPGHRRCLIVPNGPSGTPRRPDVDERFNEYLELVACPASVIQAAVPQHVE

SEQ ID NO: 181536 - protein, 68 aa, Glycine max
  Clone ID: PAT_MRT3847_134941C.1.pep
PKKQGRHQLLINCVLWEQINLTAFYTDRHIFLQGFFKLKRGRVLVYIERGLRRDFFFSCDFHFCASWI

SEQ ID NO: 181537 - protein, 47 aa, Glycine max
  Clone ID: PAT_MRT3847_134942C.1.pep
YEDLKRLKNRGGGKGVFSKRENTEQRWACFKKKTPARLENENLQQFY

SEQ ID NO: 181538 - protein, 61 aa, Glycine max
  Clone ID: PAT_MRT3847_134943C.1.pep
TSQYKKTENGARPAKRKHGSFTPGLPSFFFFFFFFFFFFFFFFFFFFFFFFGCKIYFLRTR

SEQ ID NO: 181539 - protein, 139 aa, Glycine max
  unsure (1)..(139): unsure at all Xaa locations
  Clone ID: PAT_MRT3847_134944C.1.pep
SPFLALGSVKAQKSKAYVMRYQVNSRRSRSGKTNYRALIRSINLVKNKDFTPKDRYVVRLFIKDXLQQIISASIDGDIWLATAYLHEPSRYGLVLGLTYYAITYCSALLFARRVLNSLAMDVEYLGNVADSVEDYFIVT

SEQ ID NO: 181540 - protein, 64 aa, Glycine max
  Clone ID: PAT_MRT3847_134945C.1.pep
SDLWLQGMGNRSTYSSQNMGSNWQAYVPGIHCHEKSLIHIPGKRLPMFSKFLTWVRRMYHTWRI

SEQ ID NO: 181541 - protein, 80 aa, Glycine max
  Clone ID: PAT_MRT3847_134946C.1.pep
KDSIMLGPKSRFQEFINAQTEDQGEDQGHISMPRNREKTVSNSLVTKATSLLEKKFGPFVEWDNVEVLKKQNRKARTTND

SEQ ID NO: 181542 - protein, 66 aa, Glycine max
  unsure (1)..(66): unsure at all Xaa locations
  Clone ID: PAT_MRT3847_134947C.1.pep
LGFYIKRIGTLDTTYLGTQKLMPGXNNNIYVVPTALPSFFSPSYNGSNIPYLYYIKKALTWRRIIY

SEQ ID NO: 181543 - protein, 95 aa, Glycine max
  Clone ID: PAT_MRT3847_134948C.1.pep
ADTDPRYPRSSIEDDFNYGSCVASASVHIRMAFLRKVYSILSLQVLLTTVTSALFLYFETLRTFVHDSPALIVVFALGSLGLIFALTLHRHTHPL

SEQ ID NO: 181544 - protein, 60 aa, Glycine max
  Clone ID: PAT_MRT3847_134949C.1.pep
LVLRKKNKKKQPAIMRSFFNSSLRGKPELLTEGQGPPLFGCEWRNQVQLMGGPEILCTSL

SEQ ID NO: 181545 - protein, 63 aa, Glycine max
  Clone ID: PAT_MRT3847_13494C.1.pep
HVDSVLTSLKILIGFDKLTLKKSVLISFVFRTSFLNPTLMASTRTSTLVSSIFRGDSSQSTNA

SEQ ID NO: 181546 - protein, 106 aa, Glycine max
  unsure (1)..(106): unsure at all Xaa locations
  Clone ID: PAT_MRT3847_134950C.1.pep
LIEEFHSMQRMMNAPDSNDNIDLLWSIDLLGLQGAGXKLFQTRFVVDDKLVMANTQXEFFDGNFSVESWLPISVNXLYTGSQLPLEAVXAKVTCWCGRSGLPTTDL

SEQ ID NO: 181547 - protein, 60 aa, Glycine max
  Clone ID: PAT_MRT3847_134951C.1.pep
GLRCVGCGVFLYIDFFGIRDLGIPAQCPGLCFRHFIEVQWFGYLSHLSALFVFFNESCHV

SEQ ID NO: 181548 - protein, 68 aa, Glycine max
  unsure (1)..(68): unsure at all Xaa locations
  Clone ID: PAT_MRT3847_134952C.1.pep
GVXXXVKKXQCFLKSWHAXCHQLXXLXLCXXIFVELFGQYQYSIXSVCSKMMSCLGSDRXYEGAYNIQ

SEQ ID NO: 181549 - protein, 62 aa, Glycine max
  Clone ID: PAT_MRT3847_134953C.1.pep
LLPLPSAPSLYSSPSFILIPRVAATSSAIIALVPLGSPPPPPPPPPPPPPSRCHSYTCSSGK

SEQ ID NO: 181550 - protein, 133 aa, Glycine max
  unsure (1)..(133): unsure at all Xaa locations
  Clone ID: PAT_MRT3847_134954C.1.pep
KCKAFQKKNDQYASHANKGRRRVIFEPGDXVWRHTRKERFPGQQKSKLAQRGEGPFQVLERIKDNAYKIDLPSEYNISSTFNVVDLSPYDVGEDLRMNPLEEKGDDENQRLEQAHSSTLRDHLQILVDLLQEQ

SEQ ID NO: 181551 - protein, 50 aa, Glycine max
  Clone ID: PAT_MRT3847_134955C.1.pep
QLKEKGRASDNHKICFPIVSSMTMRLANSNTLHLYVNSKNFNIQCIYSIF

SEQ ID NO: 181552 - protein, 73 aa, Glycine max
  Clone ID: PAT_MRT3847_134956C.1.pep
YSTFLKVENTLVSRKLYICQLNSYHCYLLFHHYLKHVLFIYSFIQFLAYSFALSPLHPFQFSFHFTWRKESVA

SEQ ID NO: 181553 - protein, 527 aa, Glycine max
  Clone ID: PAT_MRT3847_134957C.1.pep
MSCATFNVAASLNLHGRTKQAVSKPFGSRNHCTFPKFSFLYSETLNLSSTYYSCGRDTPSRSFHSVFKCLAQNSESSPSVSVDTNNNSQKVTVLVIGGGGREHALCHALQRSPSCETVLCAPGNAGIASSGNATCISDLEVYDGAAVISFCRKMGVGLVVVGPEAPLVAGLTNELVKAGIPTFGPSAEAAALEGSKNFMKHLCDKYDIPTAKYKTFIDPSAANEYIQEQGAPIVIKADGLAAGKGVTVAMTLEEANEAVDSMLVKGDFGSAGCRVIVEEFLQGEEASFFALVDGENAIPLESAQDHKRVGDGDTGPNTGGMGAYSPAPIITKELQSIVIHSIIIPTVKGMSAEGCKFVGVLYAGLMIEKKSGMPKLIEYNVRFGDPECQVLMVRLESDLVQVLLSACRGELSGLSLNWSPGSAMVVVMASNGYPGSYEKGTVIENLQEAELAAPGIKIFHAGTAFDSEGKFIANGGRVLGVTAKGNDLEEARDRAYQAVEKVNWSGGFYRRDIGWRALPQKQYVTKG

SEQ ID NO: 181554 - protein, 107 aa, Glycine max
  unsure (1)..(107): unsure at all Xaa locations
  Clone ID: PAT_MRT3847_134958C.1.pep
XIXXIXATTHLQXXXHXNNTXLLXIXRQSXXQASXXSGHXXALVXHYXIFXNXXXXLXXDXXXHTXLPXXXHXSHNXXXSFSLSPXXSAXKLXTRAXFRAYVRVXXL

SEQ ID NO: 181555 - protein, 129 aa, Glycine max
  unsure (1)..(129): unsure at all Xaa locations
  Clone ID: PAT_MRT3847_134959C.1.pep
ENPHNGWKNPPGPGPKQGPKPPPXKPNQKERETPTKLIPPPLKKKKKPSNLXKPHPFKGPLPPPDQKQGPREKKNPGXGPGPLGKNRPEQGKGKPLGPGPLGGGKQRQGPGPPPKAPGKKSPFGGPGGP

SEQ ID NO: 181556 - protein, 166 aa, Glycine max
  Clone ID: PAT_MRT3847_13495C.1.pep
DTSHVHTYMGDLLHHTFFFFLFPPIRPITNGNHLCFSMCHRSPLPEMTSGGSDSPFFSLSFLFLSFSVSLFFFFFLLTNSSEIANQKEEKIRNCHPEIFRLGVEEPRWHPDLPCMPLDSRSAALIIGIQIYRTCGRNPDLLLIQPTSRSAMFLLREEQVVGRHDGH

SEQ ID NO: 181557 - protein, 36 aa, Glycine max
  Clone ID: PAT_MRT3847_134960C.1.pep
YIKKFACISYTNMYDGRRQESMTSWRQTKDRKHKAN

SEQ ID NO: 181558 - protein, 56 aa, Glycine max
  Clone ID: PAT_MRT3847_134961C.1.pep
RLELLPYLRALGECPHFKVKIVGHSLGGGTAALLTYILREQKEFSSSTCVSFAPGM

SEQ ID NO: 181559 - protein, 105 aa, Glycine max
  unsure (1)..(105): unsure at all Xaa locations
  Clone ID: PAT_MRT3847_134962C.1.pep
PTTQAMSTRVQVIISLCGXIETRCLEGTHLLFVVCQGWQNDKKMHWXVKCGTPSGLTFKVIGRCKLNEMLIRYCVEKQLHAAETPSLCLHSPIKYGTLWVDGDDN

SEQ ID NO: 181560 - protein, 47 aa, Glycine max
  Clone ID: PAT_MRT3847_134963C.1.pep
PPPSVYLYRKYISIHRVVFGSRIYLKWKTLIWFRQKKYHLYSFCVFI

SEQ ID NO: 181561 - protein, 120 aa, Glycine max
  Clone ID: PAT_MRT3847_134964C.1.pep
GPENPELPQFERENPADARGNRGKKRRETPKTPAKAKKERNDDKARSKNEASHQPAQEQGAKTRAETDPTEESTQGRTDRGAPRQTTTKNDDEKKADEKTEKEQHDNGEHPNRPKPEPNE

SEQ ID NO: 181562 - protein, 823 aa, Glycine max
  Clone ID: PAT_MRT3847_134965C.1.pep
MGSWSWVGIALFFLAFTASCFATEVTYDARSLIINGERRVIFSGAVHYPRSTVQMWPDIIQKAKDGGLDAIESYVFWDRHEPVRREYDFSGNLDFIKFFQIIQEAGLYAILRIGPYVCAEWNFGGFPLWLHNMPGIELRTDNPIYKNEMQIFTTKIVNMAKEAKLFASQGGPIILAQIENEYGNIMTDYGEAGKTYIKWCAQMALAQNIGVPWIMCQQHDAPQPMINTCNGHYCDSFQPNNPKSPKMFTENWIGWFQKWGERVPHRSAEDSAFSVARFFQNGGILNNYYMYHGGTNFGRTAGGPYMTTSYEYDAPLDEYGNLNQPKWGHLKQLHAAIKLGEKIITNGTRTDKDFGNEVTLTTYTHTNGERFCFLSNTNDSKDANVDLQQDGNYFLPAWSVTILDGCNKEVFNTAKVNSQTSIMVKKSDDASNKLTWAWIPEKKKDTMHGKGNFKVNQLLEQKELTFDVSDYLWYMTSVDINDTSIWSNATLRVNTRGHTLRAYVNGRHVGYKFSQWGGNFTYEKYVSLKKGLNVITLLSATVGLPNYGAKFDKIKTGIAGGPVQLIGNNNETIDLSTNLWSYKIGLNGEKKRLYDPQPRIGVSWRTNSPYPIGRSLTWYKADFVAPSGNDPVVVDLLGLGKGEAWVNGQSIGRYWTSWITATNGCSDTCDYRGKYVPAQKCNTNCGNPSQRWYHVPRSFLKNDKNTLVLFEEIGGNPQNVSFQTVITGTICAQVQEGALLELSCQGGKTISQIQFSSFGNPTGNCGSFKKGTWEATDGQSVVEAACVGRNSCGFMVTKEAFGVAIGPMNVDERVARLAVQATC

SEQ ID NO: 181563 - protein, 72 aa, Glycine max
  Clone ID: PAT_MRT3847_134966C.1.pep
DPILTTQNCLYLRFDLWTIEKSTIISPVLYFYPTSSFLSYEFRNYCHDSRHGPMLQWSSEILSGLISHSGIL

SEQ ID NO: 181564 - protein, 48 aa, Glycine max
  Clone ID: PAT_MRT3847_134967C.1.pep
LRRKRKIRRLTIVLDISAVHSGFFLQLSNLNFKVHHIIFFLLYCAASG

SEQ ID NO: 181565 - protein, 145 aa, Glycine max
  Clone ID: PAT_MRT3847_134968C.1.pep
LLSCLIVASSSQILKNAGGPTTPWVNSPPTMGGARRHAGGGEPPSPLRGGQFLPPCWLLQAAFWRNSKTLRRRVFYLSQHGGPSHANIPCLPNGRSAALGVLGDHQVAAEQHRGVGQRSHRGICCFCWGCSTPLLPGGRPLVGAP

SEQ ID NO: 181566 - protein, 134 aa, Glycine max
  unsure (1)..(134): unsure at all Xaa locations
  Clone ID: PAT_MRT3847_134969C.1.pep
PRVRGIIAVKGAGGNTLIQSKPINNWMGEAAWQTGCFWDKSGMSGNAAGKRRECSLLHQGFITNSNSSEHLDAXRGHNMXPHSWERMLAIXEGDTNNGHGTGRTKRAYQASGHVNHLKCRPRQRTRSDIVLGIC

SEQ ID NO: 181567 - protein, 114 aa, Glycine max
  Clone ID: PAT_MRT3847_13496C.1.pep
PHSLLQSHFHVLFFYSSTETTHSNAHQISKAPSTSFNTHFLMPLDPTLLARCTCTCKCLFISLAPLKTKKSKSHIAYNNSPAQFSNFILLNLLSNYFRYPFFLLWIQILLLKPP

SEQ ID NO: 181568 - protein, 71 aa, Glycine max
  Clone ID: PAT_MRT3847_134970C.1.pep
YHYLLSLEVRTNNIMLEYQSRKRPDAIHKKIDYSMQLNDYRIKVLQVLDAVISTMKDAALQELQNVCYHWH

SEQ ID NO: 181569 - protein, 196 aa, Glycine max
  unsure (1)..(196): unsure at all Xaa locations
  Clone ID: PAT_MRT3847_134971C.1.pep
GSRSPPPPYYYKSSIPPSPSXPPPYDYDSPPPANEHVHPSYYYHSPPPACASAPPGYYYKGAPPPSLSTSHAYYYRLTAPPSSSPPTPYYCHCPPPPSAXPPPTYYYKFAPPTCPSPPPCYYYQGATPPSPTPHASYYYRFPPPPTSYPPPYHYVSPPPPYPCATTPYQYTAAPSPCTATAPKFIYKSPTPAVNIY

SEQ ID NO: 181570 - protein, 71 aa, Glycine max
  Clone ID: PAT_MRT3847_134972C.1.pep
SNIKNDFDFCLPRSSFFLFTKPMWLNLFKHVEAHFTVCPNLCLEKKTLSFKLGPRLSVWAPYNEIRVLGII

SEQ ID NO: 181571 - protein, 38 aa, Glycine max
  Clone ID: PAT_MRT3847_134973C.1.pep
KHRQQRFKLIRSHLNHDLQSKTLSLQGIIYKFFYLTRC

SEQ ID NO: 181572 - protein, 68 aa, Glycine max
  Clone ID: PAT_MRT3847_134974C.1.pep
PRGENPLFFLATGVKFADPACRRDNIFCFLTLNRSFLGSFRNPGNPKKKKPQKLPPTKKKKKKKKQSK

SEQ ID NO: 181573 - protein, 82 aa, Glycine max
  unsure (1)..(82): unsure at all Xaa locations
  Clone ID: PAT_MRT3847_134975C.1.pep
FHGCCSTFFVTGCLWIGLREFGRGDWRNISRNXVVGTRTPTQVASLAQKYFXRQNSVKKERKRSILHYITTLDRNLISGPID

SEQ ID NO: 181574 - protein, 126 aa, Glycine max
  Clone ID: PAT_MRT3847_134976C.1.pep
LRTFGLIDVLGEKMIEGYKDGDISAFAEKAEAAEIVYVEEKKGPSDKTKEKSLGYKKIEEVIVIIFFLLFAVLPEYGEGVYYEGEVKEKKGTPEKTKEKSFGHYLKIEEEKEKEKESGVYRHPRPR

SEQ ID NO: 181575 - protein, 81 aa, Glycine max
  Clone ID: PAT_MRT3847_134977C.1.pep
IDALSTIDSILQLRCSCPWKYPNLVPSSEAQQSFTFCWKLTFARRRGCYIFPFFLGTFFIILRASLSRSQTGAREQRKNRS

SEQ ID NO: 181576 - protein, 40 aa, Glycine max
  Clone ID: PAT_MRT3847_134978C.1.pep
KKLESTSNNFERKGLYSYDDDGDIIIIGGLIGDMYSMTHF

SEQ ID NO: 181577 - protein, 429 aa, Glycine max
  unsure (1)..(429): unsure at all Xaa locations
  Clone ID: PAT_MRT3847_134979C.1.pep
MSWRRVLNSAQALAAHTFLLCFTLFLVLKLDHNLSSSWWVIFSPLWMFHGVVARGRFSLPIVAMXAVGLKIVFLPLLTFEIIILIDNFRMCKALMPGDGENMSDEAIWETLPHFWVAISMVFFIAATVFTLLKLSGDVGALGWWDLFINFAIAECFAFLVCTKWSNPVIHRNSREASSSSSTTITYLDWNSGLVVSTDENQHQGRMCSLQDIGGHFMKVPIIVFQVLLCMHLEGTPACAVHIPLPVIFSPLFLLQGAGVMLSASKLGEKLVLLLRSGAGGGIYFRFSSRAHDCLGFLHHGSRLLGWWSIDEGSREEQARLYHEGAIGYNTFCGYPPEIVKKMPKKELAEEVWRLQAALGEQTEITKFSQQEYERLQNEKVLCRVCFEGEINVVLLPCRHRVLCSTCSEKCKKCPICRDSIAERLPVYDV

SEQ ID NO: 181578 - protein, 314 aa, Glycine max
  Clone ID: PAT_MRT3847_13497C.1.pep
MAPQISRGRVPIVVLLASLVLPLLFQEYSSSSVFIASASASESDVDLLEFPLNLEYLEAEFFLFGSLGHGLDVVAPNLSEGGPPPIGARLARLENLIRDIILQFGLQEVGHLRAIKSTVRGFPRPLLDLSTASFAKVMNSAFGRPLVPPFDPYANSINYLLASYVIPYVGLTGYVGANPLLQNATSKRLVAGLLGVESGQDAVIRTLLYERQASLVQPYKVTVAEFTDRISMLRNKLGNAGVKDEGLVVPRVQGAEGSVTDNILAGDKDSLSYPRTPEEILRIIYGGGDEHVPGGFYPNGACGRIAKSYLKYTT

SEQ ID NO: 181579 - protein, 196 aa, Glycine max
  unsure (1)..(196): unsure at all Xaa locations
  Clone ID: PAT_MRT3847_134980C.1.pep
MSWRRVLNSAQALAAHTFLLCFTLFLVLKLDHNLSSSWWVIFLPLWMFHGVVARGRFSLPAPSAPRNRXYRGYAAVGLKIVFLPLLTFEIIILIDNFRMCKALMPGDGENMSDEAIWETLPHFWVAISMVFFVAATVFTLLKLSGDVGALGWWDLFINFIIAECFAFLVCTKWANPGIHRNSREASGSSSTTIGYL

SEQ ID NO: 181580 - protein, 254 aa, Glycine max
  Clone ID: PAT_MRT3847_134981C.1.pep
MSWRRVLNSAQALAAHTFLLCFTLFLVLKLDHNLSCSWWVIFSPLWMFHGVVARGRFSLPAPSAPRNRNWAPCHAVIATPLLIAFELLLCIYLESLYDLGYAAVDLKIVFLPLLTFEIIILIDNFRMCKALMPGDEENMSDEAIWETLPHFWVAISMVFFIAATVFTLLKLSGDVGALGWWDLFINFAIAECFAFLVCTKWSNPVIHRNSREASSSSSTTITYLDWNSGLVVSTDENQHQGRMCSLQDIGGHFM

SEQ ID NO: 181581 - protein, 62 aa, Glycine max
  unsure (1)..(62): unsure at all Xaa locations
  Clone ID: PAT_MRT3847_134982C.1.pep
GGGPSRNVRSSHIPALKFLLYGGTGWIGGLLGKLGAIHDIPYQSXKGRRGGGSSLMADMRNV

SEQ ID NO: 181582 - protein, 74 aa, Glycine max
  Clone ID: PAT_MRT3847_134983C.1.pep
GSSSSRIVLRFDQFFVHILWYQEKVLCRVCFEGEINVVLLPCRHRVLCSTCSEKCKKCPICRDSIAERLPVYDA

SEQ ID NO: 181583 - protein, 80 aa, Glycine max
  Clone ID: PAT_MRT3847_134984C.1.pep
GPISWVNFNIPFYFFSDPKGKMFCNLIFFPYLPTTTRRNTQGRGPTDKTPFFQHTIKVTLPSSKKNHSKILPSDLNFFFP

SEQ ID NO: 181584 - protein, 94 aa, Glycine max
  unsure (1)..(94): unsure at all Xaa locations
  Clone ID: PAT_MRT3847_134985C.1.pep
WFVKTGTGKNNIQVHVDKGKVVEISGQWKQQRDSKAHDXRCGHWWEYGYVRRLEMPEDANWKNIEAYLHNDIYLEIRIPKSQQGRDLPQGKDVA

SEQ ID NO: 181585 - protein, 164 aa, Glycine max
  Clone ID: PAT_MRT3847_134986C.1.pep
MCSISEKAKRKRQSAFRGVRKRSWGRYVSEIRLPGQKTRIWLGSFGSPEMAARAYDSAAFFLKGTSATLNFPDLVHSLPRPLSSSRRDIQSAAAEAALHSPPPKEEQESIFTSTTTSSFHDVMEAPLMSPLRVDSTFGDFSWDQLFDFNDDILIVGSTSATLVP

SEQ ID NO: 181586 - protein, 81 aa, Glycine max
  Clone ID: PAT_MRT3847_134987C.1.pep
KSGSTNPNIGQPDLAIKYSPENLAGKVVICLQVLFQIGQCSANRLGVLHYTYPSSLCSAHRVLFVPLTTRTHMSRTSLSKS

SEQ ID NO: 181587 - protein, 55 aa, Glycine max
  Clone ID: PAT_MRT3847_134988C.1.pep
ITKPCLHKTRAYYFEFFKVVQILNKNFLHSERFAINFWWISQHRLHPYKYANPGL

SEQ ID NO: 181588 - protein, 56 aa, Glycine max
  Clone ID: PAT_MRT3847_134989C.1.pep
SILTYKLESKKERKKFKMIRNFCQKNIFNLIFLILSGKYLFNSFKIKFFLAYYYFF

SEQ ID NO: 181589 - protein, 60 aa, Glycine max
  Clone ID: PAT_MRT3847_13498C.1.pep
LIKGLPLSSCFPRLNLVTPFNSLDPATPSLLHFNFWLGQVSLPMYYETLCASCQTFVPFV

SEQ ID NO: 181590 - protein, 78 aa, Glycine max
  Clone ID: PAT_MRT3847_134990C.1.pep
LDISGLDTTTEKRSFSHHTLARTHTSEARIIPLTTFGKASPSAAHITNVLQHSGSRIIPDWTKSNVYSPDNTSTSSVS

SEQ ID NO: 181591 - protein, 160 aa, Glycine max
  Clone ID: PAT_MRT3847_134991C.1.pep
ARVEDKGNLHVTKRGEVDRRIQERVASQASSATSCQQQDSSSTRGALVGNNHLDDVDIGNMQVGRSNQSSVAGPNNWAGFAGANEASKGPPQVSAIQHELPIERRENIPSQFQNVGNNCGSRNQNSVNHLSFSLKEQWKPVPGMDSDPHGATMMKDGNVM

SEQ ID NO: 181592 - protein, 97 aa, Glycine max
  unsure (1)..(97): unsure at all Xaa locations
  Clone ID: PAT_MRT3847_134992C.1.pep
KDIQGACRLXEPIYDQTERRRGVXHAEVLTRLADDNAGTIQAEKRRNKEGDRPNGHIKSPAPEGCVPLTKGGIGNGTSENVTLRVALARSESVIDAY

SEQ ID NO: 181593 - protein, 66 aa, Glycine max
  Clone ID: PAT_MRT3847_134993C.1.pep
KLKMSLVLKIKEAKIFNQIRVFYKIVKHNAAMILSISHQQSNMNIWLLYPLIGSSFQKTLFLFAWH

SEQ ID NO: 181594 - protein, 70 aa, Glycine max
  Clone ID: PAT_MRT3847_134994C.1.pep
QRPIHLPRLHILQLLLELLLHLRLLLTLPFNRNHQYLYSHTPNILFLKHSASISSHSLQTLSLRLTQPLT

SEQ ID NO: 181595 - protein, 88 aa, Glycine max
  Clone ID: PAT_MRT3847_134995C.1.pep
PSLQRLQNGTLRTEDAYDLQDIILQSDKGLFLLVNKKTIMDSGAPLTAFTVGECACGETRAYIMEKTWPVRPLMNHGARAYRKPEDKL

SEQ ID NO: 181596 - protein, 68 aa, Glycine max
  unsure (1)..(68): unsure at all Xaa locations
  Clone ID: PAT_MRT3847_134996C.1.pep
SHGTSIFEASLSPYXXVFLFSCRCRCSPLLFNXSXDEHGXTRVLLXXLHSSGLLRXXGLVGGXWXACX

SEQ ID NO: 181597 - protein, 84 aa, Glycine max
  Clone ID: PAT_MRT3847_134997C.1.pep
NFKNIIFFQRASDNRHWPSNHTKSSTQEFQCNRHLQRASQKPKPSARIDIIRVPGPPAPSKDSTLYRKIGKAFRKTLRASETIA

SEQ ID NO: 181598 - protein, 118 aa, Glycine max
  unsure (1)..(118): unsure at all Xaa locations
  Clone ID: PAT_MRT3847_134998C.1.pep
PRIRLEITIASFPIPYDIIYTNLSDLSPVLALYSNYIPPLIYAMMPSSRDLALRTVTVGSLLIASMFGRAINXQLEPNSXLHYAFTDNEFARVLQASLGLFTLPFIGDFLSHATILWF

SEQ ID NO: 181599 - protein, 69 aa, Glycine max
  unsure (1)..(69): unsure at all Xaa locations
  Clone ID: PAT_MRT3847_134999C.1.pep
PNLNNHHKTTINNQLIPSLSLLKKIILPSKSTXXPTFFPNLSLPLNSFYSKTQSHSTTSTPKFSFSYYN

SEQ ID NO: 181600 - protein, 384 aa, Glycine max
  Clone ID: PAT_MRT3847_13499C.1.pep
MEFTKKRKTEENGDTTDYPPQQSTEESPIAAVAPAPLAAEDIRKILQPFSQEQLLDLLQSASLRHPDVLDAVRAVADLDSTLRKLFVRGLAGETTTETLRGVFSAFGELDEAIVIIDKATGRSKGYGFVVFSHVDGAILALKEPSKKIDGRMTVTQLAAAGGPGGGDVSLRKVFVGNVPFEISSERLLDEFLKFGEVEEGPLGFDKSSGKSRGFAFFVYKTEEGARASLVEPLKTIEGHQVICKLAVDNKKTKPFVADQHQQQHHQQHPQQQMQQQGSMMVPQYGGYGGNGYGMQQQQQQHQVPPYNNQIPVAGAGGYGHGYGNSQMGGPVSGDYGARVPPSTGGGYPDGSQYGFPPSSGHPPQPQIPMARPPGGMYQGMPPYY

SEQ ID NO: 181601 - protein, 92 aa, Glycine max
  unsure (1)..(92): unsure at all Xaa locations
  Clone ID: PAT_MRT3847_1349C.1.pep
MAKDPNGELVTGTAGPIVHALVPMMAKGEMVNTDQAVILHMLDIPPTEESLNGAKMEXADAALHLLKGVADAADECDACTADNIAMMDAEYT

SEQ ID NO: 181602 - protein, 64 aa, Glycine max
  Clone ID: PAT_MRT3847_134C.1.pep
RTSTSCVCLFPLKNQNNQNLKLERNLFEKMSNYIFHSLHPYLGHILIKILILKIKIHHSLRTRG

SEQ ID NO: 181603 - protein, 65 aa, Glycine max
  Clone ID: PAT_MRT3847_135000C.1.pep
AGETVCFIGRIAWARTHISCVSVAFCAVMWSRPTRAIVSHQGTSSSVPGSMPMQRCSRCCHLNPN

SEQ ID NO: 181604 - protein, 393 aa, Glycine max
  Clone ID: PAT_MRT3847_135001C.1.pep
MFGFSQQHNNVDNNGGTSSLSDDEDDLTRFFDYDTAPGQNLDELFAPSIVTQLPPMLPAEATQHHHTLPQHVNQIVSSSPVDLPSHVPIEALVQQNGGSSVQRQRGKGLQWTVEEHMKFLVALDEVGKGDWITISKHIGTKSSTQVASHAQKYYLRQKAKKKIRKSIHDITLNTISHQDDTQNSTPHPDPEIQPVHEIHQMQEMPPNSMTHQMSGFEYFANQQVHEIQQMQDILSVYPSNNITHQMGGFEHFVNQQVHEMPVYPPNNMTHQMSGFEHFANQQVHEMQQMQDILSMYPSNNMIHQMNGSEYFVNQQVHEMPVHPPNNMTHQMSGFQYLANQQVHKIQQMQDILPAYPSNNMTHQMSGFECSNKDFGRGCYKPEYPPNNTSSSNN

SEQ ID NO: 181605 - protein, 164 aa, Glycine max
  Clone ID: PAT_MRT3847_135002C.1.pep
AGSDDKASCAESWASALISELEHFRSGKEKEPLSCKSVGASDIDLMDDFVEMENLAVVSVEKATEISSASLKAISEINGFSGIETKETTPEVEGKEIIPVSDHISTATNETTSEVVGMEIIPVSDQISDLSKSNKKTCSIDIFTGNIPGWLQDVVKMVLEQNHV

SEQ ID NO: 181606 - protein, 124 aa, Glycine max
  unsure (1)..(124): unsure at all Xaa locations
  Clone ID: PAT_MRT3847_135003C.1.pep
KFIDAKIVGCCMKXVFPVDEKKRKKNVVETYEALQFLENEIKDKKFFGGKEVGLVDIAGVYIAFWVPLIQEIAGLELLSSEKFPKLYKWSQEFVNHPIVKEGLPPRDPVFAFFKGRYESLSASR

SEQ ID NO: 181607 - protein, 200 aa, Glycine max
  Clone ID: PAT_MRT3847_135004C.1.pep
TIPPHDKPLVPHIDVVRSHINHHLNYKPYECFLCNQGEPSISVRFPSIGEAALKHLRDYHGYTPNLVELVKEFFIFKPIAGLENFIKSFLISDYYTIANQFLRTRDGRSSLPTGIPVASPQIPRQTRTYARPNDLNKRFSDVAGPPEASTPLQHKQYKNILACYHCKQIVSGPQELHSHTKSKHPNSSIAAYALPATNGY

SEQ ID NO: 181608 - protein, 153 aa, Glycine max
  Clone ID: PAT_MRT3847_135005C.1.pep
MVLSGKVETEVEIQAPAAKFYHVFRKQIHHVPNMSTERVHGAKVHEGDWENIGSVKHWDFTIEGRKTSAKEKIEAIDDDNKIISYSLFDGEISEGYKSLRGTLQVINKENGGIVKWTFEYEKLQENITAASPDSFLDFAAKVTKDIDDHLVKA

SEQ ID NO: 181609 - protein, 105 aa, Glycine max
  Clone ID: PAT_MRT3847_135006C.1.pep
MSGKAKRRDDDGASDADSEGHAPPKKSLKKDSDDDPDSITVCEISKNRRVAVRNWKGSIMVDIREFYVKDGKQLPGRKGISLTMDQWNVLRNHVEEIDKAINENS

SEQ ID NO: 181610 - protein, 105 aa, Glycine max
  Clone ID: PAT_MRT3847_135007C.1.pep
MSGKAKRRDDDDASDADSEGHAPPMKSLKKDSDDDPDSVTICEISKNRRVAVRNWKGSIMVDIREFYVKDGKQLPGRKGISLTMDQWNVLRNHVEEIDKAVNENS

SEQ ID NO: 181611 - protein, 125 aa, Glycine max
  Clone ID: PAT_MRT3847_135008C.1.pep
GPDRKPWTTHANLKNRRKKPRGGLQRKRGYHQPNGGGTGPGNHESRRDGRTTEQLPVTEPRRAEQSNALSTNIRHETKKRERTSMDGQQDRENPLKRAPGDIKEEGDRHNRRPDTPGKRNGQFRE

SEQ ID NO: 181612 - protein, 123 aa, Glycine max
  Clone ID: PAT_MRT3847_135009C.1.pep
WVAFMLLATEKMIAIVCIKFINFSGLSQYCFWLLRTKKINNLKNNGKTIDLNQLKGGFNNLLPNHKKKPQVGDQEQKRKLKTVARTSGRRNIHHIKLNNTICVQSPYKLLRKFHTKVHQELHA

SEQ ID NO: 181613 - protein, 41 aa, Glycine max
  Clone ID: PAT_MRT3847_13500C.1.pep
PPSWGSFFLSSLGGVLHPRFWERVLNLGAGFVLFFPRTMYN

SEQ ID NO: 181614 - protein, 48 aa, Glycine max
  Clone ID: PAT_MRT3847_135010C.1.pep
LSQMTLNTPKRKKNIISSTLVQTRFKHWPFNFLLLKNWFFLFWGSKPN

SEQ ID NO: 181615 - protein, 42 aa, Glycine max
  Clone ID: PAT_MRT3847_135011C.1.pep
RFICHHTLSKRLRWAHGMIRLLIPTIWLFHTVLVLSQRLELL

SEQ ID NO: 181616 - protein, 100 aa, Glycine max
  unsure (1)..(100): unsure at all Xaa locations
  Clone ID: PAT_MRT3847_135012C.1.pep
GFLPVPHLAEAVVFRGEKXSGLWPLNVGGGKQVPIKELAQLKKEVVGIXGGLVWGSTEPHGAPRELMESSPLASLGWPPKVSLQGGLAETPQGGLGNVHL

SEQ ID NO: 181617 - protein, 114 aa, Glycine max
  Clone ID: PAT_MRT3847_135013C.1.pep
NPLFNLLLSGSSSSRALILFSLLRCFLLFNSQTWLKREHAHHANPIQCNLFISLSNHRASPLLWNCVNFLRVREKRKEKHGTMKRCFISKRGERVVGEGKHKKSRALEPIRLEG

SEQ ID NO: 181618 - protein, 51 aa, Glycine max
  Clone ID: PAT_MRT3847_135014C.1.pep
IMHPICSSSSWLTFVRKLLCLVLPHLYHLPFSSSPLPSLTTPAVPSLPEFM

SEQ ID NO: 181619 - protein, 100 aa, Glycine max
  Clone ID: PAT_MRT3847_135015C.1.pep
TQMTLHGVVQHREEEHALVHGSCEPALAVTVLARDNRSGIVSVGVDGNHVVFDVSGVASELVMRKVVHTHALPHGVLCDSHAEEHDLAGDGGAGDRAGGA

SEQ ID NO: 181620 - protein, 128 aa, Glycine max
  unsure (1)..(128): unsure at all Xaa locations
  Clone ID: PAT_MRT3847_135016C.1.pep
WGLGQGFGPWANSRREXYYLVDAPAKXPPQGFPKSWATIIGVFXTQGLWDFRFAIWERQYFGPPFFFKVWDAQKNPANEYDLSPHVFLFGKTVGPPPLNIYPLSAPLFSGYFLVLRGWLPLKIPFPFF

SEQ ID NO: 181621 - protein, 166 aa, Glycine max
  Clone ID: PAT_MRT3847_135017C.1.pep
SLTVCHCSIILMLTPALASSSWLSVASNFIVISSSVAVTLSSVATSLSYVVTTQSPSSILVLSTSPVPLTPMLTILLLTLVFSTIAITVNLLVTALVQVRLFFTITVSNLVFRWAFCVLVMIFVITLIIMFVVLKLSSLLLVVVIRLILRWFFILRCMFVVVLFRR

SEQ ID NO: 181622 - protein, 61 aa, Glycine max
  unsure (1)..(61): unsure at all Xaa locations
  Clone ID: PAT_MRT3847_135018C.1.pep
KVEADIFFFFTTLAXLFFVCFFFFFFFFFFFFKPCCKVCFFLVQVEKFETLNTETEGCLVL

SEQ ID NO: 181623 - protein, 161 aa, Glycine max
  unsure (1)..(161): unsure at all Xaa locations
  Clone ID: PAT_MRT3847_135019C.1.pep
FRLAPPDFPRFPFPGSGIIGPSVDTPGGLXPAHPPPVKSKDCNVFPGNKKGVSKVSPVNFGKGAFVPIGAPMVGGLPFPKKKGAFFXKGDEFGFFSFGGSPVIWVFXKNSIPIDEALFAKRARSLEPLVFVGIKLGVPPRKLFFYIGNVEIELCFFFFLPP

SEQ ID NO: 181624 - protein, 43 aa, Glycine max
  Clone ID: PAT_MRT3847_13501C.1.pep
LYFITDYYQLTTYYGLGFTIGLKSSGLIIYIRCLAGGHGQGKQ

SEQ ID NO: 181625 - protein, 137 aa, Glycine max
  unsure (1)..(137): unsure at all Xaa locations
  Clone ID: PAT_MRT3847_135020C.1.pep
PGHVFDHYFHAGPALLVDVPRDTNISAHAMKSLNIPRGVRRVLCRTLNTYMRLYQKEFDTSYVGFTEDGANWLVENTDIKLVGIDXLSVAAFDHLITAHLVFLKDREIILVEGLKLDDVAAGIYTVHCLPIRCILIN

SEQ ID NO: 181626 - protein, 53 aa, Glycine max
  Clone ID: PAT_MRT3847_135021C.1.pep
ARTNARIDLEIISSLSSHIGLWLLLIIVEFLTHCTFGCCCSSYNCFGVAIIGP

SEQ ID NO: 181627 - protein, 126 aa, Glycine max
  unsure (1)..(126): unsure at all Xaa locations
  Clone ID: PAT_MRT3847_135022C.1.pep
QTGRXLGARRGRKXKHRGEGDQXGGDXXHREXXXQAXSRQTEKXHSXXRIFFMDVEXAXXXEXQKKRHXRGGNGHKKXXENPGNKTXSAKXTXKSQXXKGKXPQRKRXAKHXXXQRKTGATXQXAP

SEQ ID NO: 181628 - protein, 89 aa, Glycine max
  Clone ID: PAT_MRT3847_135023C.1.pep
KGPNKSKAFHRGNKRRLLGPFLFFGQKKKPFPFKRLKRGKGKKNLGHNVHATGPNSTGMFPPGGFFYQAPCPGGFPLKGKETFEGPPKF

SEQ ID NO: 181629 - protein, 143 aa, Glycine max
  Clone ID: PAT_MRT3847_135024C.1.pep
MCYVGKATKIFIFIVTVLVVLGLVLGLGLLRRRHHHNTANKCSDESCIPSPTTFPNPNFNTPTPPSPIDNNPTTPQTPQLPNPIPPPPYSNNPSLPPPPPILQSPPPPEETTPPTPPSVAAPPMNTPTPGSALLTPGPVHAMA

SEQ ID NO: 181630 - protein, 62 aa, Glycine max
  Clone ID: PAT_MRT3847_135025C.1.pep
INFQETLLLYAMEAFVKKCYLPGVFWFYKKKWMPPRRVELKVSNIRPAFFVWRAWALPTTTG

SEQ ID NO: 181631 - protein, 67 aa, Glycine max
  Clone ID: PAT_MRT3847_135026C.1.pep
MKIIQRDLWTQYICKACGDRVLRGFHEWEQHRQGRGHRKRISRLKRKAQVPGFVEEVKYSASEQLDI

SEQ ID NO: 181632 - protein, 64 aa, Glycine max
  unsure (1)..(64): unsure at all Xaa locations
  Clone ID: PAT_MRT3847_135027C.1.pep
DIHLLLVVKVCIFSKCPHLFVRDTSFVNLGVYAISCFVQILIYGISRNYPVGEKKKKKXXXXXX

SEQ ID NO: 181633 - protein, 71 aa, Glycine max
  Clone ID: PAT_MRT3847_135028C.1.pep
QIKMSIITKKVILFSVKLQNATVAPFYRPEKKFVTPDKNQPNHSFTDRCSNLSSSCLCVIEPLYPSTASIV

SEQ ID NO: 181634 - protein, 126 aa, Glycine max
  unsure (1)..(126): unsure at all Xaa locations
  Clone ID: PAT_MRT3847_135029C.1.pep
MTEVAFYRPGSLLNDTNLRCPLLGVLPLKHSPYHSLILTFPPSTESGLNKPEGNTSLFQIAYLFACLNESQDAEPTRCDPQAXXVHTHILPDGTMNAYVTLSSCVMPLGEVTRGALSNLGSLFWQR

SEQ ID NO: 181635 - protein, 99 aa, Glycine max
  Clone ID: PAT_MRT3847_13502C.1.pep
MVRSLWGAIDRFSGQHFQYVINELRKIKGVGEHNRELVMNLLRSVVEIVTYGERQDPHIFECFMERQVLADFVRILKISQESKIDGPLLQYLSIMSQNM

SEQ ID NO: 181636 - protein, 86 aa, Glycine max
  Clone ID: PAT_MRT3847_135030C.1.pep
LILIPVSHRSMYNICVKYTWSSEVNIGFSFNQISLVPDSKYNDNSSIIVIEGIYITSYVHVQGQESPAHNQGIPTVSIHHEVHIHA

SEQ ID NO: 181637 - protein, 120 aa, Glycine max
  Clone ID: PAT_MRT3847_135031C.1.pep
AFVVADTQKLADMAANSAVVDYDYQKLEPPILSVEDAVERSSFFEVPPFLYPKHVGDISKGMAEADHKILSAEMKLGSQYYFYMETQTALAVPDEDNCITVYSSSQCPEFTHSIIARCLG

SEQ ID NO: 181638 - protein, 101 aa, Glycine max
  unsure (1)..(101): unsure at all Xaa locations
  Clone ID: PAT_MRT3847_135032C.1.pep
XWVQAXHTXXXGKKXXPTXNXLISXXXLTTXTSXEEXFXIKXXLXERPXAXXSXXXXXKPXGXHATXFQTXGXXXFTXXXPXPSCXXPXXXXSXXTTXXAS

SEQ ID NO: 181639 - protein, 73 aa, Glycine max
  Clone ID: PAT_MRT3847_135033C.1.pep
PSYSSMTISRSQASSLSDPLIQLVSQPRNLILRKLMGQRSLKKCQIYHGCQVNLKTIYYCNGKSNLVKRNKNV

SEQ ID NO: 181640 - protein, 385 aa, Glycine max
  unsure (1)..(385): unsure at all Xaa locations
  Clone ID: PAT_MRT3847_135034C.1.pep
SGQRAVYTTGIGASAVGLTAAVHWDPVTRDWTLDRGSLVLAAARRRQXGGALVLADRGICLIDEFDKMNDQDRVSIHEAMEQQSISISKAGIVTSLQARCSVIAAANPVGGRYDSSKTFSQNVELTDPIISRFDILCVVKDVVDQVTDEMLATFVVVSHFKXQPKGANQDDKSFSESQDAHASAMPADPEILPQQLLKKYITYAKLNIFPRLQDADMDKLSHVYAELRRESSHGQGVPIAVRHIESMIRMSEAHARMHLRQHVTQEDVDMAIRVLLESFISTQKFGVQKALQKSFRKYMTFKKDYNELLLYILRELVKNALHFEEIVTGSASGLTHIDVKVDDLYNKAQEHDIYDLKPFFNSSHFSRANFVLDEERRVIRHPLTR

SEQ ID NO: 181641 - protein, 65 aa, Glycine max
  Clone ID: PAT_MRT3847_135035C.1.pep
YATSLFYVKLTPPQTRLFQTGVAPLGQMLLLVWMPLANSANDELTQGANLHCPIVCHTAIEQLHP

SEQ ID NO: 181642 - protein, 177 aa, Glycine max
  Clone ID: PAT_MRT3847_135036C.1.pep
MNKCELCKVPARIFCESDQASLCWDCDAKVHSANFLVARHARTLLCRTCRSPTPWKASGASLASAVSVCDRCAASEEPEESEAGNDDEPDTEDDDNDDEDGDNQVVPWSSSPPPPPPSSSSGSEWSECKNDDASISASEQETTTCSLKRQREDDDDASSDRDPRVLRRVGRLNGGCV

SEQ ID NO: 181643 - protein, 72 aa, Glycine max
  Clone ID: PAT_MRT3847_135037C.1.pep
DENRRLQSGLLMTLSMDYICLSFSFLPIFGLNLHVVPRTVQCACSILACMVALMSSTELGPFGVSRADSARV

SEQ ID NO: 181644 - protein, 90 aa, Glycine max
  unsure (1)..(90): unsure at all Xaa locations
  Clone ID: PAT_MRT3847_135038C.1.pep
CXICYXVVXCNYVVCLXLXVDXXPCXYRXLSXQKXSGCMXPXIXVVLHIESTHYMSTYFTLVTSLVSXXXVLXVPYCXLQXSVLIXXKGT

SEQ ID NO: 181645 - protein, 63 aa, Glycine max
  Clone ID: PAT_MRT3847_135039C.1.pep
LIFIKKILLIILDKIFLSQSYFFSYIKFKFKILFIEFELSSTRINNNFCINNRANYIYYLNIS

SEQ ID NO: 181646 - protein, 52 aa, Glycine max
  Clone ID: PAT_MRT3847_13503C.1.pep
CKLINLSRKLLVSSRNLNLEAFMSRPVFQNHELALQDLSRHPPILIPSLLSS

SEQ ID NO: 181647 - protein, 236 aa, Glycine max
  Clone ID: PAT_MRT3847_135040C.1.pep
GDSVAGVPAGSLLVLNRDDKKIFDAFENAGTPMSDSDAAGFCSQSSVYRPGMDVTKAELVGRTNWRRQEKMENVGEWKARVFEVHNVVFSFRSRKVAAGESDVAGSEQVLPLELDEDEDGFLVAENPSFGMPLSSNNNADKRRHSSFVREEREWVPMGRKSVDLPSVSVAPPRRSSAAAVAPPPAAPPTKEKEYLRSLRPAVWLTEQFPLKTEELLPLLDILANKVKAVRRLRELL

SEQ ID NO: 181648 - protein, 47 aa, Glycine max
  unsure (1)..(47): unsure at all Xaa locations
  Clone ID: PAT_MRT3847_135041C.1.pep
FEXTEPSRTXQTRXSGFSFGESFGRGXGSXATAPTDSLSSVFLHSSG

SEQ ID NO: 181649 - protein, 41 aa, Glycine max
  Clone ID: PAT_MRT3847_135042C.1.pep
TSWVKTRKTVNYLFLHQSEKGFLINYYIKEIHFSFSSITWV

SEQ ID NO: 181650 - protein, 317 aa, Glycine max
  Clone ID: PAT_MRT3847_135043C.1.pep
KLLGSLARVGSEHGMCVLGCPCPGCLDRLLYGRSDGPSIDWNTRMKIAICAAQGLTFLHEEGPFQAMYNEFSTANIQIDKDFSAKLSGYGCVGHIPEEEISSSSSAVGNLSMETLEKGMLTPKSNVWSFGIFLLELLTGRKNLDSRHPKEERNLVKWSRPFLADNYRLSLIMDPQLKGRFPSKAARTIADIAQRCLQKEPSDRPTMRTVVEHLKIIQDLKYSCRFPLQEPASNSGKHMSRSPSLNGIICPAPRLSFSPSPPSGVPVSVSPPRWSGGGPILLPPPRACASSLSLEELDRQESRKSSSSASRRASVEGF

SEQ ID NO: 181651 - protein, 109 aa, Glycine max
  Clone ID: PAT_MRT3847_135044C.1.pep
VRIRWLGLDPALMRSGRLDRKIEFPHPTEEARARILQIHSRKMNVHPDVNFEELARSTDDFNAAQLKAVCVEAGMLALRRDATEVNHEDFNEGIIQVQAKKKASLNYYA

SEQ ID NO: 181652 - protein, 35 aa, Glycine max
  unsure (1)..(35): unsure at all Xaa locations
  Clone ID: PAT_MRT3847_135045C.1.pep
ECSLGLLKFLSFHHRGFFTWFKGILKXSGSSGRSK

SEQ ID NO: 181653 - protein, 343 aa, Glycine max
  unsure (1)..(343): unsure at all Xaa locations
  Clone ID: PAT_MRT3847_135046C.1.pep
MATATSQTLRFQSPSLSLSSKLPLSSAFSVSLRPRHRGSRPLVLVVSAGLDAKPTVLVAEKLGDAGLKLLKDFANVDCSYNLSTEELCTKISLCDALIVRSGTKVSREVFESSAGRLKVVGRAGVGIDNVDLAAATEHGCLVVNAPTANTVAAAEHGIALLAAMARNIAQADASVKAGKWQRNKYVGVSLVGKTLAILGFGKVGSEVARRAKGLGMTVIAHDPYAPADRARAVGVELVTFEEAIATADFISLHMPLTAATSKMLNDETXAKMKKGVRIVNVARGGVIDEDALVKALDSGIVAQAALDVFTEEPPPKDRHRFPAIQWRWIQTIDSLKVEPKQRG

SEQ ID NO: 181654 - protein, 104 aa, Glycine max
  Clone ID: PAT_MRT3847_135047C.1.pep
IILWYLPAVLPQPFHPPLQPLLTHHGAVYLSTATPSCSLLPLAIRPICVDIRCRLLVTIWVLPSLSYTTCYPPVLCHSHRSILLRLALVSFRLSSPNLGLSNVS

SEQ ID NO: 181655 - protein, 264 aa, Glycine max
  Clone ID: PAT_MRT3847_135048C.1.pep
MASTQCFLHHHALTTPASARSPSLRILVSTKPNQLVCKAQKQQTPQEDIDVSPISRRLALTVLIGAAAVGSKVQPADAAYGEAANVFGKPKTDTDFLPYNGDGFKLSIPSKWNPSKEVEYTGQVVRYEDNFDSTTNVVVTITPTDKKSITDYGSPEEFLSKVDYLLGKQAFFGETQAEGGFDPNAVATANILETATPVIDGKPYYFLSVLTRTADGDEGGKHHIIRATVKDGKLFICKAQAGDKRWFKGARRFVESAASSFSVA

SEQ ID NO: 181656 - protein, 594 aa, Glycine max
  Clone ID: PAT_MRT3847_135049C.1.pep
MATATSQTLRFQSPSLSLSSKIPLSAFSVSLRPQRRASRHLVLVVSAGLDAKPTVLVAEKLGDAGLKLLKDFANVDCSYNLSTEELCTKISLCDALIVRSGTKVSREVFESSAGRLKVVGRAGVGIDNVDLAAATEHGCLVVNAPTANTVAAAEHGIALLAAMARNVAQADASVKAGKWQRNKYVGVSLVGKTLAVLGFGKVGSEVARRAKGLGMNVIAHDPYAPADRARAIGVELVNFDEAIATADFISLHMPLTAATSKILNDETFAKMKKGVRIVNVARGGVIDEDALVRALDSGIVAQAALDVFTEEPPPKDSKLILHELVTATPHLGASTMEAQEGVAIEIAEAVVGALKGELAATAVNAPMVPSEVLTELKPFIDLAEKLGRLAVQLVAGGSGVKTVKVTYATSRGPDDLDTRLLRAMITKGLIEPISSVFVNLVNADFTAKQRGIRITEEKVILDGSPENPLEFVQVQIANVESRFASAISDSGEIKVEGRVKDGIPHLTKVGSFDVDVSLEGSIILCRQVDQPGMIGKVGSVLGEENVNVSFMSVGRIAPRKQAVMAIGVDEQPSKESLKKIGDIPAVEEFVFLKL

SEQ ID NO: 181657 - protein, 155 aa, Glycine max
  Clone ID: PAT_MRT3847_13504C.1.pep
VSKEILSGIALQEDSHLALSWLSSEDGFSHSLVRLVYFLCTQQQMIRPMNNRGASYQDDGQPFSRIIQRGATVLRNLSLTSTEDYNFDGLLGSIESLNLLDTEADSLKSMFLAGMASKKEILFGAMMNQSVDAKALSYMCEFSGFAGNTNNDEVY

SEQ ID NO: 181658 - protein, 79 aa, Glycine max
  unsure (1)..(79): unsure at all Xaa locations
  Clone ID: PAT_MRT3847_135050C.1.pep
MKFLTENIEDVPYRLLELVRNKAIEGSQDLSETDDSTINEVTLWYRPQNGSIHPAVDHRTPXVVAATYGDMEAIRWCFC

SEQ ID NO: 181659 - protein, 233 aa, Glycine max
  unsure (1)..(233): unsure at all Xaa locations
  Clone ID: PAT_MRT3847_135051C.1.pep
GNSLDGXIPPSITKCKSLXLLALELNRLEGNIPVDIQELRGLIVIKLGNNFIGGMIPSGFGNVELLELLDLHNLNLVGQIPDDISNCKFLLGLDVSGNKLEGEIPQTLYNLTNLESLNLHHNQLNGSIPPSLGNLSRIQYLDLSHNSLSGPIPPSLGNLNNLTHFDLSFNNLSGRIPDVATIQHFGASAFSNNPFLCGPPLDTPCNRARSSSAPGKAKVLSTSAIVQLYAGMQ

SEQ ID NO: 181660 - protein, 53 aa, Glycine max
  Clone ID: PAT_MRT3847_135052C.1.pep
HNRQPEGTSHLLKAAAIMILSPTFGMTLSMVPAHKGHKNYKTEEGGTHGFHCC

SEQ ID NO: 181661 - protein, 176 aa, Glycine max
  Clone ID: PAT_MRT3847_135053C.1.pep
RTRAESARASVHLTGTIGFFLAWLANFKLLLFAFDMGPLSSHPLISLPRFVAVACFPIKIQQNQPRQNGKTPHPNPSSMIRYAIEGLALGVLLKIYDYSDRIHPKAIMCMYCFHIYFLLEIILAMVAAMARSMMGLELEPQFNDPLSSTSLQDFWGRRWNLMVTSILRPTVYDPTL

SEQ ID NO: 181662 - protein, 68 aa, Glycine max
  Clone ID: PAT_MRT3847_135054C.1.pep
IFCNKFFEEQPLLFAKFEVVLWNKKQLSCFLKLFFQSPLVPQNVIFSNLPDKLFYLSLCFTVCGVKPG

SEQ ID NO: 181663 - protein, 67 aa, Glycine max
  Clone ID: PAT_MRT3847_135055C.1.pep
LCSVPNGKTCSRVCHLIQNHLYVGMLYRCASFSRAVNHNLYSLVCMFLVCASFDPACFFQLGFSIYK

SEQ ID NO: 181664 - protein, 49 aa, Glycine max
  Clone ID: PAT_MRT3847_135056C.1.pep
RSSTRSRADARDLELVLEPVHTSLPYPKKNFQPQVHILPNSHCDRHVYK

SEQ ID NO: 181665 - protein, 84 aa, Glycine max
  Clone ID: PAT_MRT3847_135057C.1.pep
SPFRRPRVPPPLMWFQAPLGPPRLLLSVSRVFFLVTLVPDTLFPSGRALAHSFPQFLRPPFRVKRGPSGHRPQFSGGPPGARQA

SEQ ID NO: 181666 - protein, 79 aa, Glycine max
  Clone ID: PAT_MRT3847_135058C.1.pep
PNLVPVFPLFSGGFSKVKYLWGDFFPPVGIGPPPFFVWVGPPTGKKFFFTDRNPLGAWWVSLTRIPSWARVFPVSGGPL

SEQ ID NO: 181667 - protein, 90 aa, Glycine max
  Clone ID: PAT_MRT3847_135059C.1.pep
VYVELWFVLAGPPRFFLNYRFATPASSASLIFMVSKGMEKKKMENSDPLFFLSQNFISFGLSIYAWHGVSFALPHDGVSYSCNYWGSVVL

SEQ ID NO: 181668 - protein, 78 aa, Glycine max
  Clone ID: PAT_MRT3847_13505C.1.pep
RYRKRSLGWPALLPRDALHPREPAGSIQGGRQFLHPRRKSPLDAKGHAIAHVPYPDSLALPASPQLKNSLSLLGSETN

SEQ ID NO: 181669 - protein, 71 aa, Glycine max
  Clone ID: PAT_MRT3847_135060C.1.pep
KTLNNNNHNHNILKKGEKDRVVRIKEGPAPRMCLMSSAEGEGFPPNTASKYAATTFIFAGLRLRFRFWFWC

SEQ ID NO: 181670 - protein, 57 aa, Glycine max
  Clone ID: PAT_MRT3847_135061C.1.pep
MTVFHFFNCAILTFCPHSVYYSSTPLSEYYTLLTFIKTSCVYLSTAFIKLIYLTTFF

SEQ ID NO: 181671 - protein, 41 aa, Glycine max
  Clone ID: PAT_MRT3847_135062C.1.pep
LADFSTLWDIKATPTFFFLKDGKEVDKLVGANKPELEKKML

SEQ ID NO: 181672 - protein, 54 aa, Glycine max
  Clone ID: PAT_MRT3847_135063C.1.pep
REDDQSTPTDDSYANDSNATDSGDEKDKPAKMESKKDLSSKAFTCKKNSPDYED

SEQ ID NO: 181673 - protein, 89 aa, Glycine max
  Clone ID: PAT_MRT3847_135064C.1.pep
FEAGLFKKYGPLSFLKGHDTGHMVSMDQPKGLLKMLKRWTQGTLLKFATYAEKLVAEVETLLLLQLVQKRDTKVFCNKKKGIKVISMCF

SEQ ID NO: 181674 - protein, 61 aa, Glycine max
  Clone ID: PAT_MRT3847_135065C.1.pep
DISLDVASERLATYLLIMQKYLKVKMEVMPLLNATAYLCYTISASGTQTTKIDKCASWLDC

SEQ ID NO: 181675 - protein, 106 aa, Glycine max
  Clone ID: PAT_MRT3847_135066C.1.pep
RTRERRLSWNRVAIFFLWVILVFSLISLFFSINNESKTRTSHSIPPKRRSFSRALFQRSTTTTSTTQKTKLVVSSKNGDADHDPHTTTLYGDEKRIIHTGPNPLHN

SEQ ID NO: 181676 - protein, 90 aa, Glycine max
  Clone ID: PAT_MRT3847_135067C.1.pep
LVLYNSRYVSQDSIRFQLLPIRIGGCLVFVPESCLNLCIRDESRFPDESRDSSPAAGLAILHPAKTHRRVESLDREDECVSASLFSPDAW

SEQ ID NO: 181677 - protein, 170 aa, Glycine max
  Clone ID: PAT_MRT3847_135068C.1.pep
MQFFGVSEISPSPPAPTASGNNGHMMYVFNRNGVCLLYREWNRPLRTLDAQQDHKLMFGLLFSLKSLTAKMDPTSAVEKGNLGMLQLPGRGCSFHSFCTNTYKLSFMESPSGIKIILVTHPRTGDLRESLKYIYNLYVEYVVKNPLYTPGSPIRCELFNTTLDQYVRGIA

SEQ ID NO: 181678 - protein, 170 aa, Glycine max
  Clone ID: PAT_MRT3847_135069C.1.pep
MQFFGGSEISPSPPAPTASGNNGHMMYVFNRNGVCLLYREWNRPLRTLDAQQDQKLMFGLLFSLKSLTAKMDPTSAVEKGNLGMPQLPGQGCSFHSFRTNTYKLSFMESPSGIKIILVTHPRTGDLRESLKYIYNLYVEYVVKNPLYTPGSPIRCELFNTTLDQYVRGIS

SEQ ID NO: 181679 - protein, 171 aa, Glycine max
  unsure (1)..(171): unsure at all Xaa locations
  Clone ID: PAT_MRT3847_13506C.1.pep
SVTAAKRRQKGGGGDRFKFWEDEWIQGEASLITKYPRLFVVSQQQNQTIQQLGDFKDNEWEWNLSWRRPLFDNEIIMASNFLRDIERNTIQXNRRDEWVWKAYQSGQYTVQSAYKLMTREAVEGERDRAFEELWNLKVPIKVAVFAWRLLRDRLPTKVNLYRRQIEVADRS

SEQ ID NO: 181680 - protein, 433 aa, Glycine max
  unsure (1)..(433): unsure at all Xaa locations
  Clone ID: PAT_MRT3847_135070C.1.pep
FATNNDNNSDDGDKDSNNVGAAGEESGGDDSKSNVTTTMPEEERGFTSQKSTPPSTSQRSSLSSLGPAYNTFQVDSFKLIELLGPEKVDPADVKLIKDKLFGYSTFWVTKEEPFGDLGEGILFIGNLRGKREDVFAKLQNQLVEVTGDKYNLFMVEEPNADSPDPRGGPRVSFGLLRKEVSEPGPMTLWQYVIALLLFLLTIGSSVELGIASQINRLPPEVVKYFTDPDAVEAPDMELLFPFVDSALPLXAYGVLGVLLFHEVGHFLAAFPKQVKLSIPFFIPNITLGSFGAITQFKSILPDRSTQVDISLAGPFAGAVLSFSMFAVGLLLSSNPDITGDLVQVPSLLFQGSLLLGLISRATLGYAAMHAETVPIHPLVIAGWCGLTIQAFNMLPVGCLDGGRAVQGAFGKNALVGFGLTTYTLLGLGVVYLN

SEQ ID NO: 181681 - protein, 83 aa, Glycine max
  unsure (1)..(83): unsure at all Xaa locations
  Clone ID: PAT_MRT3847_135071C.1.pep
XTHLQXQQPWLSKPNYADSAVPXSTPGXGIRFVRGXSQVFLFXNRNXXGXSTXXXSHXSSLXCXXQXATQXGHCQXAXKKRXR

SEQ ID NO: 181682 - protein, 58 aa, Glycine max
  Clone ID: PAT_MRT3847_135072C.1.pep
RVPVQPCYTKACLLSSGQNVVHVTISQYHGLENSDKLDNAVKVSLMYNTRIRQNFSNK

SEQ ID NO: 181683 - protein, 88 aa, Glycine max
  Clone ID: PAT_MRT3847_135073C.1.pep
FTGAKAKIPQFPWEPPPSPPGEGGKPPSPPEPRALPPPDPPPPPPPLRGDPPLQKPPDSAAPPPPPNPPVPGVDPPPLSKPPASPPPR

SEQ ID NO: 181684 - protein, 48 aa, Glycine max
  Clone ID: PAT_MRT3847_135074C.1.pep
KPGKFCYGVIFDITVQNETSLLCIDVFQHMPDKYGSASLARSNENFIC

SEQ ID NO: 181685 - protein, 46 aa, Glycine max
  Clone ID: PAT_MRT3847_135075C.1.pep
VLLLYCQANFGFCFNYLSNVINMLLSYFKHYVELYLCKHLTKQCTI

SEQ ID NO: 181686 - protein, 310 aa, Glycine max
  Clone ID: PAT_MRT3847_135076C.1.pep
MASKLCDSCKSATATLYCRPDAAFLCGACDSKVHAANKLASRHPRVVLCEVCEQAPAHVTCKADAAALCLACDRDIHSANPLASRHERIPVTPFFESVHSVKASSPINFHHRFFSDADADADVSTEEAEAASWLLPNPKTDLNSSQYLFSETEPVPYIDLDYAAMDPKTEQKSSATADGVVPVQSNFEPFTYGYKYNTTLSQSQSHMSQSVSSPSSMEVGVVPDGNTMSEISNCSYSKVAPVTVTAQFSAADREARVLRYREKRKNRKFEKTIRYASRKAYAETRPRIKGRFAKRTDADPLAGYGVVPSC

SEQ ID NO: 181687 - protein, 81 aa, Glycine max
  Clone ID: PAT_MRT3847_135077C.1.pep
IFMEKFMPTRSRQILHFLYMLMLDYFLLFKFFHSFFATEGNSLPPYEAPEYPKFLSIEVSRSTQSTRESTTTNSPRTVVIK

SEQ ID NO: 181688 - protein, 75 aa, Glycine max
  unsure (1)..(75): unsure at all Xaa locations
  Clone ID: PAT_MRT3847_135078C.1.pep
DLATMYKDERRAKLKIYPILQAECLDRTLRKPXMDAPAQELLPHHHAHFAHNATVTGPRRRLSSRLRRPIHTLDE

SEQ ID NO: 181689 - protein, 54 aa, Glycine max
  Clone ID: PAT_MRT3847_135079C.1.pep
SIEITKLAEINRYVCELVAVGVYVTCLLCFVKIYVAICHRNADNYAHIGITLCY

SEQ ID NO: 181690 - protein, 77 aa, Glycine max
  unsure (1)..(77): unsure at all Xaa locations
  Clone ID: PAT_MRT3847_13507C.1.pep
INSNIKGFNLNFSPHTFNINIIISLSQNVIKYYYKXNTLXNKIPLLLQINPFHNNIPFLIHNFIPIYKSLITIHYIY

SEQ ID NO: 181691 - protein, 128 aa, Glycine max
  Clone ID: PAT_MRT3847_135080C.1.pep
KKKKGRTPPTTKERDRKKRQRKRRKRKKRQRGKHRGDQQQHRRRKGEQKRTRRRKKGQRQQHQARKAQAQRGQPKTRRAQKGKKPGKTGAQTSGQQNQSKATENSPEAKGNRENTKEPRPKQAKTRRK

SEQ ID NO: 181692 - protein, 70 aa, Glycine max
  Clone ID: PAT_MRT3847_135081C.1.pep
RRDTDYNLVMKPPGSYPPANSPPQYKPTINELKPPFYNSPPPLYKPPYMNPPYKKPPYGNFPSFVNNTHS

SEQ ID NO: 181693 - protein, 132 aa, Glycine max
  unsure (1)..(132): unsure at all Xaa locations
  Clone ID: PAT_MRT3847_135082C.1.pep
RVDLLELADCCKAKRLHLIYDKREHPRQSLLQHNLGEFQGPALVAIFECACLSREEFSNFQLRPPWRLRGNTINXGLGLVCCYSICDLLSVISGGYFYMFDPRGXVLGAPSTNPPSAKMFSLIGILCIPQPN

SEQ ID NO: 181694 - protein, 82 aa, Glycine max
  Clone ID: PAT_MRT3847_135083C.1.pep
PNPQFLSCFSPWFFIGFYLCYVLTPALLLNIMHCFRCCRFVWPCSTLVNPICIVKYFNKLYFAVMLNLSYFSILCPNIHSSL

SEQ ID NO: 181695 - protein, 141 aa, Glycine max
  Clone ID: PAT_MRT3847_135084C.1.pep
KHSLPFLPPLALPSFIFFLFLLLVCLFLLLYVLLCSLLPHLVHAVFYFSLGLITGFDTSVVVSHFRRITHWHNIELVKSKKKKVKCFEIWHVILFSLALISLWGCVCARVTDIPALLPLFCVAQKQNNNHQKKKYIYIPPK

SEQ ID NO: 181696 - protein, 82 aa, Glycine max
  Clone ID: PAT_MRT3847_135085C.1.pep
APFLVDKKKLRHKINLSPPFSLNFCGPTPKLFLCVCPPKVKNKKSQFLFGGPLQKKKKKKKKKKKKKKKKKQKKKKKKKKRE

SEQ ID NO: 181697 - protein, 269 aa, Glycine max
  Clone ID: PAT_MRT3847_135086C.1.pep
MHPWVFMILALFSLSTLSSREAREGLRGFSVDLIHRDSPSSPFYNPSLTPSERIINAALRSMSRLQRVSHFLDENKLPESLLIPDKGEYLMRFYIGSPPVERLAMVDTGSSLIWLQCSPCHNCFPQETPLFEPLKSSTYKYATCDSQPCTLLQPSQRDCGKLGQCIYGCMYDDKSFSVGILGTETLSFGSTGGAQTVSFPNTIFGCGVDNNFTIYTSNKVMGIAGLGAGPLSLVSQLGAQIGHKFSYCLLPYDSTSTSKLTFVSEAIIT

SEQ ID NO: 181698 - protein, 74 aa, Glycine max
  Clone ID: PAT_MRT3847_135087C.1.pep
SGWICVLLIDYLQYLQKYIPQEPCDMQDQASFYEPDSERDSYMNRTPLHSRYEPPRIRSMKPLSSINNYLFQIR

SEQ ID NO: 181699 - protein, 57 aa, Glycine max
  Clone ID: PAT_MRT3847_135088C.1.pep
YLFFPHKLQTNTKNYFLKLLKKIHPKETPNEIQTKLSNTTKINMKHKIKPIPNHNKN

SEQ ID NO: 181700 - protein, 128 aa, Glycine max
  Clone ID: PAT_MRT3847_135089C.1.pep
PIVKLNSARSCIAPSLKGQVLSRVIFSLLLTIPIRYVAVRPGARCSQFLPSFIVEYDCLLTPIYCRFALFWSLGRCHTPTPHPTPISSTFSYPHPHTLSPPYTLFIPYFAYPILSNFFVFHPPPPPKQ

SEQ ID NO: 181701 - protein, 56 aa, Glycine max
  unsure (1)..(56): unsure at all Xaa locations
  Clone ID: PAT_MRT3847_13508C.1.pep
QRDSSYMCXYIFIACKHQNSTLLISMITYQQSKNSTVHLDCKRFLYCSRDNLSCEV

SEQ ID NO: 181702 - protein, 60 aa, Glycine max
  Clone ID: PAT_MRT3847_135090C.1.pep
NCIAICVCAMCSPPKHSLSRPLLRSSIALALRPKRSVLLLTYMAVVIVTVTHLVITKTRL

SEQ ID NO: 181703 - protein, 47 aa, Glycine max
  Clone ID: PAT_MRT3847_135091C.1.pep
ILLGLVVEIFFLNPWIYINMKFLLKSISMTSFFHLYTEPWSLSLYII

SEQ ID NO: 181704 - protein, 74 aa, Glycine max
  Clone ID: PAT_MRT3847_135092C.1.pep
PPRPAGRRPQKGVVLTFKALAQCSLRVNPSRRQRKKSPRPQPPPMRKKTQGFRSPVVIKNPKHPARATQRCSYF

SEQ ID NO: 181705 - protein, 493 aa, Glycine max
  Clone ID: PAT_MRT3847_135093C.1.pep
MTRMTHDFGDTMQKDAVPVVSADVIFASLRFPNYKIGVNNQIMETKDDPKVLSMKEVVARETAQLLDQQKRMSVRDLASKFEKGLAAAAKLSEEARLREAASLEKHVLLKKLRDALQSLKGRVAGRNKDDVAEAIAMVEALAVQLTQREGELIQEKSEVKKLTNFLKQASEDAKKLVNEERAFARFEIENARAAVQRVEEALQEHERMSQASGKQDLEQLMKEVQEARRIKMLHQPSKVMDMEHELRALRAQLAEKSRLYLRLQKELARTKKGEENAPHLYELEGTETLGSYLQIQPCSDNGPELSECSIQWYRVSSEGAKKELISGATKSVYAPEPFDVGRVLQVDIISEGQQITLSTTGPIDPAAGLGTYVEALVRKHDTEFNVVVTQTVSDHPNESIHVLHVGKMRMKLCKGNTTIAKEYYSSSMQLCGVRGGGNAAAQAVFWQPKQGLSFVLAFESERERNAAIMLARRFAFDCNIILAGPDHKAPLET

SEQ ID NO: 181706 - protein, 80 aa, Glycine max
  Clone ID: PAT_MRT3847_135094C.1.pep
SIKKAPYSFLKTKSITPPVSPSPRVPIILHSFLVTVDPASDNEGNFSENGGIHHTPLDTIVPGGTRVVLMGNERRFSIAA

SEQ ID NO: 181707 - protein, 183 aa, Glycine max
  Clone ID: PAT_MRT3847_135095C.1.pep
IICPHNFDILCTHPMFGPESGKNGWNGLAFVYDKVRLGVDESRTSRCDQFLDIFASEGCRMVEMSCAEHDWHAAGSQFITHTTGRFLEKLELEGTPIDTKGYETLLSLVENTAGDSFDLYYGLFLYNINAMEQLERFDLAFESVKKELFDRLHGFYRQQVFKHEEKLHDLPERPMLSKISEDK

SEQ ID NO: 181708 - protein, 61 aa, Glycine max
  unsure (1)..(61): unsure at all Xaa locations
  Clone ID: PAT_MRT3847_135096C.1.pep
GSEXXKKGVYLKKGKTAILFSGFGSFVRQFPRFKGKKKNGVGEGPPLGALFLLNKLGYVRD

SEQ ID NO: 181709 - protein, 348 aa, Glycine max
  unsure (1)..(348): unsure at all Xaa locations
  Clone ID: PAT_MRT3847_135097C.1.pep
RVLALQRSYHGDTLGAMEAQAPSSYTGFLQQPWYTGRGLFLDPPSVFMHNSTWNVSIPEGYHLESLKGKSITFASPDEIFHKGRDKSELATVYSSYISKVLSGFXGSDNVGALIMEPVIQGAGGMHMVDPLFQRVLVNECRSRKIPVIFDEVFTGFWRLGVETAVELIHCVPDIACFGKLLTGGIIPLAVTLATNAVFDSFIGDSKLKALLHGHSYSAHAMGCAAAVKSIQWFKDPCSNPNITSEGRLLRELWDDKMVHRISSHPAIQRVVALGTLCALELKAEGNNAGYGSLYARPLLEKLREDGVYMRPLGNVIYLLCGPCTSPEVCNQLLVKLLRRLEEFDVGKN

SEQ ID NO: 181710 - protein, 96 aa, Glycine max
  Clone ID: PAT_MRT3847_135098C.1.pep
RSSLRSRISSIEGNKLSSFKNCKITPALSSLKTSRSFGANRVLTTALHQKETNSLVSSGQSMDKWGITTSKNDHSIDSSDNQKSSTPFLKRKTIEV

SEQ ID NO: 181711 - protein, 379 aa, Glycine max
  unsure (1)..(379): unsure at all Xaa locations
  Clone ID: PAT_MRT3847_135099C.1.pep
MSHRKFEHPRHGSXGFLPRKRAARHRGKVKAFPKDDPSKAPKLTAFLGYKAGMTHIVREVEKPVTIIETPPMVIVGVVGYVKTPRGLRTLNTVWAQHLSEELKRRFYKNWCKSKKKAFTKYSKQYETEEGKKNIEAQLEKLKKYATVVRVLAHTQIRKMKGLKQKKAHIMEIQVNXGGTIAQKVDFAYSFFEKQVPIDAVFQKDEMIDIIGVTKGKGYEGVVTRWGVTRLPRKTHRGLRKVACIGAXWHPARVSFTVARAGQNGYHHRTELNKKVYKLGKAGDESHSALTEFDRTEKDITPIGGFPHYGVVKDDYIMVKGCCVGPKKRVITLRQSLLKQTSRVALEEIKLKFIDTSSKFGHGRFQTTQEKQKFFGRLKA

SEQ ID NO: 181712 - protein, 67 aa, Glycine max
  Clone ID: PAT_MRT3847_13509C.1.pep
CARCSQCILMSLMFQGSVTMSPENNLCCVLMLSLCPINTGAQVPLRRWLCLLLIWMVELAKSQKKTQ

SEQ ID NO: 181713 - protein, 86 aa, Glycine max
  Clone ID: PAT_MRT3847_1350C.1.pep
KKIAINDYADCANNLENWIKVCMFLFPRGRSLNKTTAPCPPIMLTFDYFHKCIFLSSYLFIYYYTSKRRALRSSSRSRTRADSARV

SEQ ID NO: 181714 - protein, 35 aa, Glycine max
  unsure (1)..(35): unsure at all Xaa locations
  Clone ID: PAT_MRT3847_135100C.1.pep
WSSTSTFTTPSCIKWSSSSFILANVWSNTCTXITS

SEQ ID NO: 181715 - protein, 389 aa, Glycine max
  Clone ID: PAT_MRT3847_135101C.1.pep
MSHRKFEHPRHGSLGFLPRKRAARHRGKVKAFPKDDPSKAPKLTAFLGYKAGMTHIVREVEKPGSKLHKKETCEPVTIIETPPMVIVGVVGYVKTPRGLRTLNTVWAQHLSEELKRRFYKNWCKSKKKAFTKYSKQYETEEGKKNIEAQLEKLKKYATVVRVLAHTQIRKMKGLKQKKAHIMEIQVNGGTIAQKVDFAYSFFEKQVPIDAVFQKDEMIDIIGVTKGKGYEGVVTRWGVTRLPRKTHRGLRKVACIGAWHPARVSFTVARAGQNGYHHRTELNKKVYKLGKAGDESHSALTEFDRTEKDITPIGGFPHYGVVKDDYIMVKGCCVGPKKRVITLRQSLLKQTSRVALEEIKLKFIDTSSKFGHGRFQTTQEKQKFFGRLKA

SEQ ID NO: 181716 - protein, 226 aa, Glycine max
  unsure (1)..(226): unsure at all Xaa locations
  Clone ID: PAT_MRT3847_135102C.1.pep
ILQIRKMKGLKQKKAHIMEIQVYGGSIAQKVDFAYSFFEKQVPIDAVFQKDEMIDIIGVTKGKGYEGVVTRWGVTRLPRKTHRGLRKVACIGAWHPARVSFTVARAGQNGYHHRTELNKKVYKLGKAGDESHSALTEFDRTEKDITPMGGFPHYGVVKDDFIMVKGCCVGPKKRVITLRQSLLKQTSRVALEEIKLKFIDTSSKFGXHGRFQTTQEKQKFFGRLKA

SEQ ID NO: 181717 - protein, 124 aa, Glycine max
  Clone ID: PAT_MRT3847_135103C.1.pep
LFFVISNYQLSNDQSPYMPAIEFESEECIINPDLHYISPQGISLVEDHNSDIHDNQPDGDTDTAVSLPNVVTHKDLDCLGVEFKDDNIILDDCSSNEFTTGAEDQVECSSTMEHDCSNDEITSW

SEQ ID NO: 181718 - protein, 77 aa, Glycine max
  Clone ID: PAT_MRT3847_135104C.1.pep
PYVVVSFCFPNTHTPRTTTNTTAGLMLKKNQPQPTMLHCLNTSGNLRATLSDMTVLGRQREATMKWQLHLQNNQTPL

SEQ ID NO: 181719 - protein, 40 aa, Glycine max
  Clone ID: PAT_MRT3847_135105C.1.pep
SPNSNAYSYLLFQIKSLVLLLGYALDCPLLNTKCIYLPNT

SEQ ID NO: 181720 - protein, 106 aa, Glycine max
  unsure (1)..(106): unsure at all Xaa locations
  Clone ID: PAT_MRT3847_135106C.1.pep
QNPHFMRLIQEQPGGFLCLNKEPVEGGEGKILGQVGRANPPTGAVPPXGRPANERFETKGFGWATGMEGDFAWNQKEEVGGHYPFGSKAEVEEKIDFPFQLAKKVV

SEQ ID NO: 181721 - protein, 104 aa, Glycine max
  unsure (1)..(104): unsure at all Xaa locations
  Clone ID: PAT_MRT3847_135107C.1.pep
MERYKLIKEIGDGTFGTVWRAINKQTGEXVVAIKKMNHPNNSKLKEVNLISDKSYXKFNHMNIVKLKVVKDKSDMFYEAEVDMEFNLYQLMKDREKLXSEAEDR

SEQ ID NO: 181722 - protein, 91 aa, Glycine max
  unsure (1)..(91): unsure at all Xaa locations
  Clone ID: PAT_MRT3847_135108C.1.pep
XXHQXLXEAXXGGSQXXRXXDXXXPXAXPTLAPDLIXXXXARNKXLGXVPCTLXLCXXGXGXXXXXXXXFXXXXXXXXRAEFRAYVXMXAX

SEQ ID NO: 181723 - protein, 161 aa, Glycine max
  unsure (1)..(161): unsure at all Xaa locations
  Clone ID: PAT_MRT3847_135109C.1.pep
MERYKLIKEVGDGTFGSVWRAINKQTGEVVAIKKMKKKYYSWEECVNLREVKSLRKMNHPNIVKLKEVIRESDISYFVFEYMECNLYQLMKDREKLFSEGEVRNWCFQVFQGLAYMHQRGYFHRELKPENXLLPQILSTIADFGLTREISXQPPYTEYVSH

SEQ ID NO: 181724 - protein, 95 aa, Glycine max
  unsure (1)..(95): unsure at all Xaa locations
  Clone ID: PAT_MRT3847_13510C.1.pep
HTQLSFVVLYVSFLNSHHISVQVPLSFYVECRHFLKFXFXPLXXXXCXFFFLYIIYILKSSLLKFITISNFSPIHTINFTYLNPFNSIYIAQIND

SEQ ID NO: 181725 - protein, 93 aa, Glycine max
  unsure (1)..(93): unsure at all Xaa locations
  Clone ID: PAT_MRT3847_135110C.1.pep
EGITAAYDTLSIGSKYLEYGTTRADYHVHRDSTLKLELQLRSGMXFFVRTLXGFSITLVVDSSDINEKLNANIQRQEGIPSDQQKRIFAGMHM

SEQ ID NO: 181726 - protein, 83 aa, Glycine max
  Clone ID: PAT_MRT3847_135111C.1.pep
RPRSLPDKGGLYWFYSRGPTTFLTTILVCLGGPPPLPQVFRRYRFCLWGRSRGGSGAAIRIIFISGGALFMSSIGIFCEAVFF

SEQ ID NO: 181727 - protein, 54 aa, Glycine max
  Clone ID: PAT_MRT3847_135112C.1.pep
KYEMCGINDKWLMLFARSRTGQLFRVDLACVCNYYVGTCSDLVMHIKLSGRVLL

SEQ ID NO: 181728 - protein, 107 aa, Glycine max
  unsure (1)..(107): unsure at all Xaa locations
  Clone ID: PAT_MRT3847_135113C.1.pep
LSSTNFLSGSLPGGSSSSGLLALQGSHFSEGNLFDGVLPADLWPMPRLHFLDVSSNNLTGTLPNFTSWNVSSXVXVFNLSNNLFYGLLNTSLDRFEIIDLSSNYLXR

SEQ ID NO: 181729 - protein, 75 aa, Glycine max
  unsure (1)..(75): unsure at all Xaa locations
  Clone ID: PAT_MRT3847_135114C.1.pep
SATLRLGGRAPVPSAGLCTSLERQSQYVSSVEKGSGCGVVFYNRRDFQIVDVFQCLAQVIRKPXFIKSESGAVRL

SEQ ID NO: 181730 - protein, 84 aa, Glycine max
  unsure (1)..(84): unsure at all Xaa locations
  Clone ID: PAT_MRT3847_135115C.1.pep
VPKXXXNENYXXXXGXXRRXRIPSXASTRTXPNIXGXATRTIISFXVXXISLDGXLXRRHFFFPVQXPHXXXIXHIAGSEPPXL

SEQ ID NO: 181731 - protein, 120 aa, Glycine max
  Clone ID: PAT_MRT3847_135116C.1.pep
NKRANKGKKKKGRPPKKKRFLGDFSGGKGKKNGEKRSGPKPGARNLKRGKAPPGGGALRNSGEKKSEPFPKTSQQRNIQKSGKKPKGKKPTTRSGKPKTPKRVKNWGPRELAKGGPKKGY

SEQ ID NO: 181732 - protein, 92 aa, Glycine max
  unsure (1)..(92): unsure at all Xaa locations
  Clone ID: PAT_MRT3847_135117C.1.pep
VSLRQLLXSSQLRXXPXTHQVXHXKNALQLQIXPQPXPLXPXXHVXSSXSXRXCEGAAAXGVXTDPDSXRFGLFXXXFFSPIXLNXLXXXKV

SEQ ID NO: 181733 - protein, 70 aa, Glycine max
  Clone ID: PAT_MRT3847_135118C.1.pep
CSSHQSFCYSLQWNYTSFIMLSYNGISKIIVRNTCSVNGMVILGNIYINMMYYIISIYLLILTFGLHMSV

SEQ ID NO: 181734 - protein, 119 aa, Glycine max
  unsure (1)..(119): unsure at all Xaa locations
  Clone ID: PAT_MRT3847_135119C.1.pep
DKVKIKINKFKRINHLVARMALQRDNIKLITINNPFITTNYITYIFKYDNVHKHXKHHNITIKDEKTLLLHNKPVTIFKHRNPKEIPXKINXTNIIIKSHEVFTNKRQTTTHLKISTKK

SEQ ID NO: 181735 - protein, 74 aa, Glycine max
  Clone ID: PAT_MRT3847_13511C.1.pep
LLHHKNEIFFSTSVRYFLQHSAKSYLYFDLFLHTLHTFVTVFHFYLDFPVYILLIFISNLFHSFIIIFTIILHF

SEQ ID NO: 181736 - protein, 122 aa, Glycine max
  Clone ID: PAT_MRT3847_135120C.1.pep
SFLFSLTLTLSSFPFSVFSHAPRRTTIYSLRREPHPTPTLSSLRCDPPHSPSSPSFSSTTCRDRFGAQQPKSVFFFVCLILISFLLGSVLHLLSSLSLQFFVFCFPRVRDEKYYFIEKQCGC

SEQ ID NO: 181737 - protein, 60 aa, Glycine max
  unsure (1)..(60): unsure at all Xaa locations
  Clone ID: PAT_MRT3847_135121C.1.pep
XHLFPXWPSXXNXNXFPSLSTILNCSWNHRNSKPXPAMTQITXHXXKXQYLVFSRVSPNL

SEQ ID NO: 181738 - protein, 44 aa, Glycine max
  Clone ID: PAT_MRT3847_135122C.1.pep
LVTTTNYRYYQHYFTSVHASEQGVNELTCPKQLFHQHSSIELSK

SEQ ID NO: 181739 - protein, 344 aa, Glycine max
  unsure (1)..(344): unsure at all Xaa locations
  Clone ID: PAT_MRT3847_135123C.1.pep
RKFFSWLLVNNSNLEEVDLFHNSFSGPFELPFDLNHHMDKIKTLSLSNNQMQGKLPDNIGSFFPHLVNFDVSNNNFDGHIPASIGEMSSLQGLYMGNNNFSGNVPNHILDGCFSLKTLMMDSNQLNGTLLSVIRKLRLVTLTASRNNFEGAITDEWCQHNLVMLDLSHNKFSGTIPSCFEMPAYLFLQGNSLTGTIPEALISNYSRPTAIDFSDNKFIGTIPDSIIXLWSLRFLLLAGNQLQGQLSSQVCQLEQINILDLSRNNFTGSIPPCFSSMSFGNFTIPLYSLDRLKPFSPRPDVAEMQLTTKNLYLSFKSDKFQMMSGLDLSSNQLTGEIPHQIGDLH

SEQ ID NO: 181740 - protein, 102 aa, Glycine max
  Clone ID: PAT_MRT3847_135124C.1.pep
GENTIEKNSRCLCPLAFPLFRFCHHRSETSTFSSVSESLLSRYTRSQSHLNKKNMAIMVMVGLGLLDFLVAGVSLIIGLGFIAFIASILCATAFFNNAKDVS

SEQ ID NO: 181741 - protein, 110 aa, Glycine max
  Clone ID: PAT_MRT3847_135125C.1.pep
TAARRRQRTEKTQSRKLRCLCLLAFPLFRFCHHRSETSTFSSVSESLLSRYTPSQSHLNKKNMAIMVMVGLGLLDFLVAGVSLIIGLGFIAFIASILCATAFFNNAKDVS

SEQ ID NO: 181742 - protein, 48 aa, Glycine max
  Clone ID: PAT_MRT3847_135126C.1.pep
NTNVVLAHIDCLANAEHIPMYWLDRSLFIYGIIDYLPSIKDAVSVNDV

SEQ ID NO: 181743 - protein, 61 aa, Glycine max
  Clone ID: PAT_MRT3847_135127C.1.pep
AFILLGYVQWIWPHIKLKKVLNYTNGRGIGKWYRLQIGWLNYLSLFYVHTRYNMTFKSGGM

SEQ ID NO: 181744 - protein, 398 aa, Glycine max
  Clone ID: PAT_MRT3847_135128C.1.pep
RSIFRETRGKLAHSCQAYPAFETEFKKCVHERETIDEFESYWHSLLERFYVMDNEWLQSIYNSRQHWVPVYLRETFFGEISLNEGNEYLISFFDGYVFSSTTLQVSLRHYEKAGSSWHEKELKADYDTTNSSPVLKTPSPMEKQAASLYTRKIFMKFQEELVETLANPAIKIDDSGTITTYRVAKFGENQKSHVVTFNSFEMKASCSCQMFEFSGIICRHILSVFRAKNVLTLPSQYVLTCWTRNAKTGTLLDEHASELPSTSRESVPVCYNNLRQEAIKYVEEGAKSIQIYHVAMRALKEAAKKVCTIKNQSSGTAEGATATNGSRGELLVADEDVPSNQSVAEKQKKIGELTAELEATNQRCEVYRANLLAVLKDMEEQKLKLSVKVQNARLSLKE

SEQ ID NO: 181745 - protein, 175 aa, Glycine max
  Clone ID: PAT_MRT3847_135129C.1.pep
IRLEKNVLTLPSHYVLTRWTRNAKTSTLLDEHASELPSTSCESVIVRYNNLRQEAIKYVEEGAKSIQVYHVAMRALQEAAKKVCAIKNHSSGTAEGATVTNGSRGELLVADEDAPSNQSVAEKEKKIRELTAELEVTNQRCEVYRANLLTVLKDMEEQKLKLSVKVQNARFSLKE

SEQ ID NO: 181746 - protein, 169 aa, Glycine max
  unsure (1)..(169): unsure at all Xaa locations
  Clone ID: PAT_MRT3847_13512C.1.pep
MESILGRALEYTLKYWLKSFSREQFKLQGRTVHLSNLDIDGDALHSSVGLPPALNVATAKVGKLEITLPSVSNVQTEPIVVHIDRLDLVLEENSDSDESLSSNCSXDAVCLAKGSXYALADKIADGMTIQIQTANLLLETRGGSRRQAGATWAPPMASITIRNALLYTT

SEQ ID NO: 181747 - protein, 49 aa, Glycine max
  Clone ID: PAT_MRT3847_135130C.1.pep
GSRQATGGGVRNVRARETMGRGVRDDTGSDHCHPCREPTDRTDPSVRGD

SEQ ID NO: 181748 - protein, 143 aa, Glycine max
  unsure (1)..(143): unsure at all Xaa locations
  Clone ID: PAT_MRT3847_135131C.1.pep
MPPSLSFRSSPVREPRSDSHKRGRSLESGLPSREKDDDLALFSEMQSREEESFLLQPSDDLEDSFSSKLRDFPDIKLGISIPGRGETSELLNADGDENDYDWLLTPPDXPLFPSLDDEPRELNGVSRGRPRSKPISISRSSTT

SEQ ID NO: 181749 - protein, 221 aa, Glycine max
  Clone ID: PAT_MRT3847_135132C.1.pep
MSLMSLLPPLAAASYTNTVPKLKTHSPNLVLGQRVLPNLLSLALAVTLASPLPSYAIPSLNSQSPPISFTTPFSQSKNLELGLENGKIRPCPSINPGCISTNPKSSSFAFPWLIPSNSLDDAIQKLREAILKTQKNVKFQPVEDSPDGQYLQAEVDGGFGRDVIEFLVKGDVVAYRCVAMKVTYVYPFTTALGDSKGQEARLKQINDHLGWYAPSFDSMEE

SEQ ID NO: 181750 - protein, 119 aa, Glycine max
  Clone ID: PAT_MRT3847_135133C.1.pep
NSTYSRGHLRQQWVFTTIWLPLKVAIIPALFDIPVLITFTTAVKASVRTPYRHMSDMEVDESRLSNWTDTAIGALARPTCTTDHCGSVKESIATCDAHWPSLLPWSSCAQLTPQLHDRS

SEQ ID NO: 181751 - protein, 81 aa, Glycine max
  unsure (1)..(81): unsure at all Xaa locations
  Clone ID: PAT_MRT3847_135134C.1.pep
GSGTSGQVYTGGVKKANPFFIXQDRQSLNKLVSGNPNSFRKPVQTFLEPNGRGYWEISEKKIQKPRQLYSKVEPKINGIDP

SEQ ID NO: 181752 - protein, 93 aa, Glycine max
  unsure (1)..(93): unsure at all Xaa locations
  Clone ID: PAT_MRT3847_135135C.1.pep
LSHHPVNTYMPRHXIAPYHVHITGWAYSSFGELHAPYQDELTYASXKNLHSYSSSPSATYEDLKNIHEAQVYSCHMNAQTMSGVNRSGRHDEY

SEQ ID NO: 181753 - protein, 225 aa, Glycine max
  Clone ID: PAT_MRT3847_135136C.1.pep
SVGVDIKPYANMLVRLLFPVVKEERSTAAKRAFASACAKVLKHIPASQAQKLIEDTTALHAGDKNSQIACAFLLKSYSSMAADVVGGYHAVIIPVVFLSRFEDDKNVSSLFEELWEEYTSGERITLHLYLGEIVSLICEGMSSSSWASKRKSAEAICRLSEVLGESLSSHHEVLLQSLMKEIPGRLWEGKEMLLLAVGALCTSCHKAILTQGSSSSIAILNLVSS

SEQ ID NO: 181754 - protein, 216 aa, Glycine max
  Clone ID: PAT_MRT3847_135137C.1.pep
MADEVVLLDFWPSPFGMRVRIALAEKGIKYEYKEEDLRNKSPLLLQMNPVHKKIPVLIHNGKPICESLIAVQYIEEVWNDRNPLLPSDPYQRAQARFWADYVDNKIYDLGRKIWTSKGEEKEAAKKEFIEALKLLEEQLGDKTYFGGDDLGFVDIALIPFDTWFKTFGSLNIESECPKFVAWAKRCLQKDSVAKSLPDQHKVYEFIMDIRKKFDIE

SEQ ID NO: 181755 - protein, 229 aa, Glycine max
  unsure (1)..(229): unsure at all Xaa locations
  Clone ID: PAT_MRT3847_135138C.1.pep
RVRGLLRFEAETRPEKLWVGPGSKAAEEKEFFDSHLAPFYRIEQLIIATIPESKHGKPPSIITEENIELLFEIQEKVDGIRANYSGLLVSLSDICLKPLGDDCASQSILQYFQMDPDNYDXLRRCXHAEYWFQHYTSTETCFSAFKAPLEPTTALXGXSGNNYSEASAFVITYPVNNAITKVGDENGKAIAXGKAFIQLAKEELLPMVQSNNLTLSFSTESSIEEELKR

SEQ ID NO: 181756 - protein, 219 aa, Glycine max
  Clone ID: PAT_MRT3847_135139C.1.pep
MAHEADLLYLWPSPFGMRVRIALAEKGIKYEYKEEDLRNKSPLLLQMNPVHKKIPVLIHNGKPICESLIAVQYIEEVWNDRNPLLPSDPYQRAQARFWADYVDKKIYDLGRKIWTSKGEEKEAAKKEFIEALKLLEEQLGDKTYFGGDNLGFVDIALVPFYTWFKAYETFGTLNIESECPKFIAWAKRCLQKESVAKSLPDQQKVYEFIMDLRKKLGIE

SEQ ID NO: 181757 - protein, 359 aa, Glycine max
  Clone ID: PAT_MRT3847_13513C.1.pep
ITSPKAILIEQRSIKKLLDKLGPNDLPKKKILRYLLYLLKKHGKLMVGEHVEEVYSRSEEQAATENSNHDSLRSHHVDSDTILKYGQYKTHTNELSGVAPLEEYKCPISSRLMYDPVIIDSGVTYERMWIKKWFDEGNDICPKTRKKLVHMGLTPNMAMKDLISKWCRNNGVSIPDPSRHAEDICAWEASNTSISSLRSYFNDFTAPVDLSSMSIGPLDTSFSLDASHGKTTRGSNLMQTKSRDNSHKHQAHTEIHDTDLMLLPQLCDLQWDSQCKVIQDLKDNLKSNSQAFVSVSAENFIEPLVRFLSNAYDLRDIKALRAGTQLMLEFVNNCRNGTTNLNEDTFIMLASFLNSNVIG

SEQ ID NO: 181758 - protein, 77 aa, Glycine max
  Clone ID: PAT_MRT3847_135140C.1.pep
GSLGCIIILPIIPSLPFCFFLSIIDFCQVFQKADLRNNNLHEVFVEEDTIATCHMPSDQVNVTYDVNYSTSISLLIS

SEQ ID NO: 181759 - protein, 100 aa, Glycine max
  Clone ID: PAT_MRT3847_135141C.1.pep
MTDEVVLLDFWPSPFGMRVRIALAEKGIEYEYKDEDLRNKSPLLLQMNPVHKKIPVLIHNGKPISESLIAVQYIDEVWHDRNPLLPSDPYQRAHAKFWAD

SEQ ID NO: 181760 - protein, 150 aa, Glycine max
  unsure (1)..(150): unsure at all Xaa locations
  Clone ID: PAT_MRT3847_135142C.1.pep
MADEVVLLDFWPSPFGMRVRIALAEKGIKYESKEEDLQNKSPLLLKMNPVHKKIPVLIHNGKPICESLVAVQYIEEVWNDRNPLLPSDPYQRAQARFWADYVDNKIFDLGRKIWTSKGEEKETAKKDFIXTLKLLGKQLGNETYVKKNDL

SEQ ID NO: 181761 - protein, 48 aa, Glycine max
  Clone ID: PAT_MRT3847_135143C.1.pep
LQNNQISERRGIKKGEQQRKFQEKRQKPKKVASQLMLLACSYWANPSI

SEQ ID NO: 181762 - protein, 64 aa, Glycine max
  Clone ID: PAT_MRT3847_135144C.1.pep
VLNIYAMVTSIDILGTIWALTFAFLISLFQAHQLRAYDHRLHVLKCQPGERHIIYIVSGRSGFN

SEQ ID NO: 181763 - protein, 183 aa, Glycine max
  unsure (1)..(183): unsure at all Xaa locations
  Clone ID: PAT_MRT3847_135145C.1.pep
MISVGLWHLLQIFTCFLLLTQSFSKDDRKTYIVYMGDYPKGVGFAESLHTSMVESVLGRNFPPDALLHSYKSLNGFVARLTKEEANRMRGMDSVVSVIPDRIHKPQTTRSWDFLGFPENVQRNIIAESNTIVGVIDSGIWPESDSFNDAGFGPPPKKWKGICQNFTCNNKIIXAQYFRTKGFF

SEQ ID NO: 181764 - protein, 73 aa, Glycine max
  Clone ID: PAT_MRT3847_135146C.1.pep
VSQWGFDDPFIFFITKVSRLESGFLVKHGYCPLVASLVIKGLRLYFFVSMFFNFLAGMDFPPPPFHLFGGYQL

SEQ ID NO: 181765 - protein, 88 aa, Glycine max
  Clone ID: PAT_MRT3847_135147C.1.pep
MNPMSQIILLVVLLIGVVFGQKSLPVVKGSPELVEQSPYASDKEVINKVQQQLFNAMELLQAYEEDAPMKIAEKRRNKFEFIRFGRRR

SEQ ID NO: 181766 - protein, 71 aa, Glycine max
  Clone ID: PAT_MRT3847_135148C.1.pep
PLSPRWNQLEQNVMGQNGFYELTHLATQEPVCVEQAFAFVLHTCFRCHESLVLGPADFKTFRPEADPPVGF

SEQ ID NO: 181767 - protein, 247 aa, Glycine max
  Clone ID: PAT_MRT3847_135149C.1.pep
ESILRMQHAVTHSNDPYVDDYYHQACLAKKTSVAKLKHPFCPSQIREYPPRSRANTEPHSFVQIDALGRVSFSSIRRPRPLLEVDPPNTSASSDQKISEKPLEQEPRFAARVTIEDGLCLLLDVDDIDRYLQLNQPQDSGTHLRRRRQVLLEGLATSLQLVDPLGKNGHKVGLAAKDDLVFLRLVSLPKGRKLLAKYLQLLPPGSELMRIVCMTIFRHLRFLFGGLPSDPAASETTNNLAKVVCQCV

SEQ ID NO: 181768 - protein, 63 aa, Glycine max
  unsure (1)..(63): unsure at all Xaa locations
  Clone ID: PAT_MRT3847_13514C.1.pep
EEEKMVHNTLKSYYNKVFSAPKFTXXLILLHRGMRDNKXXKTXXGKSTKIRRKKXYKXRXXVX

SEQ ID NO: 181769 - protein, 72 aa, Glycine max
  Clone ID: PAT_MRT3847_135150C.1.pep
PQKGSGATRRQNASVRNSSSNGSLHALRSQNISSFMYSSIPYNSIGVGFPRLACPSVGLQLQRRGNPWTSLS

SEQ ID NO: 181770 - protein, 47 aa, Glycine max
  unsure (1)..(47): unsure at all Xaa locations
  Clone ID: PAT_MRT3847_135151C.1.pep
XPXXXWGXXPXPSIXXLQXSXYLRYTRXLNXXSTNXRASRHXXXAXS

SEQ ID NO: 181771 - protein, 49 aa, Glycine max
  Clone ID: PAT_MRT3847_135152C.1.pep
AEVKVSDVKHQCKRLRRKCPASYFTGCSGLYDARWDWLNKLITYERDKR

SEQ ID NO: 181772 - protein, 59 aa, Glycine max
  Clone ID: PAT_MRT3847_135153C.1.pep
PPSVMGCKKQSQNKLIRIMASPIRALGKARDMYLRSITNWGQDVSYYRGGDPTGGAGRV

SEQ ID NO: 181773 - protein, 45 aa, Glycine max
  Clone ID: PAT_MRT3847_135154C.1.pep
NGINRNFFSIFLAPEKMYITVKTFFLKEKIPFANKKKFKGEDPGY

SEQ ID NO: 181774 - protein, 87 aa, Glycine max
  Clone ID: PAT_MRT3847_135155C.1.pep
ERDRLRLIANAQGEVVESLLPVLDIFDRAKSHINVETEGEESIYYSCQSIFYPVIEILNSLGGEPVETFGAPFDPLVRVSFMRQDSA

SEQ ID NO: 181775 - protein, 271 aa, Glycine max
  unsure (1)..(271): unsure at all Xaa locations
  Clone ID: PAT_MRT3847_135156C.1.pep
MEFKPPKFYKEELNCLKLWRSVHRLGGYDKVTSCKFWRQVGESFKPPKTCTTVSWTFRVFYEKALLDYEXHTTKGGELNVPITPLAEPINIENQSVQGSASSGRARRDAAARAMQGWHSQRLLSNGEFSDPIIKIYLNARNHRTPLMLSKWHTVNHXRPQLRHISDTSVVDIGPPADWVKINVQKTKDCFEVYALVPGLLREEVRVQSDPAGRLVISGEPEHSDNPWGVTPFKKVVSLPSRIDTQQTSAVVTLHGQLFVRVPFESNQNREG

SEQ ID NO: 181776 - protein, 387 aa, Glycine max
  Clone ID: PAT_MRT3847_135157C.1.pep
MALEVKPEACGMADSKACDNGDPVLASHNEPATPLPAPADTNTEIMNVLEVENKVDEKQVAEPADNGNSNSKHMLFLDADHSYDGNESGTEEEQSAFMKELENFFRERSMEFKPPKFYGEGLNCLKLWRAVTRLGGYDKVTSCKLWRQVGESFKPPKTCTTVSWTFRGFYEKALLDYERHKIKGGELNVPVASHPEPINIENQASVSGRARRDAAARAMQGWHSQRLLGNGEVSDPIIKDRNSVSVQKREKQLKSINIHKRKKPSSPYMDNAVKAARSKPSKPQLDTTVIDIGPPADWVKVNVQKTKDCFEVYALVPGLLREEVRVQSDPAGRLVISGEPEHPNNPWGVTPFKKVVSLPSRIDPHQTSAVVTLHGQLFVRVPFEHLE

SEQ ID NO: 181777 - protein, 434 aa, Glycine max
  Clone ID: PAT_MRT3847_135158C.1.pep
MDNAQVLNKTKEGEYVSDVKSKAEETPQCDKRIENDANVWQINMDTAETTVAVNPKAFEVADSKTCLNGDSNSICPSHNEPNTPHAIPTEINSGLDNENRDNEKQAVVAHADNGHSISKNLYFLDPDDSYNGNESGTEEEQSAFMKELENFFRERSMEFKPPKFYKEELNCLKLWRSVHRLGGYDKVTSYKFWRQVGESFKPPKTCTTVSWTFRVFYEKALLDYERHKIKGGELNVPVASHPEPINIENQASVSGRARRDAAARAMQGWHSQRLLGNGEVSDPIIKDRNSVSVQKREKQLKSINIHKRKKPSSPYMDNAVKAARSKPSKPQLDTTVIDIGPPADWVKVNVQKTKDCFEVYALVPGLLREEVRVQSDPAGRLVISGEPEHSNNPWGVTPFKKVVSLPSRIDPHQTSAVVTLHGQLFVRVPFEHSE

SEQ ID NO: 181778 - protein, 142 aa, Glycine max
  Clone ID: PAT_MRT3847_135159C.1.pep
NWQMSDAKENEEAGQGVPSVVEENQQLVDAEVQDQPEAASAPVPVEETSNHVEIGSDHVENTKEEPPAEDKNVELEVVSEGIPQDVQNTLLSVPVEADAQILDRTESEEAEASVRRWRLMNYHRIIRRLRNMMIFIKKVMAM

SEQ ID NO: 181779 - protein, 77 aa, Glycine max
  Clone ID: PAT_MRT3847_13515C.1.pep
LSLIINTFYSNKEIFLRELISNSSDALDKIRFENLTYKSKLDSQPELFIHIIPDKTNHTLTIFYNCICITKTYLVNN

SEQ ID NO: 181780 - protein, 44 aa, Glycine max
  Clone ID: PAT_MRT3847_135160C.1.pep
YLWMGYNQLAVRFLSNLSRYILFFFKLKASFNILHKFTFYSIYY

SEQ ID NO: 181781 - protein, 56 aa, Glycine max
  Clone ID: PAT_MRT3847_135161C.1.pep
PTRPISSKQYLVPLIPPFLFPGNQRYIDEINFASAGAGALVETHQGLVCCMLLLTN

SEQ ID NO: 181782 - protein, 167 aa, Glycine max
  unsure (1)..(167): unsure at all Xaa locations
  Clone ID: PAT_MRT3847_135162C.1.pep
ARIRLGLNVPITPLAEPINIENQSVQGSASSGRARRDAAARAMQGWHSQRLLSNGEFSDPIIKDRNSLSMQKREKQLKNINLLKRKKSSDTVNVVKVAHSQPSRPQLRHISDTSVVDIGPPADWVKINVQKTKDCFEVYALVPGLLRERGAVQSDPAXRLAISGSPS

SEQ ID NO: 181783 - protein, 221 aa, Glycine max
  Clone ID: PAT_MRT3847_135163C.1.pep
MLFSLFCAMPFLFLFLLLLCTLESHSSNHLQGPVRLDSHVGTMFPKPSPLGSPQPFLPLAPSPLAPFTNTTIPKLSGLCTLNFTTAESLISVAAIDCWEVFAPFLANVICCPQLEATLTILIGQSSKHTNVLALNGTDAKHCLADVEQILMGQGATNNLKQICSIHSSNLTEASCPVKNVNDFYDMVDTTKLLTACEKIDPVKECCYQICQNAILEAAKAL

SEQ ID NO: 181784 - protein, 796 aa, Glycine max
  Clone ID: PAT_MRT3847_135164C.1.pep
IPPSYGKMWQLNFLSLAGNDLRGFIPSELGNLTNLTHLYLGYYNQFDGGIPPQFGKLTNLVHLDIANCGLTGPIPIELGNLYKLDTLFLQTNQLSGSIPPQLGNLTMLKALDLSFNMLTGGIPYEFSALHELTLLNLFINKLHGEIPHFIAELPKLETLKLWQNNFTGVIPSNLGQNGRLIELDLSTNKLTGLVPKSLCVGKRLKILILLKNFLFGSLPDDLGQCHTLQRVRLGQNYLTGPLPHEFLYLPELLLVELQNNYLSGGFPQSTSNTSSKLAQLNLSNNRFSGTLPASISNFPNLQILLLSGNRFTGEIPPDIGRLKSILKLDISANSFSGTIPPGIGNCVLLTYLDLSQNQLSGPIPVQVAQIHILNYLNVSWNHLNQSLPKELRAMKGLTSADFSYNNFSGSIPEGGQFSLFNSTSFVGNPQLCGYDSKPCNLSSTAVLESQQKSSAKPGVPGKFKFLFALALLGCSLIFATLAIIKSRKTRRHSNSWKLTAFQKLEYGSEDITGCIKESNVIGRGGSGVVYRGTMPKGEEVAVKKLLGINKGSSHDNGLSAEIKTLGRIRHRYIVRLLAFCSNRETNLLVYDYMPNGSLGEVLHGKRGEFLKWDTRLKIAIEAAKGLCYLHHDCSPLIIHRDVKSNNILLNSDFEAHVADFGLAKFMQDNGASECMSSIAGSYGYIAPEYAYTLKVDEKSDVYSFGVVLLELITGRRPVGDFGEEGLDIVQWTKMQTNWNKEMVMKILDERLDHIPLAEAMQVFFVAMLCVHEHSVERPTMREVVEMLAQAKQPNTF

SEQ ID NO: 181785 - protein, 55 aa, Glycine max
  Clone ID: PAT_MRT3847_135165C.1.pep
AQAMASMAGLRGSSQAAGEGSLHVSGSTRLNVWSSSTLASVILAIFTVRCTSTAL

SEQ ID NO: 181786 - protein, 100 aa, Glycine max
  Clone ID: PAT_MRT3847_135166C.1.pep
MAIRLPSVLSANSILRRSNLFANHAATTSLDVPKGHFAVYVGEGEKRRYVIPVSYLNQPSFQELLSIAEEEFGFSHPMGGLIIPCTEENFLNITSGLHRL

SEQ ID NO: 181787 - protein, 53 aa, Glycine max
  Clone ID: PAT_MRT3847_135167C.1.pep
NHLGFDMYMGFFNYKLSKEKLYIEVYVYKRKFLLVLLEQVYIKDRYKEPMFWM

SEQ ID NO: 181788 - protein, 82 aa, Glycine max
  Clone ID: PAT_MRT3847_135168C.1.pep
MAKTTHRRNHHQPPTPIHWKPFPPPPAPHSTPQPNPRTTPDRSPTPLTTSPKMRPTPTAPRSPRNPAVKKATVPTRTRRRRS

SEQ ID NO: 181789 - protein, 55 aa, Glycine max
  unsure (1)..(55): unsure at all Xaa locations
  Clone ID: PAT_MRT3847_135169C.1.pep
GTETSAVEFEWAMSNLLYSPQVLDKARVELDTXVGQEGGVEEAHVSKLHSLHNII

SEQ ID NO: 181790 - protein, 116 aa, Glycine max
  Clone ID: PAT_MRT3847_13516C.1.pep
MTKKSQCAGGCLLSAEGSARHRVCLREKRLCSEPPRLGTRWEGGMGWRNKPGTPRSTKLCWADNLGCSRHHGGEGQCVGFWKGPRADPRNSWPASGGWPVTARHPPKRTSGCHCLM

SEQ ID NO: 181791 - protein, 49 aa, Glycine max
  Clone ID: PAT_MRT3847_135170C.1.pep
LQEGVQQLVLGLYIIRGDNISVVGELDEELDSSLDLSKLRAHPLKPVIH

SEQ ID NO: 181792 - protein, 130 aa, Glycine max
  unsure (1)..(130): unsure at all Xaa locations
  Clone ID: PAT_MRT3847_135171C.1.pep
KPNMSTFGADQFDDFRPKEKVLKVSYFNWWSFNTAFGTLAATLFVVYIQERFGWGLGYGISAIGFLVASVTFFMGVPIYRHKSRKGKSHAKEFFSVPVVAFRNXKLQLPSSPSELHECEMQHYIDXGRRQ

SEQ ID NO: 181793 - protein, 67 aa, Glycine max
  Clone ID: PAT_MRT3847_135172C.1.pep
GNISASVCVMFYDEHGKLPEDIMHSYKHSVGILSTGGLVTAQLLIPTVMSPQADLHQLSIRVILDKH

SEQ ID NO: 181794 - protein, 157 aa, Glycine max
  unsure (1)..(157): unsure at all Xaa locations
  Clone ID: PAT_MRT3847_135173C.1.pep
MSRLGFKHEVYDGDKHIGELDLIPPSSLTTTTPFHNNFRFPNNEIRIHHFSAKSERCPPLSILQTVAAFNVRCKLDSSVATEQKELIAIHASCFYEMKTAVXXVNDEEIHLVSMPSRXKKFPCFWCFXVPLXLSDACLXMLTWRCLANVFDLDETLI

SEQ ID NO: 181795 - protein, 166 aa, Glycine max
  unsure (1)..(166): unsure at all Xaa locations
  Clone ID: PAT_MRT3847_135174C.1.pep
MEVMGGSSFGICTAACVRDRGGVSAQDKAVXAAGWGGADESLRGGGSQIGLASRIELSMSNKSAEESSEDSSWWIGEISDNHEEDEDDAVSSQGEGXALASFSSSLEDSLPTKRGLSNHYVGKPKSXGNLMESSNIKAKDLEKCENPLIKKRTLLIANKLRRRGRS

SEQ ID NO: 181796 - protein, 58 aa, Glycine max
  Clone ID: PAT_MRT3847_135175C.1.pep
SMVANHDFQHILHVLNTNVDGKQKIMCAMTSIKGIETRFANIACNKADVDMNKRAGEI

SEQ ID NO: 181797 - protein, 69 aa, Glycine max
  Clone ID: PAT_MRT3847_135176C.1.pep
KLVLYVEVFQCKYIEKNTNLLIIPLRYLFGLLCNEQNQTTRCSLGRMTTIYQCPLQWRLIWVSTLVKIN

SEQ ID NO: 181798 - protein, 45 aa, Glycine max
  Clone ID: PAT_MRT3847_135177C.1.pep
DKHHPSHSSTLLLLWLHSSHVWFLYDQCPSLNICCYLSKEMLTLS

SEQ ID NO: 181799 - protein, 69 aa, Glycine max
  Clone ID: PAT_MRT3847_135178C.1.pep
ARIRLESGLTASIALEKAGQMESGKVVLVTAAAGGTGQFAVQVLHKSHATFLNHMSLCICFQELFVVTN

SEQ ID NO: 181800 - protein, 74 aa, Glycine max
  Clone ID: PAT_MRT3847_135179C.1.pep
GGTQLASQSACLNLLGVKGASNESPGSNSRLLTTIVTRSVLAEELSLISTITAEHLLNSHIKYNISNKDITKIS

SEQ ID NO: 181801 - protein, 86 aa, Glycine max
  unsure (1)..(86): unsure at all Xaa locations
  Clone ID: PAT_MRT3847_13517C.1.pep
MHFEDGGRTLVTDTKLSGALCTITGSANAFYYFRFRTKNFRSFRSPIHEDQDTLAHFIIAEGEDELALELPKAPPHVEDRLXDAWI

SEQ ID NO: 181802 - protein, 72 aa, Glycine max
  unsure (1)..(72): unsure at all Xaa locations
  Clone ID: PAT_MRT3847_135180C.1.pep
VXEXGGGGRQLXESGEVXXRGRVXGTGXPSSSXXXCWFVXRGRVVXRRRGSDASTTTEKASDDXPSAAPXRX

SEQ ID NO: 181803 - protein, 86 aa, Glycine max
  unsure (1)..(86): unsure at all Xaa locations
  Clone ID: PAT_MRT3847_135181C.1.pep
MKMKVLVFFVATIXXAWQCHAYDMXPLRMNTGYGCXYSGVKCXIWRLAVEAXNIFGXFETIPXXSALKEXXVYVHGGKXWRLQRLP

SEQ ID NO: 181804 - protein, 63 aa, Glycine max
  Clone ID: PAT_MRT3847_135182C.1.pep
KCESLCELTVLLILLTLEYYYPFSWFTFGLFTCMVCLHIIFPFCIIGTPFFFSLNRLFLIGCN

SEQ ID NO: 181805 - protein, 144 aa, Glycine max
  unsure (1)..(144): unsure at all Xaa locations
  Clone ID: PAT_MRT3847_135183C.1.pep
TRPTAAKDDRRALIGYAYTLGGCLVSWKATLQPSVALSTIEAKYMALIEAAKEGIWLRGLINDLEINQEYANIYCDSLSAICLAKDXVHHDRTKHIDVRYHFIRSERRIKVHKIITLHNPANMFTKPVPKSKFDHCLSLLNVDC

SEQ ID NO: 181806 - protein, 58 aa, Glycine max
  Clone ID: PAT_MRT3847_135184C.1.pep
NSHNASRGNKILVGPATFPNIDLEQFSMYYALFIRCTTKRCYCHLIYYGRGLTCVRGW

SEQ ID NO: 181807 - protein, 72 aa, Glycine max
  Clone ID: PAT_MRT3847_135185C.1.pep
KKTNFSPPPHGGAPPPFPGGPPPSFPKGPGNPPPHCGKQSPQPFGTPPEIFTPRPPLGSLVPKRPPRPGGIC

SEQ ID NO: 181808 - protein, 88 aa, Glycine max
  unsure (1)..(88): unsure at all Xaa locations
  Clone ID: PAT_MRT3847_135186C.1.pep
NFARGARXXNRXPEAXDRXEKKXXXXPNKRXTXDEAQXHPXXAXXHNIKXEPXXPRPXXPEXDQPTSAFFFFKELIWKESVKVFSDPP

SEQ ID NO: 181809 - protein, 85 aa, Glycine max
  unsure (1)..(85): unsure at all Xaa locations
  Clone ID: PAT_MRT3847_135187C.1.pep
SPSGDANVTKTNPRNFYRNVAHSAFNVVALLSPVNPHGADSVYIVPVLLAAMVTFNLIVPPNSXICRVSPRESALASAXASKYAT

SEQ ID NO: 181810 - protein, 96 aa, Glycine max
  Clone ID: PAT_MRT3847_135188C.1.pep
VPSNAFFFPPVIHSRSHETPETVVSRIKAKKKKKKPASLTQCQNDHRLLTLSSSARPRAGDRRGPWHISCRPHPPSRRMPGWRSRSCAPRRSRSAR

SEQ ID NO: 181811 - protein, 32 aa, Glycine max
  Clone ID: PAT_MRT3847_135189C.1.pep
TDARRRQHGYLNNTYTHHEIHMMLSRGAVQLR

SEQ ID NO: 181812 - protein, 109 aa, Glycine max
  Clone ID: PAT_MRT3847_13518C.1.pep
AAYNGEAKVLSSVTSQVIDGYHAAADSVAGLDIPRSHTVLLGPWWQPLELPLQAAWLYADSVSHKMHGLHHFDHRKTLYWTSDLQCLLTGLPPPQRSTGCFPDTAPFNA

SEQ ID NO: 181813 - protein, 50 aa, Glycine max
  Clone ID: PAT_MRT3847_135190C.1.pep
GRPIEFYLVGHQERVIFFACKSTSPFFLFISSSFFFFFFFFFFKKYLYFQ

SEQ ID NO: 181814 - protein, 462 aa, Glycine max
  Clone ID: PAT_MRT3847_135191C.1.pep
MILFSFTSIVLIAFGATLFQTGHAKKLWRRIEDWFHVYQFFKVPELNDTTQHNHLYRKVSLYLHSLPSIEDSDFANLITGKKQNDIVLCLGPNQTIEDHFLGATLFWFNQTGTFLLKIRKVDKRRILRPYLQHIHAVADEIDQRGKRDLLLFMNIADDFRRWRSVPFTHPSTFDTVAMEPDLKSKVKSDLESFLRAKQYYHRLGRVWKRSFLLYGPSGTGKSSFVAAMANFLSYDVYDIDLCKISSDSDLKSLLLQSTPKSVVVIEDLDRFLADKTARISASGILNFMDGLLTSCCAEERVMVFTMNTKEHVDPNLLRPGRVDVHIHFPLCDFSAFKTLASSYLGVKEHKLFPQVQEIFQNGASLSPAEIGELMIANRNSPSRAIKSVITALQTDGDGRGCGLIGRQTEDDEMDEPDGVVCGETFHTVKDLRKLYGFFSFRVTRRSSSSNASLPPASPLEKE

SEQ ID NO: 181815 - protein, 52 aa, Glycine max
  Clone ID: PAT_MRT3847_135192C.1.pep
SRSRTRVNVGVDFLRDPCIEPGTTMSPFGRAQHWTPFLATPPEKVASKFALE

SEQ ID NO: 181816 - protein, 138 aa, Glycine max
  Clone ID: PAT_MRT3847_135193C.1.pep
CLRRRQRRLLLAAWYRLPLGSQQCHSPYVPIGQAVVLFCHFFFDWMVHSLPVYGNLLLFLIHHIVVVAAPWGCPFLLTKFTFASFLLPPIEADVILFYHLFKYIVTLFSFKVPNVSYSNFTSPPPPPPPPPKKEDVIQ

SEQ ID NO: 181817 - protein, 59 aa, Glycine max
  Clone ID: PAT_MRT3847_135194C.1.pep
WSFTQYIWGMNLIVTYELIVVNRVTSFIKAAPLLGMHAASAKGHLHSNFDPGDRDRVDH

SEQ ID NO: 181818 - protein, 343 aa, Glycine max
  Clone ID: PAT_MRT3847_135195C.1.pep
IEKATAEISILKVAATSLKLELEQEKATLASIRQREGMASVAVASLEAELEKTRSEIALVQMKEKEAKEKMTELPKKLQLTAEETNQANLLAQAAREELQKVKAEAEQAKAGVSTLESRLLAAQKEIEAAKASENLAIAAIKALQESESTRSKNEVDPSNGVTLSLEEYYELSKRAHEAEERANMRVAAANSEIDKVKESELKAFEKLDEVNREIAARRESLKLAMEKAEKAKEGKLGVEQELRKWRAESEQRRKAGESGQGVINQSKSPRGSFEGKANNFDRTSDAANPAHYLTSPKANEHADNDEGGSSPESKHGKKKKKSIFPRVLMFFARRKTHSTKSG

SEQ ID NO: 181819 - protein, 100 aa, Glycine max
  Clone ID: PAT_MRT3847_135196C.1.pep
FFFFFFFFFFFFFFFFFFFYFFFLPKKMKTGGPNWEAKGQPVKFGKQKGPQKGFKRGALKIEKGNYPALPRKFKPKGQKRPKKPTPRNILGTQSKRNPPG

SEQ ID NO: 181820 - protein, 40 aa, Glycine max
  Clone ID: PAT_MRT3847_135198C.1.pep
ICRMPAFNSSAHVVYLELTGVLAAQSINQNFAYKNYNELI

SEQ ID NO: 181821 - protein, 105 aa, Glycine max
  Clone ID: PAT_MRT3847_135199C.1.pep
MRIMYWFLVLFLNLTYGSVLDASHGKTLPSTVVVGTVYCDTCFQHTFSTRSHFISGALVAVECKVGDSVPSFNKEVKTNEHGEFKVEVPLKVWIHAKRIKGCTFK

SEQ ID NO: 181822 - protein, 72 aa, Glycine max
  Clone ID: PAT_MRT3847_13519C.1.pep
SGGIFACWVYPGWGAFCISFGASLFRPVSCCLYPWCKKGVPWRKIGTRPLPVMWGSHLCRGLGGFPFCLGGS

SEQ ID NO: 181823 - protein, 47 aa, Glycine max
  unsure (1)..(47): unsure at all Xaa locations
  Clone ID: PAT_MRT3847_1351C.1.pep
ETXXIYLXXHLLTVPPRXXLXMGGXAFXRLDDSFSLNXNXXYIVSXT

SEQ ID NO: 181824 - protein, 102 aa, Glycine max
  Clone ID: PAT_MRT3847_135200C.1.pep
LFFFFFFFFFFFFFFFFFFFFFFFFFFFFLKGKGGSSIKFYLPPEKPPNRQKEFGGINLWGAGGNHPFPWQTPWSQTPIPRGGKFLAPQTKKKPTSPGGPSI

SEQ ID NO: 181825 - protein, 43 aa, Glycine max
  Clone ID: PAT_MRT3847_135201C.1.pep
IPISSWQCTLKPMRNDGVRVWDQYNSLLVLDPSPKLKHACVCS

SEQ ID NO: 181826 - protein, 52 aa, Glycine max
  Clone ID: PAT_MRT3847_135202C.1.pep
EAIHLFAQVTTHGSCAPLRCKYHHSVARWLDSKDKVADFVQFKLECLLARVG

SEQ ID NO: 181827 - protein, 138 aa, Glycine max
  Clone ID: PAT_MRT3847_135203C.1.pep
PGRGGDPNNEGKPATEATPAKARKRPHRTPQGIQRGKQIPQGNRKGHGHPQDADTTPRPKKRAGSPPPPERDQGGPPAGGRSIFIWPPSFFFFFFFFSSLPFFFFFFFFFTKDKVYCKVKKKKGGRSRETSYDAAATS

SEQ ID NO: 181828 - protein, 143 aa, Glycine max
  Clone ID: PAT_MRT3847_135204C.1.pep
SMEDHGQNQRKRHNVFGAFVDKSLGYPSSGADDHDPKKLKPNSEAPLSTIDQQVPALPLPNILVSAFKENTTDGVKFQLFVSKSYTQSTSTSPPPVYTLKVTNASTSNADVEPAGNIVDGGVAPVLTETRLIAEGQFMLRSRL

SEQ ID NO: 181829 - protein, 93 aa, Glycine max
  Clone ID: PAT_MRT3847_135205C.1.pep
LFIHRRGAETGFTIEGGKYLASRKNMKKEIRKALVILKGIKDEQIVTSLNKDNETLIMLSILKESKVVIVSTLEFLLLFVTGSKGQPKQSKWS

SEQ ID NO: 181830 - protein, 64 aa, Glycine max
  Clone ID: PAT_MRT3847_135206C.1.pep
SLIYYIFHFLLWHHTYMSFSVYDTHASSKASIYAYSIIICLFNSEFFWGRNDAVSNSLHFNPLE

SEQ ID NO: 181831 - protein, 76 aa, Glycine max
  Clone ID: PAT_MRT3847_135207C.1.pep
HDHVIIIHRLAHFTIPSNTTMQLQGYNNRRTGANAKHKHSLEPTSATHANTIFHKSVLRILIVRETQIPHLTCTIR

SEQ ID NO: 181832 - protein, 116 aa, Glycine max
  Clone ID: PAT_MRT3847_135208C.1.pep
MEGGKRKGYAWALSAGFNAALAAISVKLPLHQFVRYGMVLLFNVTMWACYVNSLKALSSLQATVTNFATNFISSGLAGFFFFHESLSFQWFAGAILIIIGVVILSNSSIEKKVSTD

SEQ ID NO: 181833 - protein, 82 aa, Glycine max
  Clone ID: PAT_MRT3847_135209C.1.pep
MSICEFNLRRAEGKKANTIPREVPRSYSSVCLSTHSCLKDFFPLRKILQSKKKKKKKKKKKKKKKKKKKKKKKSKKKKKKKK

SEQ ID NO: 181834 - protein, 61 aa, Glycine max
  unsure (1)..(61): unsure at all Xaa locations
  Clone ID: PAT_MRT3847_13520C.1.pep
FVHTTIRFTRLSCNRSPIHRGTYIHRLQLHSNTFLPEFLVEYLICWLIHRGIIFYIIQXXX

SEQ ID NO: 181835 - protein, 50 aa, Glycine max
  unsure (1)..(50): unsure at all Xaa locations
  Clone ID: PAT_MRT3847_135210C.1.pep
XVSSISFMHAKITNYSHXDNSYFIFSRIPVVNCIKNVPSNEIHVQQIFYA

SEQ ID NO: 181836 - protein, 83 aa, Glycine max
  Clone ID: PAT_MRT3847_135211C.1.pep
KICGVFFLYHFLKKEKELPPFIKKALFQCVPKNNFLFSPQTCLPPSNSKNRNLFKKSLIYNLCKYFYPWKRGPLVTFLIPTNF

SEQ ID NO: 181837 - protein, 122 aa, Glycine max
  Clone ID: PAT_MRT3847_135212C.1.pep
GVSQRGQLKRGWIWGWAGICPRGTKFPGGGEGCTTLFLFGKKGGGICLETHFRGLGKKVGKKLKKKFFGKKGGKNFSGGGKIGEFLGGGIRVGKLRRGVKSCISFFSRKEIPLFYEYLISVR

SEQ ID NO: 181838 - protein, 145 aa, Glycine max
  unsure (1)..(145): unsure at all Xaa locations
  Clone ID: PAT_MRT3847_135213C.1.pep
PLVRGKVGCNAGFMPCSVECTGLPNKGLNMGSGNQGSDYARIAGQVTSQVVSMMAELMNGHXGGEQKWTHERTHLLSGRGSRMTDGKRDEWRVPCGIPFTVTLTGICNDMLIEMLIKYRLDQALSPGIAPQLFKQSVNSVCLGMR

SEQ ID NO: 181839 - protein, 130 aa, Glycine max
  Clone ID: PAT_MRT3847_135214C.1.pep
GIRLEALLIHPSTSHHLLNRISWAFCVYLEAVSVLPQLRVMQNTKIVEPFTAHYVFALGVARFLVSSYWVFLQVLDSRGHLLVALGYGLWPSMVLISEIVQTFILADFCYYYVKSVFGGQLVLRLPSGVV

SEQ ID NO: 181840 - protein, 66 aa, Glycine max
  unsure (1)..(66): unsure at all Xaa locations
  Clone ID: PAT_MRT3847_135215C.1.pep
MHTASMVVTLYDLSLYSGLKKLEEYLIPRRYMTXNQAPKEDPTVYASLPTAPSDENGNVYRRNKHN

SEQ ID NO: 181841 - protein, 52 aa, Glycine max
  Clone ID: PAT_MRT3847_135216C.1.pep
LIQAVESFHIASACSPTGSCMGSFIELNYRTSERQLTFQIMQRIPHFQEIWQ

SEQ ID NO: 181842 - protein, 86 aa, Glycine max
  Clone ID: PAT_MRT3847_135217C.1.pep
MYCVISRVDRERWVGSMMNENAVVFQSIIISASPIVFNGEHRHHTPPDPDSSIFSLSLQSSHVDEAKPESLPQCLPPLLSSSRSTT

SEQ ID NO: 181843 - protein, 115 aa, Glycine max
  Clone ID: PAT_MRT3847_135218C.1.pep
KCKKSNSTGSSSSLKKWKLLDLLRRSNSEGKESLMILTPAPEKKNVNERWSIEVAGKSKGNGFAGEKKVAVSPHEALYLRNRELRMVDKKKSFLPYKPGLVGFCTNRLGKAFPSF

SEQ ID NO: 181844 - protein, 144 aa, Glycine max
  Clone ID: PAT_MRT3847_135219C.1.pep
VCVLGSSSEQLSSRECENLGFTGLALCSDCNTLSEYVKDKELVSDCFKCCTEDSNDATTKVTYSGAVLEVCMRKLVFYPEVVSFIEDEKDQFPSVKVQYVFNSPPKLIMLDDAGQQKETIRIDNWKREHILQFLREKVKPLASD

SEQ ID NO: 181845 - protein, 95 aa, Glycine max
  unsure (1)..(95): unsure at all Xaa locations
  Clone ID: PAT_MRT3847_13521C.1.pep
ARNSARGRIISFYDSQGIHFNXCVENIRKYLLXEAREKNRPEFLQGWQTAVTXCIPQQKXDSDCGVXVLQYCKCLALEQPFQFSQEDMPRVRKRX

SEQ ID NO: 181846 - protein, 105 aa, Glycine max
  unsure (1)..(105): unsure at all Xaa locations
  Clone ID: PAT_MRT3847_135220C.1.pep
LLATGRTPANREACKHSSREPKIDRDGGGXQADNTEXGSTXRQNAPTRNEERAATRKKGRQTDKTGRPGNAADKRRERASPAQAPRTDRSKPEHPEASKXTKPEP

SEQ ID NO: 181847 - protein, 209 aa, Glycine max
  Clone ID: PAT_MRT3847_135221C.1.pep
METPIEVKPTRVASGFLDDLSETCKMGSPNGRAMYRTDDEVPFDSEINFHPSESSLMDVHGSHSGESRTVHHETLAGMIYRSIQVVVFSNKLNLLMPFGPLAILVQKLTGHLGWVFGLSLLGIMPLAERLGYATEQLAFYTGDTVGGLLNATFGNATELIISIYALKSGMTRVVQLSLLGSILSNMLLVLGCAFLCGGIVNHEKEQVFN

SEQ ID NO: 181848 - protein, 63 aa, Glycine max
  Clone ID: PAT_MRT3847_135222C.1.pep
LIPSLVHSAFLLLYIHSLVTVDLASRRGSDFSEYGGVHHTPLDTVVPGGTIVVLVGLVRRFSI

SEQ ID NO: 181849 - protein, 50 aa, Glycine max
  Clone ID: PAT_MRT3847_135223C.1.pep
GYTGISDSGKHIPSSKKNQKKLLLSLLATLLMAASVVAIGAGVKNKTRNS

SEQ ID NO: 181850 - protein, 305 aa, Glycine max
  Clone ID: PAT_MRT3847_135224C.1.pep
MLSELGRRPMLGSNEGSFGDELEKEIGMLLREQRRQEADDRERELNIYRSGSAPPTVEGSLSAVGGLFGGAAGAPAAGAPVAFSEFQWTKDVNGITSEEELRSDPAYLSYYYSNVNLNPRLPPPLLSKEDWRFQQRLKGGASARGGIGDRRKVSRTDDNSGRSPFSTPPGFNMRKQEGEVDNEETRGSAEWGGDGLIGLPGLGLSKQKSFAEIFQEDLGHITYIACLPSDPASRDAFDDNDITSSAEAELAHACRESMATDALRSGSNVQGSSAAQNVVPPASYSYAAAVGSSLTRSTTPDPQLV

SEQ ID NO: 181851 - protein, 53 aa, Glycine max
  Clone ID: PAT_MRT3847_135225C.1.pep
LARPVFELILPRSLHMAFEYINGKKKWAFAYFGFLFLKKKKKKKKKKKKKKKD

SEQ ID NO: 181852 - protein, 48 aa, Glycine max
  Clone ID: PAT_MRT3847_135226C.1.pep
NSARASSSTLPITSFYLLTTNPTSRNFYTGNGSPYLMLKHLYKASCYK

SEQ ID NO: 181853 - protein, 59 aa, Glycine max
  Clone ID: PAT_MRT3847_135227C.1.pep
ASLGIDASYSFLYGWELFSTTIKTSTGNRHPVVAKKCHVCKPWIICRTSILYTKALVSC

SEQ ID NO: 181854 - protein, 125 aa, Glycine max
  Clone ID: PAT_MRT3847_135228C.1.pep
YMQSRGGLNKIEWLTHILLLWGNDTQQQGNKRTPQPMPHSNQAQTSEQEQRDKHGPNFQTPQKELSFRWPPVLGLDLSTPTIPTPKMTKQFNTHNFTQGRDWLTQQLGPYGNVVQGCLGPSKVRV

SEQ ID NO: 181855 - protein, 112 aa, Glycine max
  Clone ID: PAT_MRT3847_135229C.1.pep
MGTLLAKRAGERFLKALKAYSLPKGKGFFPAEISRGFIGGNFFLFKAYLKWNPKWPFTRFFGVKFFGPKNPPYFFGGPPPPPPPPPPPPPPPPPPPPPPPPPPPRRRTCTHV

SEQ ID NO: 181856 - protein, 65 aa, Glycine max
  Clone ID: PAT_MRT3847_13522C.1.pep
MGLALTVGFLGLLILFHAAYSTIQCILKLIIKLVLLFECWGSWISNLGLIFCADRGVLKILKRVF

SEQ ID NO: 181857 - protein, 52 aa, Glycine max
  Clone ID: PAT_MRT3847_135230C.1.pep
SLSCSFALSPFISVLNWNVIYLIIYLMLLVRTLFHIMHKKGQVPFQCLSLLQ

SEQ ID NO: 181858 - protein, 51 aa, Glycine max
  Clone ID: PAT_MRT3847_135231C.1.pep
LYSLLALLLRCYSSLCSHTLTRETARWSTNTLAKRACFRALDRFLQPKKKI

SEQ ID NO: 181859 - protein, 116 aa, Glycine max
  Clone ID: PAT_MRT3847_135232C.1.pep
ARGLIKYNRYKGLPLNDARAVGLRVLTARHYLHSERGPGPTDLNTEDTPLLSTIDPGDNPVRAGLCPIIERSEGNKHSGASGGIRNWLTRTARTADANISGLRASLGRRGQAAITG

SEQ ID NO: 181860 - protein, 54 aa, Glycine max
  Clone ID: PAT_MRT3847_135233C.1.pep
ERRLKPLAAGTPRPRTGAELASTSKDGFLETDKALVGCTEEPLRCYQRKRNSWL

SEQ ID NO: 181861 - protein, 58 aa, Glycine max
  Clone ID: PAT_MRT3847_135234C.1.pep
NIYDFKVIIKKTKSYLLFYNFSKKEKKSRKLIYDFGFKSVGYPTTYIVMDINLKFIPI

SEQ ID NO: 181862 - protein, 57 aa, Glycine max
  Clone ID: PAT_MRT3847_135235C.1.pep
KLIYSYMVTQYCPTPDGYSKKNRVSCLTEGCKLGMEGKCPVKPVLVFVNTKMGGWLI

SEQ ID NO: 181863 - protein, 61 aa, Glycine max
  Clone ID: PAT_MRT3847_135236C.1.pep
CLLHERQWPSSDYPYINVNCLWLPEFIFFHALVILSQAFLFSLRFKQHGFCRPKHMSWAGA

SEQ ID NO: 181864 - protein, 122 aa, Glycine max
  unsure (1)..(122): unsure at all Xaa locations
  Clone ID: PAT_MRT3847_135237C.1.pep
LSGEVSSIMLDFGVLLHNFVCLPPSSPLYASQNQCFGLRFPRIPFFASFGMCTSEAYCHLLDWQIYHFFQKLLHLPNQYPWMEHRNPQLSYQNSDLLDSAQPRPLSLVTRXXXXXXXXXXXI

SEQ ID NO: 181865 - protein, 57 aa, Glycine max
  Clone ID: PAT_MRT3847_135238C.1.pep
WHRYLYGIQVILCFPFYSVCRRFALLLPSLHNHSTHLPCLSLPNQTPRFPTRPPKHH

SEQ ID NO: 181866 - protein, 69 aa, Glycine max
  Clone ID: PAT_MRT3847_135239C.1.pep
LEPNRLEDMEQKWQCQANSSMAELMASRAYCCFKCQNLVAFHDDIVSKDFQVRFSLPFLAFFSMFMLVF

SEQ ID NO: 181867 - protein, 74 aa, Glycine max
  Clone ID: PAT_MRT3847_13523C.1.pep
KILGGKTGVKMASSKGNWGRTCGGLQLGLFFPLGGKLHNNMGPGGYPLVLFQSFKGFFYARFFELCLKIRGFVF

SEQ ID NO: 181868 - protein, 92 aa, Glycine max
  unsure (1)..(92): unsure at all Xaa locations
  Clone ID: PAT_MRT3847_135240C.1.pep
MKGTTQIINIDQELGLCTRSIMGTSAIQLSAITGQTALKHLNEFVRIIGGTGKSRTIIRRQVKSAPHSIRXGSDRPMYLGLFAEHIPSHLIG

SEQ ID NO: 181869 - protein, 156 aa, Glycine max
  unsure (1)..(156): unsure at all Xaa locations
  Clone ID: PAT_MRT3847_135241C.1.pep
NSPCGRVKIIVMDSIPALFRSDFENSGSDXLRRRSSLFFGISGDLRQLAKRFGISVVXTNQVVDLIGDGDVSFGSLGNGLYSSGRRVCPALGLAWAHCVNSRLFLSKDEDEPPVKTRKMRVVFAPHLPHSSCEYVIKGEGVFGVEMMQHREEEINL

SEQ ID NO: 181870 - protein, 62 aa, Glycine max
  Clone ID: PAT_MRT3847_135242C.1.pep
SNTSINNRVGSLPRNCNLLLTQTAPPFPDVQVFSSSEYTLFNLHLSSHTHTSNTSINNNKRV

SEQ ID NO: 181871 - protein, 116 aa, Glycine max
  unsure (1)..(116): unsure at all Xaa locations
  Clone ID: PAT_MRT3847_135243C.1.pep
SFEEVSLSAALNGVEGLDYMERIPLATSEGFPHVLSRKNGEKGKRRFVSGDGEEMTLIPGTSVEEAYNKLIVQLEKSVPTLIGIACPKDENLSCRKIXSTSNSRRLTILPMEFNFV

SEQ ID NO: 181872 - protein, 251 aa, Glycine max
  Clone ID: PAT_MRT3847_135244C.1.pep
MAMAAAFATTTATLRLPNVGESKSLQLRKCNPNPNKLKVMRGFGGCSGVAVSVRIGIGRVRASSSSSSSEEEEEAVSVQSKVTQKVYFDVSIGNPVGKFVGRIVIGLYGDDVPQTAENFRALCTGEKGFGYKGSTVHRVIKDFMIQGGDFDKGNGTGGKSIYGRTFKDENFNLSHTGPGVVSMANAGPNTNGSQFFICTVKTPWLDQRHVVFGQVLEGMAIVRLIESQETDRGDRPRKKVTISDCGELPIA

SEQ ID NO: 181873 - protein, 67 aa, Glycine max
  Clone ID: PAT_MRT3847_135245C.1.pep
NRFRKNTEAFFRLKLQQFHEGCTKNWHKSYHSKAEDAKLRLIICGTYIYIYVYTYLDILFLFLLCDS

SEQ ID NO: 181874 - protein, 253 aa, Glycine max
  Clone ID: PAT_MRT3847_135246C.1.pep
MTVTMAAAFTSTSATLRLSNVGESRGLQLRKCNPNPNKLKVMGGFGGCSGVAVGVRERKGIGRVRVRVRASSSSDEAVSAQSKVTQKVFFDVSIGNPVGKLVGRIVIGLYGDDVPQTAENFRALCTGEKGFGYKGSTFHRVIKDFMIQGGDFDKGNGTGGKSIYGRTFKDENFNLSHTGPGVVSMANAGPNTNGSQFFICTVKTPWLDQRHVVFGQVLEGMDIVRLIESQETDRGDRPTKKVTISDCGELPNA

SEQ ID NO: 181875 - protein, 87 aa, Glycine max
  unsure (1)..(87): unsure at all Xaa locations
  Clone ID: PAT_MRT3847_135247C.1.pep
KGNSLGNPLRLQSVNPFFLICRSMEPSMDFFPNRLGFYPIKEAGSLXFDGAWVFGYRIGIHLLXAENPGNLPKKKGIHSQGYYIFFH

SEQ ID NO: 181876 - protein, 100 aa, Glycine max
  Clone ID: PAT_MRT3847_135248C.1.pep
LTAQDHCSSMSSLMTTNRLQDKVDPGVWRIDENDVTSKRARNNGRLGVSSLHTMHQLSGDMLGGSLDRLQTAREPLQRFNHRRAHLQAQRGSLTYRPTIF

SEQ ID NO: 181877 - protein, 35 aa, Glycine max
  unsure (1)..(35): unsure at all Xaa locations
  Clone ID: PAT_MRT3847_135249C.1.pep
HXXNIQIILRPSTSTLNTQTRLNFPEKNLAFILYV

SEQ ID NO: 181878 - protein, 61 aa, Glycine max
  Clone ID: PAT_MRT3847_13524C.1.pep
FHKHFRSHFPWLQDRPNKDSNNSNSYMNSFAASFLGNGAVNFPQEFRSHFVWFQDSPNKST

SEQ ID NO: 181879 - protein, 166 aa, Glycine max
  unsure (1)..(166): unsure at all Xaa locations
  Clone ID: PAT_MRT3847_135250C.1.pep
AITDIKGDIITSLQSRLDIICDEVDVDSGNNHDXEAKKGCSLPFPRRVFAPWLAGVYVCDYLQPSETVEVLKDHSMELLSMKAPADVSTILEPEKEEISFKTKSFWDVVVPSYSEIHLMEDKSKRDGGSESPSSKTVKPGRINVVAAGLILLLSVLVGSVLFALKG

SEQ ID NO: 181880 - protein, 231 aa, Glycine max
  unsure (1)..(231): unsure at all Xaa locations
  Clone ID: PAT_MRT3847_135251C.1.pep
MAKGVIGEETRLKLAEGLLSQSAVPSEVGLLIGKFSSSLGRAFLFDLIPTPHNDSAEPACALTDPDKKKGTKSNPADSSSLFIDKDWVAEHARQVSRMLVGGIKVVGLYVWVSDAAFKNSTIMLCQTVKGVAEAAPVLEGDWDERLLLHISYSPRRWNCRNCSLSSNITSSSLRPCDFKMGKVLTSLPTFKCXHNFNLRLPILRDSASKFPSLSDVISHAISIHAKELASA

SEQ ID NO: 181881 - protein, 109 aa, Glycine max
  unsure (1)..(109): unsure at all Xaa locations
  Clone ID: PAT_MRT3847_135252C.1.pep
RKKAEPAFLVKSSXFFFRFITGNPLSLLYSFSLSQGITTQNTFIPLLTHKQNSIYKASLYIPPLLIQTIPIPSSLTLSSFLSFIHSNLYLKSSQISTLFSAPIYNNISI

SEQ ID NO: 181882 - protein, 488 aa, Glycine max
  Clone ID: PAT_MRT3847_135253C.1.pep
MAKAVVGEETRLKLAEDRLSQSAVPSEVGLLIGKFSSALGRAFLFDLIPTPHNDSGEPACSLTEPDKKKGPKSKSKSELADSSSLFIDKDWVAEHVRQVSRMLVGGIKVVGLYVWVSDAAFKNSTIMLCQTVKGVADAAPGLDGNWDERLLLHISYSPRRWNCRNCSLSSNITSSSLRPCDFKMGKVLTSLQTFKCMHNFNLRLPILRDSASKFQTLSDVLRHAISIHAKELAGAKALIDGKLVVESESYSSDGVHEVELLLSFLNDSSIEACSQGDVVGILSFSGLICSFAYLNSKEPISQAITDIKGDIITSLQSRLDIICDEVDADSGNNHDVGSQVSDELSAETPVPQLVLHLLRKGCSLPFPRRVFAPWLAVVYVCDYLQPFETVEVLKDHCMELLSMKAPTDVSKILEPEKEELSFKTKSFWDVAVPSYSEIHLMEDKSKRDGGSESSSSKTVKPGHINVVAAGLILLLSVLVGFLLFALKG

SEQ ID NO: 181883 - protein, 69 aa, Glycine max
  Clone ID: PAT_MRT3847_135254C.1.pep
FSMIRYSNVVRGKRLSVCESIWLETARVLLSESFFGIDLRSRRRWLHDRVSIMANDHWNRTTPSYVAFS

SEQ ID NO: 181884 - protein, 82 aa, Glycine max
  Clone ID: PAT_MRT3847_135255C.1.pep
IVDSTKNNADVRSFTHYHFLQQRMPASMSHSRRCLQAQFELLFHKVEPRQTHRKLSRACVHRFVSFQLVQQMQMVGLHKHCT

SEQ ID NO: 181885 - protein, 128 aa, Glycine max
  unsure (1)..(128): unsure at all Xaa locations
  Clone ID: PAT_MRT3847_135256C.1.pep
GSRITFSLYLIKKKVDAVYMLGDLGGNXTTPKADVIPETLGYTGVKADDDRIESLLTEDQGYEIVETIAAGRQKXATVPSGGGGPCCLCPXSTEGCAAVADPSADAQNDVKVEDKEESYEKEKNMTFH

SEQ ID NO: 181886 - protein, 117 aa, Glycine max
  Clone ID: PAT_MRT3847_135257C.1.pep
GLASAVHVTSPQLYTTASIPCCLVSTLAAHAMRPLSTKCAGFMGLATLQFITSGICTSITTNDHHGSYSLFSLYSSRILFFGHAFRLLPAVCLLHHPYTDFFFGPPPPPPPPQAGGT

SEQ ID NO: 181887 - protein, 81 aa, Glycine max
  Clone ID: PAT_MRT3847_135258C.1.pep
KAKRIVKALDLETIFFFFVKRRESLRRWTLKRSQVIFDKKEVSYELVLSWFLLINLQPFLKITCRTNDRLKHALQEKNNYR

SEQ ID NO: 181888 - protein, 188 aa, Glycine max
  Clone ID: PAT_MRT3847_135259C.1.pep
MGLKSLFNRNKDAISSDTASRSTSLSVRSRTRMADELEQVFNKFDVNGDGKISASELGSIMGSLGQPATELELDNMIREVDGDGDGCISLPEFIELNTKGVDSDEVLENLKDAFAVFDIDGNGSITAEELNTVMRSLGEDCSLAECRRMISGVDGDGDGTIDFEEFRVMMMMGSRHDTTDRVKPAPET

SEQ ID NO: 181889 - protein, 91 aa, Glycine max
  Clone ID: PAT_MRT3847_13525C.1.pep
LVLLQYRTGINPGSPLTIGGAFFFYFFFFFYISIFLGKSLLPPLLLLTGVGLLQSLLSFSLCPATPRLDILSFSFFKSIFTFRTILFSPTA

SEQ ID NO: 181890 - protein, 182 aa, Glycine max
  Clone ID: PAT_MRT3847_135260C.1.pep
MAETSIYPRAELDGHNGKAVTALATTRENPNLLLTASRDKSLLVWQLSNDGEEYGFARRRLQGHSHYVEDVVISSDGQFALSGSWDGTLRLWDLNTGITTRRFVGHTKDVLSVAFSADNRQIVSGSRDKTVKLWNTLGECKYTITEDGHTEWVSCVRFSPSTGNPLIVSCGWDKVVKIWKLS

SEQ ID NO: 181891 - protein, 123 aa, Glycine max
  Clone ID: PAT_MRT3847_135261C.1.pep
MAFASVIAIVAFLLLQPLSTTSDFLSPWLSPIFDDVCKEVECGKGTCKPSKNSTFLFECECHQGWKQSLSNDDDESSLKFLPCIVPNCTLDYSCSKAPAPVQEKATKSNESIFYACHWVDCGG

SEQ ID NO: 181892 - protein, 65 aa, Glycine max
  Clone ID: PAT_MRT3847_135262C.1.pep
LREIHSTILYSISPSNNLCFSAFALGNICRSAYIPQIKWPQLNGMKDPCDAITTHRGSWGNKCEK

SEQ ID NO: 181893 - protein, 81 aa, Glycine max
  Clone ID: PAT_MRT3847_135263C.1.pep
LGLGYRTPLKLFFQTTWSHCSGFPNVEPLLMIIKRKVSYATSFRVAKTSLGINRKIRASTSRNDHQLNANSRIYKMKFKRI

SEQ ID NO: 181894 - protein, 66 aa, Glycine max
  unsure (1)..(66): unsure at all Xaa locations
  Clone ID: PAT_MRT3847_135264C.1.pep
MIPEHYSDXSXFHRSXLTLFLXAPPTFLXLTFLQXPYGKHHRPGCGANLXPPLAWLFMEGPTXWLT

SEQ ID NO: 181895 - protein, 64 aa, Glycine max
  unsure (1)..(64): unsure at all Xaa locations
  Clone ID: PAT_MRT3847_135265C.1.pep
MFAIMAGLAPEGSHFDARXYYAKMNDALCTDGLDLFTFYYKYRXSFDAMVLYDNLFMGIYAYVF

SEQ ID NO: 181896 - protein, 96 aa, Glycine max
  Clone ID: PAT_MRT3847_135266C.1.pep
IWPIPLFPPSLFRERQRNEHRTYYGTRGKNTKGFFFINGDQNHAPTSKDFPLWDDCPRKDRMPIPINQRRRRARGPNEKTFRDPRTRPRLKKRWHP

SEQ ID NO: 181897 - protein, 153 aa, Glycine max
  Clone ID: PAT_MRT3847_135267C.1.pep
PTRSPTRPPASGDDVDMENMGIHGLLAPLKAFGYTVESLEMLLLPMAKDGTEALGSMGNDTPLAIMSNREKLTFEYFKQMFAQVTNPPIDPIREKIVTSTECMAGPEGDLTEITEEQCHRLSLKGPLLSIEEMEAIKKMNYRGWRGKVIDITY

SEQ ID NO: 181898 - protein, 106 aa, Glycine max
  Clone ID: PAT_MRT3847_135268C.1.pep
MAKWCMLVLVLALALAVATSARDVPNPKDAGLNDQKNFISYGGVGGYSGIGSNGLPFGGVGIGGGIGGGGLGGGLGGTTGIGGLGGFGGPIGGGGVGGGSIPHPTP

SEQ ID NO: 181899 - protein, 71 aa, Glycine max
  Clone ID: PAT_MRT3847_135269C.1.pep
MGASLSVSEKSIHEFMVKDAKGRDVNLSIYKGKVLLVVNVASKWYFYTHPFFLTQLFPYACCKNPNLLSFY

SEQ ID NO: 181900 - protein, 536 aa, Glycine max
  unsure (1)..(536): unsure at all Xaa locations
  Clone ID: PAT_MRT3847_13526C.1.pep
MEFDPIPIGSCSKEHQMIYKEWFNYADSDSDGRITGSDATKFFAMSNLSREDLKQVWAIADSKRQGYLGFTEFIIAMQLVSLAQSGHSITPDLLTSDVDFTNGKPPSMEGLDVLLVKKKHKQKEVDANATRKHHRWSRFQPPTSKQWAFHNLNKIVHSYLRHLLNQHLSSLFVSNGDTKSLXTVSNFXMVMLLGQYSTGKTTFIKHLLKSSYPGAHIGPEPTTDRFVVVMSGSDERSVPGNTVAVQADMPFSGLTTFGTAFLSKFVCSQMPHPLLEHITFVDTPGVLSGEKQRTQRAYDFTGVTSWFAAKCDLILLLFDPHKLDISDEFNRVISSLRGHDDQIPVGLNKANHVDPQQMMRVYGXALMWSLGKVLKTPEVMRVYIGSFNDKPVNDAATGPLGKELFEKEQDDLLSDLKDVPKAACDRRINEFVKRARAAKIHAYIISHLKKEMPAMIGKAKAQQKLIDNLAAEFGKVQREFHLPPGDFPNVEFFRERLSGYNIDKFEKLKPKMTQAVDDMLAYDIPNLLKNFRNPYD

SEQ ID NO: 181901 - protein, 101 aa, Glycine max
  unsure (1)..(101): unsure at all Xaa locations
  Clone ID: PAT_MRT3847_135270C.1.pep
SAGIHCDIICVTGWTVTSMQEDYVSICCVISSQECVPRTYRVLNPQIPFVLNRWMGKLTFPXALSQVIRYCLFXIGGGACAKNAFSMNMPKCCSLIVDIFL

SEQ ID NO: 181902 - protein, 63 aa, Glycine max
  unsure (1)..(63): unsure at all Xaa locations
  Clone ID: PAT_MRT3847_135271C.1.pep
MASHIVSYPVMCPKRELKFALXSFWDCKIIADDLQKVSADLSSSSWVXLARAGIKCIPRNTFS

SEQ ID NO: 181903 - protein, 125 aa, Glycine max
  Clone ID: PAT_MRT3847_135272C.1.pep
MAYHHNPQELPLHHFTDQQQHHNQPLVDNSLLSDPASKPASDPHQPAPNWLNNALLRTHYTDNNNNNNNNVNAANNNTNNGTNFLNLHTSTSDSGQWLARPILNRNHSEVIDDVTGAGDSNMAAA

SEQ ID NO: 181904 - protein, 63 aa, Glycine max
  Clone ID: PAT_MRT3847_135273C.1.pep
FFFFLFVQKFPIFFFWGKERKIFFALRKKGGKFGVGGFFFPTKKKKTFKGQIFTGVTGIFLLI

SEQ ID NO: 181905 - protein, 147 aa, Glycine max
  unsure (1)..(147): unsure at all Xaa locations
  Clone ID: PAT_MRT3847_135274C.1.pep
QLQSLVSGILGLVVAALLYKVTKTHGPNAXICTAPHAGGAWAIVGHWHLLWAHXLTHKTLGTTADTHGPIFTIQLGSYKGLASSCWEQDXQRFTVHDKTFSTKPCGAAXNVMTYYSAVEGFEHHGPYWRETRKSVTIGLLSNQTLEL

SEQ ID NO: 181906 - protein, 108 aa, Glycine max
  unsure (1)..(108): unsure at all Xaa locations
  Clone ID: PAT_MRT3847_135275C.1.pep
MAEQSRSPVPPATTITDLNEDCIAHCAGHLSLGDVCNLAMASSALKRLAYSDSIWQRFFRSXWHLELPWRSSGNGAAARGVYMARHAALRQFMFLDPSFSTLTVHVWK

SEQ ID NO: 181907 - protein, 244 aa, Glycine max
  unsure (1)..(244): unsure at all Xaa locations
  Clone ID: PAT_MRT3847_135276C.1.pep
MVSHPKSKFSVYQNPSFSAVLTSNSLQPSKFTILSFFSASAFAFLAVFFRENGFVHILSFAAFSPVTAXVRYAGGGVVAAKSLSDANSVHRNEILLTKHQLGLLGVKPKVDLAQPDSAKKPPKSKLQLPSSDLLVPLHRPIPSPTQGSSSSIDADGSNSNRXWCXLVLLVLHRGSQVSVSFYLSPXSVSPPRGSAGVDSAVSSPWSNRQAXSVTKITAEEKLEKFIAEVDERINESAGKMSTPP

SEQ ID NO: 181908 - protein, 103 aa, Glycine max
  Clone ID: PAT_MRT3847_135277C.1.pep
PQLGYLAQPWSVETLLLPVSNGLAHCLKRVCPPFFIHPFSLVLKRMSPPFNPTRGLPLQKYHFLSYSVGGPAPSSFIFVPPLMFLPPGLFAVLTVPQFIIPRL

SEQ ID NO: 181909 - protein, 66 aa, Glycine max
  Clone ID: PAT_MRT3847_135278C.1.pep
LYESPRCTFNLQSKSFLYLDLKSIHRQLIHTNQPLYITKRTVYMFIIHRSANKSRYCCDCDNSQMP

SEQ ID NO: 181910 - protein, 101 aa, Glycine max
  unsure (1)..(101): unsure at all Xaa locations
  Clone ID: PAT_MRT3847_135279C.1.pep
DTPVNSVSLFLQLVLQLTLPILLNTKLPIAQRTQDLVSGLTLNEKLAQLVNSAXSYQWWSGALNGAADAGFNIRFKGIIKSTTRFPKYAATRTFRRSIRCG

SEQ ID NO: 181911 - protein, 325 aa, Glycine max
  Clone ID: PAT_MRT3847_13527C.1.pep
MEERSLYSLVFLVLALAIVNKVHGQGTRVGFYSSTCPRAESIVKSTVTTHVNSDSTLAAGLLRMHFHDCFVQGCDASVLIAGSGTERTAFANLGLRGFEVIDDAKKQLEAACPGVVSCADILALAARDSVVLSGGLSYQVLTGRRDGRISQASDVSNLPAPFDSVDVQKQKFTAKGLNTQDLVTLVGAHTIGTTACQFFSNRLYNFTANGPDPSIDPSFLSQLQSLCPQNGDGSKRVALDTGSQTKFDLSYYSNLRNSRGILQSDQALWSDASTKTTVQRYLGLIRGLLGLTFNVEFGKSMVKMGNIELKTGTDGEIRKICSAIN

SEQ ID NO: 181912 - protein, 63 aa, Glycine max
  unsure (1)..(63): unsure at all Xaa locations
  Clone ID: PAT_MRT3847_135280C.1.pep
XSXXXXFXCXGXXTLXXMXXIQRPEXETRKLESVGXLXCVTXYIXVVLIXRLXFXFVVSECFW

SEQ ID NO: 181913 - protein, 68 aa, Glycine max
  Clone ID: PAT_MRT3847_135281C.1.pep
PASHPPALDRTNSPQNSFPPINKHPPPWWGDGHFEPLSQSLFSAEFNINPYFFFALRKKKKKKEPPTA

SEQ ID NO: 181914 - protein, 63 aa, Glycine max
  Clone ID: PAT_MRT3847_135282C.1.pep
RLSSIHRNLSRRRQDNTRCFGIQTVAQFLKRIRADTILLHCYHHFLVYCIAQCCKHTGCKSLG

SEQ ID NO: 181915 - protein, 39 aa, Glycine max
  Clone ID: PAT_MRT3847_135283C.1.pep
NPGTHSRNILNSHASEHGRTRGSTREYRKGTSRRTSLSL

SEQ ID NO: 181916 - protein, 115 aa, Glycine max
  unsure (1)..(115): unsure at all Xaa locations
  Clone ID: PAT_MRT3847_135284C.1.pep
MRHLMAQLHCAICNDLQLPHAQVVNMGNDAQELNLDKPDEALQMRKKALSCIERLHKAVAPTIAQIVEFHSMQRMMTAPDSNDNIDLXLMSIDTLGSQGACQAFPXKIVFDDNLV

SEQ ID NO: 181917 - protein, 78 aa, Glycine max
  unsure (1)..(78): unsure at all Xaa locations
  Clone ID: PAT_MRT3847_135285C.1.pep
AARRRQKGFAIVYYYMLAVIGQWKHSTAXPARRDERGNVNNIIVIGEAANVRPYVQHQQKVCFKPIVFFILINLLRVS

SEQ ID NO: 181918 - protein, 42 aa, Glycine max
  Clone ID: PAT_MRT3847_135286C.1.pep
KETSFCCLLKKKKKKKKKKKKKKKKKKKKKKKKKKKKKKKKK

SEQ ID NO: 181919 - protein, 129 aa, Glycine max
  unsure (1)..(129): unsure at all Xaa locations
  Clone ID: PAT_MRT3847_135287C.1.pep
MTVIEDLISLEDDMAMGTAPRXLDPINIFYKQKLPRYGKRHSCLRALIHYDLSASMLIETGSVYDGQRIPSAASAPLALENIKQDVESLDADSLGEKTPYSTRRKLPADIAGTPGVDADLDSGRYSLEA

SEQ ID NO: 181920 - protein, 155 aa, Glycine max
  unsure (1)..(155): unsure at all Xaa locations
  Clone ID: PAT_MRT3847_135288C.1.pep
MMSGRNVRESLLGSLNHHRRGHSFNGVANNNHHHDDNLDLFSDNRRSLALAASSDDSSDVSVKLRRLSVVTAKPVRSGIDDLLSSTEGGKHDYDWLLTPPXTPVFPSEGESQTTLAPPRRSLTRSTSTSKAFRLAVSQSENNPPSRPARSRSVTR

SEQ ID NO: 181921 - protein, 80 aa, Glycine max
  Clone ID: PAT_MRT3847_135289C.1.pep
MLNRLCLERSSRDSGHECGVVRLWNELTEIPLVLDISGQFFVSYSRCLAQRVFMYGHVEFSCACFVQFHFGLMSLLSWFS

SEQ ID NO: 181922 - protein, 81 aa, Glycine max
  Clone ID: PAT_MRT3847_13528C.1.pep
TKFDLSYYSNLRNSRGILQSDQALWSDASTKTTVQRYLGLIKGLLGLTFNVEFGKSMIKMGNIELKTGTDGEIRKICSAIN

SEQ ID NO: 181923 - protein, 94 aa, Glycine max
  unsure (1)..(94): unsure at all Xaa locations
  Clone ID: PAT_MRT3847_135290C.1.pep
AARKADLWISATIQSVKKACPASLTIFIRSIRQGGLXGVGQCFVYDYRVGGHILKVLPSKHFXRVCRVKLIDKARIPKWDPYQLELVSESGVNR

SEQ ID NO: 181924 - protein, 54 aa, Glycine max
  Clone ID: PAT_MRT3847_135291C.1.pep
LLGRCDGYTILVAEAMLTAPSLTLSLATSVYYIHIYLGTIAVRSIPRLTYSDIF

SEQ ID NO: 181925 - protein, 84 aa, Glycine max
  Clone ID: PAT_MRT3847_135292C.1.pep
TSLSTTSHQTTLSSHQKTLLDSHRHRRRTSTRRSRTRFNFSLPSPVYVMFPLGFLTTFKSLPIFFCAIGTLGFSSSDLGTWGFR

SEQ ID NO: 181926 - protein, 203 aa, Glycine max
  Clone ID: PAT_MRT3847_135293C.1.pep
LEEKSPGETESSGSISSLSERFSDEQVYPTQAGFSPEVTSKAAPNEEVSTPKKSKEEDTGLKILTDKLATALLTISAKEDLVKQHSKVAEEAVSGWEKAENEVSSLKQKLDAERQKNSILEDRVGHLDGALKECMRQLRQARELQEQKMVEAVVNSSRDWESKKSELERKVAELEAQLQTAKADAAASIPFDLHQRLEAVQNE

SEQ ID NO: 181927 - protein, 70 aa, Glycine max
  Clone ID: PAT_MRT3847_135294C.1.pep
EMALRWVLHSACHVLGYPTRNIEEEECKKIEGYSNIGEAKSVKGLSLANNFNEVDQCYPCSGFQMPLHYP

SEQ ID NO: 181928 - protein, 110 aa, Glycine max
  Clone ID: PAT_MRT3847_135295C.1.pep
GKNLLCSPGCVKELPSPTTSKNKTPNLYARLSHQMVRDPENYVKQVTGPMVYCLCAGAQRAPEPWGCLGSPLFPFPHYVRENSGNSITVWARPRWIVPLPVINVNSNWLL

SEQ ID NO: 181929 - protein, 32 aa, Glycine max
  Clone ID: PAT_MRT3847_135296C.1.pep
LTDLPSAAPSDGAAKLMIAFKINYLISSTSAP

SEQ ID NO: 181930 - protein, 260 aa, Glycine max
  Clone ID: PAT_MRT3847_135297C.1.pep
MWLLPNRITGKSLKPDEHIYSSKRLFYIYAHHGIYVSDDKVIHFTRRGQEVGTGTALDLLLISSGPAKSRESCPTCMAPQEEHGVISSCLNCFLAGGVLYRFEYAVTPALFLAKARGGTCTLAVSDSDDIVIHRAKYLLENGFGCYNVFKKNCEDFAIYCKTGLLEIGQSGQAVSIIGGPLAAALSSPLRMVTTNVYGMAATAVGVYCASRYMADIGMRPNAVKVPVEQLTTRLATGLLQVVEPQIPTNISRQSPQLVTQ

SEQ ID NO: 181931 - protein, 141 aa, Glycine max
  Clone ID: PAT_MRT3847_135298C.1.pep
MGLLSNRVTRESLKPGDHIYSWRTAYIYAHHGIYVGDDKVIHFTRHGQEVGTGTALDLLLISSGPAKPRESCPTCTAPQEEHGVISSCMNCFLAGGVLYRFEYAVTPALFLAKARGGTCTLAVSDDDDICRPSAKYLLENG

SEQ ID NO: 181932 - protein, 43 aa, Glycine max
  Clone ID: PAT_MRT3847_135299C.1.pep
YIAISGKLIQLMPYKETIYMKIFYLPYQDQIMELPFLHLINLN

SEQ ID NO: 181933 - protein, 97 aa, Glycine max
  unsure (1)..(97): unsure at all Xaa locations
  Clone ID: PAT_MRT3847_13529C.1.pep
TYRMQHSYSTKSNQHLFFKSPVEXLFYQTTKNRASGPRCPVSGXMIQVIPHLMPAYYGRSRLPTNRETVNRAYGGFLSGSSVREMIILTFLVEQLKI

SEQ ID NO: 181934 - protein, 101 aa, Glycine max
  Clone ID: PAT_MRT3847_1352C.1.pep
VLGVVVSVAVPVGSKWSGFCLVYAWDCAAKIILSTDPNPVFALWVINLCDPVELLCLWNNMFMQVQVLVFAFVLEDVSDSGLYYSLQFLLKYGWLVTRISY

SEQ ID NO: 181935 - protein, 93 aa, Glycine max
  unsure (1)..(93): unsure at all Xaa locations
  Clone ID: PAT_MRT3847_135300C.1.pep
XXXXPXXFRDXPRRPQAXXARGRMSRSRLLWFTFGFASTYVALYQTVLKDLTLQRHAFTSHTERYFRILEARLSNIEQSSSSSSVPAPNQVEG

SEQ ID NO: 181936 - protein, 72 aa, Glycine max
  Clone ID: PAT_MRT3847_135301C.1.pep
TAVRRRLQAGSKMNPKGDGRLSPFYAGTFRTPSSSPCLRKKYSIRCFFNSGPHGKVSWTFQNLIHQLPKPPF

SEQ ID NO: 181937 - protein, 83 aa, Glycine max
  unsure (1)..(83): unsure at all Xaa locations
  Clone ID: PAT_MRT3847_135302C.1.pep
GTKYTFLMKTHNAVHTVRRYFDEGHVYXVSKLASPSIKCTVSFIKAYANMTDDTNNFXAFPHKLVQFGEIQSASFLNGCVGGR

SEQ ID NO: 181938 - protein, 65 aa, Glycine max
  Clone ID: PAT_MRT3847_135303C.1.pep
IFSNKTPFLNGGGNFLFLKYTFSQKFTVLCRGYFQCPMTVFTPLLFRLGQLDGLHVIFGDKRIKK

SEQ ID NO: 181939 - protein, 67 aa, Glycine max
  unsure (1)..(67): unsure at all Xaa locations
  Clone ID: PAT_MRT3847_135304C.1.pep
ARDRFRIVEGLIASVHGSRASQQTVDGXSDKDCSGGRAASFDMSPRRTGAGKAVGRLRRALIGKWTG

SEQ ID NO: 181940 - protein, 47 aa, Glycine max
  Clone ID: PAT_MRT3847_135305C.1.pep
MWSVTIILMQPLQHEDDLYYFFLVEHERPYLCLLCQMIYCAFLIILF

SEQ ID NO: 181941 - protein, 72 aa, Glycine max
  Clone ID: PAT_MRT3847_135306C.1.pep
FMARLHRTRSMTSSNSNSCCYNSTSPTVGWSRCSTPPRSWLWSPRSRCGPHHGGKGVGLPPTSRPRTRGTTK

SEQ ID NO: 181942 - protein, 128 aa, Glycine max
  Clone ID: PAT_MRT3847_135307C.1.pep
PRVRKSMGDWMNKQLRIPDPHSAKKVEATDNSPESGGFTMVNGNGEDPVDGSDSQSEVSNDVSDVSTIEQRRAYKLELQEGISLFNRKPKKGIEFLINANKVGDSPEEIAAFLKDASGLNKTMIGDYL

SEQ ID NO: 181943 - protein, 41 aa, Glycine max
  Clone ID: PAT_MRT3847_135308C.1.pep
ARNSARAATNNRKHHWLVEQKLLHFVDAFHQYVMDRVCTLY

SEQ ID NO: 181944 - protein, 62 aa, Glycine max
  Clone ID: PAT_MRT3847_135309C.1.pep
LVVNVHIEPHTISNIVMNIYLIPPHVRVYLNHYPTCPMNSATSRLYAQAIPKLEGTVMSWIL

SEQ ID NO: 181945 - protein, 68 aa, Glycine max
  unsure (1)..(68): unsure at all Xaa locations
  Clone ID: PAT_MRT3847_13530C.1.pep
MASSVMASVALKXGLCTVEKSSVRGLPLSQGSLLXFRVVASGKMISTEKLFCVNGGMALRDGTGASGR

SEQ ID NO: 181946 - protein, 172 aa, Glycine max
  Clone ID: PAT_MRT3847_135310C.1.pep
MPTLVKIVLIILSPGKMNQMRKIYTQRYHMSLLSCLDSENTTQLLPGLVVTAPEFLDGEDEEGDASGQETNSSKDKGKQSTDDAICSALANFLFSFSLESPEYTKRLSVKAPEFSNEDDDDHESNSEIAKNDPVHLTESEEFSHIQVLASSYTLENSEKIDPDSNDKFSKKT

SEQ ID NO: 181947 - protein, 75 aa, Glycine max
  unsure (1)..(75): unsure at all Xaa locations
  Clone ID: PAT_MRT3847_135311C.1.pep
MTCVCVCFFSHLKIACCGGNCGCXSSCKCEIRCGRCMMYPLLSXYTVSTTTKTFGMGAAPVXAQFEGADMGVSSE

SEQ ID NO: 181948 - protein, 209 aa, Glycine max
  Clone ID: PAT_MRT3847_135312C.1.pep
MLSVEEDKVAATPDVKNAPVTTDFDPSNDLANLKNQSDHNVENSESQPDKDLSSSKAEVLPESETQASSGDANEGTLPKYELDNAEELPNSESENPKLLPDNQSSNDEGPHSNQHVESEAQFNNLSASSEAPADDNHVSSEATLDQKPASEAPLKYPSTSSEAPADDNLVSSEATLDQQPKSEAPPSNQLVNSETLPNMVCYVLNIRLV

SEQ ID NO: 181949 - protein, 100 aa, Glycine max
  Clone ID: PAT_MRT3847_135313C.1.pep
RILALHALEEIKYKEQRERFLTEREYLADNYPAWATTLLPVKLLPPSLLHEILEAVRFVDFPFWPLILFYLFVWLLLCISLLCVLLISASCHNNNLWTII

SEQ ID NO: 181950 - protein, 67 aa, Glycine max
  Clone ID: PAT_MRT3847_135314C.1.pep
SADSQAHRQGTSQEKQPNSPPMSSQGRIHRLRSYEQWLRPSLWQSEEGKPQSPLPHVTFTRTAYGGT

SEQ ID NO: 181951 - protein, 71 aa, Glycine max
  Clone ID: PAT_MRT3847_135315C.1.pep
PSIVQVPCRPPGQINLAARVFQLVKAHSSFLCVRQGTLRPGMAVNPYLVCHLDNEHPRLICTVNACVYINP

SEQ ID NO: 181952 - protein, 96 aa, Glycine max
  Clone ID: PAT_MRT3847_135316C.1.pep
MNVLQVYPDLEVAFVISEEESLFNALSKTVELLEDNTALISQYYYGCIFHELLAFQLAGRHAPAKRNCENVKSVGMIGFARSASSVLNTAELSIDG

SEQ ID NO: 181953 - protein, 71 aa, Glycine max
  Clone ID: PAT_MRT3847_135317C.1.pep
LFFEGCPGRKRTVHGGQPYIHKVKSIITQNNPRQIHLRRNKGIKEKELKAFACQQISFLELLTKTITSFTI

SEQ ID NO: 181954 - protein, 111 aa, Glycine max
  Clone ID: PAT_MRT3847_135318C.1.pep
MKHLAAYLLLGLGGNTSPSAADVKAVLESVGVEADSERLDKLISELEGKDIQELISSGSEKLASVPSAGAGGAAAAGGAAAGGAAPAEEKKEEKEEEKEESDEDMGFGLFD

SEQ ID NO: 181955 - protein, 46 aa, Glycine max
  Clone ID: PAT_MRT3847_135319C.1.pep
QRMLKADGDLPSERMDHGNSPGFVESPIHVNNGCATKIESSPVATG

SEQ ID NO: 181956 - protein, 37 aa, Glycine max
  Clone ID: PAT_MRT3847_13531C.1.pep
AQKKKEYDAISLGTTNGIIFLRLKTLTQEGRERTSTR

SEQ ID NO: 181957 - protein, 70 aa, Glycine max
  Clone ID: PAT_MRT3847_135320C.1.pep
ASSGRPLEPIVQNLDPGFPLHPSCLSLPHSSLRFTEAVTVSRDVLGCCMLKRVSRLDESRSFRLEPIRLD

SEQ ID NO: 181958 - protein, 124 aa, Glycine max
  unsure (1)..(124): unsure at all Xaa locations
  Clone ID: PAT_MRT3847_135321C.1.pep
MVRKRETCLGLYITTNHNLHGVDTNXVFSDATTAVSTXIGKPEKSRMVILKASRRISFEGNXEPALYAEIVXTGGINAEMKMKLIATFEPFWQPTCLSKNTTFLKVFDVKCDVGPTPNVMPSNS

SEQ ID NO: 181959 - protein, 108 aa, Glycine max
  unsure (1)..(108): unsure at all Xaa locations
  Clone ID: PAT_MRT3847_135322C.1.pep
KKFKKKLKKKKKKKKKKKKKKKKKKKKKKKKKKKGEKKKKKKKKRRMIAKNKGPAYSQQXPHIWGACKNKVFYEKTKKQKNRNLRKTTTFQKLENKKKNPPESPLNNI

SEQ ID NO: 181960 - protein, 56 aa, Glycine max
  unsure (1)..(56): unsure at all Xaa locations
  Clone ID: PAT_MRT3847_135323C.1.pep
RGVVFFFFVSKEMSKIPLIIECYFLIMQHFILNIYCMRYHKYKISLHNQGSSXXAG

SEQ ID NO: 181961 - protein, 349 aa, Glycine max
  unsure (1)..(349): unsure at all Xaa locations
  Clone ID: PAT_MRT3847_135324C.1.pep
TRPHLGCGAVLVSGNELRLALRAGFDPTRCIFNGNGKILEDLVLAAQEGVFVNIDSEFDLENITEAAKRAGKKVNVLLRINPDVDPQVHPYVATGNKNSKFGIRNEKLXFLDAVKELPNELKLVGAHCHLGSTITKVDIFRDAATIMINYIDQIRDQGFEVDYLNIGGGLGIDYYHSGAILPTPRDLIDTVRDLVISRGLNLIIEPGRSLIANTCCLVNRVTGVKSNGSKNFIVIDGSMAELIRPSLYDAYQHIELVSPAPANAEIANFDVVGPVCESADFLGKDRQLPTPAKGTGLVVHDAGAYCMSMASTYNLKMRPPEYWVEEDGSVSKIRHGETFEDHIRFFEGL

SEQ ID NO: 181962 - protein, 535 aa, Glycine max
  unsure (1)..(535): unsure at all Xaa locations
  Clone ID: PAT_MRT3847_135325C.1.pep
TNPVLGPEFPARPTRLREDDRGGRVLSCDYPCNTHCLVGKIFHQQHTAMAGSNILSHSPSLPKTYSHSLNQNALSQKLFFLPLKFKATTKPRALRAVLSQNAVKTSVEDTKNAHFQHCFTKSEDGYLYCEGLKVHDIMESVERRPFYLYSKPQITRNVEAYKDALEGLNSIIGYAIKANNNLKILEHLRHLGCGAVLVSGNELKLALRAGFDPTRCIFNGNGKILEDLVLAAQEGVFVNIDSEFDLENIVEAAKRAGKKVNVLLRINPDVDPQVHPYVATGNKNSKFGIRNEKLQCFLDAVKEHPNELKLVGAHCHLGSTITKVDIFRDAATIMIDQIFEVDYLNIGGGFGIDYYHSGAILPTPXDLITPRDLIDTVRDLVISXDHNLIIEPGRSLIANTCCLVNRVTGVKTNGSKNFIVIDGSMAELIRPSLYDAYQHIELVSPAPSNAETETFDVVGPVCESADFLGKGRELPTPAKGTGLVVHDAGAYCMSMASTYNLKMRPPEYWVEDDGSVSKIRHGETFEDHIRFFEGL

SEQ ID NO: 181963 - protein, 165 aa, Glycine max
  unsure (1)..(165): unsure at all Xaa locations
  Clone ID: PAT_MRT3847_135326C.1.pep
MGSGIKVSFSVLCLLGLVIVGDHAAYAQDSPTDFVNAHNAARSQVGVPNIVWDDTVAAFAQNYANQRKGDCKLVHSGGDGKYGENLAXGTGNLSGTNAVKLWVDEKSKYDYNSNTCVGGECRHYTQVVWKNSVRLGCGKVRCDNGGTFITCNYAPPGNYVGQRPY

SEQ ID NO: 181964 - protein, 179 aa, Glycine max
  Clone ID: PAT_MRT3847_135327C.1.pep
MKGYEPRSSSSCAACKLLKRRCIPNCIFAPYFRSDECKKFAKVHKVFGASNVSKILIEVPEEQREDTVNSLAYEAEARLRDPVYGCIGAIALLQRKMVELQHDLAIAKDRLARCHAAAAAATTTIPSPDILHANVSLPPFPDFCTSSSDFNDIFCHSSSSQLLGRHETVDDFNQIPYIF

SEQ ID NO: 181965 - protein, 81 aa, Glycine max
  unsure (1)..(81): unsure at all Xaa locations
  Clone ID: PAT_MRT3847_135328C.1.pep
YEFIFAKAVKIIILSSRKRITELVKVGGVIGSPNSLRTGYVEAPLYAPISKYDRFPGHKMEISTALASXDPGSTICMLPVG

SEQ ID NO: 181966 - protein, 155 aa, Glycine max
  Clone ID: PAT_MRT3847_135329C.1.pep
VELWHPKKGTKQITARHVVIAVGGRPKELTCPGGEHAISSDDIFWMKKKEPGKTLVVGASYVALECAGFLKGMGYDVKVMVRSILLRGFDQDIASKIREYIEVQSGIEFIHKTVPQSITKLENGQLLVKWTTEDGERSEEAFDTVLNATGRAPDL

SEQ ID NO: 181967 - protein, 135 aa, Glycine max
  Clone ID: PAT_MRT3847_13532C.1.pep
MASVSQKTTSPSSSSCSATNAAARIPRLAAAPSPAPATAAAVPQDWTAAVTDVPRISSTNASAAKGVVAAMPRAQSSHPLDPLSAAEISVAVATVRAAGSTPELRDSMRFIEIVLLEPDKNVVALADAYLFPPFQ

SEQ ID NO: 181968 - protein, 200 aa, Glycine max
  unsure (1)..(200): unsure at all Xaa locations
  Clone ID: PAT_MRT3847_135330C.1.pep
RLLRALFEIVLKRGWAQLAEKALNLCKMGTKRMWSVQTPLRQFNGIPSDLLTKLEKKDLAWERYYDLSSQEIGELIRAPKMGRTLHKFIHQFPKLNLAAHVQPITRTVLRVELTITPDFAWDDRIHGYVEPFWVIVEDNDGEYILHHEYFMLKKQYIDEDHTLNFTVPIYEPLPPQYFIRVVSDRWLGSXTVLPVSFRHL

SEQ ID NO: 181969 - protein, 73 aa, Glycine max
  Clone ID: PAT_MRT3847_135331C.1.pep
SFFPIVSFVRLVYNDKLVLMVDKMEVGVGSPGFHRVQAILAPSASMGGGSANDRSAGQEIRPFLSGSNRMNSS

SEQ ID NO: 181970 - protein, 41 aa, Glycine max
  unsure (1)..(41): unsure at all Xaa locations
  Clone ID: PAT_MRT3847_135332C.1.pep
VGXNRTXDIGFFQEGVKKGYFHXIFRIFLFRXXQEGIGIGL

SEQ ID NO: 181971 - protein, 176 aa, Glycine max
  Clone ID: PAT_MRT3847_135333C.1.pep
IEVRICCVAMLQVQEAQNKLDVSKEAEEQPCDVQEAENKLDAPKDAKEQPCDVQEAENKLNVPKDAEEQPVDETKGHELDITGERDVQILDDTKSNIRSGTSAMDGESINISGSKRRPHSAITKNSKRGSAKANLETDNLESVQEPKSEMQLNTVPRKKGRKPNSLLNAEEGYDHS

SEQ ID NO: 181972 - protein, 57 aa, Glycine max
  Clone ID: PAT_MRT3847_135334C.1.pep
LCERLSILYQFPQQHPKNEPKKWYSFCYLGPESLTAERLASLLQSDGPEEVPTSLVE

SEQ ID NO: 181973 - protein, 317 aa, Glycine max
  Clone ID: PAT_MRT3847_135335C.1.pep
AEKLLDKMIEKEIVLRQKNAYETELFEMEPSAYNLMIGYLCEHGRTGKAETFFRQLMKKGVQDSVSFNNLICGHSKEGNPDSAFEIIKIMGRRGVARDADSYRLLIESYLRKGEPADAKTALDGMLESGHLPESSLYRSVMESLFDDGRVQTASRVMKSMVEKGVKENMDLVSKVLEALLMRGHVEEALGRIHLLMLNGCEPDFDHLLSVLCEKEKTIAALKLLDFVLERDCIIDFSIYDKVLDALLAAGKTLNAYSILCKILEKGGSTDWSSRDELIKSLNQEGNTKQADVLSRMIKGTDGGPPKRGGKRKTTVST

SEQ ID NO: 181974 - protein, 96 aa, Glycine max
  Clone ID: PAT_MRT3847_135336C.1.pep
FFLPEGATFLEYFTYILYLLIAGRREGGPGQPVTYGESIPDGCNDWGTTATVHEQLAEADEPRRNGRRAGLRERGAEGQSKRGRGELSRPARTDAA

SEQ ID NO: 181975 - protein, 79 aa, Glycine max
  Clone ID: PAT_MRT3847_135337C.1.pep
LLLTTLSSTPSSTTSPRPSYTFSTITFRCQNSITNKNSLIPITSLNPPSFSPKTSSTFKKLLHPYFTHSQKISPHQSFF

SEQ ID NO: 181976 - protein, 54 aa, Glycine max
  Clone ID: PAT_MRT3847_135338C.1.pep
IMRRINPSMSLDLWKNIGRYLASYEHFSKLKTYFIYFTTPTRTYLTKVALNWLR

SEQ ID NO: 181977 - protein, 33 aa, Glycine max
  Clone ID: PAT_MRT3847_135339C.1.pep
VSKMFFPGCLLFSCVWPGWMLLLAIYARINVSS

SEQ ID NO: 181978 - protein, 85 aa, Glycine max
  unsure (1)..(85): unsure at all Xaa locations
  Clone ID: PAT_MRT3847_13533C.1.pep
MAQLPPKIPTIPQNWPSFPHQRVPSMANFNPTTFTTTATTTPPPPSWVDEFLDFSSARRGXHRRSASDSITFLEAPFLEECRAGF

SEQ ID NO: 181979 - protein, 62 aa, Glycine max
  unsure (1)..(62): unsure at all Xaa locations
  Clone ID: PAT_MRT3847_135340C.1.pep
KLFGVLSFFPHLTWIRRVCAIYKWFQEHPWTCGSLRVPTALYKTFAMSPKXQKKKKKKXXXT

SEQ ID NO: 181980 - protein, 148 aa, Glycine max
  Clone ID: PAT_MRT3847_135341C.1.pep
TRPDTPGQANTMCNPYPTDPAHCLGHSRYSALYLAPYANIPLYPQCYVASSRLVPCRRGTLLSSTIRINISLSLRNVTPSIHFTLSIIPSFLLFIPLTINCFCCSRYLSPPFFFFFLLQYSVYTIHSPRFFLASFMASIGYSLPILLF

SEQ ID NO: 181981 - protein, 59 aa, Glycine max
  Clone ID: PAT_MRT3847_135342C.1.pep
GPTYDVEAVGTHAGKVIDLLTSCLVSFHGLSLVSFLADNHLILRSLVTLHKTTRYATVF

SEQ ID NO: 181982 - protein, 133 aa, Glycine max
  Clone ID: PAT_MRT3847_135343C.1.pep
QGQRYWYYYIIDGYDVSHDPAKDHTTEPTTGRKLNIIDIPAAKSTSKTTTSSSDRKSRRVSTASIPKGRGLSPERIVAPKPQRPHETRQVINTQYDKTTLEDLNRRFAKQQIAESSDESDYDSDEGSDVPSLT

SEQ ID NO: 181983 - protein, 51 aa, Glycine max
  Clone ID: PAT_MRT3847_135344C.1.pep
NRKQKQSLLDFKNLPISSYFLVYDFLRERKSLSVLATDFVNHFLFHSYDIC

SEQ ID NO: 181984 - protein, 66 aa, Glycine max
  Clone ID: PAT_MRT3847_135345C.1.pep
MSNIADYGPIVSGKIADYAGRRVVSQSQATLNSNFNVSIAHLWLFCILTCKQWVSERFSASWDHLS

SEQ ID NO: 181985 - protein, 86 aa, Glycine max
  Clone ID: PAT_MRT3847_135346C.1.pep
APLLSILMPIDTHNDRVQKRQAASHIHLPGVCKKHTAQLDANKALRKGLRRDLTPSPCPTNTMDSLLSTLAPPTKIPTCNRGVWKK

SEQ ID NO: 181986 - protein, 128 aa, Glycine max
  Clone ID: PAT_MRT3847_135347C.1.pep
PARDSSRRRSVPFRRSSTGDDFEFSDKGPPSFDRVGSKGVNPALIGLLLVGGLLLIFLGGNYVLYTYAQKTLPPRKKKPISKKKMKKERLKQGVSAPGEENFFLTLYSVMVNCALLEKISRSVVSGVW

SEQ ID NO: 181987 - protein, 72 aa, Glycine max
  Clone ID: PAT_MRT3847_135348C.1.pep
IGGVNPSLKTKKLEIYKFGSNNRGGIIFIPRGGRGGKQQWLNMFINGGRGLIISMAKKNWGRSTPGGRSPLN

SEQ ID NO: 181988 - protein, 302 aa, Glycine max
  unsure (1)..(302): unsure at all Xaa locations
  Clone ID: PAT_MRT3847_135349C.1.pep
MGTLLISKIREEYPDRMMCSFSVVPSPKVSDTVVEPYNATLSVHQLVENSDETFCIDXTRALYDICFRTLKLTTPTYGDLNHLVSAVMSGITTCLRFPGQLNADLRKLAVNMVPFPRLHFFMVGXAPLTSRGSQQYRALTVPELTQQMFDAKNMMAASDPRHGRYLTVAAMFRGRMSMKEVDEQMLNVQNKNSSYFVEWIPNNVKTAVCDIPPKGLKMSVTFIGNSTAIQELFKRISDQFTAMFRRKAFLHWYTGEGMDEMEFTEAESNMNDLVSEYQQYQDATAEEEGEFDEEEGEAEAEA

SEQ ID NO: 181989 - protein, 75 aa, Glycine max
  unsure (1)..(75): unsure at all Xaa locations
  Clone ID: PAT_MRT3847_13534C.1.pep
LYFPLTSIPLSTAKPLNTNPKLITLSSSSSYNIKSSIIYSMALVATLPIRTPTQTQQXMALDTESQLSLIQIHNK

SEQ ID NO: 181990 - protein, 53 aa, Glycine max
  Clone ID: PAT_MRT3847_135350C.1.pep
RQDLQRGMLHKMAHRALHWCPPAMNRSCSQHCKEYLFITYGYEPLVEVLDAEM

SEQ ID NO: 181991 - protein, 55 aa, Glycine max
  Clone ID: PAT_MRT3847_135351C.1.pep
CGCDQTKIFNSITHVPHKSVLSINQDDNFFFFLLSNENSISNPYIKIALTDPFVC

SEQ ID NO: 181992 - protein, 73 aa, Glycine max
  Clone ID: PAT_MRT3847_135352C.1.pep
KKDGRPPGTGWDFQGDHRGLKKKGVFLPCTQFGGRLHLRMGKVFHPKEKNSRIKQGSIQTPKDFFLKRAANKI

SEQ ID NO: 181993 - protein, 87 aa, Glycine max
  Clone ID: PAT_MRT3847_135353C.1.pep
RVMGNHQVSSSEGLSIGFGTWSMLGVPTEGRGHICRRVAYGKGKRVVPILAQGLEVLWFPSSPGWSRLSSYILSKKEGPSVYGNDEK

SEQ ID NO: 181994 - protein, 53 aa, Glycine max
  Clone ID: PAT_MRT3847_135354C.1.pep
HAYGAAIYVASDFEGAIQGAPEGAVYLLRDTVWLDQKKQLKLLQHQFCVQHHA

SEQ ID NO: 181995 - protein, 75 aa, Glycine max
  Clone ID: PAT_MRT3847_135355C.1.pep
SVEKKKRAAAPPPVLVKFNDVGIKVTVGLELAPLGSAKWLQSMMSVNGHSHFLQSHSDYYYYYYENGSRAFQEDT

SEQ ID NO: 181996 - protein, 59 aa, Glycine max
  Clone ID: PAT_MRT3847_135356C.1.pep
GQPRIRLRLLCTLLGKMFSDTASNVVLTNDIITLAGHRSTHDAVKNTVTHIPKLNEAAE

SEQ ID NO: 181997 - protein, 326 aa, Glycine max
  Clone ID: PAT_MRT3847_135357C.1.pep
MVFFFPLKINCQVLSMLLDRNMNVDIVNHNNQTPLMYAAKQGKIDCVKKLIQAGANVFMIDSVHGGGCLHDAASHGHVDCLKAILFAAHFTAFEDSRGYLRFVDSRDFNGFAPLHLAALKGQSECVDALLDNDAILCARTSNCGGTALHLAARSGSLDCIRILLARGADRLQFDYHGNTPYTIALEHGQEECAALLGSTSGSSLVWPNHLRFIRELDKKTKALLEKALVELNKERQKAKNKPRSSRNSERNNNNIASMAGKKELCSICYDRVCTFVVRPCGHEMCAHCIMRLCQKKSDIDAPRSSNSKPVCPFCRGDIVRLLAKTK

SEQ ID NO: 181998 - protein, 507 aa, Glycine max
  Clone ID: PAT_MRT3847_135358C.1.pep
MSRYDSRSGDPTSYRDRRSDSGLGAPTGFGGSVQHSSSNRRDYDDGGSPKRNLSLDGLPHFEKNFYIESPAVRAMTDAEVNEYQPQREITVEGRDIPKPVKTFHDAGFPEYVLQEITKAGFTEPTPIQSQGWPMALKGRDLIGIAETGSGKTLAYLLPAIVHVNAQPILNPGDGPIVLVLAPTRELAVQIQQETTKFGASSRIKSTCIYGGVPKGPQVRDLQKGVEIVIATPGRLIDMLESNHTNLQRVTYLVLDEADRMLDMGFDPQLRKIVSQIRPDRQTLYWSATWPKEVEQLARKFLYNPYKVIIGSSDLKANHAIRQYVDIVSEKQKYDKLVKLLEDIMDGSRILIFMDTKKGCDQITRQLRMDGWPALSIHGDKSQAERVWVLSEFKSGKSPIMTATDVAARGLDVKDVKYVVNYDFPGSLEDYVHRIGRTGRAGAKGTAYTYFTAANARFAKELIAILEEAGQKVSPELAAMGRGAPPPPSGPRGFQDRGRGYGSSRPWS

SEQ ID NO: 181999 - protein, 107 aa, Glycine max
  unsure (1)..(107): unsure at all Xaa locations
  Clone ID: PAT_MRT3847_135359C.1.pep
IMPESIEKHLLXXKXXDXXXXNTXXRXXNXXXXKGRRGPXXEGPTEHDEXPRPTAQGRATNTRPKRTEDNTDPKRTKRGRRRTRPRHTKSEKRNNPKXRKRAKEHTP

SEQ ID NO: 182000 - protein, 91 aa, Glycine max
  Clone ID: PAT_MRT3847_13535C.1.pep
MAATATAEAKTYWCHECDMSVSLTLPTYPVLCPDCHTHFLELMDSPSLSEENDAESSLLDVVFQDALLLLNPNPNRNTKPHSCKPVSLACL

SEQ ID NO: 182001 - protein, 127 aa, Glycine max
  Clone ID: PAT_MRT3847_135360C.1.pep
FEVVKKRTKVRGDSVLSTSSSIPSPIIVRSIYLLAHPRLDGSSLSLSLSPAFVCQWRIAGNEGESFIGKVNPAFVCTIPSNHLHQHPPLSPPSFLLSSFYFNNPSYRLFMRACIFFFPLTSECSSGW

SEQ ID NO: 182002 - protein, 220 aa, Glycine max
  unsure (1)..(220): unsure at all Xaa locations
  Clone ID: PAT_MRT3847_135361C.1.pep
PRVRRCMEELQCIIVVMNRSQPKVLRLNLIGPQKKEGEXACASPYEHDDLPENRTNILLDFLGSIKGPAVTPTTXPELGAPFTATEAGTXSDSSSDPXIFTILDMXMNGEVTIEETIKESDDLADTNXDTECECLSTFSARMRFQPWITHLLXINHLHSASEERSEMSHGMPHASSIRAFLEMYSRLDRGAGFDISAYRNDVDFRENLRESVALSGDAPP

SEQ ID NO: 182003 - protein, 49 aa, Glycine max
  unsure (1)..(49): unsure at all Xaa locations
  Clone ID: PAT_MRT3847_135362C.1.pep
EQCKXQXLPYLRLDPCTXXYLPTHYXQSTRARXFPAVLAYSEXDGRGEX

SEQ ID NO: 182004 - protein, 55 aa, Glycine max
  Clone ID: PAT_MRT3847_135363C.1.pep
AQSNKYKLNFKIKNCNYFRFKKYFKIETPRLCLCLVTLKSTFAHQNCSLKLSLKK

SEQ ID NO: 182005 - protein, 647 aa, Glycine max
  Clone ID: PAT_MRT3847_135364C.1.pep
NFDLCETSCGYPAKPEKMVPENLKKQLALAVRSIHWSYAIFWTDSTTQPGVLSWGEGYYNGDIKTRKTSQGVELNSDQIGLQRSEQLRELFKSLKTVEVTPQTKRPSAAALSPEDLTDAEWYYLVCMSFIFNIGQGLPGRTLAKGQPIWLNNAHSSDCKIFSRSLLAKSASIETVVCFPFREGVIELGTTEQVPEDLSVIELIKTSFLNSLHANVPNKSVATLKSRNQEGLSYAAFDHNDYNVKSIPEVGYEIANTTSPDGSSNAFQANQPLDETFMIESITNGTSQVQNWQVIDDELSNCVHNSMNSSDCISQTFACPENIASAPKSNNPSDPCARNFQKCNNPKMTLVDPRSDDLHYQRVLSTLIKSSDQLLMGMHLQKFPQESSFVSWRKEQPMDCKWPRAGTSQKLLKKVLFEVPQMHLDGLHESQEENDYKEGMRVEADENGMNHVMSERRRRAKLNERFLTLRSMVPSISKDDKVSILDDAIDYLKKLERRVKELEAHRVVTDIETGTRRSPQDTVERTSDHYFRKNNNGKKPGMKKRKACGVDETEKEINSDALKGSYANDVTVSTSDNEIVIELKCPSKAGRLLEIMEAINSFNIDFSSVQSTEADGNLYLTIKSVLTGPSVATTKRIKQALQKLASKC

SEQ ID NO: 182006 - protein, 225 aa, Glycine max
  unsure (1)..(225): unsure at all Xaa locations
  Clone ID: PAT_MRT3847_135365C.1.pep
MWRGARVVSGYLRRFSTAVRRRMEDEGDWLYSSEWWGSDSDDGHSVLRSTSGKGNGVVAVVAYPSSRPSKMHWSGMERWLQQRCEEVHPGYKDGGKLRILGYQWRVLRFNEVTRQSTAKXMAAYRENTPGVVYLMQQPHCLAVPYVKSMVSAGLTTIASCSFDIISALQGKKNMHILCIGHGGGSLPLFLASRIQGAIVHVVEIDPLVISASFVLWGSPGFSLMT

SEQ ID NO: 182007 - protein, 122 aa, Glycine max
  Clone ID: PAT_MRT3847_135366C.1.pep
MLNIQWMGPMKFDVHDSRLGDLPGRDGSKQPFVWSSPEHGFKTEIGKQIFCNRSLNMKNIVAVGFDMDYTLAQYKPETFESLAYQGTIKKLVYDLGYPRELLNWSFNWKYMVRGLVLDKKKK

SEQ ID NO: 182008 - protein, 74 aa, Glycine max
  unsure (1)..(74): unsure at all Xaa locations
  Clone ID: PAT_MRT3847_135367C.1.pep
XSYITRICLYFIDHQLPSATAPTLDPLLLRTPAENKMIDLLGMVYTIHTFLACINFQHPKKLMNYDSLDIARSM

SEQ ID NO: 182009 - protein, 71 aa, Glycine max
  Clone ID: PAT_MRT3847_135368C.1.pep
RKSCGRVLQLNSYLMRDVSGMDPSPDYNPNPPLGRKKGLPMGKSKSKPHFLKNISWACSSLLSFGAPSGVG

SEQ ID NO: 182010 - protein, 92 aa, Glycine max
  unsure (1)..(92): unsure at all Xaa locations
  Clone ID: PAT_MRT3847_135369C.1.pep
PLXAMRDXXLWGSXXVXNDXXAKNXXXXXVIRXNVXPXVXFXNXLXVPXXXXVHXXLXXXXXXXXXXXIKXRXARDLXXARAEFRAYVRVXX

SEQ ID NO: 182011 - protein, 49 aa, Glycine max
  Clone ID: PAT_MRT3847_13536C.1.pep
DHHTLSRSCKVCSTCSESCVKCLTAVRIIGRKAVGVAVMCLPCERIGVN

SEQ ID NO: 182012 - protein, 91 aa, Glycine max
  Clone ID: PAT_MRT3847_135370C.1.pep
VMTGRSMQTTYLLNFLFFLVNFLKVWGLKVIFYSWILIILFILRKKRSQIYKSFIMFPFLVFCFCFGKHFPLFFYYVLFPCIVRRDKNCCA

SEQ ID NO: 182013 - protein, 55 aa, Glycine max
  Clone ID: PAT_MRT3847_135371C.1.pep
RKIGNKINMKICLKLNFQTFRWRFKSLLCYLVYSFHCGRYRFRNFFCQCVSISDA

SEQ ID NO: 182014 - protein, 174 aa, Glycine max
  unsure (1)..(174): unsure at all Xaa locations
  Clone ID: PAT_MRT3847_135372C.1.pep
QYCLAALLLLLLLHVVLSGPSNGIIRVGLEKNKFDQRKTLKRNIDSEEATLREARPFGGYENSDDTSIIRLKNYMNAQYFGXEIGIGTPQKFTVIFDTGSSNLWVPSSKCYFSVACYLHSRYKSSQSSTQNKNGTIPHSXSSAEIRYGTGQISGFFSQDYAKGWRLDCLDQDFN

SEQ ID NO: 182015 - protein, 65 aa, Glycine max
  Clone ID: PAT_MRT3847_135373C.1.pep
KSQLPALSSYLSFLQRILTHSPSPMAFFIPTSSTHAFCSKGLGKCVVPGTRSRSSFVTHERFFVA

SEQ ID NO: 182016 - protein, 98 aa, Glycine max
  Clone ID: PAT_MRT3847_135374C.1.pep
NSHVLFSIFPLEQYYLCVHTFLPSHLICKVYLFYVVLVFLEIACSYAVCSAEFRPTAYKDISREFVLRCYTKVSQKYHKLAYVPHYDMQFVHFHFRNI

SEQ ID NO: 182017 - protein, 58 aa, Glycine max
  unsure (1)..(58): unsure at all Xaa locations
  Clone ID: PAT_MRT3847_135375C.1.pep
SPGWAVCYTEKITVSGAPATSXDSLTLPSAATSRSTNWNPIPLRSTRTERYETSSRSP

SEQ ID NO: 182018 - protein, 84 aa, Glycine max
  Clone ID: PAT_MRT3847_135376C.1.pep
VVSLMEFNFSLHSLSCYSFPSYFSLPLVVMYFYLGTFEQNKENTSTNLFAMAVGIKQKDLVNKMVKKVISRGVLYKLFITNVLF

SEQ ID NO: 182019 - protein, 28 aa, Glycine max
  Clone ID: PAT_MRT3847_135377C.1.pep
NKKTNIRFTLTILTKLYYYRKINIIINK

SEQ ID NO: 182020 - protein, 175 aa, Glycine max
  Clone ID: PAT_MRT3847_135378C.1.pep
GLPSFVASVVNQTRSNLIRIKGLGVKKIVVGALQPLGCLPQETATSSFQRCNATSNALVLLHNSLLNQAVTKLNQLETTKDRYSTFVILNLFDSFMSVLNHPSTHNIRNKLTPCCVGVSSGYSCGSVDKNNVKKYRVCDDPKSAFFWDLVHPTQAGWHAVYNKLRTMNALQHILY

SEQ ID NO: 182021 - protein, 92 aa, Glycine max
  Clone ID: PAT_MRT3847_135379C.1.pep
REDGKEPGCSARLQKQSRKSCSPRPLECKQPGSLDVVVGGLGQHVVADDGVARDPIVHVGKPRSNDLCSSTQSGGSLSRKVMGTPHIAKSLR

SEQ ID NO: 182022 - protein, 100 aa, Glycine max
  Clone ID: PAT_MRT3847_13537C.1.pep
TPFLYPFFPSGQNPSPFKKTHHSGDPFFFGQKLCPSHFWSATLGFPPFKKKSPLIIMGCGWGCKNKKGFFSFVSQLRSALFAGGSLPILFVPIPPNIFSP

SEQ ID NO: 182023 - protein, 174 aa, Glycine max
  Clone ID: PAT_MRT3847_135380C.1.pep
WRKTIAITEYGIRSVAAKYIMKCDDDTFVRIESIISEARKVGSGRSLYIGNMNYHHRPLRSGKWAVTYEEWSEEEYPTYANGPGYTISADIAQFIVSNFEEHRLKLFKMEDVSMGMWVEQFNSSRPVEYVHSFKFCQFGCIEDYFTAHYQSPRQMTCMWDKLQQKGQPLCCNMR

SEQ ID NO: 182024 - protein, 81 aa, Glycine max
  Clone ID: PAT_MRT3847_135381C.1.pep
MGENHIGIATGDLNPGLPICFKRFAWQDFRIIKNSGLKQPQFCELSVCGIPNLLDASLDITSPPHLPLPEIGPHSPRPATG

SEQ ID NO: 182025 - protein, 270 aa, Glycine max
  Clone ID: PAT_MRT3847_135382C.1.pep
MDSLLFLLRQTHQFEFTMDSLPSVSPSMVLPPSHPFRRLPPSLVSSRTRSRRRRHVSVSCTLAGDGTDDEVERALHMDGAIPRTSDEFVKRVSSRAYDMRRNLQQSFDTSSYDVLDANPWREISKPVYVLTQKENQLCTMKTRRNRSEVERELGLLFSKGSKWSSGIGNQSKQARGGTNKFQMLVEDVREGVLVFEDANEAVKYCDLLEGGGQGCEGVAEIEASSIFDLCQKMRALAVLFRRGRTPPLPESLKLNLRARNRSLEDQDDLM

SEQ ID NO: 182026 - protein, 214 aa, Glycine max
  Clone ID: PAT_MRT3847_135383C.1.pep
MKVSIAKFHSLPLCFFLLLAFNTKPLLAAEPEPVVDKQGNPLEPGVGYYVWPLWADEGGLTLGQTRNKTCPLYVIRDPSFIGTPVSFLAPGLDHVPTLTDLTIDFPVVTVCNQPTVWRLNKVGSGFWFVSTSGDPNDITSKFKIERLEGDHAYEIYSFKFCPSVPGALCAPVGTFEDADGTKVMAVGDDIEPYYVRFQKVSIFGQDKKQPFSIL

SEQ ID NO: 182027 - protein, 147 aa, Glycine max
  Clone ID: PAT_MRT3847_135384C.1.pep
AGPTTRPASRRQKGIIKLSQKPKPKGVTFIFIIQSFQRSSFFFFSSESRKHALAEVKLRFCPSSGGVGEEHVRRNNNIDIDMARCFGLGSVLVLAALAASMVVLPLMLPPLPPPPLVFLFFPVGIMAALMLLAFSPSDQNGVVYAST

SEQ ID NO: 182028 - protein, 100 aa, Glycine max
  unsure (1)..(100): unsure at all Xaa locations
  Clone ID: PAT_MRT3847_135385C.1.pep
AINFSKLILAFLLASLLLLNLDDADQSAHVQTQGSLMKKINCNGTSATKCLLSSRTRLCKKACGTXCKRCNCLPTVTAGNQKKTPSYAYLTTHGGKHKSP

SEQ ID NO: 182029 - protein, 64 aa, Glycine max
  Clone ID: PAT_MRT3847_135386C.1.pep
HPRGGALPLSFPLCVFYAVGVTIRVVIQCCSEVKKNKVNFSIFQRRVLTCLFQQRCMSFLCWML

SEQ ID NO: 182030 - protein, 67 aa, Glycine max
  unsure (1)..(67): unsure at all Xaa locations
  Clone ID: PAT_MRT3847_135387C.1.pep
TLSPKTFFLDTLITTITQPSSASLTITLRLVKKQKSXILITILIYSTLFIIPRMDTNSIYLFSNNHN

SEQ ID NO: 182031 - protein, 141 aa, Glycine max
  Clone ID: PAT_MRT3847_135388C.1.pep
QQPGIGGEVVPHQDNSFLYTEPQTCTGLWLALEDANILNGCLWAIPGSHKNGLVRRFLRDKDGVKFDQPSPSYDQKDFVPIEVKAGSLVVIHGDLIHQSFENQSQKSRHAYSLHVVDTVGCKWAPENWIRRKVEPEPLFVS

SEQ ID NO: 182032 - protein, 92 aa, Glycine max
  Clone ID: PAT_MRT3847_135389C.1.pep
GEWGIWKRKMIWINLRPGGKFVLYVHYWLLHIKAVLVMYQYCGLFELEVIFSVYVYVYTSIGFNFEVNICHDSIFPIPLQTLACLVLRTENG

SEQ ID NO: 182033 - protein, 85 aa, Glycine max
  Clone ID: PAT_MRT3847_13538C.1.pep
FADSFKNKFPSSRRIVSPPVLILAHIFRSFLHSYRMRRSIVCRTVGSHSHDRLFFYGTMFWIWRACNFSLMGTKLWQPQSNPAML

SEQ ID NO: 182034 - protein, 280 aa, Glycine max
  Clone ID: PAT_MRT3847_135390C.1.pep
MGILSPEQLRFFNSQGYLVIESFACSDEIESMMKRMEQLVDDFDPSSTASIFSTKNQQQSTDNYFFDSAERISFFFEEKAFGNDGKLKQPKQLSLNKVGHALHEIEPAFKKFSSSEKVSSLMRSLGYKRPAVMQSMYIFKQPGIGGEVVGHQDNIFLYTEPQTCTGLWLALEDANILNGCLWTIPGSHKNGLVRRGHWLSSMGKFYPPSFKTDQKKSSPIYVKAGSEVVVHGDLIHQSFENQLPKSRHAYSLHVVALVGCKWAPENWIRRKVEPEPLFVS

SEQ ID NO: 182035 - protein, 49 aa, Glycine max
  Clone ID: PAT_MRT3847_135391C.1.pep
MVKKKAQLTTVVVGHVAPQEAPTIIELKKPVVEKKAPGHPILGHARRAS

SEQ ID NO: 182036 - protein, 86 aa, Glycine max
  Clone ID: PAT_MRT3847_135392C.1.pep
PIQVFPPLRCGLAIFLWLATQGFSTVKRALSAPPSRCVFSSLGTPGALFCTVSGIFVLSHASNLFLKTFCLFQYLCNVFINNKYNT

SEQ ID NO: 182037 - protein, 91 aa, Glycine max
  Clone ID: PAT_MRT3847_135393C.1.pep
MATSSPSLASVSFFSPNNTVSDFKVLKATKVEFPALDGQSVSYAILEFPGGSINPPHTHPRSAELLFTVEGSLQVGFVDTTNKLFTQTLQT

SEQ ID NO: 182038 - protein, 57 aa, Glycine max
  unsure (1)..(57): unsure at all Xaa locations
  Clone ID: PAT_MRT3847_135394C.1.pep
LSRTALNKVQELIFIAAHSKLEKRDLSSDQDWDGXAVNLGAWXDNVLSDVRVDTSSV

SEQ ID NO: 182039 - protein, 102 aa, Glycine max
  Clone ID: PAT_MRT3847_135395C.1.pep
GALGAFWPSSILVSAILSVPLLSKVLELVGLGSPGWFVYRFPPFDFTVYSLSSVLFSFFSSFFCFFFFGVFWFLFLFFFFPPFVFFVLLSPVSPPPVSLGVE

SEQ ID NO: 182040 - protein, 54 aa, Glycine max
  Clone ID: PAT_MRT3847_135396C.1.pep
KTLGKRPTTGPPNKKLRSLKAYWNPPFKRKITPAGGVLTPRGTLKFGRAPPPVP

SEQ ID NO: 182041 - protein, 46 aa, Glycine max
  unsure (1)..(46): unsure at all Xaa locations
  Clone ID: PAT_MRT3847_135397C.1.pep
NRVLGKMEGVESFDIYLKEPKVTVTPNVQPHXILQAPSTSGIKTAF

SEQ ID NO: 182042 - protein, 51 aa, Glycine max
  Clone ID: PAT_MRT3847_135398C.1.pep
AINVAPLKCFLCLLNKGRKKQSLALGLKIVGFKPANLKTWELGWNQAVFTL

SEQ ID NO: 182043 - protein, 53 aa, Glycine max
  Clone ID: PAT_MRT3847_135399C.1.pep
VTTLQINKPHTRLTQIVILCDPIMRGILMSRTNPYCDLLTAPRTRGLTTELTR

SEQ ID NO: 182044 - protein, 67 aa, Glycine max
  Clone ID: PAT_MRT3847_13539C.1.pep
KVLHLVTPNEALIASRIAGARVLSVLYAIFLYLRYALRRSKNKTNPHNAQPLDTTRSHCLAGCKSDL

SEQ ID NO: 182045 - protein, 126 aa, Glycine max
  Clone ID: PAT_MRT3847_1353C.1.pep
MPSTENQGSSSSFSSFGRSIFGARQEQVHSVEASNESDSCNLELGLFQKHVTDRFQDLSAASDEEFLSIDWIQKLLGAFISCQEEFRAILLNNKEQGTKPPFDRMMSEFFERPVKALDIVDASRDG

SEQ ID NO: 182046 - protein, 63 aa, Glycine max
  Clone ID: PAT_MRT3847_135400C.1.pep
TILYMAKIGRLFLVYLYFWDIEKKCVYIPFCGHLFSSYYVAILFIYIPCKCYSLIDLASIWVP

SEQ ID NO: 182047 - protein, 101 aa, Glycine max
  Clone ID: PAT_MRT3847_135401C.1.pep
VLRGRPRSDCILFLLVGDRHDLFSGRVLWSSPECHGPPRHSSCLTQFRLQRLSVFASSAPSSRSLGQRLPLAPKHPPLSLQTILQAEWLVLISVLSRAAVG

SEQ ID NO: 182048 - protein, 67 aa, Glycine max
  Clone ID: PAT_MRT3847_135402C.1.pep
AGLIFLNFDPNFRNPGFWGKPLPGGQPHRVFWVPWVNPTQFSLFSFIFWQSFFFGGGPLGPLLAPKV

SEQ ID NO: 182049 - protein, 75 aa, Glycine max
  Clone ID: PAT_MRT3847_135403C.1.pep
APPGVLGIKPGAGFKPGGFFFLKVPKTKGRPREGTLKFFSVGAKQVGDAQPHCPKDMINSKVLAGPFNCFLSPAV

SEQ ID NO: 182050 - protein, 148 aa, Glycine max
  Clone ID: PAT_MRT3847_135404C.1.pep
SRTAPRYDYLFKLLLIGDSGVGKSCLLLRFADDTYTESYISTIGVDFKIRTIELDGKTVKLQIWDTAGQERFRTITSSYYRGAHGICVVYDVTDMDSFNNVKQWLQEIDRYATEGVNKLLVGNKSDMADKKVVEYTVAKEFADSLGIP

SEQ ID NO: 182051 - protein, 119 aa, Glycine max
  Clone ID: PAT_MRT3847_135405C.1.pep
SSRINKEKFRTGEDPSTERKIQNEKILPELLTELTQRAPIRTHPRVRIQTPDIELPDAPIKEESPTPSHTKHQELPRDLYIMTAVILFDGKNPRGLSELFQVAEAEFKLSPVFQSNNEE

SEQ ID NO: 182052 - protein, 137 aa, Glycine max
  Clone ID: PAT_MRT3847_135406C.1.pep
MVVGSALGAFAVAGPSSPLLLLRGQKVFKFRPFSSSSSAAPSRKLVLYSKPGCCLCDGLKEKLQAAFLLSGTDSLHDVDLQIRDITTNPEWENAYQYEIPVLAKVLSDGTEVALPRLSPRLGVELLQKKIAAALNQQ

SEQ ID NO: 182053 - protein, 126 aa, Glycine max
  Clone ID: PAT_MRT3847_135407C.1.pep
YPASTHASVSSFFQSRWSDLDINQHVNNVKYIDWILESAPQPILESHELSSVTLEYRRECGRDSVLDSLTAVSGADMGNLAHSGHVECKHLLRLENGAEIVRGRTEWRPKPMNNIGVVNQVPAEST

SEQ ID NO: 182054 - protein, 423 aa, Glycine max
  Clone ID: PAT_MRT3847_135408C.1.pep
MVATAATASFLPVPSPDAGKGKPKKLGGGGGGGGGSVNLGGLKQKQGLCGGLQVKANAQAPPKTVEKVENDLPWLPSSSISHAPRTFINQLPDWSMLLAAITTVFLAAEKQWMMLDWKPRRPDMLIDPFGIGKIVQDGLVFRQNFPIRSYEIGADKTASIETLMNHLQETALNHVKTAGLLGDGFGSTPEMCKKNLIWVVTKMQVVVDKYPTWGDVVQVDTWVSASGKNGMRRDWLVRDAKTGEILTRASSVWVMMNKVTRRLSKIPEEVRAEISSYFVDSAPVVPEDNRKLTKLDDSANFIRTGLSPRWHDLDVNQHVNNVKYVGWILESAPQPLLESHELCAMTLEYRRECGRNSVLDSLSDLSGADVGNLADDGFFECKHLLRLDDGAEIVRGRTEWRPKPLNRNFGHVLSQVPVPAEST

SEQ ID NO: 182055 - protein, 110 aa, Glycine max
  Clone ID: PAT_MRT3847_135409C.1.pep
YRMATRITPLYCGSSKQGCCQVYIDLFSGGFYVDTTQYRITLIQKCPIGNLLGVAAGQKGLLMDKIVMSGNAIVKRRDWASLVQEFLTDRNRTEHFDACEWTQSEPHCWE

SEQ ID NO: 182056 - protein, 29 aa, Glycine max
  Clone ID: PAT_MRT3847_13540C.1.pep
IVFIDHLLRYSLLNLVFIHHKSKPSWFES

SEQ ID NO: 182057 - protein, 416 aa, Glycine max
  Clone ID: PAT_MRT3847_135410C.1.pep
MVATAATSSFFPVTSPSPDSGGAGSKLGGGPANLGGLKSKSASSGGLKAKAQAPSKINGTTVVTSKESFKHDDDLPSPPPRTFINQLPDWSMLLAAITTIFLAAEKQWMMLDWKPRRPDMLIDPFGIGKIVQDGLVFRENFSIRSYEIGADRTASIETVMNHLQETALNHVKSAGLLGDGFGSTPEMCKKNLIWVVTRMQVVVERYPTWGDIVQVDTWVSGSGKNGMRRDWLLRDCKTGEILTRASSVWVMMNKLTRRLSKIPEEVRQEIGSYFVDSDPILEEDNRKLTKLDDNTADYIRTGLSPRWSDLDINQHVNNVKYIGWILESAPQPILESHELSSMTLEYRRECGRDSVLDSLTAVSGADMGNLAHSGHVECKHLLRLENGAEIVRGRTEWRPKPVNNFGVVNQVPAEST

SEQ ID NO: 182058 - protein, 39 aa, Glycine max
  Clone ID: PAT_MRT3847_135411C.1.pep
RLVETPELNSPAQAHNQHMHNGIISPILNIITVSSRAYL

SEQ ID NO: 182059 - protein, 86 aa, Glycine max
  Clone ID: PAT_MRT3847_135412C.1.pep
HEKLFSFWETKLESKIIVIHTHHLFYVMRLHQLRILHLLPQEQLHLAMIAHLGNTINSFNKDYISCLSLNFGVFFFFLLGRNLVTI

SEQ ID NO: 182060 - protein, 133 aa, Glycine max
  Clone ID: PAT_MRT3847_135413C.1.pep
MRTPSSSHKSGLNKGTWTPEEDAKLIAYITRYGSWNWRQLPRFAGLARCGKSCRLRWLNYLRPNIKRGNYTKEEEEIIIRLHEKLGNKYALTFQAKLNFPQHCTASKARQGNYKIFPYFNTYRPMHLAKSTHN

SEQ ID NO: 182061 - protein, 102 aa, Glycine max
  Clone ID: PAT_MRT3847_135414C.1.pep
MDAGQMQRQWIDYTKSLFLEGFLDGQFLQLQQLQDENNPDFVVEVVSLFFEDSERLLKDLTFALSVLLLSSYHSPSFPSTVHAFIFHAFRILSCPIFIQWWL

SEQ ID NO: 182062 - protein, 139 aa, Glycine max
  unsure (1)..(139): unsure at all Xaa locations
  Clone ID: PAT_MRT3847_135415C.1.pep
ISHLLGQLPVTPLITAKMPVPFRILYDPPPXHGGRPVGPGYEYGGTIFCYGXXHPRSVCYSYSAGIPCYGNGSDLWSGEKNPQARSHMFLLQVRRCTIVRMCKSWWPFTNFLFITIMINHVRSGYHSIYGFLLFKIRRE

SEQ ID NO: 182063 - protein, 46 aa, Glycine max
  Clone ID: PAT_MRT3847_135416C.1.pep
KMWSNYKCTYYRSIPGSYSCIVVLHETITALTATRISSLIFGKLYL

SEQ ID NO: 182064 - protein, 383 aa, Glycine max
  Clone ID: PAT_MRT3847_135417C.1.pep
MAGDKQKLFNRLKPFIGVVFLQFGYAGMDILSKAALNKGMSNYVFVVYRHVFAFVVMAPFALILEKKVRPKMTFSIFMKIMILSLLEPVIDQNLYFLGMKYTTATFAVSMYNVLPAITFVMAWILRLEKVKLKSIRSQAKVVGTLATVVGAMVMTLIKGPILDLFGTHASSTHNQQNGGVNLQHAIKGSVMITIGCFSCACFMILQAITIEAYPAELSLTAWICLLGTVEGGVVALVMERKNLSAWSLQWDTKLLAAVYSGIVCSGMAYYIQGAVMKDRGPVFVTTFNPLCMVIVAIMGSFFLAEIMYLGRVVGAIVIILGLYLVVWGKSNDYESSNSITKKHTLPSKQTVEENNGKEEDHSNHDVITLSNLGAGNIVRDEQV

SEQ ID NO: 182065 - protein, 95 aa, Glycine max
  Clone ID: PAT_MRT3847_135418C.1.pep
IHSRWRGYNLESQVPGCSDREIRFLSLEANLALWDSYRECWLEIQTCACFSKEANLFRGKKHVLFQTHPFGKGFERFFWYSSNNFKQCSPGQFLI

SEQ ID NO: 182066 - protein, 71 aa, Glycine max
  Clone ID: PAT_MRT3847_135419C.1.pep
TSIDIQAFLSVGGSGAPSRGGVGGLAPPGMAPLAEKGPLALSLPPSKDKSRGLFFLLAPGEGCFFLLIKMN

SEQ ID NO: 182067 - protein, 185 aa, Glycine max
  Clone ID: PAT_MRT3847_13541C.1.pep
MQKRRAGRKKFHETRHPVYKGVRQRNGKWVSELRQPNNKNARVWLGTFAHPDMAAIAYDVAALAFKGDSASLNFPNAATSFPRLNSRTCSVRAIQFAATQAAEKHFSCVESQQLQREGSGSGSFSLDDDSSEFSSQGRFFWDEEEVFNMPELLNCMAEALIITPPALERGFNWVGGETTVDLTLW

SEQ ID NO: 182068 - protein, 99 aa, Glycine max
  Clone ID: PAT_MRT3847_135420C.1.pep
MVREHNINSGWPPIGAPLLNVQRDEYDQHWSSFDSSVNAVSFGFVATAILVSMFLVMAIFERFLKPTSPPILPSGGRNRRRSSQMDFNGKLGHPSPKIV

SEQ ID NO: 182069 - protein, 84 aa, Glycine max
  Clone ID: PAT_MRT3847_135421C.1.pep
YGGYRGSKTWLSGFGLLVGCPNSLEVTMFCLVVKLLTQIFFKWGFSFLFVRPKEIWVPPFPGGKKSFFSKSKKKKKKKKKKKKK

SEQ ID NO: 182070 - protein, 216 aa, Glycine max
  unsure (1)..(216): unsure at all Xaa locations
  Clone ID: PAT_MRT3847_135422C.1.pep
MAVTMALMTRQHLLTYIYLLVYISLSSGVILYNKWVLSTLYFNFPFPITLTMIHMAFSGGVAFFLIRVLKVVSPIKMTLHIYATCVVPISAFFAASLWFGNTAYLYISVAFIQMLKALMPVATFLVAVTCGTEKLRCDVFWNMVLVIDGVGIXATWGVAVTCARENLSGDMICCXSLVTVGVVISSYGEIHFNVLGTVYQVTGMVAEALRLVLTQV

SEQ ID NO: 182071 - protein, 80 aa, Glycine max
  Clone ID: PAT_MRT3847_135423C.1.pep
ILSRGQTDKTVATSEPIPGDTKYDDFGIESSFIFNYDSEYELDDTLSDALCLLAIDYRQQRVLNDSLVTKNRYSLILSQR

SEQ ID NO: 182072 - protein, 53 aa, Glycine max
  Clone ID: PAT_MRT3847_135424C.1.pep
SAHHAPLEQRILLRIQTRHLTLLMPPPLKASRALFSAISNNPTAVVRRVQVNW

SEQ ID NO: 182073 - protein, 36 aa, Glycine max
  Clone ID: PAT_MRT3847_135425C.1.pep
RLFRVVFGLIQLLIDFSLMLLVNNFIMIHLSNDNIM

SEQ ID NO: 182074 - protein, 60 aa, Glycine max
  Clone ID: PAT_MRT3847_135426C.1.pep
DTARRQPTERGRRLTTPFCLRASGNRPLFDMMTFKTLASFMPPSPAATFVAFHPQDNHII

SEQ ID NO: 182075 - protein, 75 aa, Glycine max
  Clone ID: PAT_MRT3847_135427C.1.pep
YREKGTICSTIILFSSFKITSSRIVLAICIIFILSWKIVLGREFQLALRNHRIIKHQSQNKHRYTKGYLKISLEP

SEQ ID NO: 182076 - protein, 155 aa, Glycine max
  Clone ID: PAT_MRT3847_135428C.1.pep
YVWDLFDEMLDRGQPPDVITYNNLIDALCKNGHLDRAIALFNKMKDQGIRPNTFTFTILLDGLCKGGRLKDAQEVFQDLLTKGYHLNIYTYNVMINGHCKQGLLEEALTMLSKMEDNGCIPNAVTFDIIIIALFKKDENDKAEKLLRQMIARGLL

SEQ ID NO: 182077 - protein, 65 aa, Glycine max
  Clone ID: PAT_MRT3847_135429C.1.pep
PPLFFFFFDFALTSVSYPLIIGFRKGNYTYTPFITHPHHHHHHPVKYWLPTIKFPPLCLYPTHLS

SEQ ID NO: 182078 - protein, 62 aa, Glycine max
  Clone ID: PAT_MRT3847_13542C.1.pep
NGFNPALIVFLLVGGLLRTFLIGDYVLYTCAQKTLLARNKKPVSLKKMRKERLKQGVSVPGE

SEQ ID NO: 182079 - protein, 77 aa, Glycine max
  unsure (1)..(77): unsure at all Xaa locations
  Clone ID: PAT_MRT3847_135430C.1.pep
XNXXKSXSXXIXYXXXXXXXSXXTXXHYIXXXXXXNIQXXXIXXXXXXXYTYXIXXXXXQKKXXXXXXKNTXXTXXX

SEQ ID NO: 182080 - protein, 53 aa, Glycine max
  Clone ID: PAT_MRT3847_135431C.1.pep
TLLAHGAVHGAMAAYTGFTVGPVNSKHAYISIAVSGSFHYSCLYSIQLNHFYC

SEQ ID NO: 182081 - protein, 65 aa, Glycine max
  Clone ID: PAT_MRT3847_135432C.1.pep
MKGEVKMKSKMKWVGLLGLVLSAFSIFIHFLLARFTQMGVAEYESSVTIFSWRPSLRNQFPPQIL

SEQ ID NO: 182082 - protein, 61 aa, Glycine max
  Clone ID: PAT_MRT3847_135433C.1.pep
QLPWTPGMEPLGTPRSPTPFSIASSTTPTASSSPEKACENAAPKPSPLTANQNTDSISHRP

SEQ ID NO: 182083 - protein, 56 aa, Glycine max
  Clone ID: PAT_MRT3847_135434C.1.pep
HTGPKLPMSDIELPTFTSPIKRGWTSSIYHSLATTLTIIFKPTLPRNLNPFIFITI

SEQ ID NO: 182084 - protein, 62 aa, Glycine max
  unsure (1)..(62): unsure at all Xaa locations
  Clone ID: PAT_MRT3847_135435C.1.pep
FSLIAPSLYKLALLCFLPVTSLIKNLPAXXXXPFRASSDLPPTHDRPANRLRNDRRRGFPRQ

SEQ ID NO: 182085 - protein, 46 aa, Glycine max
  Clone ID: PAT_MRT3847_135436C.1.pep
GIGMKLVLLTRVDPFPVALLAVLLGGQNEIVRSNATNPMLTRVLEN

SEQ ID NO: 182086 - protein, 65 aa, Glycine max
  Clone ID: PAT_MRT3847_135437C.1.pep
RKLRKSKYNLLVFEYLDFFSLNITINKKIIDVLKNLIYFSTLKHFKSHQFKILTLYILSYIKIIK

SEQ ID NO: 182087 - protein, 25 aa, Glycine max
  Clone ID: PAT_MRT3847_135438C.1.pep
AMASTRPLIFSIHIKLDIHYTSLDL

SEQ ID NO: 182088 - protein, 125 aa, Glycine max
  unsure (1)..(125): unsure at all Xaa locations
  Clone ID: PAT_MRT3847_135439C.1.pep
EELANEAKRAVSAEKQRLAKEVASMLKLSVEIDTSSSESLAKIVAALRAGAEYAGIPVCNCVLVAGSQSGVAGGTQVGMPCVVLRSSLTSRAEFPLANATMDGXXGADLSISKLRSLRPKNNHRH

SEQ ID NO: 182089 - protein, 113 aa, Glycine max
  unsure (1)..(113): unsure at all Xaa locations
  Clone ID: PAT_MRT3847_13543C.1.pep
EASVPGDVKLYIEERXSWRRFVESCLCYTEDDYVDRVLTENNYIMEKTMVXMKLYEEVMMDFLRXHIMVSKVLNTQSVLRHLKKLAPXYSLTTYTLIYTHILVHEPDCSSVCG

SEQ ID NO: 182090 - protein, 150 aa, Glycine max
  Clone ID: PAT_MRT3847_135440C.1.pep
FGTRAPEYAIGGLFSIKSDVYSFGVILLEVLSGKKNKGFSFSSQNYNLIAHAWWCWKECSPMEFIDTCLRDSYIQSEALRYIHIGLLCVQHQPNDRPNMTAVVTMLTSESALPHPKKPIFFLERVLVEEDFGQNMYNQTNEVTLSEMQPR

SEQ ID NO: 182091 - protein, 58 aa, Glycine max
  Clone ID: PAT_MRT3847_135441C.1.pep
KGFCQGKDTNGKEMSCAARLDIKYTPTPCGIWLKKTEVNVENYGGCPPAHTEISPRKD

SEQ ID NO: 182092 - protein, 99 aa, Glycine max
  unsure (1)..(99): unsure at all Xaa locations
  Clone ID: PAT_MRT3847_135442C.1.pep
MKVLVFFVAIVLAAWHCHGXSDHDXDXHGHTXQIFPLXMETXHGGHXIPEVSWPKXXGLVWKXTTSFDWETVPXDXQGYXGNYMLXGXXXSGXXIVNPP

SEQ ID NO: 182093 - protein, 47 aa, Glycine max
  Clone ID: PAT_MRT3847_135443C.1.pep
PNQLLAAFHIIRLENPGFPHNRLKHTLSQLRIRIGHTDHTSTVPALM

SEQ ID NO: 182094 - protein, 329 aa, Glycine max
  Clone ID: PAT_MRT3847_135444C.1.pep
MAASLQAAATFMQPTKVGIASRNLKSTQCISKAFGLEPAAAKLTCSLQPDLKEFAQKCVDATKIAGFALATSALVVSGASAEGVPKRLTFDEIQSKTYLEVKGTGTANQCPTIEGGVDSFAFKPGKYNAQKLCLEPTSFTVKAEGVAKNAPPEFQNTKLMTRLTYTLDEIEGPFEVTSDGTVKFEEKDGIDYAAVTVQLPGGERVPFLFTIKQLVASGKPDSFSGEFLVPSYRGSSFLDPKGRGASTGYDNAVALPAGGRGDEEELAKENNKSASSSKGKITLSVTKTKPETGEVIGVFESVQPSDTDLGAKAPKDVKIQGIWYAQLDS

SEQ ID NO: 182095 - protein, 329 aa, Glycine max
  Clone ID: PAT_MRT3847_135445C.1.pep
MAASLQAAATFMQPTKVGMATRNLKSTQCISKAFGLEPAAAKLICSLKPDLKDFAQKCVDATKIAGFALATSALVVSGASAEGVPKRLTFDEIQSKTYLEVKGTGTANQCPTIEGGVDSFAFKAGKYKAQKLCLEPTSFTVKAEGVAKNAPLEFQNTKLMTRLTYTLDEIEGPFEVSSDGTVKFEEKDGIDYAAVTVQLPGGERVPFLFTIKQLVASGKPDSFSGEFLVPSYRGSSFLDPKGRGASTGYDNAVALPAGGRGDEEELAKENNKSASSSKGKITLSVTKSKPETGEVIGVFESVQPSDTDLGAKAPKDVKIQGIWYAQLDS

SEQ ID NO: 182096 - protein, 61 aa, Glycine max
  Clone ID: PAT_MRT3847_135446C.1.pep
IPSMQTGSLSIALTLTLLLLTNADDSDKTGIINYNNSPPKQPDLIILRDAIGTYTLIVTTK

SEQ ID NO: 182097 - protein, 66 aa, Glycine max
  Clone ID: PAT_MRT3847_135447C.1.pep
RAPRKKLKTFPIVRQRANVQVIRSLSLEIGGGFFGGGKQKEGRFFRGPKVAIGIKKKKVAICLGGV

SEQ ID NO: 182098 - protein, 84 aa, Glycine max
  Clone ID: PAT_MRT3847_135448C.1.pep
HSVFLKSTTFLTKLIVCDSPGQVHTQDNHWHIQISIKQWQFKVPQAGHSILKHFWIHKQGFPYVGLIDNSQKCGMVAFCKTTGC

SEQ ID NO: 182099 - protein, 61 aa, Glycine max
  Clone ID: PAT_MRT3847_135449C.1.pep
VFIAHEQHCICGEFLSCAHYSLILFLTNFRKKKIGFRLYVLMVEYLDIHLFWFILISVAFY

SEQ ID NO: 182100 - protein, 30 aa, Glycine max
  Clone ID: PAT_MRT3847_13544C.1.pep
MPYLQFFRCFWYCSSIKVIEFLCFYLPVQC

SEQ ID NO: 182101 - protein, 162 aa, Glycine max
  unsure (1)..(162): unsure at all Xaa locations
  Clone ID: PAT_MRT3847_135450C.1.pep
MQKEEQEKEYLESLTCPSFNCYSTDELPGIAQSRIQKDDASFSASQNDDPDFEFAAFRDEPFEFSNDDAVFPLFNSDVARDRRNSVSGGLDSDAAVLRFPITGEELRRGEHDPSLSPSSESSSEADELEVVPAXTYCLWRSNSPQASPRKCKKSNSTGSSSS

SEQ ID NO: 182102 - protein, 90 aa, Glycine max
  Clone ID: PAT_MRT3847_135451C.1.pep
RKLMSVLVQPGLTTQITWFRPFLPKILPYSKKPGKKNLGWILGRGLEKKSNGTKSHSNLNTWKILHLFQVKFPWPREPFSSNPYKMRSPG

SEQ ID NO: 182103 - protein, 86 aa, Glycine max
  Clone ID: PAT_MRT3847_135452C.1.pep
NSARGRVVSPDKDFFQILSPSLRLLRIAPRGDQMVSFGVEDFEERYGGLKPSQFADMIALTGDRSDNIPGVHGIGDVHAVQLISRF

SEQ ID NO: 182104 - protein, 41 aa, Glycine max
  Clone ID: PAT_MRT3847_135453C.1.pep
RSYGHGFRGDLSSDSLDKTPFFTNTFHIRIRPPVQRYLLHK

SEQ ID NO: 182105 - protein, 105 aa, Glycine max
  Clone ID: PAT_MRT3847_135454C.1.pep
MKAFSVKVEEGREGKNGNLSVGPVYRNLLSENEFPPMDPDFSTTWDIFCVSVKNHPNNRMLGKRKIVDEKIGPYVWKTYKEVYDEVLHMSSALRASGAEPGTQIE

SEQ ID NO: 182106 - protein, 37 aa, Glycine max
  unsure (1)..(37): unsure at all Xaa locations
  Clone ID: PAT_MRT3847_135455C.1.pep
ARDSCXNTTEGIPLIQSYHGIGHRGLSTGDDGKLTCG

SEQ ID NO: 182107 - protein, 131 aa, Glycine max
  Clone ID: PAT_MRT3847_135456C.1.pep
YQRVKLLHIPTDSPIALPSWLSEEECDYYASKYDKTGFTGGLNYYRNLDLNWELTASWTGAQVKVPVKFIVGDLDLTYNAPGAKEYIHKGGFKKNVPLLEDVVVLEGAGPFLHQERPDEISNPIYDFFKKF

SEQ ID NO: 182108 - protein, 68 aa, Glycine max
  unsure (1)..(68): unsure at all Xaa locations
  Clone ID: PAT_MRT3847_135457C.1.pep
NLDVREINRALNLEMFPKGMXYPFVNQMFVLARYGFXFGVNKIPAAGNHGGHLKRKGNESLSIIRMVF

SEQ ID NO: 182109 - protein, 59 aa, Glycine max
  Clone ID: PAT_MRT3847_135458C.1.pep
ICLNFRTLTTFVNLVLVRKMGIPCPYLATLNQLLEGSNLIMKFSHLMEKFEHVLVFVVK

SEQ ID NO: 182110 - protein, 81 aa, Glycine max
  unsure (1)..(81): unsure at all Xaa locations
  Clone ID: PAT_MRT3847_135459C.1.pep
SRRKVHSIGLYIVTRIPKVYPHKLTRLMILHIHDCYVSRCNSXVLFNITATIXSNHHPLPVNNALRGLDIVNYIIRSVEHA

SEQ ID NO: 182111 - protein, 54 aa, Glycine max
  Clone ID: PAT_MRT3847_13545C.1.pep
SSHGGDDHHHHHNQQQQQQQQQLPLSRYESQKRRDWNTFGQYLRNQRAPVAFLS

SEQ ID NO: 182112 - protein, 113 aa, Glycine max
  Clone ID: PAT_MRT3847_135460C.1.pep
GNTNCIVKEDVNDDSISIGSVSEDSMNSVCSSSSSELAEDASSSSASYLSTSSSHSNGPLFELSELMSQLPIKRGLSMFYQGKAQSFSSLASVESIGDLPKKKERFYRKKMKS

SEQ ID NO: 182113 - protein, 91 aa, Glycine max
  Clone ID: PAT_MRT3847_135461C.1.pep
ANGSTSSFLCFFPSSADSFLLSFDFFFFDKPFSVRNFCFPPSSAFSSMPPSSIIFISATFLAVKTIYASQSLDKKRSYAVQCFHIFLLFFP

SEQ ID NO: 182114 - protein, 83 aa, Glycine max
  unsure (1)..(83): unsure at all Xaa locations
  Clone ID: PAT_MRT3847_135462C.1.pep
XXXXXHTPXXPXKPXPXXXPHXPXPHNXRXPHXXXXXXLTXHTPXXPXXTXXXXXHXXXXSXHXXXXTLXNXILTXXHXFLXX

SEQ ID NO: 182115 - protein, 52 aa, Glycine max
  Clone ID: PAT_MRT3847_135463C.1.pep
CQEYFRFFLLHCVRVLNGKKLTLCAGHKLAESFFIPLLIDMLNQSTMRHRNA

SEQ ID NO: 182116 - protein, 155 aa, Glycine max
  Clone ID: PAT_MRT3847_135464C.1.pep
MAKTTHIAIVSSPGFGHIVPIIEFSKRLVKLHPNFQVTCIIPSLESSTESCKAYLKTLPSFIDFIFLPPVSIEQLSQGGYIGQLIQLNISHSLPSIHEVLKSLFSKVPLTALVVDVLALQALEFAKEFNALSYFYFPSSAMVLSLLLHMSKLDEE

SEQ ID NO: 182117 - protein, 530 aa, Glycine max
  Clone ID: PAT_MRT3847_135465C.1.pep
MASCQRPETLIRAYLHASDNKGISDVTAKYLSMLTDPNVAVRRGSALAIGVLPYELLASQWRNVLLKLCGSCKIEENPEDRDAEARVNAVKGLTLVCETLINGREDTATSFVEDDFSLFILIKNEVMISLFKALDDYSVDNRGDVGSWVREAALDGLEKCTYMLCKIDKSVCLSGRSDGNEIEPIAHPSIDSMLKNNQELSLFDENLATNLVGGICKQAVEKMDKLREAAANVLYRILYNQIIHIPYIPFREKLEEIIPKEADAQWGVPSYSYPRFIQFLQFACYSRDVLSGLVISIGGLQDSLKRVSLSALLEYLEEVESEDPNTRTSRLYMLSADILWVLQQYKKSDRVIVPTLKTIEILFSKKIFLNMEAHTPAFCGAVLDSVSFEVKGSKDFSKLYAGIAILGYVAAVQEPINMRAFSQLLNFLGHRYPKIRKASAEQLYLVLLENGDLVAEDKIDKALEIISETCWDGDMDSAKHQRLKFSEIVGLEVGSLGNNSDGTSRKTSSKKPTDLDENASYSSLVEASGF

SEQ ID NO: 182118 - protein, 511 aa, Glycine max
  Clone ID: PAT_MRT3847_135466C.1.pep
MEPETSLNFTLMLTFLLYLNLVMGVLSVDHYRRVDFPDEFVFGSGTSAYQVEGASNEDGRTPSIWDTFAHAVYEHGENGDLACDGYHKYKEDVQLMVETGLEAYRFSISWSRLIPNGRGPVNPKGLQYYNNLINELISKGIQPHVTLHNCDLPQALEDEYGGWVSRDIIRDFTNYADVCFREFGDRVQYWTTVNEPNAFALGGYDQGTSPPQRCSPPFCTTNSTRGNSTYEPYLAVHHILLSHSSAVRLYRRKYRDQQHGYVGISVYTFGFIPLTDSEKDKAASQRARDFLVGWIIEPLVHGDYPISMKKNAGARIPTFTTRESEQLKGSSDFIGVIYYNNVNVTDNPDALKTPLRDILADMAASLIYLQDLFSEEEYPVTPWSLREELNNFQLHYGNPPIFIHENGQRTMSNSSLQDVSRVKYLQGNIGGVLDALRDGSNIKGYFAWSFLDLFELLAGYKSSFGLYYVDRDDPELKRYPKLSAKWYKWFLRGTIELKKDASFDSVGHLFQ

SEQ ID NO: 182119 - protein, 81 aa, Glycine max
  Clone ID: PAT_MRT3847_135467C.1.pep
AFLSFSALFSFRFPLSHTLPLLFLCNNLSSLLHSLNSCQTPISADEGQCHASMVASASSPSLNCFSLNEAGFKECNYLGLS

SEQ ID NO: 182120 - protein, 57 aa, Glycine max
  unsure (1)..(57): unsure at all Xaa locations
  Clone ID: PAT_MRT3847_135468C.1.pep
KFPSPFSEFLQRGIKAYGFXALFQKGHGAPRGGPSFRKFYKEPPKGPQRVPLKKLPF

SEQ ID NO: 182121 - protein, 117 aa, Glycine max
  Clone ID: PAT_MRT3847_135469C.1.pep
VSMDGAPYLRKVDLRSYTTYQELSSALEKMFLSCFTLGQCGSHGAPGREMLSESKLRDLLHGSEYVLTYEDKDGDWMLVGDVPWEMFIETCKRLKIMKGSDAIGLAPRAMEKSKSRI

SEQ ID NO: 182122 - protein, 73 aa, Glycine max
  Clone ID: PAT_MRT3847_13546C.1.pep
RHVLGLQVSELSSKVGDLDVTILLELIASIGHVRQVVLKCRDITLKAEDLLLQLTNCVLLSLTKLSLCIELVV

SEQ ID NO: 182123 - protein, 38 aa, Glycine max
  Clone ID: PAT_MRT3847_135470C.1.pep
NYTKDPLSYCENLFWSFILKKNYFGALTFSFESFRFSH

SEQ ID NO: 182124 - protein, 372 aa, Glycine max
  unsure (1)..(372): unsure at all Xaa locations
  Clone ID: PAT_MRT3847_135471C.1.pep
MSPPTLVTEEEGRSTVASDSSQSLDCFSQNGAGLKERNYLGLSDCSSVDSCASTVPSLCDEKKENMNLKATELRLGLPGFQSPEREPDLFSLSSPKLDEKPLFPLLPTKDGICSSGQKAVVSGNKRGFADTMDGFSQGKFAGNTGMNAVLSPRPSGAQPSAMKETPSKLSERPXCSTNNGTGHNHTGASISGSAPXASKAQVVGWPXHIRSFRKNSMATTTNKNNDEVDGKXPGAGALFVKVSMDGAPYLRKVXDLRNYTXTYQELSSALEKMFLSCFTLGQCGSRSSKGREMLSEXSKLKDLLHGSEYVXLTYEDKDGDWMLVXWDMFIDTCKRLKIMKGSDAIGLSSMARDINMNRCYLVLYPEEGWKEN

SEQ ID NO: 182125 - protein, 352 aa, Glycine max
  Clone ID: PAT_MRT3847_135472C.1.pep
MSPPLLVTEDEGQCHASMVASASSPSLNCFSLNEAGFKECNYLGLSDCSSVDSSTVPNLSDEKKENLNLKATELRLGLPGSQSPERETELFSLSSTKLDEKPLFPLLPTKDGICSLSQKTVVSGNKRGFADTMDPEFPGNAGINMMLSPKPSGVQPTTVKEIPSKVLQELPSAANGTGHNHTSGASISGSAPAAKAQVVGWPPIRSFRKNSLATTTNKNNDEVDGKPGVGALFVKVSMDGAPYLRKVDLRSYTTYQELSSALEKMFLSCFTLGQCGSHGAPGREMLSESKLRDLLHGSEYVLTYEDKDGDWMLVGDVPWEMFIDTCKRLKIMKGSDAIGLAPRAMEKSKSRS

SEQ ID NO: 182126 - protein, 44 aa, Glycine max
  unsure (1)..(44): unsure at all Xaa locations
  Clone ID: PAT_MRT3847_135473C.1.pep
VEASGILGGPKNAAPAIVSPXPCKKRFREAMAACFLALPGQWSS

SEQ ID NO: 182127 - protein, 290 aa, Glycine max
  Clone ID: PAT_MRT3847_135474C.1.pep
MDGRGGCCIARYVPGASHGSTVDKIMLRFRPIAPKPAAAATASDGSSSESSDAFLKNGTTKRKYVRDNNYTSKRRIRRRKNTSSPEKKQKPVVTLPLLPETPDRKDSRAKDLTPSPAKPVRNNNNNNNKSKNLNIINKNVPVWVSFENRSLTMMGGWCSCVTVEGVTDTCLESEWLGSTDEERRLNLSNDTCPGFISDGYGRVTWTNEAYGKMMMMKGEGDEGQGPVLLVNKVNTVVPHASFTCLVRVVQYSCGKERNSLTVPCDVWRMDCGGFAWRLDVKTALSLRLGY

SEQ ID NO: 182128 - protein, 72 aa, Glycine max
  Clone ID: PAT_MRT3847_135475C.1.pep
FSEGRQSFRVLPNTDTRRADVYIKHRLISMSLQVQRLRYTVRYAITQGRKRYCGRISSPGNMIRKQPKERAA

SEQ ID NO: 182129 - protein, 92 aa, Glycine max
  Clone ID: PAT_MRT3847_135476C.1.pep
PMQDGFQGQGFAASCCPLWDSMSWPFSGALCIGGLSVELPCVPGLLEVYVKCGESIYLKLLGLIWSFKWVQRWANFFHICEIFGHMLFKAPE

SEQ ID NO: 182130 - protein, 271 aa, Glycine max
  Clone ID: PAT_MRT3847_135477C.1.pep
MISVCKCLLIEQTFTKRDYLLDNPIHLPLDFTSTQTSSIPRGGKSRPVYPLQGHHICTEKGKANWEELLAGMVEVSVSWFPRWKDGGTGVLCSCEGFLNVPLTGKRGCINYNPILAIRQLVYPMRGAPSEEIITPFVAWGFNEDKKLRGSSNEVIGGYHKWLKARTQGITWLPKLKDPSGEEVEVLEESEEVQALKVELERTRVRAFAKRDTQWLSARKNLEEDELSDSLSTPLQVIKCTASAHPLSKRSALSPKSLTCGKRSIRALSARA

SEQ ID NO: 182131 - protein, 97 aa, Glycine max
  unsure (1)..(97): unsure at all Xaa locations
  Clone ID: PAT_MRT3847_135478C.1.pep
LTLRFSSDLESXKKKKKKKKKKKKKKKKKKKKKKKKKKKKKKKKKKKKKKKKKKXXGGGSFKKKXFKNRVGKKFIFFFGAPKFNFLARFLKGGGGGK

SEQ ID NO: 182132 - protein, 81 aa, Glycine max
  unsure (1)..(81): unsure at all Xaa locations
  Clone ID: PAT_MRT3847_135479C.1.pep
MEGCTPHSKISLTQMPLVTTQGDPGDGARWTQKHKDEYLAGRGYTXLNQGHGHDRFRICAGKPEGTHXTGYCWHVYHLLKY

SEQ ID NO: 182133 - protein, 83 aa, Glycine max
  Clone ID: PAT_MRT3847_13547C.1.pep
MQIFVKTLTGKTITIEVESSDTIDNVKAKIKDKEGITPDQQRMIITGKQLEDGSTLADYNIQKEYTLHHVIRISGGAKKRKKK

SEQ ID NO: 182134 - protein, 60 aa, Glycine max
  Clone ID: PAT_MRT3847_135480C.1.pep
PTVQWHIFRINRFYYCILLGEEEVINHERGWCDTTYHDNRASLHAIICKSLGENKPYCNC

SEQ ID NO: 182135 - protein, 88 aa, Glycine max
  Clone ID: PAT_MRT3847_135481C.1.pep
SLPPAEKKPQSNASVPVGSHSMTLVVRVKTFATSGWDKRATSSPARGGLYATSYNTLINILGKPFGTTRNAICLVFPSHNRLIDFLKK

SEQ ID NO: 182136 - protein, 79 aa, Glycine max
  unsure (1)..(79): unsure at all Xaa locations
  Clone ID: PAT_MRT3847_135482C.1.pep
YVSYEFSSKHVPCYGIFALLMKXNHXAITPRGLFIYSQRHEQFAKKINIKVLPSESSFNNPTITSQPLPLLLPLTIITS

SEQ ID NO: 182137 - protein, 45 aa, Glycine max
  Clone ID: PAT_MRT3847_135483C.1.pep
IDRSHMHVDSAEMIMKHVCTPKFSLTAAGILQLPYHFISLTNIYK

SEQ ID NO: 182138 - protein, 149 aa, Glycine max
  unsure (1)..(149): unsure at all Xaa locations
  Clone ID: PAT_MRT3847_135484C.1.pep
DSQGNTHEFNLIDGGVCANNPTLVAMNQVTKQIINENPDFFSIKPMEYGRFLIISLGTGTPKNEQKFNAQMAAKWGLLDWLTNSGSTPLIDVFTQSSADMVDFHLATVTQALHSENNYLRIQDDTLTGTDSXVDIATKENLEKLSQIGE

SEQ ID NO: 182139 - protein, 157 aa, Glycine max
  unsure (1)..(157): unsure at all Xaa locations
  Clone ID: PAT_MRT3847_135485C.1.pep
MGSKTRSSLAIFLTVNILFFALVSACGTCPSPTPRHKHKPVKPSPSGGSGGSGGSGGSGGSGGSGGSGGSGGSGGSGGSGGSGGSGASCPRDALKLGVCANVLNGLLNVTLGQPPVTPCCSLLNGLVDLEAAVCLCTALKANILGINLNLXPISLSL

SEQ ID NO: 182140 - protein, 83 aa, Glycine max
  Clone ID: PAT_MRT3847_135486C.1.pep
LPRLQARYYSIASSSKVHPNSLHICAVVVESQTKAGRINKGVATNWLRAKEPAGENGGRALVPMFVRKSQFRLPFKATTPVIM

SEQ ID NO: 182141 - protein, 51 aa, Glycine max
  unsure (1)..(51): unsure at all Xaa locations
  Clone ID: PAT_MRT3847_135487C.1.pep
ATAKTVKDVSPHDFVKAYAYHXSRRSGKMELPKWTDIVKTAKFKELAPYDP

SEQ ID NO: 182142 - protein, 87 aa, Glycine max
  unsure (1)..(87): unsure at all Xaa locations
  Clone ID: PAT_MRT3847_135488C.1.pep
LDGFGSRLIQRLEKEAAVMNNIPFKYACMLYKLNAARERRIIINIAXWNFETSMDDGAAIDEPGHMDHIYNMITVTLQTDCACFIID

SEQ ID NO: 182143 - protein, 52 aa, Glycine max
  Clone ID: PAT_MRT3847_135489C.1.pep
TNGSFVDLKCSTGGSLQMICFRSAPNYLGLLSIVRSVWVHSSTWRQSLTKKK

SEQ ID NO: 182144 - protein, 47 aa, Glycine max
  Clone ID: PAT_MRT3847_13548C.1.pep
QKVLMDLINSQWANGVRYISMPRWNPTSQLNQVSHPRRKPNFSCLHD

SEQ ID NO: 182145 - protein, 97 aa, Glycine max
  Clone ID: PAT_MRT3847_135490C.1.pep
NRLSVYPIPHGSHLFNGPTYSPVYLGLPIYLPKRNFEHNTNLQAYNFLTLHTVKNRSSNPERRMHYILLNGTAQVDPCTRALLETDLDHNFLRLSGT

SEQ ID NO: 182146 - protein, 70 aa, Glycine max
  Clone ID: PAT_MRT3847_135491C.1.pep
LSSTSLFQSSCSISECTLSHTCESMLLCHHSNSSLLFSSATHLFVDVYSQSPACGVRAPFSYQGQRFRFG

SEQ ID NO: 182147 - protein, 157 aa, Glycine max
  unsure (1)..(157): unsure at all Xaa locations
  Clone ID: PAT_MRT3847_135492C.1.pep
RSCKVVSGCQQVDPQAHLASDQIFLTQNPHLCYLNHLVYWSIYVSYLIQPIHLQLFCKLQPKYLYTPGHSSLFSLTLHVCCCQLPQPYSHHQSSSYHQISQEGADHCQALVTIFFLHSNQLLHKLHAQNQGQKLGLNLLTWFQLLSWFLSDTMXSSF

SEQ ID NO: 182148 - protein, 203 aa, Glycine max
  Clone ID: PAT_MRT3847_135493C.1.pep
LLFKSPPPPSPTPYYYNSPPPPVVYPPHPYHPHHHPLIVKVVGKVYSYKCYDWEYPEKSHNKKHLKGAVVEVKCKAGRNIIKAYGETKSNGKYSITVKDFNYVKYGPTVCKAKLYAPPKGSPFNIPTKLNEGTDLKVKSKDKYEVVLKAKPFAYASKKHFEDCYKPKPSPTPYYYKSPPPPSPVYIYKSPPPPAPAADDYEAI

SEQ ID NO: 182149 - protein, 313 aa, Glycine max
  Clone ID: PAT_MRT3847_135494C.1.pep
TRSPPPPPKYPPPYYYNSPPPPVVYPPHPYHPHHHPLIVKVVGKVYSYKCYDWEYPEKSHNKKHLKGAVVEVKCKAGRNIIKAYGETKSNGKYSITVKDFNYVKYGSTVCKAKLYAPPKGSPFNIPTKLNEGTELKVKSKDKYEVVLKAKPFAYASKKHCEECYKPKPSPTAYYYKSPPPPSPTYIYKSPPPPSPTYVYKSPPPPVKSPPYYYQSPPPPSPKPKPPYYYKSPPPPSPKPKPPYYYQSPPPPSPVPKPPYYYKSPPPPSPVPKPPYYYHSPPPPSPTSHPPYYYKSPPPPTSYPPPPYHYVSPP

SEQ ID NO: 182150 - protein, 225 aa, Glycine max
  Clone ID: PAT_MRT3847_135495C.1.pep
MKMKLLLMLLLVFLLLHQPIWAADPPAFSPGEEQHHMNKKVVIAIVVATTALAALIFTFLCFWIYHHTKYPTKSKSKNVQSPDAEKGITLAPFLNKFSSIKIVGMNGSVPIIDYKQIEKTTNNFQESNILGEGGFGRVYRARLDHNFDVAVKKLHCETQHAEREFENEVNLLSKIQHPNIISLLGCSIDGYSRFIVYELMQNGSLETQLHGPSHGSALTWHMKMK

SEQ ID NO: 182151 - protein, 355 aa, Glycine max
  Clone ID: PAT_MRT3847_135496C.1.pep
SFLCFWVYHHTKYPTKSKFKSKNFRSPEKGITLAPFVSKFSSIKIVGMDGYVPIIDYKQIEKTTNNFQESNILGEGGFGRVYKACLDHNLDVAVKKLHCETQHAEREFENEVNMLSKIQHPNIISLLGCSMDGYTRFVVYELMHNGSLEAQLHGPSHGSALTWHMRMKIALDTARGLEYLHEHCHPAVIHRDMKSSNILLDANFNAKLSDFGLALTDGSQSKKNIKLSGTLGYVAPEYLLDGKLSDKSDVYAFGVVLLELLLGRKPVEKLVPAQCQSIVTWAMPHLTDRSKLPNIVDPVIKNTMDPKHLYQVAAVAVLCVQPEPSYRPLITDVLHSLIPLVPIELGGTLRVSQVK

SEQ ID NO: 182152 - protein, 29 aa, Glycine max
  Clone ID: PAT_MRT3847_135497C.1.pep
QRAFSTGAWSHPYKTMVRISGVDAKCWAH

SEQ ID NO: 182153 - protein, 47 aa, Glycine max
  Clone ID: PAT_MRT3847_135498C.1.pep
QIALKFKNKMIFVIPNDTLNILKARVQPCMIFILFSRSEKNGGYTKD

SEQ ID NO: 182154 - protein, 107 aa, Glycine max
  unsure (1)..(107): unsure at all Xaa locations
  Clone ID: PAT_MRT3847_135499C.1.pep
GLEDTEANRQVYRTLLETTPGLGQDIYXAILFEETLYQITTDGGTIDGVLXEQNIDAGIKVDKGLGPLSRCNHKSWSQGLDGLASRSAAXYYQQGARFAKLRTAVSI

SEQ ID NO: 182155 - protein, 188 aa, Glycine max
  unsure (1)..(188): unsure at all Xaa locations
  Clone ID: PAT_MRT3847_13549C.1.pep
MQLSSTLTASMGKEKDHITIVVFEXVDSGKSTTTXHLTYMLVGFDKPVIERLEKEAADMNXRSFKDTYVLXDKLNAERYRSTTIDFALRKMKTAKYYCTVTDAPGHRDLIHTMTTGTSQADCALLNSDSTTGDLEAGSSKDGQTREHALMTFTLGVKQMIRCCFRMAATTPMNSKARYDEAVKEISCY

SEQ ID NO: 182156 - protein, 177 aa, Glycine max
  unsure (1)..(177): unsure at all Xaa locations
  Clone ID: PAT_MRT3847_1354C.1.pep
SCLVEVGTLSVVGRVIGDVLDPFECSIPMRVTYXNKDVSNGCEFKPSQVVNQPRINIGGDDFRNFYTLXXVDPDAPSPSDPNFREYLHWLVTDIPATTGPTFGHEVVTYENPRPMMGIHRIVFVLFRQQGRETVYAPGWRQNFITREFAELYNLGLPVAAVYFNIQRESGCGGRRLC

SEQ ID NO: 182157 - protein, 152 aa, Glycine max
  unsure (1)..(152): unsure at all Xaa locations
  Clone ID: PAT_MRT3847_135500C.1.pep
MPPKGSGKKPAAFPQATSKASAAKKQKNPLIEKRPRNYGIGQDIQPQRXNVGRMVRWPAYVRLQRQKKILNMRLKVPPAIAQFQHVADRNLATQAFKILNKYRPETKAEKKERLTKEATAVSEGKKKEDVSKKPYVAKYGLNHVVGLIENKK

SEQ ID NO: 182158 - protein, 61 aa, Glycine max
  Clone ID: PAT_MRT3847_135501C.1.pep
ISRSLIIYFLIPFYYYNSINQILLNHNNIQITFSYTKMKFYHIYYISHHHYINQLIIFNIH

SEQ ID NO: 182159 - protein, 100 aa, Glycine max
  Clone ID: PAT_MRT3847_135502C.1.pep
PMLYSEASEAAHPRLTDLSTPISHTPHSTTSSTITLTVCNTHTHTHTSSVQSHNIHHTPVSPVNLKVTCDHQQTLPQIAQCGMRQNLLEGSLASLCLYNY

SEQ ID NO: 182160 - protein, 106 aa, Glycine max
  unsure (1)..(106): unsure at all Xaa locations
  Clone ID: PAT_MRT3847_135503C.1.pep
XXXXXXXFGFXTXXXXXXTTXXXXXFXXVIXXDXHNHDSNMVALSYQGXGPLNXXXTTXMAVXKYLCLXXGXXXWGXTXXXXNIRSXWGHNLVCKPLXPXXXDIXQ

SEQ ID NO: 182161 - protein, 70 aa, Glycine max
  Clone ID: PAT_MRT3847_135504C.1.pep
GQIWRAYQEKTQGRPVQDATVDNMYKYIVSQKVLRSTSEMFRSLQLRRILIHFSLKHAPLTNDPKQMLAG

SEQ ID NO: 182162 - protein, 164 aa, Glycine max
  Clone ID: PAT_MRT3847_135505C.1.pep
DHGAGHINPRRALDPGLVYDIQPQDYFEFLCTQKLTTSELGVFAKYSNRTCKHSLSSPGDLNYPAISVVFPLKNSTSVLTVHRTATNVGLPVSKYHVVVSPFKGASVKVEPDTLSFTRKYQKLSYKITLTTQSRQTEPEFGGLVWKDGVHKVRSPIVITYLPPI

SEQ ID NO: 182163 - protein, 188 aa, Glycine max
  unsure (1)..(188): unsure at all Xaa locations
  Clone ID: PAT_MRT3847_135506C.1.pep
ALQSIDWKTYGLNLGGVVEQDGVTLLQWENLPTDTHIDILLHSYHKHYKTMIPAPRKMSPLVRNLVKRAVKLSLDDLKANHSQAFLSSRDVEICGYAPDLARXIAGILSSCDLDFQGECISLLGLQSQGVGTEIVENCIEERIVSVVEMDNKKPHNSQEPAPFLFEEDPVEELEFQENDFSPLNSLLF

SEQ ID NO: 182164 - protein, 51 aa, Glycine max
  Clone ID: PAT_MRT3847_135507C.1.pep
GKTQLPHFAKECMDGVVKLDDFITHELPIEEINKAFDLLTVGKSLRCLLHF

SEQ ID NO: 182165 - protein, 127 aa, Glycine max
  unsure (1)..(127): unsure at all Xaa locations
  Clone ID: PAT_MRT3847_135508C.1.pep
GFRGGRAMDENPNPTXGAKTFLSSRIERASHLAEVYKKGAPSKXLVPFVVPIQIKLFGAVQMYTQEGEDLSLWPLAIIVSSQSVPLSLNKSISFLCIKEKGMIIRHALFHRHAHPAIKHVLFLIVHK

SEQ ID NO: 182166 - protein, 38 aa, Glycine max
  Clone ID: PAT_MRT3847_135509C.1.pep
VMGLACHIKSILNVGGAKIVSLFWDDQTIFFRVYRRPL

SEQ ID NO: 182167 - protein, 58 aa, Glycine max
  unsure (1)..(58): unsure at all Xaa locations
  Clone ID: PAT_MRT3847_13550C.1.pep
FNXPXQGLTRVPGXIXNFXRWFGTXXFXLKFRAXXAFLRKVXPKASGKFPXSLYRXRR

SEQ ID NO: 182168 - protein, 68 aa, Glycine max
  Clone ID: PAT_MRT3847_135510C.1.pep
AEISLFSLTHILVPSLGFSFGKEQQGLVGFNPCVFSHPQKGKILFPLFKPSILKETCFQTPPFFDSKL

SEQ ID NO: 182169 - protein, 39 aa, Glycine max
  Clone ID: PAT_MRT3847_135511C.1.pep
RLQYIYNIILFIHLLLIYFFIFYFFSFLSFFFFFFFYNF

SEQ ID NO: 182170 - protein, 38 aa, Glycine max
  Clone ID: PAT_MRT3847_135512C.1.pep
ETEIATGNISRNANSQECQVFLLSRSILISRVLKCLQI

SEQ ID NO: 182171 - protein, 278 aa, Glycine max
  unsure (1)..(278): unsure at all Xaa locations
  Clone ID: PAT_MRT3847_135513C.1.pep
EFRQALGSIICLLGLWLLYKGARKRVIKKRIQKFFKKNGGLLLKKRMSSGEVNVDKATLFSLKDLEKATDHFNLNIIIGKGGQGTVRMLXEFIILSQINNRNVVKLLGCCLGTEIPLLXYEFIPNGNLFQYLHDQNEDLPMTWDIRLRIATGIAGALFYLHSVASQPIYHRDIKSTNILLDEKYRAKIADFGATRMISIEDTHLTTVVQGTFGYLDPEYFYTSQFTEKSDVXSFVVLAELLTGQQPMSSVRNAESNNLASYFVQCMEEDPFCRLLAAV

SEQ ID NO: 182172 - protein, 88 aa, Glycine max
  Clone ID: PAT_MRT3847_135514C.1.pep
SFEEEQVSKQKSNDQQQFTDANSSNNSANLFNQQHLTDADNSKNLLLFINLLEKYELMCSQVSNALQTFANPTKLVLDTIKGFYASHS

SEQ ID NO: 182173 - protein, 110 aa, Glycine max
  Clone ID: PAT_MRT3847_135515C.1.pep
RVLELLEATANVAIPREESSPLKSSQPSPTGVFNASGRRTLPYTKQNCDETTNTVIIITIPRLLFFICILVFPSTYYSFEYLIFLSKSKSYIRNVTVCKDFALVLSWPKL

SEQ ID NO: 182174 - protein, 72 aa, Glycine max
  unsure (1)..(72): unsure at all Xaa locations
  Clone ID: PAT_MRT3847_135516C.1.pep
HIFVKTLPGKTITLGVESSDTIDFVXAKIQDKEGIPSDQHGYILVXLQLDDSRTLSDFYMHTESPVQLVLRL

SEQ ID NO: 182175 - protein, 61 aa, Glycine max
  Clone ID: PAT_MRT3847_135517C.1.pep
CGSNNHNRGIKNAFKNQFIYANNSSYLGYFQKLVMNPVLKILIPHPQKLKLIHGRDKGRRP

SEQ ID NO: 182176 - protein, 75 aa, Glycine max
  Clone ID: PAT_MRT3847_135518C.1.pep
GRTTFWEKELATYRQMDSKGSDQSYGKAKVQHDQWGQKPPISVGTYENRSTISFVKKDEIKDISLIIWLLRLASI

SEQ ID NO: 182177 - protein, 70 aa, Glycine max
  unsure (1)..(70): unsure at all Xaa locations
  Clone ID: PAT_MRT3847_135519C.1.pep
TGPCPTTIVGRVRQRTETAEACVGVKGDRKRRTLTQEDERTYDTTLVTHCHHPYLFFPPLSVVXSQPYSS

SEQ ID NO: 182178 - protein, 62 aa, Glycine max
  Clone ID: PAT_MRT3847_13551C.1.pep
ADISTSGFYDLLLLILPVECVITKIHKYGGYDVRETMSVLGSFTSRVWLGRCYFVSTANSYG

SEQ ID NO: 182179 - protein, 86 aa, Glycine max
  Clone ID: PAT_MRT3847_135520C.1.pep
LLWFLFSPLSSENVPLTFPQKLTVLVALFGLHPTFLARVSRVPASAYSSLLLLHHITFQARRFLVCCRIVSSLCVSVAAWFHSRVL

SEQ ID NO: 182180 - protein, 278 aa, Glycine max
  Clone ID: PAT_MRT3847_135521C.1.pep
MCVFAMPGGATVCSGHRFLCVVLHSTRPRLSYPTRSRPVPVQLGSVFVSNGNGDSKRFSSKLSLIPRAVDSSTAQSSVVSDDGFSVSKLSFGVIGLGVGLSLLSYGFGAYFNILPGSEWSAIMLTYGFPLAIIGMALKYAELKPVPCLTYSDAQSLREKCATPILKQVKSDVTRYRYGDEQHLDEALKRIFQYGQGGGIPRRSAPVLQSIREEVTQDGKYCLVLVFEAKALQLSDFEQRQAKFTSFFGPGITAEIGKGEKDLYEVRLISNTDPNASPS

SEQ ID NO: 182181 - protein, 105 aa, Glycine max
  Clone ID: PAT_MRT3847_135522C.1.pep
DANFEARTSSLKRNARPHAHNSSSRKKLKLDTSESGDIDIVVEGIIFTPDIDLSGNSETVEGGAREDALDDEEDLKNSIVEIWGVDLCSMEINTLEEMESYLLSR

SEQ ID NO: 182182 - protein, 53 aa, Glycine max
  Clone ID: PAT_MRT3847_135523C.1.pep
SSRSALLFQFSLFYMRHCVLILFARNIQLCYSMIIYLLLIKEIDLFASHPRRS

SEQ ID NO: 182183 - protein, 152 aa, Glycine max
  Clone ID: PAT_MRT3847_135524C.1.pep
MSSFPNYSTTEYIHKYHLRGPSPTSTTSSSNANTQDTDTKDAISRLQALRVDFDKKQNTTSPSYEPFIIGVAGGSASGKTTVCQEIITNLSNKRVVIISQDSFYRNLTDEEKQIARENKYDFDHPNAFDYEMFEQTVAAIKSGKGDIEIPIY

SEQ ID NO: 182184 - protein, 62 aa, Glycine max
  Clone ID: PAT_MRT3847_135525C.1.pep
MGKPKVHMNIVVIGHVDSGKSTTTGHLIYKLRGIDKRVIARFEKAAAEMHKRSFKYTWVLDK

SEQ ID NO: 182185 - protein, 234 aa, Glycine max
  Clone ID: PAT_MRT3847_135526C.1.pep
KKLLEAVDLKCKLVDFGNACWTYKQQGSIGVLRQYRCPEVLLGSKYSTPADLWSFACICFELATGDVLFDPHSGDNYDRDEDHLALMMELLGKMPPKIALGGRYSREFLNRHGDLRHISNLRFWPMDKVLMDKYNFNEQDTNDLVDFLVPILDFVPEKRPTAAQCLSHPWMSAGPRTLESSITTVQPDAINEELSKRRKRETAEKEAVEIGLRNISIKETSEPLKDSQPLKSFK

SEQ ID NO: 182186 - protein, 228 aa, Glycine max
  Clone ID: PAT_MRT3847_135527C.1.pep
VDLKCKLVDFGNACWTYKQFTNDIQTRQYRCPEVLLGSKYSTPADLWSFACICFELASGDVLFDPHSGDNYDRDEDHLALMMELLGMMPRKIALGGCYSRDFFNRYGDLRHIRRLRFWPLNKVLTEKYDFSEQEANNMTDFLLPLLDFVPEKRPTAAQCLQHPWMSAGPRTLESSLTAVQPDAINEELSKRRKRETAEKEAVEIGLRNISIKETSEPLKDSQPLKSFK

SEQ ID NO: 182187 - protein, 85 aa, Glycine max
  unsure (1)..(85): unsure at all Xaa locations
  Clone ID: PAT_MRT3847_135528C.1.pep
DERDGYADXAELHRVLRKSDTKRNLETLIQAEQSKXSTTSTKRIGVASVCFGLSGIKKSLSISSTSSKHMFSGLHKLVFEEQRKE

SEQ ID NO: 182188 - protein, 96 aa, Glycine max
  Clone ID: PAT_MRT3847_135529C.1.pep
CFLGGPVISRENYRSKHLLQRPSVFSNRTTLDGNADQWEEESERKERSRIVYPLSPIPDRRVGALIQDFSSLILELNRVLRNRQKEFISDTKSYIK

SEQ ID NO: 182189 - protein, 53 aa, Glycine max
  Clone ID: PAT_MRT3847_13552C.1.pep
KPLRTPFAHWSLKNTQKLRLRHREIERERERHRLGRWAIAVHGGAAADPNLPL

SEQ ID NO: 182190 - protein, 154 aa, Glycine max
  unsure (1)..(154): unsure at all Xaa locations
  Clone ID: PAT_MRT3847_135530C.1.pep
MAENREHKVVDKSQVAPATSRTMSFPLSFLDLPYARLLYVKRLFFYHFPHXPSLKHNLSLTLQHFFPLAGNLLCPPQPNKPFIRCTDDDSVTLTIVESKAYFNHLSSNHPKNLKDLDHLVPMVTFTTVPGDDDEDTYVSPLGALQVTVFPNLAF

SEQ ID NO: 182191 - protein, 52 aa, Glycine max
  Clone ID: PAT_MRT3847_135531C.1.pep
IFSHRNSDTISKLNTQILNTAWVQPYNTTHMQEYEKFLKIQDMIQPRCINMN

SEQ ID NO: 182192 - protein, 47 aa, Glycine max
  Clone ID: PAT_MRT3847_135532C.1.pep
SSHFLVHGGNTFSLDLLPNTVTINGLLCFSPSVLFASVERQLDPNFL

SEQ ID NO: 182193 - protein, 65 aa, Glycine max
  Clone ID: PAT_MRT3847_135533C.1.pep
PSRLRKDDRRGMDFFIYSFVAALRSELECLSIAGPFGCFYNLQKVQGFTISESQRLLGAYNGTRT

SEQ ID NO: 182194 - protein, 45 aa, Glycine max
  Clone ID: PAT_MRT3847_135534C.1.pep
YLWLQPFFQRAMISHPRVSPNEDVNAPRYLVWGVHQQFLKFGFLF

SEQ ID NO: 182195 - protein, 120 aa, Glycine max
  Clone ID: PAT_MRT3847_135535C.1.pep
MFNNSPLVMASRRFQQKWGNCHSAYIMLCVLGINPLNEHSYIYHFCRDTILTTIYYVYHNPKFVKAQLHWYPETTYIYLQNPVVARPRLTRLCVYKQRRLKKKSGINALSRCAVWASNNH

SEQ ID NO: 182196 - protein, 100 aa, Glycine max
  Clone ID: PAT_MRT3847_135536C.1.pep
LEFPSFNSHLPPATDRLHLDVGHNWHNHFCHPFVPTLQQARNPPIEGGCNPILSRPIPMRLDWPPVFRGGMTPSPNYNYDYGCISRKQCTFLKGLVVHNM

SEQ ID NO: 182197 - protein, 72 aa, Glycine max
  Clone ID: PAT_MRT3847_135537C.1.pep
AQGVFVGAKGSPGQVVAVAVAPLVAHVRQRLGLLRRRGCLCCGRASEALCSGFGVKSPPLFSPPLLRYVWKH

SEQ ID NO: 182198 - protein, 105 aa, Glycine max
  Clone ID: PAT_MRT3847_135538C.1.pep
DLTILNPLTHPISKWCTIDISKFFFRRVCTMETDNTGPQKLRDQLILLPLIYICCSPQTISMRGCRKRYQTTCPLTRPNSTYIPHPLRVFAPGLNFTHSPFPYST

SEQ ID NO: 182199 - protein, 70 aa, Glycine max
  unsure (1)..(70): unsure at all Xaa locations
  Clone ID: PAT_MRT3847_135539C.1.pep
SPQVCFWKTDGGSWGFLSKCWGQGGQPPPLTLGWGTPPPGWGFFWPLWPFRDXKFPVSPPKINFPFWFKI

SEQ ID NO: 182200 - protein, 33 aa, Glycine max
  Clone ID: PAT_MRT3847_13553C.1.pep
VNKILHTRFTECKRTLLSPRYYETLYSSSRKSR

SEQ ID NO: 182201 - protein, 84 aa, Glycine max
  unsure (1)..(84): unsure at all Xaa locations
  Clone ID: PAT_MRT3847_135540C.1.pep
DYYLALIXEILXKQVASLGAXLXXSXARNXAELNRXXTQLXGKHXPDDVKIXPXDLSXGEDXXXXSCXEXRILSPDSGXDYMVH

SEQ ID NO: 182202 - protein, 84 aa, Glycine max
  unsure (1)..(84): unsure at all Xaa locations
  Clone ID: PAT_MRT3847_135541C.1.pep
ARNSAXAFLHHLQPTSLTKKGPPPPPYHNKLAKLNGYEEYVPRIKETDKKGRRSPSRCPKKKNWKQSFGVLSFIKKMLNHYNFL

SEQ ID NO: 182203 - protein, 66 aa, Glycine max
  Clone ID: PAT_MRT3847_135542C.1.pep
LPINWLSHPCPRLFGMRPIVNILYMLIRHYNFVMCNPVVVVLLHVLPTACYNVCAYFTFTYKSGAN

SEQ ID NO: 182204 - protein, 112 aa, Glycine max
  unsure (1)..(112): unsure at all Xaa locations
  Clone ID: PAT_MRT3847_135543C.1.pep
LIRDWAWTLXKSGNMKDIFARSIRKEGPEKVMERFVLVGILCAHAMVAKRPTIAEALKMLEGDIDIHQMPDRPVPLGHESFPSSLLQGLQSGRSTAYFSSYLSSFSTRMSTV

SEQ ID NO: 182205 - protein, 395 aa, Glycine max
  unsure (1)..(395): unsure at all Xaa locations
  Clone ID: PAT_MRT3847_135544C.1.pep
MSNHTRALARAATPKMQQRRERRMFSTSDDSAMTKQVEATHAPDGREIDVKPILQIVDEILVRFIARTVEGHEVKRDQDALEMTAALAEFDMLDSLAYIINKISCELSCKCSGGGDAHSSTMVLLNYMSSYAWHAKVVLTLAAFAVIFGEFWLVAQLSAENTLAKSVALLKQLPDIAENFMSLKPHFEALIRLVKAAMDVTMCIXAEFSELPSEYISEDTPKMSVASTHIPIASYWVIRSIVACSSQIASLVGMRNESISSTTEAWELSSLAHKVSSIYEHLKNQLVLCYQYIDDKRHIEAFHNLIRLFETVHVDNMKILRALIYAKDDVLPLVDGTAKSRVSLEVLRRKHVLLLISDLDLSQEEILVLDNLYKDARARGDTQYEMVWIPVGDKN

SEQ ID NO: 182206 - protein, 119 aa, Glycine max
  unsure (1)..(119): unsure at all Xaa locations
  Clone ID: PAT_MRT3847_135545C.1.pep
KQATPNCITPNNQSYTSPTNPTTEKYFLKHYSYLFWNRAMHNKDFKEFNLFSYIPFVLRGFLLTNFVHTFQVLLHSRCNNLAQRRKLMFMWHPLQISELMXXXXXLRRRQRGLFIYXPP

SEQ ID NO: 182207 - protein, 38 aa, Glycine max
  Clone ID: PAT_MRT3847_135546C.1.pep
KITQAQIQPYILLTQCYDVSKLRSLNITVTAAHNNPLQ

SEQ ID NO: 182208 - protein, 82 aa, Glycine max
  Clone ID: PAT_MRT3847_135547C.1.pep
MAKLVLVLRLLLLRGCFSLREQAQQNECQIQKLNALKPDNRIQSDGGFIETWNPNNKPLQCADVALSLCTLNRNALRTHSYT

SEQ ID NO: 182209 - protein, 120 aa, Glycine max
  unsure (1)..(120): unsure at all Xaa locations
  Clone ID: PAT_MRT3847_135548C.1.pep
EQTSKALKKWHMAVKKKQGVKLXNSKVRAMDGSSTDSTIHSSGPTLHRYKTTGHSTHFVSNYDDQDDYHSDTELSSISPTSNLIVRVDHDEEEAKENEHHPTANNQEAPLHLSSLERSMK

SEQ ID NO: 182210 - protein, 74 aa, Glycine max
  Clone ID: PAT_MRT3847_135549C.1.pep
NFCYPLSSSKSNHAFLYSHGQGQDRNQRIWKNWPFGCQSRSAKRPCGTSVAVTDLLLPTVNMPSLLNSNVVNDP

SEQ ID NO: 182211 - protein, 123 aa, Glycine max
  unsure (1)..(123): unsure at all Xaa locations
  Clone ID: PAT_MRT3847_13554C.1.pep
HASDQVKFKRRREGKTDYRARIRLINQDKNKYNTPKYRFVVRFSNKDIVAQIISASIAXLTNYAAAYCTGLLLARRVLKTLEMDEEYEGNVEATGEDYSVEPAESRRPFRALLDVGLVRTTTG

SEQ ID NO: 182212 - protein, 96 aa, Glycine max
  unsure (1)..(96): unsure at all Xaa locations
  Clone ID: PAT_MRT3847_135550C.1.pep
YTVNTSTAKSGERFKILSKTFAQNAALIAMEIISSLYAAHACGNAKFVIDSEEGILHEVLTLSIWDLHLTXLFAFKYAVKAACTVLRVDQIIMAKP

SEQ ID NO: 182213 - protein, 195 aa, Glycine max
  Clone ID: PAT_MRT3847_135551C.1.pep
NRIRIYSKLSIKNWLKPVSLTLGDAALALHYANMIVLIERMLSSPHLVDLAARDDLYNMLPTTVTTALRAKLKCHAKSKSSSNAHDANPAAEWSPVLAQILEWLAPLAHNMLSWHSERNFEKEHSVFNANVLLVQTLYFANQAKTEAAIIDLLVGLNYVCRIDTKVGTRDTLDCVSTRSFNGVHLRKNGMYTEFL

SEQ ID NO: 182214 - protein, 78 aa, Glycine max
  Clone ID: PAT_MRT3847_135552C.1.pep
GACFSAKVLSFPPPFPTVVPKTGFLIAGGKNAFIYLCFKVVGLADPPIPFLKNQRVSPLCCVGLLWFIKSPPSICRVP

SEQ ID NO: 182215 - protein, 65 aa, Glycine max
  Clone ID: PAT_MRT3847_135553C.1.pep
HRLAEGKQIQNGYVGKEHTCMGLFYWTLFSRLIAKLMGVPDHSTGLTCHSRNADDSGERINFEVG

SEQ ID NO: 182216 - protein, 49 aa, Glycine max
  Clone ID: PAT_MRT3847_135554C.1.pep
ICVQRDLKDLINVLMQLLWLPSRAHTGRSHHRRTNDENLVLKWQRQNLN

SEQ ID NO: 182217 - protein, 85 aa, Glycine max
  Clone ID: PAT_MRT3847_135555C.1.pep
AREHPANAIIFCRRVEPTHAIDADLIMGALNYTGVYRPMYGNRTTITLATLQQDSYSLALLEGAWAASNTWTRSASHRSPTAPPS

SEQ ID NO: 182218 - protein, 75 aa, Glycine max
  Clone ID: PAT_MRT3847_135556C.1.pep
STTQHAPTFHSTPIPYHIPSTSLAHYLLTSTNSTLLLTESKTIPTTIPLSLSLPENLSFPSPTLLSRPTFFSHLI

SEQ ID NO: 182219 - protein, 319 aa, Glycine max
  Clone ID: PAT_MRT3847_135557C.1.pep
MRRALALLPLLFLFVAIGESRKDGGKYWKMNTRDHQMPKKFKALLNQNFEIQSEKILKTKEQILEGSKHDCEKSLVKNTHTTILEDFEPISSVPIYRNDDIYAKEENKVVKNFEPRPNVSAYGDNDVDAKPKKNVIKDFEPRPNVSAYGDNDVDAKPKKNVMKDFEPRPNVSAYGDNDVDVKPKKNVMKDFEPRPNVSAYGGNDVDAKPKKNVMKDFEPRPNVSAYGGNDVDAKPKKSVTKDFDPRPNVSSYNDNDIEAVEEKKIMKDFEPIPKVSTYGDDDVNTKEKKKVMKDFKPRPNVSAYGDNNVSAKEKNKVMK

SEQ ID NO: 182220 - protein, 107 aa, Glycine max
  unsure (1)..(107): unsure at all Xaa locations
  Clone ID: PAT_MRT3847_135558C.1.pep
YFGKGSEPLPLDFPPTPVCCFPFGFVCPLVSPFPVQIFFFCPPFWAPFFVSPFRFLPLGALFFYPFSAFFSLKQIKYLWGGNGPLYFKKPSXXXRAAAVFILVVPGI

SEQ ID NO: 182221 - protein, 61 aa, Glycine max
  Clone ID: PAT_MRT3847_135559C.1.pep
RFRSPAPTAKKRSFWGITPTNSPSVTTLNGRKTRSHVLAEPAAPPPSMLFQPGFARQKPNI

SEQ ID NO: 182222 - protein, 90 aa, Glycine max
  Clone ID: PAT_MRT3847_13555C.1.pep
MVYVKAQKSKAYFKRYQVKFKRRREGKTDYRARIRLINQDKNKYNTPKYRFVVRFSNKDIVAQIISASIAGDIVLAAALNSAADNDEDDE

SEQ ID NO: 182223 - protein, 58 aa, Glycine max
  Clone ID: PAT_MRT3847_135560C.1.pep
GSPNGIFDLRPRATSHLRNYYPVRVAQQIALRYRYQPLILWAMSKVPYESVQPVTLFI

SEQ ID NO: 182224 - protein, 37 aa, Glycine max
  Clone ID: PAT_MRT3847_135561C.1.pep
FVLSFQDSYQLAWELENAWEQSIKSGSPIDIDSSLRR

SEQ ID NO: 182225 - protein, 177 aa, Glycine max
  Clone ID: PAT_MRT3847_135562C.1.pep
IRHQEPDIRTCNFLLKCLVEANRVEFVRRVFEELKDRGPSPNIYTYTIMMNFYCSDVGCDAGMRQAAVILGKIYRSGEKPTVVTYSTYIHGLCKVGNVEAALMLIRNLHYTNQPLNSHSFNDGIYGFCKRGEVFEALQVLEEMKSSGILPDVYSYSILINAFCGKGDVMKCLDLMEE

SEQ ID NO: 182226 - protein, 147 aa, Glycine max
  unsure (1)..(147): unsure at all Xaa locations
  Clone ID: PAT_MRT3847_135563C.1.pep
MSMNPSFWSGVCLHNMANXAKEGTTIRRVMESLFRYFDNGNLWSINHGLAFSVLKDMLFLMDDSEKNTHVLLSTLIKHLDHKIVLKEPQMQLDIVEVATSLAPYAKVQPSVSIVGAVSDMMRHLRKCIHCSLDDSNLAPDVINWNKN

SEQ ID NO: 182227 - protein, 118 aa, Glycine max
  unsure (1)..(118): unsure at all Xaa locations
  Clone ID: PAT_MRT3847_135564C.1.pep
AGPSQGPERQPIETLAQGDTDYKKAAPITTSDAVELAAWSLYGAATAEGAVAFXFLYITNATGRVVNTQAFKXAARGIHGIAWAXGGGTYALAYXTAGKLGGHIXTSVTIGLSLARKL

SEQ ID NO: 182228 - protein, 68 aa, Glycine max
  Clone ID: PAT_MRT3847_135565C.1.pep
SDAREKTTEGGAYGDNYALTPPNRGQESGPGRRYGSTKKKPNAESQGRPAETIQRARRADAQRNRKGT

SEQ ID NO: 182229 - protein, 104 aa, Glycine max
  unsure (1)..(104): unsure at all Xaa locations
  Clone ID: PAT_MRT3847_135566C.1.pep
IKYKGFQVAPAEXEALLLTHPKISDAAVVPMKDEAAGEVPVAFVVISNGYTDTTQDEIKQFISKQVVFYKRINRVFFIDAIPKSPSGKILRKDLRAKLTATVPT

SEQ ID NO: 182230 - protein, 68 aa, Glycine max
  Clone ID: PAT_MRT3847_135567C.1.pep
MLGINQGDSLSLLLLRSGVGGGIYFIFSSRAHDCFGFLHHGSRLLGWWSIDEGSQEEQARLYHEGAIG

SEQ ID NO: 182231 - protein, 78 aa, Glycine max
  unsure (1)..(78): unsure at all Xaa locations
  Clone ID: PAT_MRT3847_135568C.1.pep
RINSVTRRGVNPTNGHRVSPPPEKNDTQPFYKRGEQXPCFTREIIFLTKKDPRKKTPGAGGKDPQSQFHFKHRAQKGN

SEQ ID NO: 182232 - protein, 70 aa, Glycine max
  Clone ID: PAT_MRT3847_135569C.1.pep
VASVMKSFVVSLTTHVVASGVPYVVQAYSIDSDDAVTASPNTSMSNRLLMPAQPEMEDAARVEDVLCRGS

SEQ ID NO: 182233 - protein, 147 aa, Glycine max
  Clone ID: PAT_MRT3847_13556C.1.pep
RVFGALKGALDGGLDIPHSDKRFAGFDKEKKELDAEVHRKYVFGGHLLDNLILYFLQILAEDEPEKYQSHFSEYIKRGIEADGIEALYKKVHAAIRADPTLKKSDKQLPKEHKRYNLKKLTYEERKAKLIARVASLNSAADNDEDDE

SEQ ID NO: 182234 - protein, 60 aa, Glycine max
  Clone ID: PAT_MRT3847_135570C.1.pep
KGPKKSKGRIGQKKSVPPASRHFYVEQPYRGSSEGMLPPIKNPRASSPFLIHSQQKTFPF

SEQ ID NO: 182235 - protein, 56 aa, Glycine max
  Clone ID: PAT_MRT3847_135571C.1.pep
KRDAKHRSRTFFKHKENALGGDDDGPCLLAQLSYEDIDYISHIERFHNQMCCGDQT

SEQ ID NO: 182236 - protein, 75 aa, Glycine max
  unsure (1)..(75): unsure at all Xaa locations
  Clone ID: PAT_MRT3847_135572C.1.pep
EPVIGRSILRSKHSVHHIISTPPLFGNLSRVSMVIFARPKKSIVAKIKLCQVVKGCFPFHHXEGLAKYTRRLKFS

SEQ ID NO: 182237 - protein, 50 aa, Glycine max
  Clone ID: PAT_MRT3847_135573C.1.pep
EHRSLKQWRAKKTIKKRFLEYPGMIKKFICKRAYFKNVYENNPLRGPVVL

SEQ ID NO: 182238 - protein, 160 aa, Glycine max
  unsure (1)..(160): unsure at all Xaa locations
  Clone ID: PAT_MRT3847_135574C.1.pep
LTESHTKKCTISEKTLTGKTITLDGQSADTMANADAQXQDPEGVTSCQDHNXFAHGEQLGKGRTLGDYSIHXEYPFIWPLLTGGIIDPSLVARARTYNLYKTICRXCYAXMHSTAENCRTNKCTHRNQLTPNKKNKRMLCEPWVSSYKLLDLEHEQVGYV

SEQ ID NO: 182239 - protein, 139 aa, Glycine max
  unsure (1)..(139): unsure at all Xaa locations
  Clone ID: PAT_MRT3847_135575C.1.pep
RDFTTAKVSAKIMTLTPGVDGEPILLTDGRLAGADRITVCAMLAGDTYDTQXPLAAREEIVAPSAGDWTTAVVTXTSTPEPTAPHVGAMEQLMGTTTSADCDIGGALLMVDAYDTSAADALTSIYAAPSMGGWAMQMDT

SEQ ID NO: 182240 - protein, 77 aa, Glycine max
  Clone ID: PAT_MRT3847_135576C.1.pep
RPRVLDQFDLKAWVYGSQDFDVAALTKAILKALRSLAAEEKDLNLLQLELKQRLMGQNFLLVVDDVWHEHYWSWEAL

SEQ ID NO: 182241 - protein, 69 aa, Glycine max
  Clone ID: PAT_MRT3847_135577C.1.pep
RFILLSICNRNPNIYSIYLKKKKHIVNSYSNIENAIRTKVRWMIDILNNCFYLFLLIFHHFFRTYFKIF

SEQ ID NO: 182242 - protein, 500 aa, Glycine max
  Clone ID: PAT_MRT3847_135578C.1.pep
MGSNQAPSFKKRFYHVKVKSLELASLQKLRQRMDQVQHQAFRKAYGKIWDLALIEVYVEAIASLAQYYDQSLRCFKFGDFQLVPTIEEFEGILGCPLGRRKPYLFSGFYPSMARVEKVVKISPLELDRLKQNRNGVVGIPRQHLVEKAKALADQGERTLFIDVLALLVFGIVLFPNVDGLVDLAAIDAFLAYHHKKESPTIVVLADAYDTFDLRCEKSSTRIVCCTPALYRDQTAKRDNSGLAHEDKCSTRILVYSLFQIGITCFYMEVVLPASAPGLQSLHQLLNKNLQLRVLAFHGKEDPFTLKKRNQEKLFAYKGVRMSPPPLGISQSLKNSLISLKDENLAPCSALRSLKFSLFQPLSSELFSWLPSQFCANQALKGLPDLDVAFSMNEIIIKLFKKHGNKNPDPVNDPVHAHSSPVLVHMMDPEKEAGPTLVQMAQAQAQAEEMALALVEWALRPLECCPPGPAKAPGMQRPHPFQKEKVGLLARPPFEENPRRS

SEQ ID NO: 182243 - protein, 54 aa, Glycine max
  Clone ID: PAT_MRT3847_135579C.1.pep
GGLTNLISNSLCFRRHTTSTIRVNDFHTIMACAHPTDAWTHGKTLMLIAVTILL

SEQ ID NO: 182244 - protein, 180 aa, Glycine max
  Clone ID: PAT_MRT3847_13557C.1.pep
EGNVEATGEDYSVEPAESRRPFRALLDVGLIRTTTGNRVFGALKGALDGGLDIPHSDKRFAGFDKEKKELDAEVHRKYVFGGHTTFFFLQILAEDEPEKYQSHFSEYIKRGIEADGIEALYKKVHAAIRADPSLKKSEKQPPKEHKRYNLKKLTYEERKAKLIARVAAINSAADNDEDDE

SEQ ID NO: 182245 - protein, 71 aa, Glycine max
  Clone ID: PAT_MRT3847_135580C.1.pep
FFIRYIYQGTPPPPGLPFTVFPLVFFLIPNTRWFLKLSFFPFLMVIVVSLELVEVPFRNLVLMQIRPGHLM

SEQ ID NO: 182246 - protein, 58 aa, Glycine max
  Clone ID: PAT_MRT3847_135581C.1.pep
DTRPSTRSGTPYATVDLWCVLLLSLQKYMQFILTQLHFILLHRLTMPTTLTRNTHASF

SEQ ID NO: 182247 - protein, 50 aa, Glycine max
  Clone ID: PAT_MRT3847_135582C.1.pep
APHIWSVLLSGPSSSFFIRYGLCKHVVIFYDRLMLCLRSEPILFGNTWSK

SEQ ID NO: 182248 - protein, 64 aa, Glycine max
  unsure (1)..(64): unsure at all Xaa locations
  Clone ID: PAT_MRT3847_135583C.1.pep
MAFAGTTXKCMACDKTVYLVDKLTADNRVYHKACFRCHHCIGTLMLIIYNSFEGVXYCMPHCDQ

SEQ ID NO: 182249 - protein, 54 aa, Glycine max
  unsure (1)..(54): unsure at all Xaa locations
  Clone ID: PAT_MRT3847_135584C.1.pep
HHNXXLLLXQRLVQXXXSXLNWRXXIRLNILSXALCXXXXLGSSRVLXVXTPXL

SEQ ID NO: 182250 - protein, 62 aa, Glycine max
  Clone ID: PAT_MRT3847_135585C.1.pep
MASSQFLIMTTMAVFLAVVSAAHAADAPAPSPTSPASVISPSFAAGFLTAAVALVFGSSLRI

SEQ ID NO: 182251 - protein, 62 aa, Glycine max
  Clone ID: PAT_MRT3847_135586C.1.pep
MASSQVVIMTAMAVLLAVVSAAHAADAPAPSPSSPASVISPSFAVGFLTAAVALVFGSSLRI

SEQ ID NO: 182252 - protein, 86 aa, Glycine max
  unsure (1)..(86): unsure at all Xaa locations
  Clone ID: PAT_MRT3847_135587C.1.pep
EKXKMGNFFQVGANNFHRLTDFLNQREQKGAGEAKFLWGELSRGGKKLSKFNFPPPKWKGKKKGGININYFKPIEKTGLAQNGVFN

SEQ ID NO: 182253 - protein, 126 aa, Glycine max
  Clone ID: PAT_MRT3847_135588C.1.pep
SKFIDDKIGGTVWKSVFTVDEKEREKNVEESLKALQFLESEIKGKKFFGGEEFGMVDIAAIFIAFWVHMVQEIAGLELFTSEKFPKLYNWSQEFMSHPVVKEVLPPRDPLFAFFKARYESLLADSK

SEQ ID NO: 182254 - protein, 75 aa, Glycine max
  Clone ID: PAT_MRT3847_135589C.1.pep
GPRIRSLVRTDVRRLHYCRVYPKGAGFNRRGDTLFNSYIYLRTPRNQRAKKLWFPLNLLRATIDIVIHLQVLRYI

SEQ ID NO: 182255 - protein, 116 aa, Glycine max
  unsure (1)..(116): unsure at all Xaa locations
  Clone ID: PAT_MRT3847_13558C.1.pep
TISEVEAFALMSEDLKLLASEFRNHGGKQLHHALRFYSGQXRARAACFIQAAWSRYWKKKIERSLHEAEDKLKDAXGATIYASSFADNALRNLIQNSRPNKMQQRLLLSLLPQKAS

SEQ ID NO: 182256 - protein, 88 aa, Glycine max
  unsure (1)..(88): unsure at all Xaa locations
  Clone ID: PAT_MRT3847_135590C.1.pep
PKXYNLXLYKLNTXXXXXPFLXFFXFSSSTKXPXXFYSLXKIKKKNXTXXFHXSQITKKKTPXKXKNYHIXSXHXLXNXXITSTIPSP

SEQ ID NO: 182257 - protein, 111 aa, Glycine max
  Clone ID: PAT_MRT3847_135591C.1.pep
GLSETPAAAPAGGLSPQASPSPQQAADASTNGPVNEVSPAPAPAQGNTASALFPIQGISLFVAKMVAPFSGFLEEVWSILKCKKKAIRNNNNLKASLGKNHGKVLFHLRLA

SEQ ID NO: 182258 - protein, 547 aa, Glycine max
  unsure (1)..(547): unsure at all Xaa locations
  Clone ID: PAT_MRT3847_135592C.1.pep
MAASAGGQITLSSTVQLHGVACSRNWKLVKFCNGEVMGRKLVLKSAYGGSTKDVRHHQQQQHICMSLTADVSTESKLRDLDMERRNPRTVLAVILGGGAGTRLFPLTKRRAKPAVPIGGAYRLIDVPMSNCINSGINKVYILTQFNSASLNRHIARAYNSGNGVTFGDGYVEVLAATQTPGEAGKKWFQGTADAVRQFHWLFEDPRSKDIEDVLILSGDHLYRMDYMDFVQNHRESGADITLSCLPMDDSRASDFGLMRIDNKGRILSFSENPKGEELKAMQVDTTVLGLSKDEAQKKPYIASMGVYVFKKEILLNLLRNMHREXLILFQSLFFKCYKLIXFRWRFPTANDFGSEVIPASAREFYMKAYLFNDYWEDIGTIRSFFEANLALTEHPPRFSFYDAAKPMYTSRRNLPPSKIDNSKIVDSIISHGSFLNNSFIEHSVVGIRSRINSNVHLKDTVMLGADYYETDAEVVALLAEGRVPIGIGENTKIKDCIIDKNARIGKNVVIANSEGIQEADRSSEGFYIRSGVTIVLKNSVIEDGFII

SEQ ID NO: 182259 - protein, 89 aa, Glycine max
  unsure (1)..(89): unsure at all Xaa locations
  Clone ID: PAT_MRT3847_135593C.1.pep
MNLQXFRRMXRSSNXXQXRTSXASXSLLCPENQPXIFSPXIPXHXGCDPCCLLTARXXXXXNXXEEFVILSXSLXXXFXVLLLPXKXWI

SEQ ID NO: 182260 - protein, 69 aa, Glycine max
  Clone ID: PAT_MRT3847_135594C.1.pep
QMEKHIKTNPCSSTYLELCPNFWGFPFNPPKRLFFHLAPILNTQRSRASPKGGKISEKNDSSGPPFFFF

SEQ ID NO: 182261 - protein, 39 aa, Glycine max
  Clone ID: PAT_MRT3847_135595C.1.pep
PTRPSQNKISHRLFLIPYNAPCCPPCPGRSPPSHFPKLC

SEQ ID NO: 182262 - protein, 82 aa, Glycine max
  Clone ID: PAT_MRT3847_135596C.1.pep
LGFFFFFFFFSRHDVRHLLLHYPSYFYGGLLAFRHEPSSVIKNIVGGSMEEKLHLISNVDSLLDSRVYTVLMSLHVFTYKRV

SEQ ID NO: 182263 - protein, 87 aa, Glycine max
  unsure (1)..(87): unsure at all Xaa locations
  Clone ID: PAT_MRT3847_135597C.1.pep
GKKPFLKGKPNRGPFSLRGGGGMGPIKRGKKKTXGGGARGEKNPLIKGEKGGGAPQVLPLPLPSPLGEDELEKLTFLGPPPKAGFFS

SEQ ID NO: 182264 - protein, 100 aa, Glycine max
  Clone ID: PAT_MRT3847_135598C.1.pep
LQSDLNKARLLAYGLNEIKGLRVDISSVETNIIYVEVEEGSRATAAKLCKDLEDYGILFMPMGSSRLRIVFHHQISASDVQYALSCFQQAVNGVRNENGN

SEQ ID NO: 182265 - protein, 59 aa, Glycine max
  Clone ID: PAT_MRT3847_135599C.1.pep
IYNRTRGSIYLIRTAACMPSIFFRVSFNIAGRKDTPICFLRERGVPPNRTKRARGMHSP

SEQ ID NO: 182266 - protein, 51 aa, Glycine max
  Clone ID: PAT_MRT3847_13559C.1.pep
PLASGVCEYDIWTLEGRPPCQILWSINFITTTVLWSNKFLIFVIFRLFYVA

SEQ ID NO: 182267 - protein, 86 aa, Glycine max
  Clone ID: PAT_MRT3847_1355C.1.pep
MIDGQELKEENGQGLVFGGKIEVSSMGWDRRLLGGPGSSPPRCTSKCGRCTPCRPVHVPVPPGMRVTAEYYPEAWRCKCGNKLYMP

SEQ ID NO: 182268 - protein, 87 aa, Glycine max
  unsure (1)..(87): unsure at all Xaa locations
  Clone ID: PAT_MRT3847_135600C.1.pep
VYKIAPGVLTEHGKTKNPXYPNVDAHSGVLLQYYGLPEQNYYPVLFGVSRALGVLPQLIIDRAVGAPIERPKSFSPEAYAKLVGAKL

SEQ ID NO: 182269 - protein, 95 aa, Glycine max
  unsure (1)..(95): unsure at all Xaa locations
  Clone ID: PAT_MRT3847_135601C.1.pep
LVPIHSLCACGLNSGVSRSSFSCTIPTAFSQITVWNQTASRHNTIXFDPSKQSFGEFYIDLLWGGTQVDKTADWTTLVHTATTMDAERGADWKTG

SEQ ID NO: 182270 - protein, 109 aa, Glycine max
  Clone ID: PAT_MRT3847_135602C.1.pep
DAEQDYAWVKYGMIFPFMDHVDRFQGQSDLGCYNYNPSEFQISIEEAFLADQGFTEKLIADINTAAGRTGCGDSVLKGFQKVTASNQNAACHFLNQVSQLEGIFFHLEI

SEQ ID NO: 182271 - protein, 61 aa, Glycine max
  Clone ID: PAT_MRT3847_135603C.1.pep
LMFYEKYCIERLLICTVNTFISPVITWSSYFYVPCLVELYYLKILFMMTSIDTCSCPHIIW

SEQ ID NO: 182272 - protein, 65 aa, Glycine max
  Clone ID: PAT_MRT3847_135604C.1.pep
DQEEEVRMDYDGRTMTNDRITNGDAESCTHTQTAASPGRTAKHEAGMCSPTPDDDPAVQRHTHRK

SEQ ID NO: 182273 - protein, 46 aa, Glycine max
  Clone ID: PAT_MRT3847_135605C.1.pep
FMQRPHIYLDFPPVFVKPSYRNFILHKQTGLRTFLNLYGDNFTSPQ

SEQ ID NO: 182274 - protein, 208 aa, Glycine max
  unsure (1)..(208): unsure at all Xaa locations
  Clone ID: PAT_MRT3847_135606C.1.pep
MEDGEKPSHGIADMDVVDATLQSHRVASDQVMVLQGHDIKNGDSDPAHVPATSAISNNQFELEDAKTVSHQELITPKPKEKNVREMKNVLNDTEMTDYDEYGTPLDRETFMKELETFYRERSLEFKPPKFYGEPLNCLKLWRAVIRLGGYDVVTGSKLWRQVGESFHPPKTCTTVSWTFRIFYEKALLEYEKHKREIGELQXPVGPFH

SEQ ID NO: 182275 - protein, 90 aa, Glycine max
  Clone ID: PAT_MRT3847_135607C.1.pep
KFIVVVSVALPVVGIVEVNLASAPFATHSFSQGQRLVKLAVSSAVPDGGDGRYRIGVTAPPSGAVAPPGYYMAFAVNQGVPSVAKWIHVS

SEQ ID NO: 182276 - protein, 71 aa, Glycine max
  Clone ID: PAT_MRT3847_135608C.1.pep
LILKSQQPLNYPSMPFMSVDKQKSSFKETDPIHFTEYLYNTRKGKICIHQPHHITGRENQRPREKSHQDPE

SEQ ID NO: 182277 - protein, 45 aa, Glycine max
  unsure (1)..(45): unsure at all Xaa locations
  Clone ID: PAT_MRT3847_135609C.1.pep
AAXXASXGRXAXXXSLLXQSXXTAXSXFXAPSPXXRAYXRVHXTX

SEQ ID NO: 182278 - protein, 171 aa, Glycine max
  Clone ID: PAT_MRT3847_13560C.1.pep
EDYSVEPAESRRPFRALLDVGLVRTTTGNRVFGALKGALDGGLDIPHSDKRFAGFDKEKKELDAEVHRKYVFGGHVAAYMKILAEDEPEKYQSHFSEYIKRGIEADGIEALYKKVHAAIRADPTLKKSDKQPPKEHKRYNMKKLTYEERKAKLVARVAAINSAADNDEDDE

SEQ ID NO: 182279 - protein, 141 aa, Glycine max
  unsure (1)..(141): unsure at all Xaa locations
  Clone ID: PAT_MRT3847_135610C.1.pep
PRVRFFIVRVSTLSHTSKTLYTEIILLYYKNKNEXVAYFHFLCNQIAAHDPGFNEQIHDPVWSNFKAESTVFDMRTXINSAECLSSVRAVSNPFKRGLFGGGIKWNFYTCLVDKERSVDDLYSPTASPISIGKESLKLLDS

SEQ ID NO: 182280 - protein, 155 aa, Glycine max
  unsure (1)..(155): unsure at all Xaa locations
  Clone ID: PAT_MRT3847_135611C.1.pep
EEPELWSRPLPKRGDLLFNAALWRLPQQPSAVATPSKTKKTSTKKAKTTKKVSPKSSPKASPPRSRSPIKKKTSPKASTTAKSKSSAAAKTSAVAAARGPAAFVVPFSAQDEEEKKKQLIASFLPANRXPVTGVDVVFLFTPLVRCPLGSTPSQQ

SEQ ID NO: 182281 - protein, 76 aa, Glycine max
  unsure (1)..(76): unsure at all Xaa locations
  Clone ID: PAT_MRT3847_135612C.1.pep
MSQVFGNGRHLSVGSTAPPLTKGKLXLYSMKFCPYTQPMHLILDAKKIPYYVVNINFSTKPEXLFDNHPLTKIPPI

SEQ ID NO: 182282 - protein, 117 aa, Glycine max
  unsure (1)..(117): unsure at all Xaa locations
  Clone ID: PAT_MRT3847_135613C.1.pep
EKRGDYLAXGDRGGRVVIFXRDDRKKNARNDRRELEQXNFATSRHPEFRFKTEFQSHEPEFDYLKSVEIEEKINKVRWWMSNASLQFILSTNDXTIKLWEVKAHKVKQVKEMAPPLC

SEQ ID NO: 182283 - protein, 67 aa, Glycine max
  Clone ID: PAT_MRT3847_135614C.1.pep
TSLNPPETEEMLNEKNNYRELSELAEQAKKRAEVARLRELHTLKGHVESVVKLKGLDIETMQQHYTV

SEQ ID NO: 182284 - protein, 74 aa, Glycine max
  Clone ID: PAT_MRT3847_135615C.1.pep
TRPATYTLINFIYTYSFFWNTIYTETLCVYTEIVCVCYLLWPFQFLLSASPKFGTNLPCTMLPVDDALLQPKSR

SEQ ID NO: 182285 - protein, 148 aa, Glycine max
  Clone ID: PAT_MRT3847_135616C.1.pep
MAATAAAGIASLFSSSINSVKCLRSSKNCSIIDPLITTVPSNRGMFGSHLVEPLSINSHKLWGPRISAAVAQEEAVVVVDDDGAGLVEEEKVEENEGEAVAEQDSDSSATKLYFGNLPYSVDSAKLAGLIQDYGSAELIEVLYDRDSG

SEQ ID NO: 182286 - protein, 88 aa, Glycine max
  unsure (1)..(88): unsure at all Xaa locations
  Clone ID: PAT_MRT3847_135617C.1.pep
XILSXHXAHSSLXTXPSSTCXXCDXXHGLKSSVIVGXVCAXGXGCGHSXSKEPXLREGTCLLRXXPCWVXXLSXTXLRCEICXXARXG

SEQ ID NO: 182287 - protein, 118 aa, Glycine max
  Clone ID: PAT_MRT3847_135618C.1.pep
HMAFELYGMLAGNVSPMTGENVKPAYGGEDEAFLRKVVTPIYNVIAKEAARSKKGRSKHSQWRNYDDLNEYFWSADCFRLGWPMRADADFFCLPAEKLVFDKSNVCCWSSRARRWKCW

SEQ ID NO: 182288 - protein, 79 aa, Glycine max
  unsure (1)..(79): unsure at all Xaa locations
  Clone ID: PAT_MRT3847_135619C.1.pep
MSLXXNEHXQHILRVLNTNVDXKQKIMFAMTSIKGIGRRFANIACKKAXVDMNKRAGDLXXAXLDXVXTVVATXXXFQR

SEQ ID NO: 182289 - protein, 68 aa, Glycine max
  Clone ID: PAT_MRT3847_13561C.1.pep
MSASLSCTSCAPSGSRTRKYNWSVKAIRRKTTGTGRMRYLRNVPRRFKSGFREGTEAAPRKKGAATTA

SEQ ID NO: 182290 - protein, 60 aa, Glycine max
  Clone ID: PAT_MRT3847_135620C.1.pep
MEETFLCTSESVNEGHSDKLCDQISDAVLDACVEHDPDRIVACHTCKRDKLVMVVGDDQE

SEQ ID NO: 182291 - protein, 66 aa, Glycine max
  Clone ID: PAT_MRT3847_135621C.1.pep
AAIGSLNTNTVRHSYHSQSLLTTRIQQECRGIITGPCRVTPRVACVLLPHLPHELPLRSPRVKRRV

SEQ ID NO: 182292 - protein, 82 aa, Glycine max
  unsure (1)..(82): unsure at all Xaa locations
  Clone ID: PAT_MRT3847_135622C.1.pep
ATNWSFGIRVKLGVDAQRGLITSMVIKPVNAHHLNKMGNIVNGEQXFVLDDVGYXGCHSXEEMVEVDVHWLILECSGKVRTL

SEQ ID NO: 182293 - protein, 81 aa, Glycine max
  Clone ID: PAT_MRT3847_135623C.1.pep
TPAREPVPKIPGVDPPASGPAIVKEPRNPGKVPLTQFPPKVGPWPTAKGVDPPIPTGNFSPCSPAWLSKNYHPPLFKKKFP

SEQ ID NO: 182294 - protein, 138 aa, Glycine max
  Clone ID: PAT_MRT3847_135624C.1.pep
HASDTIDNVKAKIQDKEGIPPDQQRLIFAGKQLEDGRTLADYNIQKESTLHLVLRLRGGAKKRKKKTYTKPKKIKHKHKKVKLAVLQFYKVDDATGKVTRLRKECPNTECGAGVFMANHFDRHYCGKCGLTYVYNQKA

SEQ ID NO: 182295 - protein, 70 aa, Glycine max
  Clone ID: PAT_MRT3847_135625C.1.pep
SQYEAALRSPRIYLDTSLKDDDMSAVLVNYITLSILSYMVCYYDVCKILNTTWLRGSDLRSTTSDDTVKL

SEQ ID NO: 182296 - protein, 71 aa, Glycine max
  unsure (1)..(71): unsure at all Xaa locations
  Clone ID: PAT_MRT3847_135626C.1.pep
LFDLVIHLITKPEFPMACGHFSLKTGGIIAAAFSALSIGSTWITGSWPSICDLRVXSLTLRTANSIHMPLL

SEQ ID NO: 182297 - protein, 49 aa, Glycine max
  Clone ID: PAT_MRT3847_135627C.1.pep
IIEYETRIAISVTKMFIYILKIQSCSGDPMDPHLEYDHVGCTAFSRIIK

SEQ ID NO: 182298 - protein, 77 aa, Glycine max
  unsure (1)..(77): unsure at all Xaa locations
  Clone ID: PAT_MRT3847_135628C.1.pep
HFELLSFGAGRTSCPGASLAMQMIPNAGVGMIQCFEXKVGEEGKGMVIMEEGPGMALHRAXPCICFQAARCHPCAKV

SEQ ID NO: 182299 - protein, 79 aa, Glycine max
  Clone ID: PAT_MRT3847_135629C.1.pep
ENLHSFSLTNLICFNGGKTSPFYPGIFSRFQAKNKFLKGCKTKAKFYFPTQTIVTQAFKVCNFLRAINRFFSTFASKPK

SEQ ID NO: 182300 - protein, 298 aa, Glycine max
  Clone ID: PAT_MRT3847_13562C.1.pep
MVYVKSQKSKAYFKRYQVKFKRRREGKTDYRARIRLINQDKNKYNTPKYRFVVRFSNKDIVAQIISASIAGDIVLAAAYAHELPRYGLEVGLTNYAAAYCTGLLLARRVLKTLEMDEEYEGNVEATGEDYSVEPAESRRPFRALLDVGLIRTTTGNRVFGALKGALDGGLDIPHSDKRFAGFDKEKKELDAEVHRKYVFGGHVAAYMKILAEDEPEKYQSHFSEYIKRGIEADGIEALYKKVHAAIRADPSLKKSEKQPPKEHKRYNLKKLTYEERKAKLIARVAAINSAADNDEDDE

SEQ ID NO: 182301 - protein, 99 aa, Glycine max
  unsure (1)..(99): unsure at all Xaa locations
  Clone ID: PAT_MRT3847_135630C.1.pep
ACLQIALYESLLASPHRTLNGEEADFFFVPVLDXMYITRADDAPHLSMQEHMGLRSSLTLEYYKNTYTHIVEQYPYWSHSSGRDHIWVMRIVYLTLKTF

SEQ ID NO: 182302 - protein, 68 aa, Glycine max
  Clone ID: PAT_MRT3847_135631C.1.pep
ASAFGSRENRDVYPNLSELHLGGGNGGSGGAGRNGVPSSSPMMDPNDVDAASGGWLLGGSSSYGHPLH

SEQ ID NO: 182303 - protein, 98 aa, Glycine max
  unsure (1)..(98): unsure at all Xaa locations
  Clone ID: PAT_MRT3847_135632C.1.pep
RFRKISLVGSEVLFLSSGINTTNSFEDIGXAKDSGAIMDELYVGDIVHRPTPVRLSTFTPKQPLYIQLKNREFLIGIFQFPVPLLILGLAVGIGFYTK

SEQ ID NO: 182304 - protein, 62 aa, Glycine max
  Clone ID: PAT_MRT3847_135633C.1.pep
LKKLLDMQMQMHGKDLLDLHSIMIVEKYKTLIKISKYYILKLYLPIQQVNITSVNDTIKNLF

SEQ ID NO: 182305 - protein, 66 aa, Glycine max
  Clone ID: PAT_MRT3847_135634C.1.pep
VYKFNPRLLNQMDMVNSSRTIHFEFIKQNVAHDCINSSLSSSHWLNKALIMLQCILASRHGQEVTV

SEQ ID NO: 182306 - protein, 90 aa, Glycine max
  unsure (1)..(90): unsure at all Xaa locations
  Clone ID: PAT_MRT3847_135635C.1.pep
XXRXXXXIPXMXTAPXMSRXTGXXXPPPWXGSXRNQDTDXDXXSVXGEEGATXGFRXQCLKQTMDNWXIGFRLLXXXGXLXLGFXFDYLX

SEQ ID NO: 182307 - protein, 68 aa, Glycine max
  unsure (1)..(68): unsure at all Xaa locations
  Clone ID: PAT_MRT3847_135636C.1.pep
LSTRLTYILIGPECLGTKSAKSTLSPHKVFADKLPITLCIILVFLYQXPCISPLTRRTITCKYAGFKV

SEQ ID NO: 182308 - protein, 42 aa, Glycine max
  Clone ID: PAT_MRT3847_135637C.1.pep
GAPGAAFLLGREGFLFRGAPKDRYALTCLMGFKPKVFPLGGW

SEQ ID NO: 182309 - protein, 384 aa, Glycine max
  Clone ID: PAT_MRT3847_135638C.1.pep
RKSGFFTEETLEFQRKILERAGLGESTYFPEAVLNDPPNPSMKEARKEAEAVMFGAIDELFAKTSVKPKDIGILIVNCSLFCPTPSLSAMIINHYKLRGNIKSLNLGGMGCSAGLISIDLAKDLLQVHPNSYALVVSTENITLNWYSGNDRSKLVSNCLFRMGGAAILLSNKGSDRRRSKYQLVDTVRTNKGSDDKCFGCVVQEEDSNGKIGVTLSKDLMAVAGDALKTNITTLGPLVLPMSEQLLFFATLVGKKLFKMKIKPYIPDFKLAFEHFCIHAGGRAVLDELEKNLQLSTWHMEPSRMTLYRFGNTSSSSLWYELAYTEAKGRIRKGDRTWQIAFGSGFKCNSAVWKALRTINSAKEKNPWMDEIHKFPVEVPRISPL

SEQ ID NO: 182310 - protein, 65 aa, Glycine max
  Clone ID: PAT_MRT3847_135639C.1.pep
KALSLIKHFVAQHTSFGTYNFNKKPSLLLCCHEDLSLRLLRISCLSQYGINRMEILFMILVNDSV

SEQ ID NO: 182311 - protein, 78 aa, Glycine max
  Clone ID: PAT_MRT3847_13563C.1.pep
CRDSHSLSSLSPPLLHPLTQHHLSESRATMPEAHLCCTGDSPPPLLLHKIFNQYYQMCVFCVYALPIDGLVRELMMKL

SEQ ID NO: 182312 - protein, 212 aa, Glycine max
  unsure (1)..(212): unsure at all Xaa locations
  Clone ID: PAT_MRT3847_135640C.1.pep
APPPPPPQNHQKKIGEHSPQRQNHPFILASGHFFCTIISLXVVIAGISCFRGYMVIHPXIPVISITNAHLDLLSNDYTGLLQTQLTIIVVAQNGNAKAHATFSDIRFNLSYQGQGIAVMLAPPFDVAKNSSKPLNYVVRSASIPLTPEQMEEVDESWKRDVIGFDLKGSARTRWRVGPLGSVKFWCNLECQLRFRPSNGSYIHHSRCTSESK

SEQ ID NO: 182313 - protein, 113 aa, Glycine max
  unsure (1)..(113): unsure at all Xaa locations
  Clone ID: PAT_MRT3847_135641C.1.pep
APTPIAYLQVSPFMKAEPTSDGMITTEAGSITTGGLVVILSLCLTIYGISSFXERHPSTDPTLTLTGLMKEPDQLQTADQWATLTGCLLXPGISDAITVYLLLYMPNLTYYIA

SEQ ID NO: 182314 - protein, 227 aa, Glycine max
  Clone ID: PAT_MRT3847_135642C.1.pep
MMDAEEVLKLYDSCWFGHQNLKEHTTSSPTPSPHENSSDHQIREEPMLLRIQSSHSRSMSDQLSSMTCFKDDSLSPDSVFSPKLQTILSGKDVTDSEAAQVQHQLVLLPKNRERRKKRSSKSLSDLEFEELKGFMDLGFVFSEEDKDSSLASIIPGLQRLGKSDEEEEDSELGSSVQRPYLSEAWKTQERRKKENPLVNWKIPALNNEIDIKDSLRWWAQTVASTVR

SEQ ID NO: 182315 - protein, 48 aa, Glycine max
  Clone ID: PAT_MRT3847_135643C.1.pep
IDHLQVVFLQIGTLLCEDIMFYLNLPPIISQPQISGYSSQLCAQRRNV

SEQ ID NO: 182316 - protein, 113 aa, Glycine max
  Clone ID: PAT_MRT3847_135644C.1.pep
KPPGGKDNNLPPAGGVQIYLTRGPNRFSPFQGGWGGPPFHVAGPLFGRPPAFEFNPGIVCWRTCWAPQVFSPWAPCSLCCCPFFSHPPFGKGGALPGPRPNFSGLPLGPGGGG

SEQ ID NO: 182317 - protein, 81 aa, Glycine max
  Clone ID: PAT_MRT3847_135645C.1.pep
TMIASSLSILHSCSSSSILFTISLSNPKPSYSLPFMLQAQDRTRKEDRSARHTLIIKKVEGTPERPRLSPLLSYCICFLCG

SEQ ID NO: 182318 - protein, 176 aa, Glycine max
  Clone ID: PAT_MRT3847_135646C.1.pep
LANCVSQNNVKKAEEVFSKMKDLDFPITVFTCNQLLFLYKRNDRKKIADVLLLMENENINPSSHTYSILIDTKGQSKDIDGMDQIVDRMKAQGIEPDINTQAVLIRHYISSGLQDKAETLLKEMEGENLKQNRWLCRILLPLYANLGKVDEVGRIWKVCETNPRYDECLGAIEAWG

SEQ ID NO: 182319 - protein, 78 aa, Glycine max
  unsure (1)..(78): unsure at all Xaa locations
  Clone ID: PAT_MRT3847_135647C.1.pep
SYLIYCSDKNDVKNTCKLWDESAWCALNSXKAKRQFVNEWAAEIPGGPEAASVIAEELGYDLVGQIGSLGNHYLIIHK

SEQ ID NO: 182320 - protein, 74 aa, Glycine max
  Clone ID: PAT_MRT3847_135648C.1.pep
MSLQAQPQQQPQQLVQVYPTNQPPSSSHHSNGSFGAVFIVLAIILVISVVACFLGRLCNKRYNNSHSNRQKPSK

SEQ ID NO: 182321 - protein, 125 aa, Glycine max
  Clone ID: PAT_MRT3847_135649C.1.pep
VLNSLYQLIESRVWPFESAVHLSSWVDIHNTGVAYEKVNKGQPVPVIYEDASSEESGDLETDEAFEVSSDIEESTDIMSECSCALVLLFFSMLSKKSPGGKTIGSGPRYWIFQKIMFVFPPSLTQ

SEQ ID NO: 182322 - protein, 178 aa, Glycine max
  Clone ID: PAT_MRT3847_13564C.1.pep
SSYTRWHSLESPLDPSLRDALYANLNEKEPQPIMHERRRRKMRSNHKLVFDYVNAALLELVGYGSEKCLKRSKSHYRVQVQEGASAAASPLLVDHIVAQMKELIASGVRCEWENGGASTSLVVENVVRKEVVQIGWVELMELEIDILGKEIEGDLIQELVENAVVDLTGRASESLSVK

SEQ ID NO: 182323 - protein, 383 aa, Glycine max
  Clone ID: PAT_MRT3847_135650C.1.pep
MITNPSLHASTLPSALSSSLITLHGSSVKCMPCLPFRALRKINWIRATSAADGGPIESSPALGSKNPLAVVLDIPRTIWKKTMRPLSDFGFGGRSIWEGGVGLFLVSSAVLFALSLAWLKGFQMRSKFRKYTATFEFDQACGICTGTPVRIRGVTVGDVIRVNPSLRSIEAIVEIEDDKTIIPRNSLVEVNQSGLLMETIIDITPRDPIPTPSAGPLDQECSKEALIVCDREKIKGIEGVSLDKLVGIFTRLGQDVEKIGIVNSYSLAERAASIIKEAKPLLIKMKAMAEDVQPLLTEVRDSGLLKEVENLTRSLTQATEDLRRVHSSIMTPENTELLQKSIYTLIFTLKNIENVSSDILGFPGDEATRKSLKLLIKSLSRLL

SEQ ID NO: 182324 - protein, 187 aa, Glycine max
  unsure (1)..(187): unsure at all Xaa locations
  Clone ID: PAT_MRT3847_135651C.1.pep
MITNPSLHASTLPSALSSSLVTLHGSFVNCMPCFPFRPQRKINRIRATSAADGGPVESSPASGSKNPLAVVLDIPGTLWKQTMRPLSDFGFGGRSIWEGGXXRXFLVSGAVLFALSLAWLKGFQMRSKLRKYTATFEFDQACGICTGTPVRIRGVTVGDVIGVNPSLRSIEAIGEIEDDKTIIPRNS

SEQ ID NO: 182325 - protein, 62 aa, Glycine max
  Clone ID: PAT_MRT3847_135652C.1.pep
MKKNHNVDIGTLAFSAGLLFVQCLFSISPIKKILKFFYTALGLLYMDVEIMLLLDKRYFLGE

SEQ ID NO: 182326 - protein, 214 aa, Glycine max
  Clone ID: PAT_MRT3847_135653C.1.pep
GAREPIPGLYASGEVAGGVHGANRLGGSSLLGCVVYGRVAGDEAASYLLKQLSSGQIAGERLGQVANHLETKIRIDPSTNKAVIEFSWDGQNQQASSSSSSASSSGVQERPAAQTAPPQQTDSLAQVPYNDHQVKGRKSYSIDEVAKHSPDDDPWVVVAGQVLPVKDFLEDPPGGAKAILLYKGKDCTKAFDMLHERDVIQKYAKDTIIGTLQK

SEQ ID NO: 182327 - protein, 130 aa, Glycine max
  unsure (1)..(130): unsure at all Xaa locations
  Clone ID: PAT_MRT3847_135654C.1.pep
PALSKLPPSKFKLNCHAAVDMNGNAGTGGVLRDNNGNVVVTFVFKMAXCSVTQAELWAIVLGIQVAKSRGFSESLVESDSKLAISLIQHRCSPSYVCFQLVEMIRKFESDGGRFTWIPAYPEANQVAEIL

SEQ ID NO: 182328 - protein, 88 aa, Glycine max
  Clone ID: PAT_MRT3847_135655C.1.pep
MRMVKDSKNERLTLLLEETNKLLVNLGAAVQRQKDNKYSNGIEPLEDSEADLLESDASKNGVSKESPLDEDIDLIDSDHNGDSSDLLE

SEQ ID NO: 182329 - protein, 80 aa, Glycine max
  Clone ID: PAT_MRT3847_135656C.1.pep
RVGALGILCLKPKGSLRFFCGTTKSEKTTSQVLTRLDSASSRDSVRPLHINDARIGDGCYHQSPHPTVSGMSSALIERAI

SEQ ID NO: 182330 - protein, 61 aa, Glycine max
  Clone ID: PAT_MRT3847_135657C.1.pep
IQKYIKKNQIIIMLARIESIHNVLINDSCKITVHHSQQKQVISINILKQKDNAKAGRKEVP

SEQ ID NO: 182331 - protein, 93 aa, Glycine max
  unsure (1)..(93): unsure at all Xaa locations
  Clone ID: PAT_MRT3847_135658C.1.pep
GLLRNNLQRVISQPNHYRSRFLHNSPHRQKCPLDLQDLKSRRADRHFDQYMGSVLDHVIQIFMCHSSNFTVGKIPRSEYIXGSMFTDENFLKI

SEQ ID NO: 182332 - protein, 70 aa, Glycine max
  Clone ID: PAT_MRT3847_135659C.1.pep
FEKDASGKAIPICAIHFYAKLERPKEIWGGKQPQTTMVPFEHEFFRSLILGGIPNPYSLSWSIKCWRPLQ

SEQ ID NO: 182333 - protein, 243 aa, Glycine max
  Clone ID: PAT_MRT3847_13565C.1.pep
SNKDIVAQIISASIAGDLVLATAYSHELPRYGLEVGLTNYAAAYCTGLLLARRVLKTLEMDEEYEGNVEATGEDYSVEPAESRRPFRALLDVGLVRTTTGNRVFGALKGALDGGLDIPHSDKRFAGFDKEKKELDAEVHRKYVFGGHVAAYMKILAEDEPEKYQSHFSEYIKRGIEADGIEALYKKVHAAIRADPTLRKSDKEPPKEHKRYNMKKLTYEERKAKLIARVAAINSAADSDEDDE

SEQ ID NO: 182334 - protein, 57 aa, Glycine max
  Clone ID: PAT_MRT3847_135660C.1.pep
NSRKFGPMLFMIVPQWLCHCIWFTFVQCKLNVPEVRQSNESVQSSWCPLAFPAKRRT

SEQ ID NO: 182335 - protein, 108 aa, Glycine max
  unsure (1)..(108): unsure at all Xaa locations
  Clone ID: PAT_MRT3847_135661C.1.pep
VDPRVRNCYEEVKDRCTLAEKLGGSAVISLEGKPLXEPLLAPCLEHLXSPTPALGGCRLPPSCQTGGAGGIPAGGGQSLHPSCQTDPPPPGFSFSLHPLTVLAFTNCF

SEQ ID NO: 182336 - protein, 95 aa, Glycine max
  Clone ID: PAT_MRT3847_135662C.1.pep
IFAVSFTGKLLFRIKTFKHKLLQLKINFANFCPTHTYCCFLEAEVDQKIISPEILSIPSLIPISLLLFRGRSRSEDYFPRDFINTFTNTNLLAAF

SEQ ID NO: 182337 - protein, 61 aa, Glycine max
  unsure (1)..(61): unsure at all Xaa locations
  Clone ID: PAT_MRT3847_135663C.1.pep
RGKPXLRSEVQNINVVWFGAGNIATFDSGRVDAGCTHSKLWLCCIQLCCLIGHHLCQQISS

SEQ ID NO: 182338 - protein, 94 aa, Glycine max
  unsure (1)..(94): unsure at all Xaa locations
  Clone ID: PAT_MRT3847_135664C.1.pep
LNPNHQFSFLFSTFPRKFKWASGLRLAIXDPHLLHTXSLLPSXLLHHPPIQPSPXHXSLXPPPLHXAPHPAALEEIXLTSAHARASSRXGALXL

SEQ ID NO: 182339 - protein, 41 aa, Glycine max
  Clone ID: PAT_MRT3847_135665C.1.pep
TLVLTVPYRYDVECLSLSTIDTLNIRCCGDNDRRSSSCTSA

SEQ ID NO: 182340 - protein, 70 aa, Glycine max
  Clone ID: PAT_MRT3847_135666C.1.pep
LFKGLSICAWFWFHRRIKCYNSKVSSILKVSKWSMMVIYACIFFYSQWLTIFQGGISSVYTICQQATNIY

SEQ ID NO: 182341 - protein, 133 aa, Glycine max
  unsure (1)..(133): unsure at all Xaa locations
  Clone ID: PAT_MRT3847_135667C.1.pep
MSIGDAFLCLLFIATCWISAASADSIYGCGGFVEASSSLVKSRKQTDAKLDYSDVTVELQTVDGLVKDRTQCAPNGYYFIPVYDKGSFVIKINGPPGWTWDPEKVPVVVDNYGCNGNEDINFXFTGFTISGRV

SEQ ID NO: 182342 - protein, 121 aa, Glycine max
  unsure (1)..(121): unsure at all Xaa locations
  Clone ID: PAT_MRT3847_135668C.1.pep
MKKTNNEKPVLELMNSQIDEVVVQAIEVNYKNNKTISKEGKTQIESFSRVLSDMLSSLKPWLPKIQNALNPQDIVSDDETRECDRPKPEETTLNLVSSSPLVSWRANCTVKRGRQXFMLTP

SEQ ID NO: 182343 - protein, 64 aa, Glycine max
  Clone ID: PAT_MRT3847_135669C.1.pep
LDGVMKVRRMMRTKDLKKPAECSWIEVERTNTIFVVGDCSHPQRSIIYSTLQTLDQQVKEPAEF

SEQ ID NO: 182344 - protein, 265 aa, Glycine max
  Clone ID: PAT_MRT3847_13566C.1.pep
MVYVKAQKSKAYFKRYQVKFKRRREGKTDYRARIRLINQDKNKYNTPKYRFVVRFSNKDIVAQIISASIAGDIVLAAAYAHELPRYGLEVGLTNYAAAYCTGLLLARRVLKTLEMDEEYEGNVEATGEDYSVEPAESRRPFRALLDVGLIRTTTGNRVFGALKGALDGGLDIPHSDKRFAGFDKEKKELDAEVHRKYVFGGHVAAYMKILAEDEPEKYQSHFSEYIKRGIEADGIEALYKNVHAAIRADPTLKKSDKQTPKEHKR

SEQ ID NO: 182345 - protein, 214 aa, Glycine max
  Clone ID: PAT_MRT3847_135670C.1.pep
MKATLKGKYDVDKNGAAFANIAVNAGDVKFRASVTEATFINGPSLTGLALAVEKPGSFIVDYNVPKKDFRFQFMNTVRVGERPLNLTYAHSRGDNRTVLDGTFVYDSANKVSANYALDSGNCKLKYTYVHKGLTTFEPAYDVAKNTWDFAVSRRVYGGDDTLRASYQTSSRVLGVEWSRNPKHTAGFKIVASVNLAEEFKAPKLVAETTWNFEM

SEQ ID NO: 182346 - protein, 153 aa, Glycine max
  Clone ID: PAT_MRT3847_135671C.1.pep
RNSRVDPASGKIECHIIKPNHCHVLVTPSRASPSPLFLFFPCIITVKGFPLLFSILFFFFSWFKVLVTQISILFWPSKPLQTHPKSSHHGTLTALTHFLRAACRAFTTESHDLSSKTSTHRFTIGTTKQQPNNHYIIFIKFNAENTNITINNK

SEQ ID NO: 182347 - protein, 61 aa, Glycine max
  Clone ID: PAT_MRT3847_135672C.1.pep
GQGGPPPFFYFPGWGFFSPPSPVAPKKQPQKSPAPFCPEGTPPRACCPRGGKTSPPGKGGG

SEQ ID NO: 182348 - protein, 96 aa, Glycine max
  unsure (1)..(96): unsure at all Xaa locations
  Clone ID: PAT_MRT3847_135673C.1.pep
MIGTLCLTRVVDLVLDCVVPCIDDPKVRDACLQVCRCCIELDSLTPMHVTIQLCYSNTPGRLQLSFPDLXSALLSGKPRAEVLNWIPYRRGGHLTA

SEQ ID NO: 182349 - protein, 99 aa, Glycine max
  Clone ID: PAT_MRT3847_135674C.1.pep
KKGGIFKGTFPFPPTNERPNKQDEREKPTPSKKKGGDKRTGPKNPKKTPNQGYPGGAQGSPRHGNQTKVPRKAYIRGAGHRAKGGPQKGPKRDLARTRG

SEQ ID NO: 182350 - protein, 209 aa, Glycine max
  unsure (1)..(209): unsure at all Xaa locations
  Clone ID: PAT_MRT3847_135675C.1.pep
AREHVYHVAGSKTKAKELELLLAILPDNNGSLYGDLKRICETDLGLISQWXLTKHVFKITKQYLANVSLKINVKMGGRNTVLLDAVSCRIPLVSDIPTIIFGADVTHPENGEDSSPSIAAVVASQDWPEVTKYAGLVCAQAHRQELIQDLYKTWQDPVRGTVSGGMIRDLLVSFRKATGQKPLRIIFYRDRVSEGQFYQVLLYELDAIR

SEQ ID NO: 182351 - protein, 40 aa, Glycine max
  Clone ID: PAT_MRT3847_135676C.1.pep
KALTHDPRKHTKLDHRLQTTHGFVLLELKVKLIYKMQSTE

SEQ ID NO: 182352 - protein, 208 aa, Glycine max
  unsure (1)..(208): unsure at all Xaa locations
  Clone ID: PAT_MRT3847_135677C.1.pep
VAKSQRNRGATGNKWKLSTSSKPKPSNINKINLKGEWDYLEDIYNNLQRGEEADFSAYPTFVRNRIERLRKIKDESEKKQLSCIFSYINHLIKFKDQHSFDVLSAKGHKIPNILRHKFSNMFAVFESKRLPPEKISLLIWXVLGPTLFFDEFRTGYPDIAKDLSMNILPVRQLYEHLGCKISRQKNIFYATLPVPLKFPELRQRKRKR

SEQ ID NO: 182353 - protein, 68 aa, Glycine max
  Clone ID: PAT_MRT3847_135678C.1.pep
PLERVAPFPQAGGDGLKRVFVLGFSNKVFGNKNSPPTGIGTALANAGGALYSFIKARMGEEKRPAKAA

SEQ ID NO: 182354 - protein, 150 aa, Glycine max
  Clone ID: PAT_MRT3847_135679C.1.pep
IWLAPGRAQSHRINTAPESQTGFYHSWFFRTSPTHLHLSSIRRETGTSQPPKGRSVWPGSASYPKANAGYDQPHRFRRRLPTVQGLFTESVPNHGYRHRCFSVWINFCPAEVCALALGAPKVRFILLGFELVANSSTIRKGSFLVNIGWP

SEQ ID NO: 182355 - protein, 98 aa, Glycine max
  Clone ID: PAT_MRT3847_13567C.1.pep
VKTLHFPGLYIIDIGVDIIELALCCPNSGAVDLGGSDHRRRRSRTRTMFDYLFDSLCLSRTAPSPLERILMSSSKFTPIAAGGIHHGKHHRLNPNSGS

SEQ ID NO: 182356 - protein, 83 aa, Glycine max
  unsure (1)..(83): unsure at all Xaa locations
  Clone ID: PAT_MRT3847_135680C.1.pep
VYALVLMWRFFDGDLVFEVFMMTSSYIKSTVFFYINIWXNMFDDTINFEAFSHMLVLFGEIHDKVVXKSLQEEFLTSWSILVA

SEQ ID NO: 182357 - protein, 298 aa, Glycine max
  Clone ID: PAT_MRT3847_135681C.1.pep
KTKQMWADMLKWRQEFGADTIMEDFEFNELEEVLKYYPQGHHGIDKDGRPVYIEKLGQVDSIKLMQVTTMERYLKYHVREFERTFAVKLPACSISAKKHIDQSTTLLDVQGVGLKSLNKAARDLLQRLQKIDGDNYPESLNRMFIINAGSGFRLLWNSIKSFLDPKATSKIHVLGNKYQRKLLEIIDASELPEFLGGTCTCADKGGCMLSDKGPWNDPDILKMVHNGEGKCKRKTLSGIEEKTIIEDGTAHQNVGNKESFPETYDVDEQCLSPKKQCAVYKYDAFVPVLGKPVDSSWN

SEQ ID NO: 182358 - protein, 75 aa, Glycine max
  unsure (1)..(75): unsure at all Xaa locations
  Clone ID: PAT_MRT3847_135682C.1.pep
PIKIIAVGRPEEATHPDTWKAGVDDLIXPLILRFAGXGSGIAYNMLPDSGACTAVGLISASMVRTFDLCVALYVG

SEQ ID NO: 182359 - protein, 136 aa, Glycine max
  unsure (1)..(136): unsure at all Xaa locations
  Clone ID: PAT_MRT3847_135683C.1.pep
MGGMPRASPTVLSDTMSVGTHRLSKQGAITKRMTAIEEMAGLDLLCRDINGTLTLNKLSVNKNLIEVLANGGDKDXVMLLAPRAVTTENQDTIHTAIGSMLADPPDARAGIRDVHXLPFNTLLNRTVLTYPESDGN

SEQ ID NO: 182360 - protein, 152 aa, Glycine max
  unsure (1)..(152): unsure at all Xaa locations
  Clone ID: PAT_MRT3847_135684C.1.pep
ILMIWLLAGILGYEAFDRIIDGPKNEDGFLTVLGSGFELVVTIIMTLLLCHDHWRRHAGHSHRHGHDXYGHSHGFTMSTHCDAYHTRDHYHHTHHFDEYHASEAHHHTEEDHLHHHGHREVTELHLXSKMAAXDEYAWNINVQGAYLHVLGD

SEQ ID NO: 182361 - protein, 53 aa, Glycine max
  Clone ID: PAT_MRT3847_135685C.1.pep
PLRWKYNLLDLSLSLSPLFYIGDLLNMRNFWVNLNHSGVFSEYHATLLWWQAV

SEQ ID NO: 182362 - protein, 69 aa, Glycine max
  Clone ID: PAT_MRT3847_135686C.1.pep
KDLVVRTRPMGPVQCPWPVVSHGISKLDLLIPAHFPKMEKNFPESIPGDHKLWNLAGTFWLVTPKGPIV

SEQ ID NO: 182363 - protein, 63 aa, Glycine max
  unsure (1)..(63): unsure at all Xaa locations
  Clone ID: PAT_MRT3847_135687C.1.pep
STFVGHVSFLVRIVLIPLNNFMFIKILYVPPLSRWSPPLWGLTSVNLEVCLIVRPLXHTLTVR

SEQ ID NO: 182364 - protein, 78 aa, Glycine max
  unsure (1)..(78): unsure at all Xaa locations
  Clone ID: PAT_MRT3847_135688C.1.pep
KEKNLEERNTLLELEPAAAQVLHELVSLVHNSVSSTQDGQSLSTSINDFLFAGNDKHEKIXTSVLKDDPLAKILWDVE

SEQ ID NO: 182365 - protein, 88 aa, Glycine max
  Clone ID: PAT_MRT3847_135689C.1.pep
LTHALPTVLDLLEGIYERDSERDCLKQRMSPNHSSDHMVKLIAYAPDNTAYITVYDIDELTGVLTNVLSIGITLSITLGDNPATDTIT

SEQ ID NO: 182366 - protein, 70 aa, Glycine max
  Clone ID: PAT_MRT3847_13568C.1.pep
HVQNPYAIAVCVKPSILKFKNVGHEKSFNLSFKAMQGKATNNCAFGNLIWPDGKHHVMSPIVVRALFTRN

SEQ ID NO: 182367 - protein, 46 aa, Glycine max
  Clone ID: PAT_MRT3847_135690C.1.pep
FEAKMKKLEGKGNPIIAKMSQGEPGTGGNVDNNAPPAGGNGAGPKI

SEQ ID NO: 182368 - protein, 204 aa, Glycine max
  unsure (1)..(204): unsure at all Xaa locations
  Clone ID: PAT_MRT3847_135691C.1.pep
PRPEILKPDFLRFMDEFYINESFPKGTNASFIALIPKINEPQSFNDYRPISLIGCVYKIVAKVLAKRLAAVLPNLIDERQTAFMKGRHILHGVLIANEAIAEAKSRSKPCMVFKADFEKAYDSVSWGFLDYMLMRMGFCERWRKWINGYLSTATIXILVNGSPSKEFTPKRGXRQGDPLAPFLFNIVAEGLTGLMRSACVQESV

SEQ ID NO: 182369 - protein, 63 aa, Glycine max
  Clone ID: PAT_MRT3847_135692C.1.pep
FLIFSGCCFAFSSKEQPQENECQIQKLNALKPDKRIESEGGLIATWDPNKKTFQCADDALYHC

SEQ ID NO: 182370 - protein, 112 aa, Glycine max
  Clone ID: PAT_MRT3847_135693C.1.pep
VLLSSLSKLEDIWLNGDGHFLLGVSQPSIADLSMVCELMQLEVLDEKDRSRILSPYKKVLQWIEDTRTATNPHFEEVHNILYRAKKKFEQQRSRVAETGTEPSNKMGGHSKM

SEQ ID NO: 182371 - protein, 125 aa, Glycine max
  Clone ID: PAT_MRT3847_135694C.1.pep
KQGNTAVYLLYAHARICSIIRKSGKDIEEVKRNGKIVLDHEDERALGLHLLQFPEVYEEACTYLLPNFLCEYLYNLAEIFTKKFYANCQVVGSPEETSRLLLCEATVTVMRHCFYLLGIEPVYRL

SEQ ID NO: 182372 - protein, 32 aa, Glycine max
  Clone ID: PAT_MRT3847_135695C.1.pep
AKKLMDLGLQFIPMEKIIKDAVEDLKSKGFLS

SEQ ID NO: 182373 - protein, 56 aa, Glycine max
  Clone ID: PAT_MRT3847_135696C.1.pep
KVKEPKPRPLAHASYVWLFCPAHCSGKGPLEPLPDPLAAPVNTTAWAYRPHFAPGK

SEQ ID NO: 182374 - protein, 350 aa, Glycine max
  Clone ID: PAT_MRT3847_135697C.1.pep
MKTFQLANESSSLLSLSPKFILPEDERPQLSEVTSLDSIPIIDLSDHSYDGNNHSSSLVVQKISQACEEYGFFQIVNHGIPEQVCNKMMTAITDLFNLPPEQTGQLYTTDHTKNTKLYNYYLNVEGGEKVKMWSECFSHYWYPIEDIIHLLPQEIGTQYGEAFSEYAREIGSLVRRLLGLLSIGLGIEEDFLLKIFGDQPRLRAQANFYPPCPDPELTLGLPVHTDFNALTIVLQSQVSGLQVIKDGKRIALPFIPNAFVINLGDQIQVLSNGRFKSVHHRAVTNKLSPRVSMAMFYGPNVDTTIGPIQDLIDEEHPPRYRNYRFSEFLEEFFKQEGTRRMVKEVFELPC

SEQ ID NO: 182375 - protein, 49 aa, Glycine max
  Clone ID: PAT_MRT3847_135698C.1.pep
DFNLMNTFSSRTKNNPYSLGKMVDIVTLLMEIFFELLKLNSSLFEFIVP

SEQ ID NO: 182376 - protein, 87 aa, Glycine max
  Clone ID: PAT_MRT3847_135699C.1.pep
IDEEILQEAVNMGFDRNQLVESLSNRIQNEVCDLLFSPQVYLPDCLISLSVFQGTVTYYLLLDNRFRVSRGYLGTEFQETMGGLVFL

SEQ ID NO: 182377 - protein, 111 aa, Glycine max
  Clone ID: PAT_MRT3847_13569C.1.pep
RVGGRLGSLERQGGGAQARALSDGVNGFPSRLRSSAHRPVTLRACLSLSLLSPPLDRQQRPAPAAAPHGPEGSGSQQPLLHQGGRAALGAFMPQNKAIPVLLALQRAKACA

SEQ ID NO: 182378 - protein, 65 aa, Glycine max
  Clone ID: PAT_MRT3847_1356C.1.pep
NYKLSGSTSHFLIYILSYNITPEPDIRNFPFRTLIILSFYLLLILTWIPLGQPGWKPLTIKHGTQ

SEQ ID NO: 182379 - protein, 62 aa, Glycine max
  Clone ID: PAT_MRT3847_135700C.1.pep
CQVACPSPHPQFPTRFFVDVRVVSRWLICGNVSVKSSLHDHKHRSRHAKPDHLIVHDDKHRE

SEQ ID NO: 182380 - protein, 125 aa, Glycine max
  unsure (1)..(125): unsure at all Xaa locations
  Clone ID: PAT_MRT3847_135701C.1.pep
WFVVGPCPHGAQAVEWRTLFGPPLLCLTAPPAWVQAPPGFIFAFYSFGVANSXLHRDHVLVILSAFLLRQWPGGSFSMPXXWAXSTNGFGSWVSLIGXXXXFSFSPNALPNPLNFFPFFLYNLEY

SEQ ID NO: 182381 - protein, 110 aa, Glycine max
  Clone ID: PAT_MRT3847_135702C.1.pep
IHARVLSGGRRTPKGDPPGIFIGGGIPFWKRLSALGLFLSLPLMLIFLGWPVAPTMMVMAGITGAHCPGAPGYPPLGVEIRGGKKGFLNLTGRGKGFGVFILGKTPTPFF

SEQ ID NO: 182382 - protein, 47 aa, Glycine max
  Clone ID: PAT_MRT3847_135703C.1.pep
ALQHSILWQCERLKIVSIMLLLASKEFFFLFQIYNVSLVIPWVSLGI

SEQ ID NO: 182383 - protein, 158 aa, Glycine max
  Clone ID: PAT_MRT3847_135704C.1.pep
KNTKPNVIKAKPLGPAASVPILAASRLLRSAASRAPGAANLAAGARTFTGDSFLPFLGVPKAKASISNRVFRLPVEASFCVESMLPYHSATASALLNSMLSVSRHSYGWTPEAFRLWMIAVCGCGASAHTLHGFQFTLLGLLRDFSPWLNMKPERLVN

SEQ ID NO: 182384 - protein, 78 aa, Glycine max
  unsure (1)..(78): unsure at all Xaa locations
  Clone ID: PAT_MRT3847_135705C.1.pep
MSAASRSAGAANLAAGARPRLAQSPFRLPKQTSFSNRVFRSEXCVESMLPYHSATASALLNSMLSVSRHSYGWTPEGS

SEQ ID NO: 182385 - protein, 90 aa, Glycine max
  Clone ID: PAT_MRT3847_135706C.1.pep
MSAAWRLLRSAASRAAGAANLAAGARPRPARSPFRLPKQTSISNRVFRLPVEASFCVESMLPYHSATASALLNSMLSVSRHSYGWTPEGS

SEQ ID NO: 182386 - protein, 89 aa, Glycine max
  Clone ID: PAT_MRT3847_135707C.1.pep
MSAARCLLRSAVSRAAGAANLAAGARTKPARSPFRLPKQTSVSNRVFRLPVEASFCVESMLPYHSATASALLNSMLSVSRHSYGWTPEG

SEQ ID NO: 182387 - protein, 63 aa, Glycine max
  Clone ID: PAT_MRT3847_135708C.1.pep
SCIAVGLFFFFSITHGNKWAALIRHSFTILRSYIEAENFQTCRGGNVQMKKLHMDWSLSKLEN

SEQ ID NO: 182388 - protein, 458 aa, Glycine max
  Clone ID: PAT_MRT3847_135709C.1.pep
SISSILISLSFSVSTCHGSFFLALLLLSTPSCRLFQGLLLHSHNLSSLHLFLHSLLHLLHFKHLHPSQPPPFHFTFQTTPSLFHYPFYCYHSSLRPCLQPQCFRVHKISSDFPIGVWPRTAKSTGSASATAIQLKGEDDPFANVLLPVESEPGGNYTSESYFKKVLMKSHFITKDPPEADLFFLPFSMARLWHDRRVGVGGIQDFIRDYIHNISHRYPYWNNTGGADHFYVACHSIGRSAMDKAPDEKFNAIQVVCSSSYFLTGYFAHKDACLPQIWPRKGNPPNLVSSKRKRLAFFAGGVNSPVRVKLLETWKNDSEIFVHHGRLKTPYADELLGSKFCLHVKGFEVNTARIGDSLYYGCVPVIIANYYDLPFADVLNWKSFSVVVTTLDIPLLKKILKDIISSNKYLMLQSNVLKVRKHFQWHSPPQDFDAFYMVMYELWLRRSSIKNTWVDSFRV

SEQ ID NO: 182389 - protein, 73 aa, Glycine max
  Clone ID: PAT_MRT3847_13570C.1.pep
ESWWWRCTVFIPIVLLLLQAHKVALCAMCGRVPFVLIVRQQALDEMEAGTGWVLLHRPSSVGSRPIRIARSTT

SEQ ID NO: 182390 - protein, 51 aa, Glycine max
  Clone ID: PAT_MRT3847_135710C.1.pep
FPVGKVRSRPPPGLKKNFRVHKLKYDGAGVSCFCFFFFFFFFFFFFNQLHL

SEQ ID NO: 182391 - protein, 211 aa, Glycine max
  Clone ID: PAT_MRT3847_135711C.1.pep
MSHTRKHTPFLFPHVDSTVVPEPSNFFSSNLVSNPLPTNSFFQNFVLKNGDQPEYIHPYLIKSSNSCLSLSYPSRFMNPSFIYQVFNPDLTISSSQKSHPSHLNHTISSHNDLSVTLDIPSSNLRFFLVRGSPFLTLSVTQPTPLSITTIHAILSFTSSESLTKHTFHLNNGQTWFLYASSPIRLSHGLSEITSDAFSGIIRIALLPGSDW

SEQ ID NO: 182392 - protein, 576 aa, Glycine max
  unsure (1)..(576): unsure at all Xaa locations
  Clone ID: PAT_MRT3847_135712C.1.pep
MDRRRNASPVYARQWSGGSSSTGSSSPAMSPAHPQSRLGPTSATGLSTVKRTQNVAAKAAAQRLARVMASQNTTADDGEDDDDLDFRFSAPSPASLSSFSSNSGSNRSASTNATAIPPISVARPNRSPSPALGRNFVEHTHSVRSTSAGRPAVSVRSAAVVPPNKSTLRTPMAIPPIDPPTNRNRDKRFTSDISIRPLNSKDTGDQREASALRDELDMLQEENEVLLEKLRQAEEKRQEVEARTRELEKQVASLGEGVSLEAKLLSRKEAALRQREAALXAAQQTQSGRDEDITALRVEIQNLKDDATAALEQQQEAEAEAKSLRTMTQRMILTQEEMEEVVLKRCWLARYWGLAVKHGICADIAQSKHEHWSSLAPLPFELVISAGQKAKEESWNKSADGPDRSKLVRDLNDLAGEGNIESMLSVEMGLRELASLKVEDAVVLALAQHRRPNSVRQSVLDSKSRGDAKYSEAFELSEEEAEDVLFKEAWLTYFWRRALFHGVEEDIAEERLQFWIARSGQSPSSHDAVDVERGLLELRKLSIEQQLWEASRKGIDQLQGSADANHKHASDSDASS

SEQ ID NO: 182393 - protein, 84 aa, Glycine max
  Clone ID: PAT_MRT3847_135713C.1.pep
MDRRRNASPVYARQWSGGSSSTGSSSPAMSPAHPQSRLGPTSATGLFTVKRTQNVAVKAAAQRLARVMASQTTTADDGEDDDDL

SEQ ID NO: 182394 - protein, 70 aa, Glycine max
  Clone ID: PAT_MRT3847_135714C.1.pep
KVEDTEIATPASSSSALTDEYDACTSSALCDITVLDCLNASEITFPIVQDLEKGPYAEIDRAVLSESVLM

SEQ ID NO: 182395 - protein, 129 aa, Glycine max
  Clone ID: PAT_MRT3847_135715C.1.pep
MSDPYERVKGGRLAFKGGILASRSKSIDKKGKKKKKNKGKDNDNNPNPNPNPEEQELEQEQKQEQEETPLLEDEGEGSEYTIDAAKRMKYEQLFPVEAKKFGYQPKTNFKSVEDALDDRVKKKADRYCK

SEQ ID NO: 182396 - protein, 100 aa, Glycine max
  Clone ID: PAT_MRT3847_135716C.1.pep
MRTESKKISKSSWPKLAVRKWLNIKSSAERFHSDYDATTAIAKERRRSCSDRDRYVVVPDDLSEGWVMDSTSGMKKKSAPGPGTGGPDLRMFVGTWNVGG

SEQ ID NO: 182397 - protein, 40 aa, Glycine max
  Clone ID: PAT_MRT3847_135717C.1.pep
FLIQNFTSQVAHESFVEVEEISAIYITLGDTIKTDKEHMQ

SEQ ID NO: 182398 - protein, 67 aa, Glycine max
  Clone ID: PAT_MRT3847_135718C.1.pep
DRRGFADRLYCTTNGILGLKLSCSLVLSNAPIDDRSIFLSTYDLAQVIEDRVKQWCCSLAESGMNLQ

SEQ ID NO: 182399 - protein, 83 aa, Glycine max
  Clone ID: PAT_MRT3847_135719C.1.pep
FSEQCSIVVWEVENFEPFPRETKKGNFCRKPLSNYPDTHTDSSLLQPNQRLKKKSSQNARVREHSSNLTPFLFYFNIIIFRSL

SEQ ID NO: 182400 - protein, 78 aa, Glycine max
  Clone ID: PAT_MRT3847_13571C.1.pep
LIPEKKKKKKKKKKKKKKKKKKKKKKKKKKKKKKKKKKKKKKKKKKKKKKKKGGALLKNQILFPGAWKKKFFFWGPQN

SEQ ID NO: 182401 - protein, 72 aa, Glycine max
  Clone ID: PAT_MRT3847_135720C.1.pep
RAILIDVTLIPPTLHPTLQVQAHMQTNLFKLHLAEVATDQSHMMDLQISQSKIALTKNTVGGTTLRIDLLAN

SEQ ID NO: 182402 - protein, 45 aa, Glycine max
  unsure (1)..(45): unsure at all Xaa locations
  Clone ID: PAT_MRT3847_135721C.1.pep
LSVWVSAFLFCLEIWPSLFPWVQFTMKFTKPXARGKKFKKRLXLT

SEQ ID NO: 182403 - protein, 152 aa, Glycine max
  Clone ID: PAT_MRT3847_135722C.1.pep
MMMDSEGLENGIEELKLKEEKGNAHAQPQGQLQITTFSELVNDVNLHFQIIRFPKQIYVWIGYNSAKLGHMYAAASTRPNNMVSVTSILGGVSDNTGSGIAHRLVLKTGLNIILACSIPKNSPILETEAEKILIQKLISLGYTKSRLGGTSL

SEQ ID NO: 182404 - protein, 53 aa, Glycine max
  Clone ID: PAT_MRT3847_135723C.1.pep
PLPVRLACGLALSLGSLSGLAVVVWPLLLRAGGPRVLGLCGFSCGFSLCRWCE

SEQ ID NO: 182405 - protein, 83 aa, Glycine max
  Clone ID: PAT_MRT3847_135724C.1.pep
KSQVMIKLYLLPLIFVCSWDLLMFTFFSMFKSLMNYLICSMLFVCSISLFSACSVARAYDKKYRIGSSGILSYSNSIVGEPIG

SEQ ID NO: 182406 - protein, 106 aa, Glycine max
  Clone ID: PAT_MRT3847_135725C.1.pep
CLNIRLLIKNSFEMNNTQSVQTHLLLRTCSIYTVGAVTQYLYLHLNSGVNRCLICASLPVSLAYWMWLNLKARSMGMDNMRRLLSLLSHSKDPFVPHAQRRPKTSL

SEQ ID NO: 182407 - protein, 82 aa, Glycine max
  Clone ID: PAT_MRT3847_135726C.1.pep
LGLRLAPQPSIADSLPCTTHHQLIIHGFLRFTSPYLFSPSVVLLCSVPSAAPSPSPNRFLVERRKTMSSFTDQCSVGVDRQP

SEQ ID NO: 182408 - protein, 68 aa, Glycine max
  Clone ID: PAT_MRT3847_135727C.1.pep
KENEVFIFYTPPIRLFWEGNQPCLYIKNPLGFYRFNTFFFGQSITAWHPPKNPHFKTLHMQAGGLPPK

SEQ ID NO: 182409 - protein, 83 aa, Glycine max
  Clone ID: PAT_MRT3847_135728C.1.pep
FGLFIRDPVFPPFEGGGPLKPPLRAGAEAILGAPQGGKAPDHSPNGGGFCPPPHSAAWFPPRFFFGRVGALGFFRGVKKVRLF

SEQ ID NO: 182410 - protein, 58 aa, Glycine max
  unsure (1)..(58): unsure at all Xaa locations
  Clone ID: PAT_MRT3847_135729C.1.pep
MGKGKRVQDLVCGXAQRIRRLKKRIIEERLKMKRDYGVKFRWILNKELVYGISGNFKR

SEQ ID NO: 182411 - protein, 93 aa, Glycine max
  Clone ID: PAT_MRT3847_13572C.1.pep
RKCPTQEVPLRAPTSKNRRIQTPTTSNSCTLHSPALSLSPSLCPSSSPSHTLSLSVFFFFFVLFSLCVCFGLLLLLLFLLSNPALSCCARTRG

SEQ ID NO: 182412 - protein, 58 aa, Glycine max
  Clone ID: PAT_MRT3847_135730C.1.pep
VYGNCRLSTIVCMIFRPLSYLICFLVERCALDCWLCLSTAYVFSSSSVSCSRVELFTP

SEQ ID NO: 182413 - protein, 120 aa, Glycine max
  Clone ID: PAT_MRT3847_135731C.1.pep
ICLELLFSISSVSIYYGTQSDIRVKSYCRLIFLRASVFNFKRLDILWDSIGHPCKKLSSFDFSNSFVLNFERLDILRDTIGYLSQKLLSFEFGQRFCFQLRASRYIMGLNGTSVSHVIVV

SEQ ID NO: 182414 - protein, 64 aa, Glycine max
  Clone ID: PAT_MRT3847_135732C.1.pep
TNMTNITNNLKLPKSTKYYLNTRIISPLKSKNYFRGQSPSVVFSHPYPSVVFSHPYERVGGRVG

SEQ ID NO: 182415 - protein, 71 aa, Glycine max
  unsure (1)..(71): unsure at all Xaa locations
  Clone ID: PAT_MRT3847_135733C.1.pep
WQASTPRLCRRILRTLCCVFPRRCQEVRLLRSNLRQEYAELMHXFMTAVKQTYGEKVLIQFEDFANHNAFD

SEQ ID NO: 182416 - protein, 111 aa, Glycine max
  Clone ID: PAT_MRT3847_135734C.1.pep
LVDLGQERLRALEVLTKQKERVAKVYNKKVKSKTFNVGDLVWKVILPMDSKDRALGKWSPNWEGPFKIIQIYSNGAYELEELTPQKRTLRINGKYLKKYKPTLLEVKISIE

SEQ ID NO: 182417 - protein, 116 aa, Glycine max
  Clone ID: PAT_MRT3847_135735C.1.pep
MAGSGSAFSNITSFLRTQQPSSQPLDSSLFLSAPSSAPFLGSRSMMSFEGEGGKGCNGSFFRAFDMDDNGDECMDEYFHQPEKKRRLSASQVQFLEKSFEEENKLEPERKTKLAKD

SEQ ID NO: 182418 - protein, 34 aa, Glycine max
  Clone ID: PAT_MRT3847_135736C.1.pep
TIDGFSTQAELRCHSKSRCWSYMNLWLFMYTQVL

SEQ ID NO: 182419 - protein, 625 aa, Glycine max
  unsure (1)..(625): unsure at all Xaa locations
  Clone ID: PAT_MRT3847_135737C.1.pep
MERKFMALGFIWWVVLVHPLCLISANMEGDALHSLRTNLQDPNNVLQSWDPTLVNPCTWFHVTCNNDNSVIRVDLGNAALSGQLVPQLGQLKNLQYLELYSNNITGPIPSDLGNLTNLVSLDLYLNHFTGPIPDSLGKLSKLRFLRLNNNSLSGPIPMSLTNITALQVLDLSNNHLSGVVPDNGSFSLFTPISFANNMDLCGPVTGHPCPGSPPFSPPPPFVPPPPISAPGGNGATGAIAGGVAAGAALLFAAPAIAFAWWRRRKPQEFFFDVPAEEDPEVHLGQLKRFSLRELQVATDSFSNKNILGRDXFGQGVVKGRLVRXWLVLQKRLKELSSTSGGHECETRVEMNSKTVHRNLVQLSLFCFRQEIIILVDXHSPNGSAAFCKRESPPYQETLDKPTEKRGALGSARGLSYLHDHCDPKIIHRDVKAANILLDEEFEAVVGDFGLAKLMDYKDTHVTTAVRGTIGHIAPEYLSTGKSSEKTDVFGYGIMLLELITGQRAFDLARLANDDDVMLLDWVKGLLKEKKLEMLVDPDLQTNYIETEVEQLIQVALLCTQGSPMDRPKMSEVVRMLEGDGLAERWDEWQKVEVLRQEVELAPHPNSDWIVDSTENLHAVELSGPR

SEQ ID NO: 182420 - protein, 65 aa, Glycine max
  unsure (1)..(65): unsure at all Xaa locations
  Clone ID: PAT_MRT3847_135738C.1.pep
QVFKPQIEXTRLEYIKHDDLILRLFQRVEKQTLQKILTDDGTPNVAXISGLYLKXVKVGGRXVSX

SEQ ID NO: 182421 - protein, 53 aa, Glycine max
  Clone ID: PAT_MRT3847_135739C.1.pep
LHYHSMHSHDPVGTKEVAMPCYWLSYDMLIVCQQFGWYYLLQYRLCMMLGYIQ

SEQ ID NO: 182422 - protein, 39 aa, Glycine max
  Clone ID: PAT_MRT3847_13573C.1.pep
VHVQKRICQLLMSKRLCECVHGLGDIFTRYGTSVVAMLA

SEQ ID NO: 182423 - protein, 63 aa, Glycine max
  Clone ID: PAT_MRT3847_135740C.1.pep
STSNGRQSCWNSSFLADDRLDTGLLSRQQRLHRNYAHDITRPVYRPSWLIINRYSLHILAIPT

SEQ ID NO: 182424 - protein, 223 aa, Glycine max
  unsure (1)..(223): unsure at all Xaa locations
  Clone ID: PAT_MRT3847_135741C.1.pep
SVCVNLKLALKGINRVLESRGVAGKLDFRGWREELNEQKRRFPLSYKTFEKEISPRYAVQVLDELTNGEAIVSTGVGQHQMWAAQFYKYKRPRQWLTSGGLGAMGKLSLKILLLNNQHLGMVVQWEDRFYKSNRAHTYLGDPSNENAIYPNMLKFADAYGIPAARVTKKEDLRAAIQKMLETPGPYLLDVIVPQXHQEHVLPMIPSNGTFQDVITEGDGRTSY

SEQ ID NO: 182425 - protein, 645 aa, Glycine max
  Clone ID: PAT_MRT3847_135742C.1.pep
MAAITAPKAAFSVLPSSSHSPNPFVRFAIPYSPHHSQRRSLRISSALSDATTKSSTAAAEAFASRFGLDEPRKGADILVEALERQGVTDVFAYPGGASMEIHQALTRSSSIRNVLPRHEQGGVFAAEGYARSSGLPGVCIATSGPGATNLVSGLADALLDSVPLVAITGQVPRRMIGTDAFQETPIVEVTRSITKHNYLVLDVDDIPRIVNEAFFLATSGRPGPVLIDIPKDIQQQLAIPNWDQPIRLPGYTSRLPKSPNEKHLELIVRLVMESKKPVLYVGGGCLNSSEELRRFVELTGVPVASTLMGLGAYPIADDNSLQMLGMHGTVYANYAVDRADLLLAFGVRFDDRVTGKLEAFASRAKIVHIDIDSAEIGKNKQPHVSVCADLKLALKGINRVLESRGVAGKLDFRGWREELNEQKRRFPLSYKTFEKEISPQYAIQVLDELTNGEAIVSTGVGQHQMWAAQFYKYKRPRQWLTSGGLGAMGFGLPAAIGAAVANPGAVVVDIDGDGSFMMNVQELATIKVEKLPVKILLLNNQHLGMVVQWEDRFYKSNRAHTYLGDPSNENAIYPNMLKFADACGIPAARVTKKEDLRAAIQKMLETPGPYLLDVIVPHQEHVLPMIPSNGTFQDVITEGDGRTSY

SEQ ID NO: 182426 - protein, 87 aa, Glycine max
  Clone ID: PAT_MRT3847_135743C.1.pep
LLCFSTLSKTNRQKTPEFSPTKYPPHHQKKHWDQLWIFFPGGAHFGKKGFKLRLPGLSSVFKRTHYARNLHKMPMFWGKILIKLTCN

SEQ ID NO: 182427 - protein, 203 aa, Glycine max
  unsure (1)..(203): unsure at all Xaa locations
  Clone ID: PAT_MRT3847_135744C.1.pep
QVLDELTNGDAIVSTGVGQHQMWAAQFYKYKRPRQWLTSGGLGAMGFGLPAAIGAAVANPGAVVVDIXDGDGSFIMNVQELATIKVEKLPVKILLLNNQHLGMVVQWEDRFYKSNRAHTYLGDPSNENAIFPDMLKFADACGIPAARVTKKEDLRAAIQKMLDTPGPYLLDVIVPHQEHVLPMIPSNGTFQDVITEGDGRTSY

SEQ ID NO: 182428 - protein, 170 aa, Glycine max
  Clone ID: PAT_MRT3847_135745C.1.pep
TREKDLDVEDTEGQLDLKELSGEGNIENMLFVEQGLRQLASLKVEEALAVALAQHRRPNMLKAGFSDDLKLPIEGQCDAFELSQEEAEDVSFKQAWLAYIWKRAKRHEIEPDIANERFQHWINHNSMTPTSQDAVDVERGLVEIKRLDIETQLWDESRRELEQEIGNSNI

SEQ ID NO: 182429 - protein, 547 aa, Glycine max
  Clone ID: PAT_MRT3847_135746C.1.pep
MTSMESLIGLVNRIQQACTVLGDYGAADNSAFSSLWEALPSVAVVGGQSSGKSSVLESIVGRDFLPRGSGIVTRRPLVLQLHKVDGRAKEYAEFLHMPGQKITDYAFVRQEIQNETDRVTGRTKQISPVPIHLSIYSPHVVNLTLIDLPGLTKVAVEGQPETIAQDIENMVRSFVDKPNCIILAISPANQDIATSDAIKLSREVDPSGERTFGVLTKLDLMDRGTNALDVLEGRSYRLQHPWVGVVNRSQADINKNVDMIVARRKESEYFETSPDYGHLANKMGSVYLAKLLSQHLESVIRARIPNITSLINKTIEELESEMNQIGRPIAADAGAQLYTILELCRAFDRIFKEHLDGGRPGGDRIYNVFDNQLPAALRKLPFDRHLSLQNVRKVVSEADGYQPHLIAPEQGYRRLIEGALGYFRGPAEASVDAVHFVLKELVRKSIAETQELRRFPTLQAEIAAGTNEALERFREESKKTVIRLVDMEASYLTVEFFRKLPQEMEKAGNPANQPTPNVDRYGKGHYRKIGSNVSSYIGMVSDTLRNT

SEQ ID NO: 182430 - protein, 58 aa, Glycine max
  Clone ID: PAT_MRT3847_135747C.1.pep
RLGRKYTITNPRHHHFSTAIECDVQGHSLYTILLYFVFICQGLPQICLIIIFKNSFFS

SEQ ID NO: 182431 - protein, 118 aa, Glycine max
  unsure (1)..(118): unsure at all Xaa locations
  Clone ID: PAT_MRT3847_135748C.1.pep
GFIRVVAFPNTIEHIEPDMNSRVQLLSTTTNGDFVQGKDLAMDKVNVACAVVGLTXSYTTTLXLESGLQKDRGLIVDYFGRMSYVAHHENLPQEKDLLEAHIVFDIKISLLIAKSFLY

SEQ ID NO: 182432 - protein, 63 aa, Glycine max
  unsure (1)..(63): unsure at all Xaa locations
  Clone ID: PAT_MRT3847_135749C.1.pep
TNIKPINSFRMRGFIKHKQQFLFFLTYTKYPFLPKQLIIYYHDKIILTISPESYNNXSVCSTQ

SEQ ID NO: 182433 - protein, 123 aa, Glycine max
  Clone ID: PAT_MRT3847_13574C.1.pep
GSLPLCSFLSVSFSFSLFGERDQSGTASPHRSQKSDNPDKNNSQKHKKIINTIKKISRVLNNKIPSSFFVFFLFQLFPSHQTHTIPAPPFFHSKKVRIQLFSDWYQLVHLFFFFNFFRIFFGS

SEQ ID NO: 182434 - protein, 170 aa, Glycine max
  unsure (1)..(170): unsure at all Xaa locations
  Clone ID: PAT_MRT3847_135750C.1.pep
YICNLRNLETLDIRETNVSKLPKEFCKLKKLRHLLGDNLDLFQLKNGLGGLTSLQTLCDVSIPVDDNDNGVELIRKLGKLKQLRNLSLNGVKEEQGSILCFSLNEMTNLEKLNIWSEDEDEIIDLPTISSLPMLRKXCLVGKLRKIPEWVPQLQNLVKLTLENCKLTDDP

SEQ ID NO: 182435 - protein, 89 aa, Glycine max
  Clone ID: PAT_MRT3847_135751C.1.pep
FEVESESIVVSPDLLLNRRNYYYLRAYGAAVHSNDDAKAFACRYPWCATACGHALLLWACCRVQDAFVRRSTMMHSLSTFKPLIVLSRH

SEQ ID NO: 182436 - protein, 94 aa, Glycine max
  Clone ID: PAT_MRT3847_135752C.1.pep
MSRLGFKHEVYDGDKHVGELDVIPLSSSSTTTPFHNSFRFPNNEIRIHHFSAKSERCPPLSILQTVAAFNVRCKLDSSVATEQKELIAIHASCF

SEQ ID NO: 182437 - protein, 59 aa, Glycine max
  Clone ID: PAT_MRT3847_135753C.1.pep
TTMRKSMWSLPTTKEVWFDSSKTVGCFLRHGVVLSNPGGEAFWPEMKGISIERGPSLQH

SEQ ID NO: 182438 - protein, 76 aa, Glycine max
  Clone ID: PAT_MRT3847_135754C.1.pep
MASNISPSAFDKEQIFGMAEKEMEYRVELFNKMTQTCFNKCVDNRYKESELNMGENSCIDRCVSKYWHVTNLIGQL

SEQ ID NO: 182439 - protein, 83 aa, Glycine max
  unsure (1)..(83): unsure at all Xaa locations
  Clone ID: PAT_MRT3847_135755C.1.pep
XXXXPXTSXSPXXXIPTIXXQLLAQLYXXXPXXKPLXXXFXSQXXPXXTYSEYXPISHNXXXLXXXSTSPXXLAPXXXXXRQS

SEQ ID NO: 182440 - protein, 266 aa, Glycine max
  unsure (1)..(266): unsure at all Xaa locations
  Clone ID: PAT_MRT3847_135756C.1.pep
RRNLLLFTTGIDSLFTLSEWKKWIGALSHREPEKPEPXPDIYSTFVVHDDEDDDGGGTFRRRKSGGGAQPQDDPYATMVFKDNGHDDEDDEDSSLPPLLKRLPKDFGGGAPLDYDDEDDDAGDFGTMIVKSDRSRQRDRPSSGVASPAWKARSPLNRFGGGDDDGDDDDDDGGGFSTFVVRSTVKSGERESVSGTVVRRTSGGGSVGVGVGVGSTMERAVASMQGMGEFGFGKQRKGSGSPQNDEGRHQSITTKGSTSSIPDCVTR

SEQ ID NO: 182441 - protein, 38 aa, Glycine max
  unsure (1)..(38): unsure at all Xaa locations
  Clone ID: PAT_MRT3847_135757C.1.pep
DTTXHHTYFILFQPRLKVPCDHTLGGGTFLYIDLLCRI

SEQ ID NO: 182442 - protein, 91 aa, Glycine max
  Clone ID: PAT_MRT3847_135758C.1.pep
EYAVKVENYTLTKANNLVLNVDGAIGSLFLDLLAGSGMFTKQEVDEIVEIGYLNGLFVLARSIGLIGHTFDQKRLKQPLYRHPWEDVLYTK

SEQ ID NO: 182443 - protein, 63 aa, Glycine max
  Clone ID: PAT_MRT3847_135759C.1.pep
YIQDKCLHRQIKTHAQENCLPRSQKRKNLNHGSSHICSIHCKELSYVSHSWSRLRVSLQTRKC

SEQ ID NO: 182444 - protein, 542 aa, Glycine max
  unsure (1)..(542): unsure at all Xaa locations
  Clone ID: PAT_MRT3847_13575C.1.pep
MAREQIQVLNALDVAKTQWYHFTAIIIAGMGFFTDAYDLFCISLVTKLLGRIYYHVDGAAKPGTLPPNVSAAVNGVAFCGTLSGQLFFGWLGDKMGRKKVYGMTLMLMVICSIGSGLSFGHRAKSVIATLCFFRFWLGFGIGGDYPLSATIMSEYSNKKTRGAFIAAVFAMQGFGILAGGIFAIIISVAFKERFDAPPYELDPAGSTVPQADYIWRIIRPXVMVGALPAALTYYWRMKMPETARYTALVAKNTKQAAADMSKVLQVEIQAEPQKEEQKANSYGLFSKEFLRRHGLHLLGTASTWFLLDIAFYSQNLFQKDIFSAIGWIPPAKTMNAIEEVYRIARAQTLIALCSTVPGYWFTVALIDKIGRFAIQLMGFFFMTVFMFALAIPYDHWTHKDNRIGFVVIYSLTFFFANFGPNATTFVVPAEIFPARFRSTCHGISSASGKLGAIVGAFGFLYLAQNKDKSKADAGYPAGIGVKNALIVLGVVNILGFFFTFLVPEANGKSLEEMSGENDEDVGTQEESEQSHSQNNNRTVPYV

SEQ ID NO: 182445 - protein, 64 aa, Glycine max
  Clone ID: PAT_MRT3847_135760C.1.pep
TIDVFIDLFKELAFLTKERDAHSLCGLLPPTFSSQQLQENKLMNNISLYQVPLQKYVAMMDLHV

SEQ ID NO: 182446 - protein, 250 aa, Glycine max
  Clone ID: PAT_MRT3847_135761C.1.pep
HRFVGGLIPEHMREMGIELKKGFSRLTDLFTRLTDLLKEGMDGEVNIGIASNQAEEWYPLFGSLLSRSQGNWELWTAFTVEDPEDNPPMARWLTLSESGALFDIEVNASPILAAEMLRRNLWNVAYGCLVTSATLTALGTFDRFRMRAGLPKKAVTAVVPSPFHHADAGVLRVPDLKADPRDAAAHTAAIIRDLPELVEGSRGTLVLFSSRKQMQDVFDGLDRDWRKQVFIQGNLSKQETLNKHKARVDG

SEQ ID NO: 182447 - protein, 57 aa, Glycine max
  Clone ID: PAT_MRT3847_135762C.1.pep
CYVQTFLPLTLSSTLLPLGSFLQIVLSHNSAPNTHPLPFHFYLSKPPLLTLIPTITL

SEQ ID NO: 182448 - protein, 67 aa, Glycine max
  Clone ID: PAT_MRT3847_135763C.1.pep
LNRLSHYAIQPARSDDLLHTVSSWQIVLQGSYSRSHLCHQASSVLCSPDSQVAPNSTDHGPYVRHPQ

SEQ ID NO: 182449 - protein, 58 aa, Glycine max
  Clone ID: PAT_MRT3847_135764C.1.pep
LSPGIGFLPLQAAYAKSQERPLPGGPEPSVRYHSRKSWDYNLVTDPQAMGQAHADNFH

SEQ ID NO: 182450 - protein, 49 aa, Glycine max
  Clone ID: PAT_MRT3847_135765C.1.pep
QWCFRSLNEVNSNPIYAIVILGYSFVRWHKLKPVFYYILYYHLSTLTSS

SEQ ID NO: 182451 - protein, 144 aa, Glycine max
  unsure (1)..(144): unsure at all Xaa locations
  Clone ID: PAT_MRT3847_135766C.1.pep
MLLIDLGNKMNQEMNGVEAERVKVNVHDKLHXVFSAVVIGDPAVGKTQILSRFAKNEFCFNSKSTIGVEFQTRSVTINGKVIKAQIWDTAGQERYRAVTSAYYRGALWAMLVYDITKRQSFDHVARWVDELRAHADSSIVIMLI

SEQ ID NO: 182452 - protein, 97 aa, Glycine max
  unsure (1)..(97): unsure at all Xaa locations
  Clone ID: PAT_MRT3847_135767C.1.pep
MNQEMNGVEAERVKVNVHDKIDYVFKVVVIGDSAVGKTQILSRFAKNXFCFDSKSTIGVEFQTRTVTINGKVIKAQIWDTAGQERYRAVTCAFYRGA

SEQ ID NO: 182453 - protein, 55 aa, Glycine max
  Clone ID: PAT_MRT3847_135768C.1.pep
FHKKFFLFFVTTFINTFFNTFFTLIYKPYPISLTNQYIALQIYLFLNKNIILPIP

SEQ ID NO: 182454 - protein, 103 aa, Glycine max
  Clone ID: PAT_MRT3847_135769C.1.pep
ACQNYCPPPKTPLLVLGTPIYLGLVYLLLKFVFFPLIGIRLFFWSVRRSYNHMCLVWGFSGSYWPLFGLTRNILCGAPPSRDRASPPPPPPPPPPLPPPPPPP

SEQ ID NO: 182455 - protein, 83 aa, Glycine max
  Clone ID: PAT_MRT3847_13576C.1.pep
NQRGETYIELNINNFLNFAPLLLGFNIGVLKRRHDLLCFPSMLKNGQNKVEHPGNPVTKRVWMIKGGPKSTESRLKELENELL

SEQ ID NO: 182456 - protein, 93 aa, Glycine max
  Clone ID: PAT_MRT3847_135770C.1.pep
PPCDSPSPSSASSPCRSRLPRRSRVSNTTSPNARPTSLTPGCWATSSATSRTSGTTGTAAGKSTTVPRRGRSATTSANASTSQRRRATSGRRT

SEQ ID NO: 182457 - protein, 59 aa, Glycine max
  Clone ID: PAT_MRT3847_135771C.1.pep
TYNPHLTSTLFTISLQQKIQRFNAHYKRFQTTFLERRYCIVQDILKEHKLSCYQKYYIL

SEQ ID NO: 182458 - protein, 130 aa, Glycine max
  unsure (1)..(130): unsure at all Xaa locations
  Clone ID: PAT_MRT3847_135772C.1.pep
WVFIQTSFVFVLGTXMVVALVNLLVDPGNTFFEVPRFLVFLIPLIFLPLPPNSSEPGSVIILVSRDKRQTAXLTFFDLYGPVTMNNVLCLSVFLALAYARGWTWNFFSKVLVIFVVGMAVGVFASWPTVF

SEQ ID NO: 182459 - protein, 78 aa, Glycine max
  Clone ID: PAT_MRT3847_135773C.1.pep
TLKSIFLFSEINLYKFIHKNHKKTKIIKTMSLIPLSRTIHSLQRFKLFSPSSCFSDTLLTHLRDPLIACLWGSHAPHP

SEQ ID NO: 182460 - protein, 266 aa, Glycine max
  unsure (1)..(266): unsure at all Xaa locations
  Clone ID: PAT_MRT3847_135774C.1.pep
CDVNNGTRGDLRCSMAKDVVTIRNETLNFNGDKNCIENLSGGIEGTMLKDMSSDFQKKVTFTKHDKGGNEAGFLYGNDETYKXLAEIERDDLLLDQLLQSRRSCPEQSTARGPKFDPEASLGVRHADLAGLARTCEVFRASGLAIADTKIINDKQFQLISVTAEKWVPIIEVPVDSIKIYLQKKKKEGFSILGLEQTANSVPLDQYIFPKKMVLVLGREKEGIPVDIIHILDACIEIPQFGVVRSLNVHVSGAIALWEYTRQQRSQ

SEQ ID NO: 182461 - protein, 133 aa, Glycine max
  unsure (1)..(133): unsure at all Xaa locations
  Clone ID: PAT_MRT3847_135775C.1.pep
MTEIERDDLLLDQLLQSRRSSLDQQKASRQNFILVASLLDRIPNLAGLARTCEVFRASGLAIADTKIINDKQFQLISVTAEKWVPIIEVPVDSIKIYLQKKKKEGFSILGLEQTAXSVPLDQYIFPKKMVPGS

SEQ ID NO: 182462 - protein, 97 aa, Glycine max
  unsure (1)..(97): unsure at all Xaa locations
  Clone ID: PAT_MRT3847_135776C.1.pep
MASTPMTLTFEDVAKHSNKKDCRIIINGKVSDNTPFLDEHPXGDEILLTSTGKDASIDFEHVGYIDSAIEIMERYFIGKVDTSTLPHTFIHNLQHPI

SEQ ID NO: 182463 - protein, 149 aa, Glycine max
  unsure (1)..(149): unsure at all Xaa locations
  Clone ID: PAT_MRT3847_135777C.1.pep
YTCGNRGGSKQRGAXALYGLLVLAHQGLFQYPLQYFDVIKGSTGHHKTSICVDQSRSSQANDVRKQIVASADPVLKYAXSSFRRLVGHSTVASHAQGGRPVVTCRVYPSEAIYGAVRMLLFAHASTATVTAARNGWQMNFAYKRPIHPG

SEQ ID NO: 182464 - protein, 53 aa, Glycine max
  Clone ID: PAT_MRT3847_135778C.1.pep
KTHIKPLFYSLSPTKRIAWYIQRFTRTPPRHNSLFCISFYVIPRSPQRMGITP

SEQ ID NO: 182465 - protein, 79 aa, Glycine max
  Clone ID: PAT_MRT3847_135779C.1.pep
ARPRADSARGKAAEAAAAMISSGNNGKFVERTGSLDSSYNSVTAKMSSPYSEDTDDDDSPKKKNTNMLKKIGVLWKKTH

SEQ ID NO: 182466 - protein, 125 aa, Glycine max
  Clone ID: PAT_MRT3847_13577C.1.pep
QQKRNRAPEPFPLPPKPETPYVLDLPPGEGMRNLPNSGPRGFPKKGPLPLPKKDPRPPPYTGTLGARPKKGPPPAGWGPPPLAPIKNRGGGAPPLRGDWAAAGKGGAGNPPKPPLFKKKENNCPP

SEQ ID NO: 182467 - protein, 91 aa, Glycine max
  unsure (1)..(91): unsure at all Xaa locations
  Clone ID: PAT_MRT3847_135780C.1.pep
TSTPXINHFLILIINTFYSNKKIFLLKLITNSSNAFNKILFKSLTNKSKLYAQPYFFIHIIPYNTNNTLTIFYNFIFMTKSYLLNNFVTIS

SEQ ID NO: 182468 - protein, 89 aa, Glycine max
  Clone ID: PAT_MRT3847_135781C.1.pep
AANSEVEAELRRLKVQSDQWRKAAEAAAAMISAGNNGKFVERTGSLDSSYNSITAKMSSPYSENTDDDSPKKKNTNMLKKIGVLWKKNH

SEQ ID NO: 182469 - protein, 42 aa, Glycine max
  Clone ID: PAT_MRT3847_135782C.1.pep
GSLYGYMLKEFLNVLFQKTMSCGVNYVNLMRAPHIYYVCLFR

SEQ ID NO: 182470 - protein, 55 aa, Glycine max
  Clone ID: PAT_MRT3847_135783C.1.pep
FKVGNPDIKLTLGWPQYTPIGPLPPYITSVPLLSFISPCLSHTPKMQCMIQTPQM

SEQ ID NO: 182471 - protein, 118 aa, Glycine max
  unsure (1)..(118): unsure at all Xaa locations
  Clone ID: PAT_MRT3847_135784C.1.pep
SLPDADIFASVSFTAQHGQLPKGFYXDLTRFQAPLDFPSGFKLPNATLSLQQQIVGPVSFRVDSGITVDLKNPDWPIHAPEPVFALEYALQVLGSAKAVAWYCPKRQEFMAELRFFET

SEQ ID NO: 182472 - protein, 209 aa, Glycine max
  Clone ID: PAT_MRT3847_135785C.1.pep
MKSTMLLAFALVLALSSQPLLGGAEASPEQVVDTLGKKLRVGTNYYIVPSLPYTKIRTTRGLGLASVGKPYCPLDVVVVNGYHGLPVTFSPVNPKKGVIRVSTDLNIKFSARTSCPRQYSTVWKLDDFDFSKRQWFVTTGGVVGNPSLETIHNWFKIEKYDGAYKLVYCPSVVKCPKHLCKNVGLFVDEKGNKRLALTDVPLKVQFQQA

SEQ ID NO: 182473 - protein, 84 aa, Glycine max
  Clone ID: PAT_MRT3847_135786C.1.pep
SSEKLHDYCVGSVRPKELRHPAAPQRAIMPGLSGVGKSRCTAILTSVPLMAALASSCSEKRDDQNHSPNRPNPKRQCIVFLFLL

SEQ ID NO: 182474 - protein, 45 aa, Glycine max
  Clone ID: PAT_MRT3847_135787C.1.pep
VRLRLPFLLHLKMILWTTTSKTKNQEAIAPLLHAASHSFKLPLKK

SEQ ID NO: 182475 - protein, 198 aa, Glycine max
  Clone ID: PAT_MRT3847_135788C.1.pep
MNPPEFPSGSCGTSSPPGKKELQLQGTRPPPLRVSKDSHKIRKPPLPPTAHQPAALPEHRKPVIIYAVSPKVLHVPAGDFMNVVQRLTGPSSGDVSPAARLASIERTSPSEREKVHSEDNDVKLMLEGVEVGQFPGILSPATLPPISPGFFSEPQTTSFWNDLSPFWSTNSFVASPSGLLSGALVSPLPSPDIFNLFD

SEQ ID NO: 182476 - protein, 84 aa, Glycine max
  Clone ID: PAT_MRT3847_135789C.1.pep
FIRLIARFCMLCSQNEERLSRADPGWSGHGRGGLSERKKKINGAMSTYVRLVDQTIRYTTPRIIPSFYRGEIKKKKRYSDRAVR

SEQ ID NO: 182477 - protein, 629 aa, Glycine max
  unsure (1)..(629): unsure at all Xaa locations
  Clone ID: PAT_MRT3847_13578C.1.pep
VVSAPMPTRARSSESARFEMLNDQHSAIVLHNVNASIHSVARLAPLLPTMQKELPIFPLLSMPILPCPRVCLWCVSCCGNPPMYNXYSYVLPSIPVLSGXNRRVLGPKSLSGQTWILRQDNTQHESSVMIQDQNQYTPHDQSKDLIREGSSNEDRQSRAELXNLGQMGCTLTLXQYSSFLLAFTLGLIYRHPYPNTYVITSASARKICSLSWPIFWSPTSGISRGNSNLRSSVDGIQIKQSSKFIIINDLRGKVVHMDVVKRKGKEHEKLLISDDDAPQDKKKESSWNSNLLKWASGFISSNEQPKNAETNSPEKGRGGRHGKTINIFSIASGHLYERFLKIMILSVLKNTHRPVKFWFIKNYLSPPFKDLIPHMAQEYGFECELITYKWPTWLHKQKEKQRIIWAYKILFLDVIFPLSLEKVIFVDADQIVRTDMGELYDMDIKGKPLAYTPFCDNNREMDGYRFWRQGFWKDHLRGKPYHISALYVVDLKKFRETASGDNLRVFYETLSKDPNSLANLDQDLPNYAQHIVPIFSLPQEWLWCESWCGNATKSKAKTIDLCNNPMTKEPKLQGARRIVSEWPDLDLEASKFTARILGDDLEPLQSPNQSKDLTSEGALKEDLESKAEL

SEQ ID NO: 182478 - protein, 44 aa, Glycine max
  Clone ID: PAT_MRT3847_135790C.1.pep
KELQYIDSLLMVLFHYEACCFSLINKFGVYYYYNVLYQMELPFP

SEQ ID NO: 182479 - protein, 114 aa, Glycine max
  Clone ID: PAT_MRT3847_135791C.1.pep
KLFKCWVIFSVQAFLLLGQVIKFGFFPKKLNLVTPRFFQFIFFKNPPPLSYFFFFLYNNYFISFYVYFFFFFFFFFSLFFFFFFFFFFFFFFFFFFFFFFFFFFFFPRVRPRVR

SEQ ID NO: 182480 - protein, 66 aa, Glycine max
  Clone ID: PAT_MRT3847_135792C.1.pep
HLEMRGKHSFLSRHKNFSRALPLFVTRGEPPANLRSLNSLPLRPLSHVWRGNNTHQRERRQQRQQM

SEQ ID NO: 182481 - protein, 66 aa, Glycine max
  Clone ID: PAT_MRT3847_135793C.1.pep
ALATILLASPAALYPQSHSSTSHLNFFHSQTLSSPLYTSFDNLSAYPTYTLSPTHPEHCGKRDPKT

SEQ ID NO: 182482 - protein, 43 aa, Glycine max
  Clone ID: PAT_MRT3847_135794C.1.pep
SASYQDNIPEKADHIFTTKSVFRDETSYTNYVNYNNFETLSSF

SEQ ID NO: 182483 - protein, 109 aa, Glycine max
  Clone ID: PAT_MRT3847_135795C.1.pep
MGNCASYPKTNEGEAPVPVPVPEPVAEEVKVEQQENKAEENVVEAKTEETPVASADNSLVTLLNENEEKKEEQFEAKEVKAEAPKEEKAQAEDAKPETNEEKPAAKAEN

SEQ ID NO: 182484 - protein, 200 aa, Glycine max
  Clone ID: PAT_MRT3847_135796C.1.pep
LVFEVSKMTSPYINCSVSLFIAFGNLADDTITSEAFPLKLAHCGEIQEKVVLKFSHEDFLTAWPTQVRPATTLLADGCPYLHAMVHDSSMSTIPRDYVIGVKLATINTMCAYGLNPAISGSRVLGSIPHSISQQTVWHEVATVRTPLHHDPSKHSCCHFSIDLLGGGMVVDKTADRITLIHYSPILHCVTVGAWLKGLIV

SEQ ID NO: 182485 - protein, 146 aa, Glycine max
  Clone ID: PAT_MRT3847_135797C.1.pep
MYKMWTQAGSLMASTMFIYTMFMRFFPSPLQARVRRYTNKFTSFVYPYIRIRFHEFTGERLMKSEAYNAIQTYLSEHSSQRASKLKAEAIKVKDTRTPLMLSMDDNEEIIEEFQGVKVWWGSYKTTSKTQSFPWNSSSDEKRYYKL

SEQ ID NO: 182486 - protein, 39 aa, Glycine max
  Clone ID: PAT_MRT3847_135798C.1.pep
MNVDVVKERLKLVFRSVIFDIVMINLEIMDGYLVYEYIV

SEQ ID NO: 182487 - protein, 82 aa, Glycine max
  unsure (1)..(82): unsure at all Xaa locations
  Clone ID: PAT_MRT3847_135799C.1.pep
KLWSRWSADNHFHDAVLADYNPADGRHALVYDSNTVNESXEWVDLNEISPEDIEWEGEHPGILHRSGHGGQCGGGMRFFGHR

SEQ ID NO: 182488 - protein, 49 aa, Glycine max
  Clone ID: PAT_MRT3847_13579C.1.pep
NSCQTHQTSMQKNKNINETSMCKPPELKRDLSGHAFLFHTDKFHFQNLM

SEQ ID NO: 182489 - protein, 48 aa, Glycine max
  Clone ID: PAT_MRT3847_1357C.1.pep
DPQMLTHCMPIRSIYNLGRPSNVVTGCLRVPPLPLLRRVQTWRNQNPN

SEQ ID NO: 182490 - protein, 580 aa, Glycine max
  Clone ID: PAT_MRT3847_135800C.1.pep
AASAPPFHLGGFAHRVLRGQARAMVAVHPTASAICGALPLWPDSSLGGLVAVIGAWRDRIIMCTGTYGPTPALVLAVRASAADPVVGASSAPPPSLPVTLDGRFEPVVVRCDMELDETDPTNWLKLESAIEEYIQKNHHAFENVCDRLLLPFQHEEKWSENLRSKLPKTKESLEGADGPTLGWRRNVLLVEASHNPDSGRVIHHARELESFCARNGIRLSLMQGLSGIVKTVPSTTFPTPFQSPLFTGSFPSSPRMFSPDLGQRIGRIDLVPPLSLDGQLGKTIASPPMSPRGLRQLSFPVKSLHEKLQNSPQVGVIHLALQNDSDGLIVSWHNDVFVVAEPGELAEKFLQNVKFSLLSTMRSHRRRGASLLANISTISDLVAFKPYFQIGGIVHRYLGRQTLVMEDDQEIASYMFRRTVPSMHLSPEDVRWMVGAWRDRIIICTGTYGPTHALIKAFLDSGAKAIVCSSSEPPESQSITVDGYIEWNVMENGKFEIGEDEADDENIPASPVSDWEDSDAERNVDHTFSFWDDDEEELSHFVCQLYDSLFREGASINVALQHALASYRRMRYVCHLPGVQ

SEQ ID NO: 182491 - protein, 36 aa, Glycine max
  Clone ID: PAT_MRT3847_135801C.1.pep
LQEQNSRPSLLCLIRVLPASWMRKEKVWVEKKQEKA

SEQ ID NO: 182492 - protein, 120 aa, Glycine max
  Clone ID: PAT_MRT3847_135802C.1.pep
MSLPLYFITEPGITAGIEVSRTQGDAFLVLDKLLGNNLFLISSFFPMTTRNGQIKNFTLNFGPQHPAAHGVLRLVLEMNGEVVERAEPHIGLLHRGTEKLIEYKTYLQALPYFDRLDYAG

SEQ ID NO: 182493 - protein, 152 aa, Glycine max
  unsure (1)..(152): unsure at all Xaa locations
  Clone ID: PAT_MRT3847_135803C.1.pep
VPVYIGAQVLASVSAAFALKLIFHPFMSGGVTVPSVGYGQAFAAEFMVSFTLMFVVTAVAGGTXVMREFPGIIMVQVREFPGMMVGATVMINILMAGAATGSSMNPARTLGPAIAAHNYKGIWIYLTAPILGSLCGAGAYTVLKLPDRNTTM

SEQ ID NO: 182494 - protein, 93 aa, Glycine max
  Clone ID: PAT_MRT3847_135804C.1.pep
APLFFFFTAGSSPEENPSRCTIFRDYPPAFITSTLGPVTQVLHDRHRFFGLVCWPSRLPFYVVVSAFVISAGLKSNGIRAPTILVTFTAGQQC

SEQ ID NO: 182495 - protein, 112 aa, Glycine max
  Clone ID: PAT_MRT3847_135805C.1.pep
MRESRFHRTRLVLRLQHSLRVRQGQSDYLNRLNQYRQRVWTCKITGKSGLTYEEALVLEKHAAEKVQQIPEELVAPALRIIHYRNRKNQSHDTGKKENHEVQANQPPKDQKT

SEQ ID NO: 182496 - protein, 63 aa, Glycine max
  Clone ID: PAT_MRT3847_135806C.1.pep
GGTLDIYAYESRDLILGLRRVRALVASDFSVDRIRYIRLWPPRKGRTADAPLTQAVLFFGLVF

SEQ ID NO: 182497 - protein, 122 aa, Glycine max
  unsure (1)..(122): unsure at all Xaa locations
  Clone ID: PAT_MRT3847_135807C.1.pep
PLFWLLPVLLAGHSQTIFRRTCNFPYVPMVVADNLQRLSILMLADFVPGSKTSILXKAFNWNPLATFFLAKIPPGLVNLSVETPSGSSITAFFILLVKAYVLSIVIGIADYFGIKLKFWGGR

SEQ ID NO: 182498 - protein, 121 aa, Glycine max
  unsure (1)..(121): unsure at all Xaa locations
  Clone ID: PAT_MRT3847_135808C.1.pep
PEKFLRDIATWDKADSALTEPLHDSGKLWQMNEGDGAYYVPKIDIYVSDALIRKFQCAALHLDFHLPDRFKTQFLTEDEAKIERPAMIHIAMLXSVERMFAILVXHYRGKWPLWLRPRQAI

SEQ ID NO: 182499 - protein, 274 aa, Glycine max
  unsure (1)..(274): unsure at all Xaa locations
  Clone ID: PAT_MRT3847_135809C.1.pep
MSEKPSSSLTSTVAAREVDPLLQDLNEKKQSFRRNVVSLAVELKELRSRLASQEQSYAKETQTRQEAETNAKNMELQIGRLQKNLEEKNEQLQASTSSAEKYLKELDELRTQLVATRATADASAASAQSAQLQCLELVKELDEKNGSLREHEDRVLRLGERLDNLQTYHQDRKAFLRXSIKLHCVKKKKKRRVLKKKVLKLEFXEQEARIQTRKLQRMGERRDKAIKELRDQLAAKQQREVAAADKLNQNFWDTSGFKMVVSMSMLILVVFSRR

SEQ ID NO: 182500 - protein, 51 aa, Glycine max
  Clone ID: PAT_MRT3847_13580C.1.pep
CIIYHQSFVVPQTLSVEMILAQILINLTFDEQEALYWRLGEILQQGITRKS

SEQ ID NO: 182501 - protein, 58 aa, Glycine max
  Clone ID: PAT_MRT3847_135810C.1.pep
YIKRPWANSWAKGVQKLDKQANFSSIPRPGDFLTKFKNGKNKLATIFDWSRIPNFEKT

SEQ ID NO: 182502 - protein, 60 aa, Glycine max
  Clone ID: PAT_MRT3847_135811C.1.pep
MGKVKIGINGCGRSGRLVARVARHRDDVARVAVNDPFITTEDMTYMFKYDSVQGHWEHHE

SEQ ID NO: 182503 - protein, 85 aa, Glycine max
  Clone ID: PAT_MRT3847_135812C.1.pep
SEMAPQADFGKFGFEIEKLFGRQKSFGNGNAPATHQNLCQYKFYPTYGATKVVHMHVEDVKCNEAASRFISEKRTELQMKGLFGQ

SEQ ID NO: 182504 - protein, 65 aa, Glycine max
  Clone ID: PAT_MRT3847_135813C.1.pep
YLHLRLAILSCLCCVAFVRGGMRFCLAFGCTFTCLSRNGCGGSDCTDCFYPCFKLFLLRECSPVL

SEQ ID NO: 182505 - protein, 198 aa, Glycine max
  unsure (1)..(198): unsure at all Xaa locations
  Clone ID: PAT_MRT3847_135814C.1.pep
MGEQDVENELLXYDEDEETRYXEESTPGALKKDVKGSYVYIXSFGLRDFLLMAELLRGIVEWGFEHPXEVQNECICXAILGMDVLCQXKSGMGKTGVFVLGXLEXIETVNGQVXVLGMCQKREVGLEMRGEGEGLCRDMGRGEGGGVFGGLWVGRDEGGGGKEWGGGGGGGEGGGGGWWVGGGGWWWWGGGVVGWDGG

SEQ ID NO: 182506 - protein, 95 aa, Glycine max
  Clone ID: PAT_MRT3847_135815C.1.pep
MIPPVEMDDKWVQCDRCQKWRLLPVGTNLDSLPEKWLCSMLDWLPDMNRCSFSEDETTKARIALYQGPPLDSQSNLQNVSGSVMLGGTMAMSQHP

SEQ ID NO: 182507 - protein, 39 aa, Glycine max
  Clone ID: PAT_MRT3847_135816C.1.pep
QAFLTSSHYYQVLNCSTLYKSHAISVVASLDWSTENLDI

SEQ ID NO: 182508 - protein, 77 aa, Glycine max
  Clone ID: PAT_MRT3847_135817C.1.pep
ENKKKKGGWRIIQKGGVFVETNKFNMVGSCLIRGHYGLYNSQSPHFSSPFFSSSCFNLKLSRAGCIRLIVIFGSQAR

SEQ ID NO: 182509 - protein, 123 aa, Glycine max
  Clone ID: PAT_MRT3847_135818C.1.pep
AVYFPDFLNPKTVSWWVAEIRRFHELVPVDGLWIDMNEASNFCSGKCTIPKGKVCPSGTGPGWICCLDCKNITSTRWDDPPYKINASGVQAPIGFKTIATSADHYDGVLEYDAHSIYGFSQAI

SEQ ID NO: 182510 - protein, 69 aa, Glycine max
  Clone ID: PAT_MRT3847_135819C.1.pep
ILCGIRDCTLRFRCILCQIMPVTISSVFFFQTKKNCSGPPLYLLAPLPVGLRSPKKKRSLVPLSAFSSG

SEQ ID NO: 182511 - protein, 91 aa, Glycine max
  Clone ID: PAT_MRT3847_13581C.1.pep
FHIWVEWREHSNRTSKWKNESDTEHEDDDSCCEGSSSDRTVLGLPPTGPLKIEDVKNAFRLSALKWHPDKHQGPSQAALMVNGFQCLQRDN

SEQ ID NO: 182512 - protein, 69 aa, Glycine max
  Clone ID: PAT_MRT3847_135820C.1.pep
DTFWRMPECYIHGFSIQYLMGPLELIDRVQEETKSHTDRKPLVVGLSNITEVSYDASWLTLTKMNCYLP

SEQ ID NO: 182513 - protein, 171 aa, Glycine max
  unsure (1)..(171): unsure at all Xaa locations
  Clone ID: PAT_MRT3847_135821C.1.pep
MADAAADLEDAGGSAVIKDVFAGAVGGMAQVLIGQPFDILKVRLQTSPVPTTALATARNIYTHEGALAFYKGTLTPLIGIGACVSVQFGAFHAARRWFEARNAAAHKGAGLLRSKDLSYTQYYLAGXSPGISNTVLSAPIEHVRIRLQTQPHSXRPRLYSGPVDCVRQLCS

SEQ ID NO: 182514 - protein, 58 aa, Glycine max
  Clone ID: PAT_MRT3847_135822C.1.pep
FGHPTMTLSIMYSTTLLIVLTLSMPPFKISLMITRHNISNKLNAHILIYIFFKCIIID

SEQ ID NO: 182515 - protein, 122 aa, Glycine max
  unsure (1)..(122): unsure at all Xaa locations
  Clone ID: PAT_MRT3847_135823C.1.pep
MKLTALGLLVATILAAWPWHANDMLPIRMNTVYGAQTAEARCPXWTLAEEAHNMYGFETIPKECAETPKEYMHGKQYSSDYNTGNQHAYLYARDLIVHPKDTFVFSIDGPVLSNIPYYQKHG

SEQ ID NO: 182516 - protein, 74 aa, Glycine max
  Clone ID: PAT_MRT3847_135824C.1.pep
KGYIEPSQSAIYLGEKSVIIRSFHVFQCCGGMSSEVSVCKVLHSRESGVTSSTNRLSLNPSVSSHPLLSSSRSR

SEQ ID NO: 182517 - protein, 143 aa, Glycine max
  Clone ID: PAT_MRT3847_135825C.1.pep
MVQLMKNSRKPETSSCGDPVKLEIVEDPLEEEHGPHNKRCKPSPSPSPQPQQWSASDDGSVSSPSHLNILDEPSPLGLRLRKSPSLLDLIQMKLSQGSAQPSEDLSSGAKRESRAAAVSGAGGADKLKASNFPASLLRIGSWE

SEQ ID NO: 182518 - protein, 57 aa, Glycine max
  Clone ID: PAT_MRT3847_135826C.1.pep
ARGEVFTATFLPIVEGQARARGRGSRESNEQPQTKATEILYVSGGLRGIKIGSTSGG

SEQ ID NO: 182519 - protein, 127 aa, Glycine max
  unsure (1)..(127): unsure at all Xaa locations
  Clone ID: PAT_MRT3847_135827C.1.pep
MMTEPSILCDDKLELANTHEFFAGHSPADSWLPIFVNCLYPVSHLPSEAVAANVACRNARGDLPTTANLSSAEHNQASYIDILILTALXGKGKKMVIITTVDPFPVPVLADLFGVMNEILSSNATNP

SEQ ID NO: 182520 - protein, 365 aa, Glycine max
  unsure (1)..(365): unsure at all Xaa locations
  Clone ID: PAT_MRT3847_135828C.1.pep
TKRLSQILRLNRTTFINLVHSNIGDGAIVMNNFLQHLQESRYPGMDVILAETEAMLARGKMDMPITTCFAVTRNDDLLLHRLLKRGSDPNELDRSGKTALHIAASKGNEHCVNFLLEYGADPNSKDMDGSVPLWEAMKGRHESVMKILIDNGADISFADAXHLACSAVEQNXVGIAQEIIPCGMDVTQPKKNGATALHTAVVEGNTEMINFLVDQGADIDMQDVNGWTPRVLAEQSESEEIKNIFHDIKDSRKPGVIPISKNDNRSGRFQIDPSMLTIPQESMLLPPYDGRRRSSSSFDNSIFGMMSTANRAKKDLQASESRSTRRSVNGLARVTLSCPEKGEHAGKLVLLPKTLEKLLEFGARK

SEQ ID NO: 182521 - protein, 119 aa, Glycine max
  Clone ID: PAT_MRT3847_135829C.1.pep
IIVITQTKSANFNTRKMYITFTLNESNLRAISRVIKTTRQRKEDEDEIIPLEFSPPVSLSRSESECEDDDSSSSLHGIVLFIVRTTHEDREVTERESSDTGWVLVGGCFRNWNLDSDEK

SEQ ID NO: 182522 - protein, 91 aa, Glycine max
  unsure (1)..(91): unsure at all Xaa locations
  Clone ID: PAT_MRT3847_13582C.1.pep
AIPVDPKKGNLGIIAPIAIGFIVGANILLGGAFSGAAMNPAVTFGPAVVNRTWINLWIXWEGPLIGDGTCGLIYKDVLISNTHEQFPSTXY

SEQ ID NO: 182523 - protein, 204 aa, Glycine max
  Clone ID: PAT_MRT3847_135830C.1.pep
KGLFLLHQNPNSNSESSHQQEPNRCRCSLSVTSLSSCVVRTMKRTMPWSDDDESSSSHSDSERDSETGGENSKGKSRKQKTEKSGVIDFEALKRHGYRGGPSVLKVPAPKEDDSKQDWSWSTGKEKRVDKEIEESYEERKKTREAISLGEELPAALTRNDKKNISFSQKEKRKRELGQASRGKNYVEEEKRLLRENGIYSGFDA

SEQ ID NO: 182524 - protein, 153 aa, Glycine max
  Clone ID: PAT_MRT3847_135831C.1.pep
QCLVRTMKRTMPWSDDDESSSSHSDSECDSETGGGNSKGKSRKQTTKKSGLIDFEALKRHGYRGGPSVLKVPAPKEDDSKKNWSWSTGKEKHVDKEIEESYEERKKTREAISLGEELPAALTWNDKKNLSFSQKEKRKRELGQASRGKNYVEE

SEQ ID NO: 182525 - protein, 110 aa, Glycine max
  Clone ID: PAT_MRT3847_135832C.1.pep
AKGKIKSMKENYLPELNEMYQKSASKLQRHTSLPQQPKSYKLEKLKKFMKMLECAIAFLQVSNRASAPACGLKLDSCEKQIIKIININRPKKIVPPLQYGQFPPPHMQSH

SEQ ID NO: 182526 - protein, 139 aa, Glycine max
  Clone ID: PAT_MRT3847_135833C.1.pep
LCSSDSTLGPGGLDLSQAFFRPINNAVPPSPTKRHNKISDLCIVTGGARQISGESRLNLLQRNLSLFRAIIPPLVRYYPDTTLLIVSNPVDVLTYVAWKLSGLPSNRVIGSGTNLDSSRFRFLIADHLDVNAQDVQVNQ

SEQ ID NO: 182527 - protein, 73 aa, Glycine max
  Clone ID: PAT_MRT3847_135834C.1.pep
FRSIEFQIGNLGSILVGWLSFINDGKEKCSFQLFLASTLKMLCTGTLYFYGKILGWVEFRVSIRDVCLNIQLN

SEQ ID NO: 182528 - protein, 325 aa, Glycine max
  unsure (1)..(325): unsure at all Xaa locations
  Clone ID: PAT_MRT3847_135835C.1.pep
SNPHFYTNVTKNPFAVSLQCSPRLASFSDGVVSGHCLRRKQQRQLRDAEAAVRSGSPAAGLRLDGPVYGEGREDHSGDADGERARDYSDDHDGGNGAAREARARRSEKRRPRGTGEAGQVDERVGGGDREEFERSASAGAGFSQIGDDDDGEEDLSQAFFRPINNAAPPSPTKRHNKISVIGAGNVGMAIAQTILTQDLTDELVLVDTNSDKLXDLCIVTAGARQISGESRLNLLQRNLSLFRAIIPPLVRYSPDTTLLIVSNPVDVLTYVAWKLSGFPSNRVIGSGTNLDSSRFRFLIADHLDVNAQDVQVNQCHFPFFLFFKL

SEQ ID NO: 182529 - protein, 352 aa, Glycine max
  unsure (1)..(352): unsure at all Xaa locations
  Clone ID: PAT_MRT3847_135836C.1.pep
MHKSASGSTLGPGGLDLTQAFFRPITNAAPPSPTKRHNKISVIGAGNVGMAIAQTILTQDLTDELVLVDTNTDKLRGEMLDLQHAAAFLPRTKINSSADSSVTAGSDLCIVTAGARQIVGESRLNLLQRNLSLFRAIIPPLVRYSPDTILLIVSNPVDILTYVAWKLSGFPSNRVIGSGTNLDSSRFRFLIADHLDLNAQDVQAYIVGEHGDSSVALWSSISIGGVPVXLSFLEKPTTLGMRKRRLENIXQXVIDGAYEVIRLKGYTSWAIGYSVANLARSFIRDQRKIHPXVSVLAKGFYGIDGEVFLSLPALVGRGGVLSVTNVHLNEEETQRLKDSAKTIHEVQTQLGI

SEQ ID NO: 182530 - protein, 109 aa, Glycine max
  Clone ID: PAT_MRT3847_135837C.1.pep
TLGAVIYTGIIVLLALLIYLDNKTHRMEPSREQRKKLVRHRPKEGIKNTMNTESTVLDEANSDKQPRREKRKRKRKKLVCPIPKEGIKNTMNNESTALDETNSINNPVE

SEQ ID NO: 182531 - protein, 358 aa, Glycine max
  unsure (1)..(358): unsure at all Xaa locations
  Clone ID: PAT_MRT3847_135838C.1.pep
MHKSSSDSTLGPGGLDLSQAFFRPINNAAPPSPTKRHPAPRSTPPXNKISVIGAGNVGMAIAQTILTQDLTDELVLVDTNSDKLRGEMLDLQHAAAFLPRTKIHASADSSVTAGSDLCIVTAGARQISGESRLNLLQRNLSLFRAIIPPLVRYSPDTTLLIVSNPVDVLTYVAWKLSGFPSNRVIGSGTNLDSSRFRFLIADHLDVNAQDVQAYIVGEHGDSSVALWSSISIGGVPVLSFLENQQIVYEKETLENIHKSVIDSAYEVIKLKGYTSWAIGYSVANLARSFIRNQRKIHPVSVLAKGFYGIDGEVFLSLPAMIGRGGILGVTNVHLNEEETQRLRDSAKTILEVQTQLGI

SEQ ID NO: 182532 - protein, 80 aa, Glycine max
  unsure (1)..(80): unsure at all Xaa locations
  Clone ID: PAT_MRT3847_135839C.1.pep
HSRNESKIVPEHVRVPLHTDTMGGRLNIPKERNANMMALKSALVEGVMVDARRGWAEKDGPLKYNWEPXAELAHMLQVHG

SEQ ID NO: 182533 - protein, 286 aa, Glycine max
  Clone ID: PAT_MRT3847_13583C.1.pep
EHSHSSTKQGNNDIESGTQTVTSSQVASCSANSKSGLKTSVLKVVDQFRGSNLSKHFPLAVGSDIAGRHNDKSFFPYELFVKLYNSNKVELCPFGLINCGNSCYANAVLQCLAFTPPLTAYLLQGSHSKSCANKKWCFTCEFERLILKSKDTKSAMSPMGIISQLQNIGSQLGNGREEDAHEFLRLAVETMQSVCLMESGDNTSDSLKEETNLMGLTFGGYLLSKIKCMKCGGKSESQERMMDLTVEIEGEITTLVKALLLFTSTVSFFNLRQRLYCLKKSKYGIF

SEQ ID NO: 182534 - protein, 47 aa, Glycine max
  Clone ID: PAT_MRT3847_135840C.1.pep
TTQRLIANMPKITKSHQSNVLSVVKFKCSVPPGRIMDQEVGFLMEGN

SEQ ID NO: 182535 - protein, 299 aa, Glycine max
  Clone ID: PAT_MRT3847_135841C.1.pep
MEEEEAPDVICELENVQGLVDALTAVRWKRQQDAVLELSEHGIVLIVEESGCLQAKVYLKRELFIRYDYNARGGRPRFGVSLGHFVDCLNAFSVPAGQSISSLVQIQYPGPDMQLLLKSVDSLDASICAEIRTRIPDTIAWDYNFEPAGANPLTFTVKSAALKEAIEDLEWPGSSIKITLEPDPPSVSLRAEGHGDLQIDFMYYVNSELLVAFQCDHQASFKYKYKFLRATTSNMPSSVIKENRGSKLSIGRGGMLKVQHLVSIAKPSVSHPYADSVGYQQPSRIAHIEFFVKPEESED

SEQ ID NO: 182536 - protein, 137 aa, Glycine max
  Clone ID: PAT_MRT3847_135842C.1.pep
MGNCLRKAHADDDSDHIVELASGNVQLITTKESWDQKLDQARKESKIVIANFSATWCGPCKVIAPHYCELSVKYPSIIFLLVDVDELADFSTSWDIKATPTFFFLKDGKEVDKLVGANKPELEKKIVVVNDVVPHKQ

SEQ ID NO: 182537 - protein, 56 aa, Glycine max
  Clone ID: PAT_MRT3847_135843C.1.pep
SSDDEIHPYNSSQAHRSCASLMITLKYSTCPFQPFIICTNPFTLSIFLAKSGILSW

SEQ ID NO: 182538 - protein, 73 aa, Glycine max
  Clone ID: PAT_MRT3847_135844C.1.pep
VVCFNRKHKTCAFPPQKGAPKRSFLCEEKPFGSVRHGMAMQQKLLQQQRKQSLKYTPQESTSVTARGRRAVDP

SEQ ID NO: 182539 - protein, 72 aa, Glycine max
  Clone ID: PAT_MRT3847_135845C.1.pep
RKINFFFSLHKKNNNNKMQSKMTTMQLLKTEQSRRSSSTSNANNVGRRHLTVSRRANTHPYYRNKINSENCY

SEQ ID NO: 182540 - protein, 95 aa, Glycine max
  unsure (1)..(95): unsure at all Xaa locations
  Clone ID: PAT_MRT3847_135846C.1.pep
HTERGDRYRASPAPALHHSLTSTAASKVNNVLGLGTTFFSTPSSQRADTTWELVRVQIMISEHYDTKLTIASFTLSAGHLXILMESLFLPLELIQ

SEQ ID NO: 182541 - protein, 557 aa, Glycine max
  unsure (1)..(557): unsure at all Xaa locations
  Clone ID: PAT_MRT3847_135847C.1.pep
FELPRGYRVPKFSKFAGELEESTIEHVAHFQIKYGDLAIYEFLKINYFPSSLMKNIFTWFTRLPPNWIYTSVQPERVFHQHFFRGKTKVSLVDLETTKHFNSETIKDYLNRFXXVKARCYTQILEYELVRITTASLDFSIQKKLVNQQVRDMAQLAKRVRRIEKIKYEKKDNDNSINYQDLDVNQEEDEICVAELQPGPPYNCQMLKLDEKXKFPNSNYNFDITKANKIFDLLLKEKQISLSDDHIIPTFEQRKGKRYCKFHNIFGHWTNSCLRFRGMVQKAINEXRLKFEGMKDPNHILRSLXVNSLELRRGGIIEGCSRKGYYDYQNPHWVNQNMSKTXWRRHQRMKRDVILEMQHKNAARLPFFDRISEGLPPGFEKKMSTKDREEKEMITESFNRNVAAFDPSTNDIRCHMKPLHLIALVEDQIINKILVDGGDTFNILPRSMLCRFGRTIEDLIPHNIVVSYFYGKPSNLEGVVCLDISVGSRRRPMVFLVILSQANFNILLGREWIHGVGVVPMTVHXSCSFRXEDGKLIMVGGDQSSLISLLHEFKDYFT

SEQ ID NO: 182542 - protein, 104 aa, Glycine max
  unsure (1)..(104): unsure at all Xaa locations
  Clone ID: PAT_MRT3847_135848C.1.pep
EEILKVPAQKSVAFSLVKEIPEFFHGNLSKEKAPPFRIFMVVKDFFTVFDRVGKKVGIINXRTLVSSAHRFPVPVNPMVSQPLSGLVGKRQNHSSDDDGHRPFP

SEQ ID NO: 182543 - protein, 92 aa, Glycine max
  Clone ID: PAT_MRT3847_135849C.1.pep
LELLLSQALAVIEYLVAHGSERAVDDIIEHTFQISVRTILLYLVNLFLQLTTVLTSRIREDLLIIDCGWRKALPSWEYGEPSAKDRVPIVQE

SEQ ID NO: 182544 - protein, 253 aa, Glycine max
  Clone ID: PAT_MRT3847_13584C.1.pep
MTTPRGNHHPQPNGERRRQWPPPQPPAAAPEAAAAPTAVAANYNGYRQYHPTTPARSSSSASFKGCCCCLFLLFSFLALLVLAVVLVIILAVKPKKPQFDLEQVGVQYMGITPNSPSTASLSLTIRLLFAATNPNKVGIRYGQSSFTVMYRGIPLGKATVPGFFQQPHSTRQVIATIAVDRVNLLQADAADLIRDASLNDRVDLRVLGDVAAKIRVINFDSPAVQVSVDCAIVISPRKQSLTYKQCGFDGLTV

SEQ ID NO: 182545 - protein, 36 aa, Glycine max
  Clone ID: PAT_MRT3847_135850C.1.pep
SRVWMNLSKIEVVKRFRQVKLEAPELEIEAIERLEL

SEQ ID NO: 182546 - protein, 76 aa, Glycine max
  unsure (1)..(76): unsure at all Xaa locations
  Clone ID: PAT_MRT3847_135851C.1.pep
GGPGAVFAXYRTPVLVXAPFTAVXFPTSEAAXRGLMXVSPESVXDERLVVHAGPGAAVFFFAAAASXPLGVVATAL

SEQ ID NO: 182547 - protein, 120 aa, Glycine max
  Clone ID: PAT_MRT3847_135852C.1.pep
HVATIRLFLFVDFYIAVMQHHMAHSTKAIWIHLKLAQAYRLASLCSEIRKFCSLRSIVCDLEIDADQSLFRSHTRHSPCKINNTFCVWIEPANHYVLLHHPMHIDLITPRTSYGTRTRPL

SEQ ID NO: 182548 - protein, 99 aa, Glycine max
  unsure (1)..(99): unsure at all Xaa locations
  Clone ID: PAT_MRT3847_135853C.1.pep
CLMLTFTDGRYIVSIVCTSRTHDRISTGGLDGMTITYYTFXTDAHEREMTMTSNYYHYAHGHITVYDGAGEDSLANVDHGLSAMARYATANGDTVLDAN

SEQ ID NO: 182549 - protein, 47 aa, Glycine max
  Clone ID: PAT_MRT3847_135854C.1.pep
LWCCLDQKGHTVLNCNFIDCFSGLYFLFTALCAIFYGLFGVIVAYIL

SEQ ID NO: 182550 - protein, 83 aa, Glycine max
  Clone ID: PAT_MRT3847_135855C.1.pep
IMKIFNNYRIQSYLLHVGWFNHAWEPVMLPPYSCDAPIHLILYGIFHLQHAQHLNQDQTLKSPISNFINKILEASDLLKRNFQ

SEQ ID NO: 182551 - protein, 65 aa, Glycine max
  unsure (1)..(65): unsure at all Xaa locations
  Clone ID: PAT_MRT3847_135856C.1.pep
QQLNASPLLENIATQERXSTHPMLLVFLSLTCQSHMMDELDVALLMVSLSLSVCFCLSLPGARAE

SEQ ID NO: 182552 - protein, 73 aa, Glycine max
  Clone ID: PAT_MRT3847_135857C.1.pep
PPWKFSKFRGSVIKKNLRNFPKRGKTQGGGRKFFFPQRKKRGNLAEIKQKKKKKKKKKKKKKKKKKKKKTQNP

SEQ ID NO: 182553 - protein, 105 aa, Glycine max
  Clone ID: PAT_MRT3847_135858C.1.pep
LSDRGCVFGPYRNISGQVFFILPHYAFHVGLLESTAPAHYIEFLRPKEQQQKASLEDGSDVDTHAEVANMDKNTDSCSPANGSRLRPSSKEKTCVAITASYGINR

SEQ ID NO: 182554 - protein, 46 aa, Glycine max
  unsure (1)..(46): unsure at all Xaa locations
  Clone ID: PAT_MRT3847_135859C.1.pep
TLMHTLCLYKLYVLLKALIWSFLASKFTYFLCILEPNSEXTYACXR

SEQ ID NO: 182555 - protein, 372 aa, Glycine max
  Clone ID: PAT_MRT3847_13585C.1.pep
LIFQLGCVPGALLSEDYSPPIAGVPVSVDPPVIASNCPPSVTSGSNQQNNSSHASMSFSVQTPCPLKAETNTCQGSALTPQTHKLNQISNNPCQPKVIPTSKTNFASQRENRAVEAEVIPSDLDSCLQQHSVSCNARSAFNNLIGSGSFGQSGISADNLTLMEQQIISAIGNRDNVNPRVNASSSLNKSQLRTDGGHLLGHNMSSGSTSILGGIPIHGGMSTLLRSNLITSSGSKSSQASTADFSGVGVGIGPQNCDSSTKALANLTSQSVTFPIHVEGSNQKILVLDLKCASSNQKIDYDLLQAPNPPTFHVEEQVPFSGQNPGFTHDCLHKDGSSQSMMTKDPKDKLDCAKPPSGDDLFDVLGVDLKTNC

SEQ ID NO: 182556 - protein, 62 aa, Glycine max
  unsure (1)..(62): unsure at all Xaa locations
  Clone ID: PAT_MRT3847_135860C.1.pep
KSACFYENRCFGPGFCPSKQVTWCKKFLDXKIDQFLPHPFFDPELENPWLAQRRAPRIPNFA

SEQ ID NO: 182557 - protein, 71 aa, Glycine max
  Clone ID: PAT_MRT3847_135861C.1.pep
RRGGSWGLTGGGGFLLANPKKGAFLDGFQAVGFKAFQPPRPFPKIWTLVCGFSEGGFFQFQGSQGFRPFLF

SEQ ID NO: 182558 - protein, 237 aa, Glycine max
  Clone ID: PAT_MRT3847_135862C.1.pep
MDLYGSFSTPSDCLHIDDFLDFSNITTDTHHHLPPPQNSPLISHDDANLFFNFPSVPTDEAAELEWLSQFVDDDATSFHSFPATASIGSHSTSFLSNNNNRNDNNEYPKSSLSSNIPCSSAVAGKSRARREGSVTGDGGVRRCSHCASEKTPQWRAGPLGPKTLCNACGVRFKSGRLVPEYRPAASPTFVLTQHSNSHRKVMELRRQKELLRHQQQQQLQQEQCHRHTHNHHDFKVC

SEQ ID NO: 182559 - protein, 82 aa, Glycine max
  Clone ID: PAT_MRT3847_135863C.1.pep
NATRSEEHLSQILCIPPWSLSPPRVVHQHSGHIPLSGSSVCRQYTSYALNMAKNMSLPIFQGSASTTVIQQSFFSIGMPCHS

SEQ ID NO: 182560 - protein, 113 aa, Glycine max
  unsure (1)..(113): unsure at all Xaa locations
  Clone ID: PAT_MRT3847_135864C.1.pep
QXHPPSPXYLXFXXXSXSXTPFSLFSFPLFTRIXFXPQHLLHHSPXLSXXLCPXGSCXXXTYPXXXFPSKRKLSPFPFRVEPMDSQPGLSLGLSATLSSPAAPLSDTTSVPWR

SEQ ID NO: 182561 - protein, 37 aa, Glycine max
  Clone ID: PAT_MRT3847_135865C.1.pep
SLWHWFLVLVKPSYGGGAFQVQRSATACYLTHNSATL

SEQ ID NO: 182562 - protein, 64 aa, Glycine max
  Clone ID: PAT_MRT3847_135866C.1.pep
MASKAALLLCFNVLFFTVVSSTYVPYNPHPKTPKHPPVPKPPSPKQASCPEDTIKLGVCANVLG

SEQ ID NO: 182563 - protein, 139 aa, Glycine max
  Clone ID: PAT_MRT3847_135867C.1.pep
NFRNNYLVAWVAFQLGQTLIPKSPRHLFCNYKRCRDTLEHLGGDGEVGGDHVADEVLVDLLLAVEAVLFHQPLEVCLEDAGDFNRKFFDAQCSGFLGCFLAFPSLLHGFRRRFLLLGHGLPRVLAGQAMPVCSAVAPGY

SEQ ID NO: 182564 - protein, 91 aa, Glycine max
  Clone ID: PAT_MRT3847_135868C.1.pep
FLRAEKIDALHEGFKSTDTYMLTNKVFFPCFKIFFNISLSSSFSDDQRSCFSLKSVISYNLSFELVYIYIPFYKISWFLDSQKKKIELTHL

SEQ ID NO: 182565 - protein, 61 aa, Glycine max
  Clone ID: PAT_MRT3847_135869C.1.pep
IFDELGRRRGIVYLCIMGRFISVTKRLFIKLEVANTPLLIYNWNCGLVYLKKKKRLFLFVF

SEQ ID NO: 182566 - protein, 67 aa, Glycine max
  Clone ID: PAT_MRT3847_13586C.1.pep
LGLTLVVVHVALYGTSPFVQLPIIRCIGCKVHDVYSVNFMYVFPFYRSCSHIIQCAPFFKLSDRMCG

SEQ ID NO: 182567 - protein, 35 aa, Glycine max
  Clone ID: PAT_MRT3847_135870C.1.pep
KGGGVLIKVAFLLYVGSLLEQDISTKGIRQIHVQN

SEQ ID NO: 182568 - protein, 60 aa, Glycine max
  Clone ID: PAT_MRT3847_135871C.1.pep
LILPSGHIYRIELARQATDRVFLKRKTALSGRQCVFFFSPLQCNSEYSFFSGSHKLVFKC

SEQ ID NO: 182569 - protein, 62 aa, Glycine max
  Clone ID: PAT_MRT3847_135872C.1.pep
KSLLGFISISAIAIISSLFLWIQMFVVSFSVGKSQAYPVFIRCIHCMDNFLQKTTGILFIHV

SEQ ID NO: 182570 - protein, 190 aa, Glycine max
  unsure (1)..(190): unsure at all Xaa locations
  Clone ID: PAT_MRT3847_135873C.1.pep
GSSGSRRWSSQPHSTIAHLQESRPLHRTSLYPDSSRNXSHLSSEPILVPNSSFTSYPPPGGRSHQASPSQNSGHLNLPYHATGAQMALSPPNRSHFPNSALQLSGINHGPPFGGNMRQFSTGSPLNQIIQNQLVNQAGLYPGDHPNISSGIPMINKYDQMLGLMDMRDPMPKSAHLGRQNLRFPPQGFDM

SEQ ID NO: 182571 - protein, 86 aa, Glycine max
  Clone ID: PAT_MRT3847_135874C.1.pep
GDDRRGRIELLPLKSRVTNNDALDNGSRFKGHNVCIHSNFNKFSSRLILCVFLNSLLFPISISSLNYAFILSPLLVIIGFIPRLYD

SEQ ID NO: 182572 - protein, 64 aa, Glycine max
  unsure (1)..(64): unsure at all Xaa locations
  Clone ID: PAT_MRT3847_135875C.1.pep
SKFDAXXNVEXGXXLDXXFXAXXXSLXMSXYCSFXXKXAXXINXXKXIVVDTGQXVYXGSXXRG

SEQ ID NO: 182573 - protein, 165 aa, Glycine max
  Clone ID: PAT_MRT3847_135876C.1.pep
MGNCLFSSYETTTTTVKVVVHDGRMEEFSYPVKVSYLLQLYPACFICDSDEMGFDDVVTAVHEDEELRPGQLYFALPLSRLKRHLPPQEMAALAVVATSALAKCGSRRKQIVFLSSCDVNTKPGRKVAPEGTVGNNDVARKGRSKIGGRGMGKFTATLSSIPEQG

SEQ ID NO: 182574 - protein, 101 aa, Glycine max
  unsure (1)..(101): unsure at all Xaa locations
  Clone ID: PAT_MRT3847_135877C.1.pep
IPQRPWGEGAAXIPDPREGGPVXVXTFXTAEKAAKAYHAXARGGPGXRAXVSFPEEPSGAASSKRVKGSPEGQPMRKNPSSVRPRINQRCNFENRGLLQAY

SEQ ID NO: 182575 - protein, 85 aa, Glycine max
  Clone ID: PAT_MRT3847_135878C.1.pep
MKKEGSSTAGKTTQYDPLFREFAQDHTDRFELADSILHNYIYCLLMKFHTKVFILTNQKLNNTHRSTMGYISRLPFLSFPNGSAS

SEQ ID NO: 182576 - protein, 205 aa, Glycine max
  Clone ID: PAT_MRT3847_135879C.1.pep
MSFSNANTGDKPADPYTKANADTEVSVDQKISDLTKFIDASKFGMMTTRDASSGKLVSRCMAVAAKESGGIDLLFHTNTESNKTDELQDDSHVNISFLNASGEWASISGTATVQTDRELVKKHYSPTLKAWLGDLGDGKHDGSENDPRIGVIRVKTATATYAVVAKNFVSRAADIAQGAVTGKPAAVNNLREITEAEVTQWRSVH

SEQ ID NO: 182577 - protein, 52 aa, Glycine max
  unsure (1)..(52): unsure at all Xaa locations
  Clone ID: PAT_MRT3847_13587C.1.pep
AHSVLIYSKINESSEXLQLFFCINAVLHLNMYWYIYHCRFKSQDQMRMFFFS

SEQ ID NO: 182578 - protein, 39 aa, Glycine max
  Clone ID: PAT_MRT3847_135880C.1.pep
LVSFFLILLVKDTTDGKHIVLFLVSHVIIFKCKAGETLL

SEQ ID NO: 182579 - protein, 62 aa, Glycine max
  Clone ID: PAT_MRT3847_135881C.1.pep
NCGGPTNRISMERTLSCGLMATNMKFDSNYCCFWLFIPKHSCPFFQFFHMYELVKHEKCWDR

SEQ ID NO: 182580 - protein, 113 aa, Glycine max
  Clone ID: PAT_MRT3847_135882C.1.pep
DFVMEILSKLVSRQVWRMPKLWVGFLKCVYQTQPRSFHVLLQLPPQQLESALNRHANLRGPLASYASQPTVKSSLSRSTLAVLGLANETHEQHLSSSLHSSDTSSSVHGATLT

SEQ ID NO: 182581 - protein, 105 aa, Glycine max
  Clone ID: PAT_MRT3847_135883C.1.pep
HQVSGVLGVIGDQYPTPINYFLLHGTTSFQGFDFTVLPKKTQGFYKLTPPSPKITKKVIHWQEMHSGQGLFLFRNSNTWLGPLGIFPVQIFLQELFLCQLGKGCP

SEQ ID NO: 182582 - protein, 106 aa, Glycine max
  unsure (1)..(106): unsure at all Xaa locations
  Clone ID: PAT_MRT3847_135884C.1.pep
IIVSSHPTIKDINLYXTHALADAPSYPRAEHVRGNMSDTASQTKDILIKCICHHCTHQHCLKLFKKCYDALPHYGNAINSQCILPTAPNSILGSKGALHIDVTMLS

SEQ ID NO: 182583 - protein, 106 aa, Glycine max
  Clone ID: PAT_MRT3847_135885C.1.pep
LPKAPEIPKVPEFPKPELPKVPELPKPELPKIPEIPKVPEFPKPELPKVPEVPKPELSKVPKLPKSELPKVPEIPELPKSELPKIPEIPKVPEFPKVPKAFSTTNP

SEQ ID NO: 182584 - protein, 58 aa, Glycine max
  Clone ID: PAT_MRT3847_135886C.1.pep
FIIVYHFSNLLEFVTPPTKKKKTWSRVCNCVRLYSNNITCSMAFYPNLMITDILLMIY

SEQ ID NO: 182585 - protein, 164 aa, Glycine max
  Clone ID: PAT_MRT3847_135887C.1.pep
TAHWWSHSKTQAGIYYYQEKGLVHPQLNVSTAFRKALKTWASWVAKHINHRKTHVFFRSSAPSHFRGGDWNSGGHCTEATLPLNKTLSTTYPEKNIIAEEVIKQMRTPVTLLNITSLSAYRIDGHPSIYGRKTRSSRIQDCSHWCLPGVPDTWNELLYFHLQSR

SEQ ID NO: 182586 - protein, 52 aa, Glycine max
  Clone ID: PAT_MRT3847_135888C.1.pep
HVNVCLGILYGFVIGLVNSYIIGDISLQVELLFYATEIHHIGWASAIFVRSS

SEQ ID NO: 182587 - protein, 242 aa, Glycine max
  unsure (1)..(242): unsure at all Xaa locations
  Clone ID: PAT_MRT3847_135889C.1.pep
FELGVGSYNAMLDCVCKLCRQKDPFQLHSEAEKVLVEMEHRGVPRNVETFNVLITNLCKIRKTEDALGLFRSMGEWGCYPNETTFLVLIRSLYQAARLEEGDEMIDRMRSAGFGEFLDKKAYYQLLKILCGIERVDHALSVFAMMKDGGCEPGLITYDLLMGKLGAPNRIDKANALFNXTKSKGLPVMLKKYAVDPRYFKKKKVVKGVKKRETLPEKMARKKNPLKQIRLSFVKKPQKVMGR

SEQ ID NO: 182588 - protein, 101 aa, Glycine max
  Clone ID: PAT_MRT3847_13588C.1.pep
SSRSSRIGSRKKVPPHKTTWPTKEIHLTPKKIKITSLLPLLLWSPSLLHARVVPNFAAESMVPKGTEWGGGNWEIKTPTAVKDIPQWELAAKVTTYMKTDD

SEQ ID NO: 182589 - protein, 214 aa, Glycine max
  Clone ID: PAT_MRT3847_135890C.1.pep
NGSLHDRLYCSDVKKEPLTWKQRLKICIGAARGLHFLHTGVKRTIFHRDVTPYKILLGSNMVAKLADFRLSRAGPHYASKPKPKTISKDGFIGTYGCVAPEISENNTITEKCDVYSFGVVLLELVCKDKLKDVEKRQKHPVEENIDPNIKGKIAPECWEVFMDITERCLKFDPNERPAIGEVEVQLELALSLQEEADIINTGDDYTLLSMIIMN

SEQ ID NO: 182590 - protein, 306 aa, Glycine max
  Clone ID: PAT_MRT3847_135891C.1.pep
EALNKSLSDLLDGIQEDFAAVVDWAHKIDPLCCISMHGTTERYLSGQKADAAGFVRDLLRDLESRISMQFNRFVDEACHQIERNERNVRQTGVLSYIPRFATLATRMEQYIQGQSRDLVDQAYTKFVSIMFATLEKIAQTDPKYADIFLFENYAAFQNSLYDLANIVPTLAKFYHQASEAYEQACTRHISMIIYYQFERLFQFTRRIEDLMFTVAPEEIPFQLGLSKMDLRKMLKSSLSGVDKSIAAMYKKLQKNLTSEELLPSLWDKCKKEFLDKYESFAQLVAKIYPTETIPSVAEMRDLLASM

SEQ ID NO: 182591 - protein, 65 aa, Glycine max
  Clone ID: PAT_MRT3847_135892C.1.pep
MIRICPGNGVYSSLEQHLWCSLQDRALVQALKPFPKESSQRLERVASNASGKKCESCVRKNICAS

SEQ ID NO: 182592 - protein, 68 aa, Glycine max
  Clone ID: PAT_MRT3847_135893C.1.pep
THTPLKIFVSHKFLAPLVFYPNLGSQVFFSPFFFPNSPVAVVFFPFNYKGIFFFFNHFLLIKFSFFFF

SEQ ID NO: 182593 - protein, 60 aa, Glycine max
  Clone ID: PAT_MRT3847_135894C.1.pep
PTRPQEIMMNTVSNSSNVQVSLVAHRCVFFSEEQGGNNNNNVDHQLVFNVTSYYLIFPFI

SEQ ID NO: 182594 - protein, 96 aa, Glycine max
  unsure (1)..(96): unsure at all Xaa locations
  Clone ID: PAT_MRT3847_135895C.1.pep
NADFSAPHCMGTTLIGVTYNGGVVLXADSQTSTGVYVINRPSDIITLLTDNVYVCRSVSAADTEIAFAYVRYYLHQHTILLGHPAPAKVSRDLVRL

SEQ ID NO: 182595 - protein, 80 aa, Glycine max
  Clone ID: PAT_MRT3847_135896C.1.pep
LGSIRLFFLNYLSFSEVNTRKHVLMTPMLMALLCLLRAIPSTMIFLQEKTLQKIRNMWLKVLLTNFCPWQIFNSKKKVAN

SEQ ID NO: 182596 - protein, 116 aa, Glycine max
  Clone ID: PAT_MRT3847_135897C.1.pep
IPFFWVKKGGKYGCKCLLKGLPFYPPHYYKPPCQLTVLETLLDRIYNTLWFRVWLKRKLLRKTLTFTPEIMVGVLWGGKSRSLTRLFTRPETMKTLLRPPVPLRLTHGKTPCEKNF

SEQ ID NO: 182597 - protein, 86 aa, Glycine max
  unsure (1)..(86): unsure at all Xaa locations
  Clone ID: PAT_MRT3847_135898C.1.pep
LNLDAYYRHQMFKEMKKGFKKAEASKRTGFNYXXTXHAIIVASSEKHKEDQVMALKHSMQTGMPHAMKDQTQLREEMVYHYNLENF

SEQ ID NO: 182598 - protein, 60 aa, Glycine max
  Clone ID: PAT_MRT3847_135899C.1.pep
TMMCLFVLNFKNSGLVCLLVMSKLKVCSAFLTSFYLGKIKLEIVSLKNNPMTSLTVQKKK

SEQ ID NO: 182599 - protein, 51 aa, Glycine max
  unsure (1)..(51): unsure at all Xaa locations
  Clone ID: PAT_MRT3847_13589C.1.pep
CWAKSEPHSWELILLIEGCGSNDAFEIXVLDXSTETSWHWSILIDDVKQAT

SEQ ID NO: 182600 - protein, 83 aa, Glycine max
  unsure (1)..(83): unsure at all Xaa locations
  Clone ID: PAT_MRT3847_1358C.1.pep
NXLNXXVNXXRXGVXRSXXQXFXXXXXXXXAXLSXSXXXXYXXGXXKSXXXXRXXXXXXXXXXSHXXXXXXXSXXXXXVXXVX

SEQ ID NO: 182601 - protein, 55 aa, Glycine max
  unsure (1)..(55): unsure at all Xaa locations
  Clone ID: PAT_MRT3847_135900C.1.pep
LINLLANLGTHVAYGXLIVFWTKIXTFEVAHFISEKSIYEQGLILLSHLATLGWE

SEQ ID NO: 182602 - protein, 68 aa, Glycine max
  unsure (1)..(68): unsure at all Xaa locations
  Clone ID: PAT_MRT3847_135901C.1.pep
XNKXXXXXXXXXPSVVVFCSMVSEADLENDDRCFLLYFIMGTYLGPDIKGEPPKNQSCKELRRGFLLT

SEQ ID NO: 182603 - protein, 69 aa, Glycine max
  Clone ID: PAT_MRT3847_135902C.1.pep
QITQCWRTGLDAQALTSLESVTLPVPSCQSDISSSVYYCCPIINAIGAYCHNLYFLGPIDPVPQKFMLV

SEQ ID NO: 182604 - protein, 38 aa, Glycine max
  Clone ID: PAT_MRT3847_135903C.1.pep
SVTIYVHLIASQSIMSCSMPNHNIAQIWKLHRKCLPSF

SEQ ID NO: 182605 - protein, 63 aa, Glycine max
  Clone ID: PAT_MRT3847_135904C.1.pep
KKPVSVCTSQKVSCLNFTDKNLFLVKRRRAFALPIIRFYLCKVGMGELMSVPLNVFSVARVVL

SEQ ID NO: 182606 - protein, 72 aa, Glycine max
  Clone ID: PAT_MRT3847_135905C.1.pep
TPIHPKPKVPPKTLFFLPRPLGGTFLFWAKTGPGFFFFLPIKGGGKTPPLGVFHPTLLPNTGKSPTKKTKTG

SEQ ID NO: 182607 - protein, 48 aa, Glycine max
  Clone ID: PAT_MRT3847_135906C.1.pep
KDNLQKGNMNLKGKIQSFGKTKIKIFVHRVSSITCIIVSVCNGCFSSF

SEQ ID NO: 182608 - protein, 78 aa, Glycine max
  unsure (1)..(78): unsure at all Xaa locations
  Clone ID: PAT_MRT3847_135907C.1.pep
MMALSRVREDNYRSYLREDTEKNTKWIYGAPPHYDVAHTLYDHGRVIVWAHGSLDXHVQSLVHFWDMEMFHSVGLHDF

SEQ ID NO: 182609 - protein, 152 aa, Glycine max
  Clone ID: PAT_MRT3847_135908C.1.pep
MAPYISRDRASIFVLLASLVLPLILLDYFSSALFASAKFPKSKDADLLEFALNLEYLEAEFFLFGALGHGLDVAAPNLTGGGPPPIGAKKVELDSLTNDVILQYALYEVGHLIAIKINVRGFPTPLLDLDTNSCARLMDYAYGNPLVAALIP

SEQ ID NO: 182610 - protein, 69 aa, Glycine max
  Clone ID: PAT_MRT3847_135909C.1.pep
MDVDPPLDPKEPTSCVCSQVFFGKKNAWANKNCQGGEGFPYLGGGVTQKTRFKGKWDCPTCILLPQSQR

SEQ ID NO: 182611 - protein, 87 aa, Glycine max
  Clone ID: PAT_MRT3847_13590C.1.pep
QGTMDSKQCNPSNSGANLGLKRGGFCLDPPGCDRLETFLAVLDSAEEEVASVLGFEFVLFTGSKEKLQFWACAISKWLKMDIIVLLC

SEQ ID NO: 182612 - protein, 66 aa, Glycine max
  Clone ID: PAT_MRT3847_135910C.1.pep
SFLSPPPGFLTLIERDSPNLPPHKYIFRAAYMGACESLPRHPYPRMSMFISIYPLVPIYIYIYIAL

SEQ ID NO: 182613 - protein, 53 aa, Glycine max
  Clone ID: PAT_MRT3847_135911C.1.pep
PPLNKGKEITIRLGGVPHHLLKVATGCPARIVNDQEIGTYTVLLYKVRLEYAP

SEQ ID NO: 182614 - protein, 73 aa, Glycine max
  Clone ID: PAT_MRT3847_135912C.1.pep
RLVFLWTILLQSSTIYISVMNLFSSVLVADPFSLITISMINIFYFEFFFTYSQRKLELHSSDPFLSLSHFLPN

SEQ ID NO: 182615 - protein, 136 aa, Glycine max
  Clone ID: PAT_MRT3847_135913C.1.pep
RTMLELLNQLDGFEASNKIKVLMATNRIDILDQALLRPGRIDRKIEFPNPNEESRLDILKIHSRRMNLMRGIDLKKIAEKMNGASGAELKAVCTEAGMFALRERRVHVTQEDFEMAVAKVMKKETEKNMSLRKLWK

SEQ ID NO: 182616 - protein, 418 aa, Glycine max
  Clone ID: PAT_MRT3847_135914C.1.pep
MALVGVEVKHAAEGAPEENCSAKPTKQGEGLRHYYSHNIHEHQLLLRQKTHNLNRLEAQRNELNSRVRMLREELQLLQEPGSYVGEVVKVMGKNKVLVKVHPEGKYVVDIDKSIDITKITPSTRVALRNDSYVLHLVLPSKVDPLVNLMKVEKVPDSTYDMIGGLDQQIKEIKEVIELPIKHPELFESLGIAQPKGVLLYGPPGTGKTLLARAVAHHTDCTFIRVSGSELVQKYIGEGSRMVRELFVMAREHAPSIIFMDEIDSIGSARMESGSGNGDSEVQRTMLELLNQLDGFEASNKIKVLMATNRIDILDQALLRPGRIDRKIEFPNPNEESRLDILKIHSRRMNLMRGIDLKKIAEKMNGASGAELKAVCTEAGMFALRERRVHVTQEDFEMAVAKVMKKETEKNMSLRKLWK

SEQ ID NO: 182617 - protein, 56 aa, Glycine max
  Clone ID: PAT_MRT3847_135915C.1.pep
YTIPNCSPGSYSSWQVFEFSPCYCVSEQSCSCRYSDCGRMKLPIDPGGPPPDRKNL

SEQ ID NO: 182618 - protein, 188 aa, Glycine max
  Clone ID: PAT_MRT3847_135916C.1.pep
MTECYSLLNLRFPSFPVIDFGAKIFPKRFPKSISFSHPSSKFQLCGISRAMEVVEGSEESKGSSSPLMKLLFVEMGVGYDQHGQDITVAAMRACRDAISSNSIPAFRRGSIPGVSFDQMKLQIKLGVPHSLQNSLDIEKVKSVFPYGEILNVEVVDGGLICSSGVLVEEMGDKNDDCYIVNAAVYVGY

SEQ ID NO: 182619 - protein, 65 aa, Glycine max
  unsure (1)..(65): unsure at all Xaa locations
  Clone ID: PAT_MRT3847_135917C.1.pep
XTXXIXTXXFXGILAXHLWVKXXRQXSFXPXEPXXXXCNAXXGXXLWXRXXXXNDXFPXDLKXRX

SEQ ID NO: 182620 - protein, 62 aa, Glycine max
  Clone ID: PAT_MRT3847_135918C.1.pep
SSLGVYIWDYLSSWWDTLITCIIHLASICAFLVFSNPVLCTDNEDSLFHGINIYTQTQSPVT

SEQ ID NO: 182621 - protein, 32 aa, Glycine max
  Clone ID: PAT_MRT3847_135919C.1.pep
HALFLTDSNVQSCALISSTSSQLLSCSPHLYI

SEQ ID NO: 182622 - protein, 73 aa, Glycine max
  Clone ID: PAT_MRT3847_13591C.1.pep
HHHVVLQTHLYCFSVKCTASMPPQCHCADIRLNSCHSACDRCACTRSMPGQCRCLDTTDFCYKPCKSSDEDDD

SEQ ID NO: 182623 - protein, 121 aa, Glycine max
  Clone ID: PAT_MRT3847_135920C.1.pep
EKKKIPCSTLFKRFQMFSMVRIRLPNPKGSILEFLTKFKNQTLNGVENVGPLITPRTWGNNPLTPNGPSRKTNGKIGPLPPFPSKNLRRTPLNLFSNHSFPGKIKELKIWTQPRLLSLVGA

SEQ ID NO: 182624 - protein, 75 aa, Glycine max
  unsure (1)..(75): unsure at all Xaa locations
  Clone ID: PAT_MRT3847_135921C.1.pep
FAWLAYRQPHLLLLGEPTNHLASGTIDSLSEALAEWDGGMGLVTXEFGLINQVAHEMIVCAAQAVTREEGDIMDF

SEQ ID NO: 182625 - protein, 94 aa, Glycine max
  Clone ID: PAT_MRT3847_135922C.1.pep
ARRGVLNGERKDLPIQNSRPNSYLAFSGILRNNPFFVSPRTNLLAAFLQPREWEFPGENRVIRPATFPKFAICTHLGNRPSPWVPSNPLTTQNG

SEQ ID NO: 182626 - protein, 29 aa, Glycine max
  Clone ID: PAT_MRT3847_135923C.1.pep
KNPHAIGFVRNPYNVGRAHCILLFIDFPN

SEQ ID NO: 182627 - protein, 87 aa, Glycine max
  Clone ID: PAT_MRT3847_135924C.1.pep
FAINSIIYQRMKIVVMLLLPPLMFALFFSCTSSLAVSTNTSTTCPMDLNYVLRIPWNTSACHNFQQTLAAKNGTDANTCCISLLSLF

SEQ ID NO: 182628 - protein, 436 aa, Glycine max
  Clone ID: PAT_MRT3847_135925C.1.pep
MSLTSVTMSEEVWLSCVTHALSTETEEIMGLLLGDIKHSKNGSVTALIWGASPQTRSDRRKDRVETNPEQLAAASALADRMTTSTGRTTRVIGWYHSHPHITVLPSHVDVRTQAMYQLLDSGFIGLIFSCYSEDVNKVGRIQVIAFQSSDGKQNHRSRPIPLSPVNRSPVIDIDSSPSSSENVSTKPGYFEAENAEQDTGDSRSVVVSKDGGRSDLGNFFANADANYLGRDKSGGNYHPNNSDTNIVDVDPMDMSESMQEAMHRSNLDMSGAEFVRKEIPLYVLPALSLINIDSPLSSYTDLQHVLFEEERNAYNQAILQNKRDGKVHPLTFIHHTSTYQASLCKLIEYCLSPAINALQDRLRENEIRLAVLREEAKSLEAEAYRGSEASVGTPRRVASPVHRGGSSPGLRNLHDSPESLGSRNVASPGSRSRKGY

SEQ ID NO: 182629 - protein, 89 aa, Glycine max
  unsure (1)..(89): unsure at all Xaa locations
  Clone ID: PAT_MRT3847_135926C.1.pep
MDWIQHSKNGSVTALIWXGASPQTRSDRRKDRVETNPEQLAAASALADRMTTSTGRTTRVIGWYHSHPHITVLPSHVDVRTQAMYQLLD

SEQ ID NO: 182630 - protein, 44 aa, Glycine max
  Clone ID: PAT_MRT3847_135927C.1.pep
ILSCYLLRRVDFYCHVYFCSFCIVKLFKLLESLLFLLVLFSFLE

SEQ ID NO: 182631 - protein, 127 aa, Glycine max
  unsure (1)..(127): unsure at all Xaa locations
  Clone ID: PAT_MRT3847_135928C.1.pep
PTDKGQAGTKHXNKPPRQSGRPKXXRSGAAAAKNGDKRENTEPEEQGNTTGLFFLYGSDAPSPYNPLQHKIYEKFAAPFTKRRXILKILILGGGSTLTYLSGTKTGDSLPIRKGPQLPPKRGYRGKI

SEQ ID NO: 182632 - protein, 123 aa, Glycine max
  Clone ID: PAT_MRT3847_135929C.1.pep
DLTKLCSSGSSFSFNRSLYPSLSIDIYTDIMDKNALFRFLLVLLTLSCVVFVAAVPAIRSSMIGKIDPLVQDLLAKEDPVMRLRNSEEEMKEGIVESRMLMDIVDYPGTRPNPAHDPKSPGKP

SEQ ID NO: 182633 - protein, 68 aa, Glycine max
  Clone ID: PAT_MRT3847_13592C.1.pep
AISTYSAMNPTKPGLEDSQQHIHKIRLTLFSKHVKNLEKVSAYLISGATDNILRVNGPVTMPTKVLHI

SEQ ID NO: 182634 - protein, 73 aa, Glycine max
  Clone ID: PAT_MRT3847_135930C.1.pep
RTLPLSFYCTPVGSSSILCPACGVSPCTASCSRFPQAYYGSYVLSCHKLDGHCSFLLVMSFFFPHQVGDSDEY

SEQ ID NO: 182635 - protein, 53 aa, Glycine max
  Clone ID: PAT_MRT3847_135931C.1.pep
RPKNKKKKKKKKEKKKKKKKKKKKKKKKKKKKKKKKKKKKKKKKKKKKKGGPF

SEQ ID NO: 182636 - protein, 151 aa, Glycine max
  Clone ID: PAT_MRT3847_135932C.1.pep
LFYPKNIISLFPLEYRLKKTTRGPDTKKKPKKTNRFPGGNQPNPGPGAPARGPPRGSPPPPGGGPPLPKGGQHKPRGHKGETPAPPRKGPTPPTPPKKRARPKSGDPGGPPGGAPPTTRGEQPVPLLKAKNAPPAPPEKNPTRGGETPGPS

SEQ ID NO: 182637 - protein, 86 aa, Glycine max
  Clone ID: PAT_MRT3847_135933C.1.pep
MRNVLDNANKCMRIMVLGLRGIPNVEGGVETHAQHLYPRLSNLGCEVEVIVRSPYVAAGQRSTGSIRLRRLWAPKKQGLEALIHSF

SEQ ID NO: 182638 - protein, 74 aa, Glycine max
  Clone ID: PAT_MRT3847_135934C.1.pep
FLSVSFTHLSNLSLSFLSFIRIPLSISFPMASVEVIQRHSFVVYNFASAGFVHSFITPTCVAVVVLYMVPTCTR

SEQ ID NO: 182639 - protein, 66 aa, Glycine max
  Clone ID: PAT_MRT3847_135936C.1.pep
TCHINLCKYHNNSKQVIVIYSTLAPVLPMKTLHHPANITETATKNPNDKLNNDLQKLVGIPCRKLP

SEQ ID NO: 182640 - protein, 37 aa, Glycine max
  Clone ID: PAT_MRT3847_135937C.1.pep
EIHGYLETVIKMLLRELKIRISVEKNWYFRSRHIDFY

SEQ ID NO: 182641 - protein, 57 aa, Glycine max
  Clone ID: PAT_MRT3847_135938C.1.pep
KRLRYGHSMKRTSSAVDLRILVLQTHEQHVYAVAQTATYMLNITKDCSLRHALDVHT

SEQ ID NO: 182642 - protein, 74 aa, Glycine max
  Clone ID: PAT_MRT3847_135939C.1.pep
ENSNLKKMYVLSHDLYRTHKEHTISRVIMLITADEYNISNLKTCLWIEQSLRCFTPPRVRMNFLSYHEISSDAS

SEQ ID NO: 182643 - protein, 124 aa, Glycine max
  unsure (1)..(124): unsure at all Xaa locations
  Clone ID: PAT_MRT3847_13593C.1.pep
GDKFVLENIRAVSLSEGGNLSETEGLFFLETSALGSPNLKMAFXMVISEIFPPVGGEVFYSETYKAVFFSQGQPCPQRGWSLLTKSNPLFFLFPMAFTPPPIQGGLSLLFPFWCFAFLIKRVPP

SEQ ID NO: 182644 - protein, 152 aa, Glycine max
  unsure (1)..(152): unsure at all Xaa locations
  Clone ID: PAT_MRT3847_135940C.1.pep
CRHLICEILRPAPDASSAVAAVRPARLASEGPARIEGMAXEDGTYPSLFAVLTNASISMPNHGVGLVRHGWILTGPFALSEAFGSAADLAEEGFFRTVSLYRPVLDLTHIVASVLPTKASHLSVDGVLAFADIFAMDHLVPTMFADYRRGVQ

SEQ ID NO: 182645 - protein, 82 aa, Glycine max
  unsure (1)..(82): unsure at all Xaa locations
  Clone ID: PAT_MRT3847_135941C.1.pep
IPAHACVLFLFMXFCLLIFFFSTXARYAGDVLNAHTPHPVSPHFHSPIPITQTSKNMMVHSTTQFCNFLDFKPANKPESLDF

SEQ ID NO: 182646 - protein, 54 aa, Glycine max
  unsure (1)..(54): unsure at all Xaa locations
  Clone ID: PAT_MRT3847_135942C.1.pep
CNXGQGQFFILEFLGRQTCPTPQPFVELLGSSYSVHTYYYSSGQASHFHYLALG

SEQ ID NO: 182647 - protein, 36 aa, Glycine max
  Clone ID: PAT_MRT3847_135943C.1.pep
QFIIKFHIQHSISIFDFHSSIDLSFRIKPITQNLTF

SEQ ID NO: 182648 - protein, 193 aa, Glycine max
  Clone ID: PAT_MRT3847_135944C.1.pep
MFLWDWFYGILASLGLWQKEAKILFLGLDNAGKTTLLHMLKDERLVQHQPTQYPTSEELSIGKIKFKAFDLGGHQIARRVWKDYYAQVDAVVYLVDAYDKERFAESKKELDALLSDESLANVPFLVLGNKIDIPYAASEEELRYHLGLTNFTTGKGKVNLSDSNVRPMEVFMCSIVKKMGYGDGFKWVSQYIK

SEQ ID NO: 182649 - protein, 140 aa, Glycine max
  Clone ID: PAT_MRT3847_135945C.1.pep
DTPYCVVLVQISINRPERRNAFRPHTVKELMRAFTDAREDSSIGVVILTGKGTEAFCSGGDQALRTDNGYSDNGSFSSLNVLDLQVQIRRLPKPVIAMVAGYAVGGGHVLHMVCDLTIAADNAIFGQTGPKVGSFDAGFG

SEQ ID NO: 182650 - protein, 78 aa, Glycine max
  Clone ID: PAT_MRT3847_135946C.1.pep
SIHENNRQICMHIFIFLFCLTVDLEYAALFFRNESALKFGWFFLFYLVNRLYFIMCISSASKNCKKSNHLISSAYSFT

SEQ ID NO: 182651 - protein, 46 aa, Glycine max
  Clone ID: PAT_MRT3847_135947C.1.pep
FTYEILQVVNSCKIRGFDWVRGLCSSYASCCQLCEFITCHLLDPSI

SEQ ID NO: 182652 - protein, 118 aa, Glycine max
  unsure (1)..(118): unsure at all Xaa locations
  Clone ID: PAT_MRT3847_135948C.1.pep
MAHLRHALSSPCLGAKALNLFPSSPXVGRVSMMKTVTNHSFFLSPWYFPYRVKYLCPFSVEPPSYLTVXFPCDYCCYTVCLSSYPXTFSINRYLELIHSMCAILFALGFVFPQLLSLN

SEQ ID NO: 182653 - protein, 169 aa, Glycine max
  unsure (1)..(169): unsure at all Xaa locations
  Clone ID: PAT_MRT3847_135949C.1.pep
VSLAFDLITKEKVKAIIGPQKSEQARHVINLGRELGIPIISFSATSPSLSPAHTPIFIRMAQNDSSQVKAIAAIVEAYGWREVVLIYXNTEYGNGLVPHLIDALDAVDTKVPYRSVIDPIFEESHILEELEHLKXNSTRIFIVHMTGEHGSRFXSAVXKAGMMSEGYGW

SEQ ID NO: 182654 - protein, 50 aa, Glycine max
  unsure (1)..(50): unsure at all Xaa locations
  Clone ID: PAT_MRT3847_13594C.1.pep
VLNPQNSFVLNKWMGKLSFPQCTSRSVKRMPLSIWGGAXGAMNAILMNMS

SEQ ID NO: 182655 - protein, 122 aa, Glycine max
  Clone ID: PAT_MRT3847_135950C.1.pep
MARRPARCYRYCKNKPYPKSRFNRGVPDAKIRIFDLGRKRANVDDFPLCIHLVSNEYEQLSSEALEAARICANKYLVKVAGKEGFHLRVRVHPYHVVRINKMLSCAGTDKLQTGMRGAFGKP

SEQ ID NO: 182656 - protein, 104 aa, Glycine max
  Clone ID: PAT_MRT3847_135951C.1.pep
FCSFRLPSSPLRRLLGCGHGILLCDLLLVLMVVVGYHGYSLLISPHHCIDLLPRGNHSLLISPHHCIDLLPRGNLKIDQCPYSTLCSSSSRMCLPHLQLVCLLE

SEQ ID NO: 182657 - protein, 42 aa, Glycine max
  Clone ID: PAT_MRT3847_135952C.1.pep
CLSFFLQLEKIFLNIFMALPFFALGCREIFHYPWAYKPVLLT

SEQ ID NO: 182658 - protein, 137 aa, Glycine max
  Clone ID: PAT_MRT3847_135953C.1.pep
MATPLTGLNGGGGGVAVLTNPVNKVDSSANGGGGFGRSLSESPILIFSFFHKAIRNELDALHRLAMAFATGNCSDIQPLFQRYRFLRSMYSHHSNAEDEVIFPALDMRVKNVAQTYSLEHQGESDLFDHLFELLNSS

SEQ ID NO: 182659 - protein, 108 aa, Glycine max
  unsure (1)..(108): unsure at all Xaa locations
  Clone ID: PAT_MRT3847_135954C.1.pep
MDAVRFYGFVLLLPTFPPSHKQRVFSSASYLFLALALGGLKASQHSVRHFNPFIPTRLNEPMESKGGKKKSSNGRTQSLVYETSLXYRIEDLRPNGGIKKFRSAAYFN

SEQ ID NO: 182660 - protein, 373 aa, Glycine max
  unsure (1)..(373): unsure at all Xaa locations
  Clone ID: PAT_MRT3847_135955C.1.pep
RDDVAVELHSKLLKEFPXDLLSLKRATSLNAFLPLGSCPWVPLPFNXLNFKQDFLPSPMKEKIIYIGMLAFPLLELGRMEEAEEAAKRGFEINKQDCWSQHALCHVLQYKCCFREAVKFMEECSSSWGSSSSFMLTHNWWHVALCYLEGNAPRQRVLEIYDNYIWKELERNDSMSADVYLNAAALLLQLYVRGELDXLGDRLKILSECLTNQENWYMEWHFDVLIVWTLAKTGEISKAEDLLKGLKNRLLRMTKKKQQRMQRGMMLAEALYAYGRDDDNRGLELLDPNFDATDYKIIGASDEQVDVFNEVWYNMLLNTGKPLKAIEVLEKQIKKRDGVPYLWRLLERAYKLANKKEERIANEKATALESRYFN

SEQ ID NO: 182661 - protein, 99 aa, Glycine max
  Clone ID: PAT_MRT3847_135956C.1.pep
ILGHRIARIDTRSKRKPMVFSSSTVLECDGVAIPIVKPSSCQQVATTTTNPSSSAYSNYYHCPIVELLISNKENNQIQHQQTLDMIEKEKKECVNFQIY

SEQ ID NO: 182662 - protein, 43 aa, Glycine max
  Clone ID: PAT_MRT3847_135957C.1.pep
LKKRIKTNQIKYFSRIISLFHFFCLAHEHSNVFIFFGNRRLYY

SEQ ID NO: 182663 - protein, 76 aa, Glycine max
  Clone ID: PAT_MRT3847_135958C.1.pep
AGLNSKDGSKEENDFSGLSSKVSSVAMLLTPESEDEILQASNLKNFTFNELRTATRNFCPDSMVGEGGFGSVFKGW

SEQ ID NO: 182664 - protein, 70 aa, Glycine max
  unsure (1)..(70): unsure at all Xaa locations
  Clone ID: PAT_MRT3847_135959C.1.pep
PSYSSFKVFXTLGGINIENERATLGAWAKRCPQKHSVAESLPDQHKVYEFVVKIRDTLVISRLHAGSRQP

SEQ ID NO: 182665 - protein, 55 aa, Glycine max
  unsure (1)..(55): unsure at all Xaa locations
  Clone ID: PAT_MRT3847_13595C.1.pep
LHSTTRIXASIXHYFLAXSLXCSXXFFLSDSVTPXKPINLVVLPVQNDGSTGLHW

SEQ ID NO: 182666 - protein, 56 aa, Glycine max
  Clone ID: PAT_MRT3847_135960C.1.pep
AILLITCLVHHTIKAMHNRNTEYRRPASSNLLIDTSLDVHVSMVLTSNCTIIPRAE

SEQ ID NO: 182667 - protein, 112 aa, Glycine max
  Clone ID: PAT_MRT3847_135961C.1.pep
MVGQLSEGAIAAIMQKGDTNIKPILQVINIRPITTGNSPPRYRLLMSDGLNTLSSFMLATQLNPLVEEEQLTSNCVCQIHRFIVNTLKDGRRVVILMELEVLKSAEAVGVKI

SEQ ID NO: 182668 - protein, 119 aa, Glycine max
  unsure (1)..(119): unsure at all Xaa locations
  Clone ID: PAT_MRT3847_135962C.1.pep
ADPQGGDFNEIDRXPPRGDXAEETDQGPHTDNKHAGTNPTEDTKQAAKAEEKHKQTXPQREKKRTPTRPDRPGRSTRDATHTDATAEGAEEGQKRQTQGGTPPRNPKQEEGGPQNENKA

SEQ ID NO: 182669 - protein, 85 aa, Glycine max
  Clone ID: PAT_MRT3847_135963C.1.pep
FRVVHGGYSYQFALELLHLDHASQQIDACKAHGVCIQVASFPNPQYTLEPYRMKGRFIGDLWQHLCAIVARGYHCSKGPLSNNCL

SEQ ID NO: 182670 - protein, 69 aa, Glycine max
  Clone ID: PAT_MRT3847_135964C.1.pep
WENKTHPLNFVLKLIPEGLKKLGAFPPSKCSGRTLKGPVANIFFFENNCRGEIPCDFSRTKFFSKNWGN

SEQ ID NO: 182671 - protein, 41 aa, Glycine max
  unsure (1)..(41): unsure at all Xaa locations
  Clone ID: PAT_MRT3847_135965C.1.pep
RAGLSRPSXSXSIXRALAXKXXFSRXPGXCNDGGVRXILXC

SEQ ID NO: 182672 - protein, 35 aa, Glycine max
  Clone ID: PAT_MRT3847_135966C.1.pep
LCIPFQVSPRRPVVCSHRYASNKYSNEHFEGRRGE

SEQ ID NO: 182673 - protein, 51 aa, Glycine max
  Clone ID: PAT_MRT3847_135967C.1.pep
QTSGIINVKRQGCLKSELTHINCFWITDHFAVGKIGVPILLINRPKSWGRR

SEQ ID NO: 182674 - protein, 93 aa, Glycine max
  unsure (1)..(93): unsure at all Xaa locations
  Clone ID: PAT_MRT3847_135968C.1.pep
KLVPQLRTKRHASGQMPQGNAADVAALLDHGGDAGDAXMARWLQIAGLQQLASALACTAHXINRLMHYLSMQGYGTQFTEEKQRLLKLMRNLQ

SEQ ID NO: 182675 - protein, 80 aa, Glycine max
  Clone ID: PAT_MRT3847_135969C.1.pep
PYNPILHFNNIQHYNLIISYKRSTYNLCISIKYHIIHVIFPTSNTYSSYNIQLHTSLITSFSIYTNLYLTYGKYTHFYIH

SEQ ID NO: 182676 - protein, 157 aa, Glycine max
  Clone ID: PAT_MRT3847_13596C.1.pep
MVSRVHKRIAMYRNLHLLRSIRYSHSRPKASVLFQVSDYIQGLKQKLEELNQLTVATARKIVDYDPMPKLEVETQEEGFVIKVLSESSCQGLLVFILEAFEELGLDVLQARVSCAHSFSLEALGNKENNEDTRPLDAQLVEQVVSQAIQNWREVSQI

SEQ ID NO: 182677 - protein, 138 aa, Glycine max
  Clone ID: PAT_MRT3847_135970C.1.pep
NSAREFITLEGDNLTSLFPGTSLDLGGFKLDSMHMFGVWLKDLRIISYLSGGGVVATILIMICVFCVGTIDSVGFHHTGQLVKWNGIPFAIGVYGFCFAGHSVFPNIYQSMADKKQFTKALIICFVLCVLIYGGTASM

SEQ ID NO: 182678 - protein, 165 aa, Glycine max
  Clone ID: PAT_MRT3847_135971C.1.pep
MDLLELWAIFGPGVAGAVFGAGWWIWLDAVVCSLVTVPFLHYLPGIFASFAALMFNCVRKEDIDYSPYDEGEWRLKLWLFIAYVVSFVSLAGSAGLLIQDSLDKSAPSVWTGVAGVLQCVFVLISGLLYWTSHPESVAPRYDSELQTIPGYAHPCIVLFVLCDVK

SEQ ID NO: 182679 - protein, 119 aa, Glycine max
  Clone ID: PAT_MRT3847_135972C.1.pep
MASPPLTAFTCQNLHTLNPRPRCRSFKLFCRPSFSAVAQPSPPLSGDLDRYLRCSMPQNSPLRVAVLVSGGVDSSVALRLLHAAGHSCTAFYLKIWFQEDFENFWSECPWEEDLEYAKD

SEQ ID NO: 182680 - protein, 550 aa, Glycine max
  Clone ID: PAT_MRT3847_135973C.1.pep
MYESLCKYTCYILLQQYGRNESSNKEKDKDLDQFLFDRNDDDLVDEEQQEIEGVKYESESSSDGDDANRRAQPDSFSSQQWPQSYKETTDSYTIAAAPNFESVLRGPSFIYSSFDNRSKSNLDIDGKTPFLSAAEGIRQSTWWEKASVQRLVSGELPIGYGCSFTQTIFNGINVMAGVGLLSTPYTVNQAGWMSMAVMLLFAVMCCYTATLLRYCFENREEIITYPDIGEAAFGRYGRIAVSIILYTELYSYCVEFITLEGDNLTSLFPGTSLDLGGFQLDSMHLFGVLTALIILPTVWLKDLRIISYLSAGGVIATVLIIICVFCVGTIDGVGFHHTGQLVKWNGIPFAIGVYGFCFAGHSVFPNIYQSMADKKQFTKALIICFVLSDLLYGGTAIMGYLMFGDGTLSQITLNMPPGTFASKVALWTTVINPLTKYALLMNPLARSLEELLPDRISSSYWCFILLRTTLVASTVCVAFLVPFFGLVMALIGSLFSILVSAIMPSLCFLKIIGKKATRTQVVLSVAIAAFGVICGILGTYSSLLSIADSY

SEQ ID NO: 182681 - protein, 73 aa, Glycine max
  Clone ID: PAT_MRT3847_135974C.1.pep
PYTCHRGRRRSSHRTPVVPLRRRTPRKMHLVHVRHYDSIDAESDSDRSVAGPGSPGGRIRLPPFPHVPVLRSV

SEQ ID NO: 182682 - protein, 92 aa, Glycine max
  Clone ID: PAT_MRT3847_135975C.1.pep
MNLFKSVFSDDPDPPRPESGSNNAPRDKSRDPDSPPRSSAIDSAAAGVGGDGWNFGGLIKTLTTKSESIIETYRRDLQEFGTGLKKEIEVAQ

SEQ ID NO: 182683 - protein, 117 aa, Glycine max
  Clone ID: PAT_MRT3847_135976C.1.pep
TRNIHRKDKAKLKQQQSSNQIQQDQAKSYGEDSNKQKWNWNVSLQEHAIHKRQQLPLFAESPTSSETQKPQQGQTQTTTEQASLSTQDSSSELDLELRLGPEPQDSSAAETGTRNFF

SEQ ID NO: 182684 - protein, 72 aa, Glycine max
  Clone ID: PAT_MRT3847_135977C.1.pep
EESDPSLCSVEKKDCTFYMVAEKADERINQLLTIVVAAAVNFWHPLRTLQAAPRQSFSGTVFCRAERADSQA

SEQ ID NO: 182685 - protein, 207 aa, Glycine max
  unsure (1)..(207): unsure at all Xaa locations
  Clone ID: PAT_MRT3847_135978C.1.pep
MLPPPLLLLLCLVLLGNLEPAATLIRVPLRRIHPGHRIFSPLYGWEQRAELSKTPTSGGKTAFVPLSKFMNTQYFGDIGLGTPPQNFTVVFDTGSSNLWVPSTRCHFFSLACWFHHRFNPKASSSFRPNGTKFAIQYGTGRLSGILXPDNLTIGGIHNVSVTFGEALWEPSLVFALARFDGILSLGFPTLAVGGVQPPLDALXEQRL

SEQ ID NO: 182686 - protein, 90 aa, Glycine max
  Clone ID: PAT_MRT3847_135979C.1.pep
QCGSQRRRRFRSAMHIANHHSHRFAFRTFSRFLKLRNERELFFPFFNCFNFFATTMIEEDGFRDEEEGLKTKAPFTQSQNVAPLFFFFFL

SEQ ID NO: 182687 - protein, 111 aa, Glycine max
  Clone ID: PAT_MRT3847_13597C.1.pep
AFIHEKKHVHGNVKPSNILLNSEMEPIISDFGLDRLLLNDVTQRANGSARQLMGNQRNQQDLPFVTMGPSTSGGGSIMHYQSTEAPQNIKPHYHGNRYPFGGAWLELLPGR

SEQ ID NO: 182688 - protein, 55 aa, Glycine max
  Clone ID: PAT_MRT3847_135980C.1.pep
LARGHLRERVTPLIASMIWVTFDPFFIHQPFSSSVINNLKKTAPTCPNATNSIHF

SEQ ID NO: 182689 - protein, 550 aa, Glycine max
  Clone ID: PAT_MRT3847_135981C.1.pep
TALKIVTYTRRDRLGLEFLQSAANAVGKDKFLNAIPLHHIDRTRTNLEKFIWGLSKMYSPCKEEKLSRFSRLNHSMLMWDTLKYSLTSMEIAARCGKTSFTPNFALSALYEELKSSSGFILSLMLKLVQKTRSNNSLHVLQRFRGVQLLAESICSGVSLNYANNDESGRGDMLSILKQIEMDLSNTNISFWSQASDPVLLHDPFSTLMWVLFCLPHPFLSCEESLLSLVHVFYIVAVTQAIILYYEKSKDKPSRESALSDCLITDIYNVMDESGYAQQYFVSNYFDPNVDIKNAIRRFTFPYLRRCALLWKILYSSIPAPFCDEENILDRSWNAPKDIMDWANIEIFEVAKIQELEKMFKIPSLDMVLKDELSRSTVSIWCHHFCKEFDLRRIQQNMHVTPAVPFELMRLPNVYQDLLQRCIKQRCPECKSVLDDPALCLLCGRLCSPSWKSCCRESGCQTHAVTCGAGTGVFLLIKRTTILLQRSARQAPWPSPYLDAFGEEDFEMHRGKPLYLNEERYAALTYMVASHGLDRSSRVLGQTTIGSFFLV

SEQ ID NO: 182690 - protein, 70 aa, Glycine max
  Clone ID: PAT_MRT3847_135982C.1.pep
SYLKDIQFVLPFLNKNGHPLFFSKVSKELKKLSLLGLKSNSRRKILSRLSIFLPKRPRFRIFPLDISLDF

SEQ ID NO: 182691 - protein, 108 aa, Glycine max
  Clone ID: PAT_MRT3847_135983C.1.pep
LSSAPCLTIKYVSNEVGAHVYIYHIILLRGAIASRHSLWNYGLISGLGCLKTLMLQFCIPSSPFPFSWVFSWAISSTQVEEAGRFPIYGHIVYKVYILLISTVNMFSF

SEQ ID NO: 182692 - protein, 156 aa, Glycine max
  Clone ID: PAT_MRT3847_135984C.1.pep
MVDCLSTSSINTAPPLAELSELTYSLRLHLGLRLLQSAANAVGKDKFLNAIPLHHIDRTRTNLEKFIWGLSKMYSPCKEEKLSRFSRLNHSMLMWDTLKYSLTSMEIAARCGKTSFTPNFALSALYEELKSSSGFILSLMLKLVQKTRSNNSSHVL

SEQ ID NO: 182693 - protein, 73 aa, Glycine max
  Clone ID: PAT_MRT3847_135985C.1.pep
RTAARRRQKGILYIIRTWNLIIFYVIYFQGLVGAAKECFRCGDHELAGGRGRKEAREEATTLNASMFILHSVG

SEQ ID NO: 182694 - protein, 101 aa, Glycine max
  unsure (1)..(101): unsure at all Xaa locations
  Clone ID: PAT_MRT3847_135986C.1.pep
KXXXXXLNXXXPXXXXXXXXXXXXLHXXXXXNXXXXXLXXXTXXXXIXXXXXXXXXXLXQXXXSXXNXXXXXXXXXXXKXPXKXQXXXHXHXXXXSXYXPT

SEQ ID NO: 182695 - protein, 47 aa, Glycine max
  Clone ID: PAT_MRT3847_135987C.1.pep
RKKQFLLQCLTSKTRSNILLKVLTSILQTGQTALTIKYNQGRSVTTY

SEQ ID NO: 182696 - protein, 55 aa, Glycine max
  Clone ID: PAT_MRT3847_135988C.1.pep
DNGVIIYEALMSLGPNHSVSIGATSMCYFMTTGDIALARLNLERESSKKYLPHVF

SEQ ID NO: 182697 - protein, 77 aa, Glycine max
  Clone ID: PAT_MRT3847_135989C.1.pep
FFLMVIGETIFSYLFIFSCHLTCREFCNMVKRIFICSREDLKKMKCCKLPAFSSEVEEVLLSPDSQNRDETQQSHMP

SEQ ID NO: 182698 - protein, 48 aa, Glycine max
  Clone ID: PAT_MRT3847_13598C.1.pep
ITYFFPYAQRIFIRLFFKVVGPFYPLSRIIYSYIPFQIPSLYFIHLAF

SEQ ID NO: 182699 - protein, 64 aa, Glycine max
  Clone ID: PAT_MRT3847_135990C.1.pep
MRQHNGEGLKSRQLRIQQVRYGQQRAKYFEMARTQQTARKSTGGKAPMKQLAYKAARKSAPTTG

SEQ ID NO: 182700 - protein, 190 aa, Glycine max
  Clone ID: PAT_MRT3847_135991C.1.pep
GDIGTVYLCRLHNSNQLKNQDEDEEDVSCLYAMKVVDKDAVALKKKSQRAEMEKKILKMLDHPFLPTLYAEFEASHFSCIVMEFCSGGDLHSLRFKHPHNRFPLSSARFYAAEVLVALEYLHMLGIIYRDLKPENVLVRSDGHIMLSDFDLSLYSEAIPAVESSPDSLPSSNALPLPYAYTRSHSFMSPF

SEQ ID NO: 182701 - protein, 53 aa, Glycine max
  Clone ID: PAT_MRT3847_135992C.1.pep
FDSQIIAWFCPPCTLLMVTAWARDNSGPYTNHSYMEINRRYSSLLQLLNPQTA

SEQ ID NO: 182702 - protein, 78 aa, Glycine max
  unsure (1)..(78): unsure at all Xaa locations
  Clone ID: PAT_MRT3847_135993C.1.pep
IGIIIFQYTVXIPLQQLFSFGLGLVSRSFDFQGDGFAYKLRYECGLRSGLVELHQQNLSAMNAHPWYFAYLNSHPPHV

SEQ ID NO: 182703 - protein, 78 aa, Glycine max
  Clone ID: PAT_MRT3847_135994C.1.pep
KKKKKKKKKKKKKKKKKKKKKKKKKKKKKKRKKKKKKKKKKAKIKKNEKKKKKAKKKKKIAESKKKVLTYKKLNTTQI

SEQ ID NO: 182704 - protein, 74 aa, Glycine max
  unsure (1)..(74): unsure at all Xaa locations
  Clone ID: PAT_MRT3847_135995C.1.pep
ALTLGMWEINVPHPLPVMFHSLAPPGVFGVXQGAGFKAGGFVFFEVPTTPGKPLEVTIXFFFVGAKQVVHAPHE

SEQ ID NO: 182705 - protein, 120 aa, Glycine max
  Clone ID: PAT_MRT3847_135996C.1.pep
VSWFDFYLFTRENNKCKKNEEKKCIRTYCNYIEMEVTRKLDDSMSSNFTNQSKLKLKNLILTIQCQVPKMEDLPKKLLKPFISQLLKLFCVKETLLKEKHINMNTTKLPLFFYQRKPLNT

SEQ ID NO: 182706 - protein, 79 aa, Glycine max
  Clone ID: PAT_MRT3847_135997C.1.pep
PFRVLADRAPTPAGESPVLKERKEQASIASFGFMHVPKLIMFTWMIMTYVSVVRRASMSLDHLIWIPVMINMPGVIDTK

SEQ ID NO: 182707 - protein, 104 aa, Glycine max
  unsure (1)..(104): unsure at all Xaa locations
  Clone ID: PAT_MRT3847_135998C.1.pep
ARDYYKSPPPPSPSPPPPXPSPSPPPPYYYHSPPPPSPSPPSPYYYKSPPPPSPSPPPPYYYQSPPPPSPTSHPPSPAPAPKYIYKSPPPPVYIYASPPPPIYK

SEQ ID NO: 182708 - protein, 119 aa, Glycine max
  Clone ID: PAT_MRT3847_135999C.1.pep
LLPQLLLPSTFTNHLHLRFISMLPHLHLSTSSSFHRGIKASSILSQVKHLSSCLSSLNKSLNVSSLCYNVYDSDQVDSICLMAILHVLILLCSSDGQIQTGKRDLKCKCQVNVKSTVHF

SEQ ID NO: 182709 - protein, 68 aa, Glycine max
  Clone ID: PAT_MRT3847_13599C.1.pep
HWIMFGGDPNVHHHHNLERDRDNRMSNRYLLRKMMSKCHYPMIFYKVIPISNFCEKIGRSKNRTYIIL

SEQ ID NO: 182710 - protein, 87 aa, Glycine max
  unsure (1)..(87): unsure at all Xaa locations
  Clone ID: PAT_MRT3847_1359C.1.pep
LSLAARLFXRSLSSPFPPACGGFFLPGSLLRVVSPPPKKSPGLPVRSPFLFLCGSPXPRSFFVSARCVGWGISLXGSCSVGLFRGPP

SEQ ID NO: 182711 - protein, 62 aa, Glycine max
  Clone ID: PAT_MRT3847_135C.1.pep
DAGGKIKKGAGGRKGGGPKKKPVLRSVKAGLQFRRRGLWPFLEKGRVARASDQVPTVVESVM

SEQ ID NO: 182712 - protein, 180 aa, Glycine max
  unsure (1)..(180): unsure at all Xaa locations
  Clone ID: PAT_MRT3847_136000C.1.pep
WRAPPKKYPPVSPPYHYPSPPPPPSPSPPPPYYYKSPPPPSPSPPPPYYYHSPPPPSPSPPPPYYYHSPPPPSPSPPPPYYYKSPPPPSPSPPPPYYYQSPPPPSPTPHPPYYYKSPLPPTSHPPPYHYVSPPPPSPSPPLXYHYTSPPPPSPAPAPKYIYKSPPPPVYIYASPPPPIYK

SEQ ID NO: 182713 - protein, 203 aa, Glycine max
  Clone ID: PAT_MRT3847_136002C.1.pep
TSPPPPYYYKSPPPPSPSPPPPYYYHSPPPPKEHVHPPYYYHSPPPPSPSPPPPYYYKSPPPPSPSPPPLYYYHSPTPTSPSPPPPYYYHSPPPPSPSPPPPYYYKSPPPPSPSPLSPYYYQSPPPPSPTPHPPYYYKSPPPPTSHPPPYHYVNPPPPSPSPPPPYHYTSPPPPSPAPAPKYIYKSPPPPVYIYASPPPPIYK

SEQ ID NO: 182714 - protein, 231 aa, Glycine max
  unsure (1)..(231): unsure at all Xaa locations
  Clone ID: PAT_MRT3847_136004C.1.pep
MTARGSDPIRGRLRPQMALALAIALISITLVSVNADGYPYYSPPPPYQYTSPPPPPYLYKSPPPPSPSPPPPYHPHLHHLLXYYKSPPPPSPSPPPPYYYHSPPPPSPSPPPPYYYHSPPPPSPSPPSPYYYKSPPPPSPSPPPPYYYQSPPPPSPTSHPPYYYKSPPPPTSYPPPPYHYVSPPPPSPSPPPPYHYTSPPPPSPAPAPKYIYKSPPPPVYIYASPPPPIYK

SEQ ID NO: 182715 - protein, 101 aa, Glycine max
  Clone ID: PAT_MRT3847_136005C.1.pep
MASDCLGKPDNSLGQNRISKIPPKAEFYNGQNAIVAVNVHLGYNQEDSLVMNRASLSRGMFRSEHIRSYKSEIDNKESSDKKRKPEDIVNFAKLQSKIGRV

SEQ ID NO: 182716 - protein, 34 aa, Glycine max
  Clone ID: PAT_MRT3847_136006C.1.pep
ISSVYIYIFLLLSKLVIRLATFVPYPCIIAWFKV

SEQ ID NO: 182717 - protein, 56 aa, Glycine max
  Clone ID: PAT_MRT3847_136007C.1.pep
ILLRGECKNGKGFNVSPGKMWALKYGSHFCFFFIFSSLFFFFFFFYIFFFKFFFYW

SEQ ID NO: 182718 - protein, 60 aa, Glycine max
  unsure (1)..(60): unsure at all Xaa locations
  Clone ID: PAT_MRT3847_136008C.1.pep
RCIDRNANSVAKYAPLAXLCGGFIFFASLELLTMWNGTACKTPLAPKVQPYVHLRVELGC

SEQ ID NO: 182719 - protein, 69 aa, Glycine max
  Clone ID: PAT_MRT3847_136009C.1.pep
LMPRKFWSQERFFLLLSFRPSPRINTTTFLFIQNPNKAKNKHTYSFFLVFKVNNIVIAQTSLLSSSRSR

SEQ ID NO: 182720 - protein, 75 aa, Glycine max
  Clone ID: PAT_MRT3847_13600C.1.pep
TLTPTLSNLPKPYNTPSPPLPTPYSLFITSHFSTTNPSYPLHFPLYSTILFLFTYLFFISQSLILPIFPTIFLLT

SEQ ID NO: 182721 - protein, 67 aa, Glycine max
  Clone ID: PAT_MRT3847_136010C.1.pep
SIINIYSSARVRLHTMTLLIPSHCKEPLAPGTLIFFILIVVKIVSKIKGLPSDSLARSHSIKPNHIL

SEQ ID NO: 182722 - protein, 62 aa, Glycine max
  unsure (1)..(62): unsure at all Xaa locations
  Clone ID: PAT_MRT3847_136011C.1.pep
VGITNFHGNLSFLINNPKQCTGDCNITWPSHCXFKNAGNTLKPAFSVPQATARSSENAESYA

SEQ ID NO: 182723 - protein, 76 aa, Glycine max
  Clone ID: PAT_MRT3847_136012C.1.pep
REKISYSHTHKMVNYRCISLTYPYPTTKGSTIGYCSRLFMMLKNQNCFLHHQNQQQSSSSKVLLLDTWAEISSQEF

SEQ ID NO: 182724 - protein, 89 aa, Glycine max
  Clone ID: PAT_MRT3847_136013C.1.pep
ELGYLSKVKFGICDNRTLMPIVQHQWLTRGKAKPKYLTQINDTPPSLPCWKETQEANWNLQNKAPFKDGFFIGSVKAHQNPMVGLLGQS

SEQ ID NO: 182725 - protein, 49 aa, Glycine max
  Clone ID: PAT_MRT3847_136014C.1.pep
EQSKSANVAQVAKSSPHENVTILVIEYHRKWDFPTSSIESMKKMIFYID

SEQ ID NO: 182726 - protein, 62 aa, Glycine max
  Clone ID: PAT_MRT3847_136015C.1.pep
EKPWSLVLKFFLHSPYIFKRDLKYKLAGIFLPRLKNPPVIPPKKPFLARGQYLTWGDFNSPG

SEQ ID NO: 182727 - protein, 49 aa, Glycine max
  Clone ID: PAT_MRT3847_136016C.1.pep
ETSIFNQGIRDATFKICKLFDLNKSPQCCSPEYQHRLLQLWPFQHKLRL

SEQ ID NO: 182728 - protein, 35 aa, Glycine max
  Clone ID: PAT_MRT3847_136017C.1.pep
VELGILMLYICAIVYLCMFRNVITYSMCVVSVWIL

SEQ ID NO: 182729 - protein, 58 aa, Glycine max
  Clone ID: PAT_MRT3847_136018C.1.pep
TKGAGPPGGPPFALQKKQSPLFQPPKLWGPPRRGPPFLTPQKGRSRMRPPPPTWPPWD

SEQ ID NO: 182730 - protein, 66 aa, Glycine max
  Clone ID: PAT_MRT3847_136019C.1.pep
SKKNIFFSFSGRTKNLKKSTYATKEQKMTINTDQSSSPLYRVTNFVMILILKTCSILVYVVLSGRL

SEQ ID NO: 182731 - protein, 79 aa, Glycine max
  Clone ID: PAT_MRT3847_13601C.1.pep
KGQKQRERFKNSRCRKRKKGTKLASDEARKQNNKSRNRNQRGNYEVRYLALAWFIQVNQTIPKEDLFQAPIRKLKNCEA

SEQ ID NO: 182732 - protein, 301 aa, Glycine max
  Clone ID: PAT_MRT3847_136020C.1.pep
MAIISDFNEEEQKPTHSSPPQPQSSSSSSSSSFSAAFDRSNPIAFLERVFQFVSEHSDFLATESAEKEIALLVRAAGKKKREFLKSEREKAEKKKREDLKASEEREKSDKRLKEEKEPKAEDTSKDESTSKVPNKGNGLDLEKYSWTQSLQEVNVNVPVPNGTKSRFVTVEIKKNHLKVGLKGQPPIIEGEFYKSVKPDDCYWSIEDQNAISILLTKHDQMEWWKCLVKGDPEIDTQKVEPENSKLGDLDPETRQTVEKMMFDQRQKSMGLPTSEELQKQEMLKKFMSEHPEMDFSRAKIS

SEQ ID NO: 182733 - protein, 117 aa, Glycine max
  Clone ID: PAT_MRT3847_136021C.1.pep
MKPLAPFISSTQFSRQEDQFQERTSEQKIIRIRKFVLCCGCFTALVVILVVILIVLSFTVYNVKEPEVRMNSVTLLSGTFANGGATNNVTLVADIFVKNTNAFTLRFGSTSTIVYYD

SEQ ID NO: 182734 - protein, 120 aa, Glycine max
  unsure (1)..(120): unsure at all Xaa locations
  Clone ID: PAT_MRT3847_136022C.1.pep
WSCPHHLKYVAGLQCTWYLLLLNTTFTTYPGSQFTVNSRPTQQGSRSRHVGLFVKPMNALLACYTILFPLYVPFHVLXGKPDVTTTMRPPGTITIVDQGFSSCLVLWPGLPPATDMTTDS

SEQ ID NO: 182735 - protein, 128 aa, Glycine max
  unsure (1)..(128): unsure at all Xaa locations
  Clone ID: PAT_MRT3847_136023C.1.pep
MEPSVSAPPKPWEKAASSSGPAPFKPPSAGSTSDVVEASGTAKPGEIVPASDKTATVNRNALGRPLPTRPWEQNNGSTSYGGYGSTMNYNSGYGSYGGVGGLYGGGMYGSSMYRGGYGGLYGSSXMYG

SEQ ID NO: 182736 - protein, 80 aa, Glycine max
  Clone ID: PAT_MRT3847_136024C.1.pep
TITRMHNRKMYFGFPAVLNEYTNASYPTNFHEHASSLKVPCIELTGSPPSEEGTLMQAPHYKRDWSRTNRLHQFKRGTRL

SEQ ID NO: 182737 - protein, 72 aa, Glycine max
  Clone ID: PAT_MRT3847_136025C.1.pep
RSDGARSGRAAPSAGSQSDSVNPAPPTKAAESGGGPMPGGMGCTIAQRHGYWHWECRRHTWRNGAVTGTTNI

SEQ ID NO: 182738 - protein, 140 aa, Glycine max
  Clone ID: PAT_MRT3847_136026C.1.pep
NPRKQRRCWSPDLHRRFVDALQQLGGPQVATPKQIRELMQVVGLTNDEVKSHLQKYRLHFKRPQGSSIGHANSGLCKMAQDKCGDDKSGSPQGPLFLGGSGKGLSSSGRNSMDTEGDEESDCRNWKGGIHHQLQPESDVL

SEQ ID NO: 182739 - protein, 418 aa, Glycine max
  Clone ID: PAT_MRT3847_136027C.1.pep
MGRTPCCSHEELRKGAWTVQEDQKLITYIQKHGTGSWRTLPQKAGLKRCGKSCRLRWFNYLRPDIKRGKLSQEEEQTIIKLRAVLGNRWSSIAKHLPMRTDNEIKNYWNSYLKKQFEKNAVDPSSSKPNSTDSSSESKSNDTCMVPSEKTDCHEPNTSQSHQHNLSRSISSSTHLLNKVASKILASGYLELIKSCQPVVAGNSKSESVVKTGIGLESDNIRDPLEPNLTSPSHSITSAKLLNKMATSLPHKVHGLEAAKAVFSKLMENSEKGATASDDSFVGGCLNALSPFEDKPHITKTIDSPSGPTLMFNHVTTPSCFSEDNEDNWQCVSSNYVSFKICAANGGDCSVSEINLGESSSSTSSFLFENADLGTCDDEISKYIQYCREKNLWTSNANNVGITRPYDVRGRYLKRDNIS

SEQ ID NO: 182740 - protein, 47 aa, Glycine max
  Clone ID: PAT_MRT3847_136028C.1.pep
TTIFKRMAAETTSPSTSTSDTYILNFITFTYRSYITFLRILYNTNTQ

SEQ ID NO: 182741 - protein, 145 aa, Glycine max
  Clone ID: PAT_MRT3847_136029C.1.pep
APELQDAGCWTDAATLAASHLKGSDYARVLQRWATHVLHTEHNIWRALILYVAAGALQEALAALREAQLPDTAAMFILACRETHAEVVSNLGILDEESSSSVKDELLNLRALDPNNEDVIAVNEYLGQYQRKLVHLCMDSQPFSE

SEQ ID NO: 182742 - protein, 66 aa, Glycine max
  Clone ID: PAT_MRT3847_13602C.1.pep
NFLSSIPLTLYTIQSPSCLSITTLTALLIILFHSLHSFFTKSLLILNLFITSFFIFYIYNHPILLL

SEQ ID NO: 182743 - protein, 52 aa, Glycine max
  Clone ID: PAT_MRT3847_136030C.1.pep
SHPNMVILGDEVAASKLNLCCNCQTRLLNAIQARAIEDKYHGGHLLPERLIE

SEQ ID NO: 182744 - protein, 106 aa, Glycine max
  Clone ID: PAT_MRT3847_136031C.1.pep
TAARRRQKGDEKKFTSPIRPVNFLLRPENLLITPTQRSVDYVGGFESSAGEELKGRNAQELSLRILVSNKHTECFPSLQRRAGEEDRVVAPQPPICVGKTKGIHNH

SEQ ID NO: 182745 - protein, 135 aa, Glycine max
  unsure (1)..(135): unsure at all Xaa locations
  Clone ID: PAT_MRT3847_136032C.1.pep
MTSLSSLVLLLAALILFPQVLADYEKAPVYKPPIEKPPLYKPPIEKPPVYKPPVEKPPIYKLSVXKPPVYKPPVEKPPIYKPPVEKPPVYKPPIEKPPVYKPPVEKPPVEKPPVYKPPYGKPPYPKYPPIDDTHF

SEQ ID NO: 182746 - protein, 44 aa, Glycine max
  Clone ID: PAT_MRT3847_136033C.1.pep
GKSCVCCPSQSRVHGEMTAEPCYIPVTVGGAVFRARFCFLRLWP

SEQ ID NO: 182747 - protein, 158 aa, Glycine max
  Clone ID: PAT_MRT3847_136034C.1.pep
MSNMTSLSSLVLLLAALILFPQVLADYEKPPVYKPPIEKPPLYKPPIEKPPVYKPPVEKPPIYKPPVEKPPVYKPPVEKPPVYKPPVEKPPVYKPPVENPPIYKPPVEKPPVYKPPIEKPPVYKPPVEKPPVEKPPVYKPPYGKPPYPKYPPIDDTHF

SEQ ID NO: 182748 - protein, 54 aa, Glycine max
  unsure (1)..(54): unsure at all Xaa locations
  Clone ID: PAT_MRT3847_136035C.1.pep
RIAAPPRYCXNVLVRGTNANSCGWEEQMSGVLRGLECTTTILIQESFTSQVPVI

SEQ ID NO: 182749 - protein, 175 aa, Glycine max
  Clone ID: PAT_MRT3847_136036C.1.pep
MTSLSSLVLLLAALILFPQVLADYEKAPVYKPPIEKPPLYKPPIEKPPVYKPPVEKPPIYKPPVEKPPVYKPPVEKPPVYKPPVEKPPVEKPPVEKPPVYKPPVEKPPVYKPPVENPPIYKPPVEKPPVYKPPIEKPSVYKPPVEKPPVEKPPVYKPPYGKPPYPKYPPIDDTHF

SEQ ID NO: 182750 - protein, 44 aa, Glycine max
  Clone ID: PAT_MRT3847_136037C.1.pep
RGGVNKISLKYRLFSNNHHEARCLIKMDNRRRELSIVSARRDCK

SEQ ID NO: 182751 - protein, 123 aa, Glycine max
  Clone ID: PAT_MRT3847_136038C.1.pep
MSKLESVALREAISGIMADCKEKNRLFVETIELQIGLKNYHPHMDMRFSGYVKLPHIPCPKMKICMLGDAHHVDKAQMIGLHWMDVEALNKLDQNSKLVKELAKTYHAFVAVCNRKLNIFLVF

SEQ ID NO: 182752 - protein, 51 aa, Glycine max
  Clone ID: PAT_MRT3847_136039C.1.pep
LYIRKKKNKKKKKKKKKKEKKKKKKKKKKKKKKKKKKKKKKKKKNKKKKKK

SEQ ID NO: 182753 - protein, 93 aa, Glycine max
  unsure (1)..(93): unsure at all Xaa locations
  Clone ID: PAT_MRT3847_13603C.1.pep
HGCLDGPRVFQRNFGPSAPPXGGFFFLLFFCGXXPPLAEGVFKIFFMYVFSVPIMCNDPPVLLFAGHLYCGASKYFSLNKKIRGEKAFFRAAS

SEQ ID NO: 182754 - protein, 110 aa, Glycine max
  Clone ID: PAT_MRT3847_136040C.1.pep
EWQDCQHKRFIGEGCRARIRSILFFEFVSQSLNSKTTPALAKMERNQFYIFILHQKRKGKHNANVKRKFQFYCKEKISILLKLKVSPILSLKTVLPSSNNTYKNIIFQTP

SEQ ID NO: 182755 - protein, 76 aa, Glycine max
  Clone ID: PAT_MRT3847_136041C.1.pep
PSFFLSHLYLLDLTFILDGQDWCCTMLQFLRSSTWDHLLLLVVPPSQFTFQFALFGEYDIFSLHKANSFVGFVFLI

SEQ ID NO: 182756 - protein, 84 aa, Glycine max
  unsure (1)..(84): unsure at all Xaa locations
  Clone ID: PAT_MRT3847_136042C.1.pep
DXSTIHTTSETRYSPTLYITTYLSVLFCFSHLFLSILISLNDFTXTCYSLLLLHLLLMLFPXLFSIDCFYLRDHVLHFLXTNTL

SEQ ID NO: 182757 - protein, 44 aa, Glycine max
  Clone ID: PAT_MRT3847_136043C.1.pep
IGKGFRTKGKSDKFLGRSLMLKKIPPLPMEPAKRKPGLRTLTLF

SEQ ID NO: 182758 - protein, 41 aa, Glycine max
  Clone ID: PAT_MRT3847_136044C.1.pep
ILSLTLSFYNESMMAIIYVSLGAKSNNNGFHCSVLSNCISR

SEQ ID NO: 182759 - protein, 86 aa, Glycine max
  unsure (1)..(86): unsure at all Xaa locations
  Clone ID: PAT_MRT3847_136045C.1.pep
YVSSFGSSGPEGSGSAAGESKPVLTEEERQEQTKRMLELVAQKQREREEREEREALEREXQRRRQGQELSXXRQXLQEDETRPQSK

SEQ ID NO: 182760 - protein, 218 aa, Glycine max
  unsure (1)..(218): unsure at all Xaa locations
  Clone ID: PAT_MRT3847_136046C.1.pep
EKKSITSRAHCLVLALPGQGHINPMLQFSKLLERQGVRITLVTTRFYSKNLHNVPSSIALETISDGFDEVGPQEAGSXQAYIDRLCQVDQETFAELLEKLGKSNDHVDCVIYNSCLPWALDVAKRFGIAGAAYLTQNMAVNSIYYHVQLGKLQAPLIEQEISLPALPKLHLQDMPSFFFYEDLSLLDLVVSQFSNIDKADWILCNTFYDLDKEVRKKI

SEQ ID NO: 182761 - protein, 154 aa, Glycine max
  Clone ID: PAT_MRT3847_136047C.1.pep
HSELSSYGVVVNNFYDLEKVYADHSRNVLGRKARHIGPLSLCNKDNEEKAHRVKEASIDEHECLKWLDTKKPNSVVYLCFGSAVKLSDSQLREIAMGLEASGQQFIWVAGKTKEQKGEKWLPEGFEKRMEVKGLIVRINVSCEKRHVTYVGTNK

SEQ ID NO: 182762 - protein, 42 aa, Glycine max
  Clone ID: PAT_MRT3847_136048C.1.pep
SLSYAPIRSKNRNTTMGILEILEYCKGHAVILLQSWVVYNLS

SEQ ID NO: 182763 - protein, 502 aa, Glycine max
  Clone ID: PAT_MRT3847_136049C.1.pep
MFLVVRACGSSSAHIQPTLTPQRSSINVVVRCSISSVQEKEEKGTELDSSVSFPLIRAAKRVVLVRHGQSTWNAEGRIQGSSNFSVLTKKGESQAETSRQMLIDDHFDACFASPLARSKRTAEIIWGPRHEPIIPDYDLREIDLYSFQGLLKHEGKERFGSAFRQWQVDAANFIIDGHYPVRELWERARSCWTRILAHDSRSVLVVAHNAVNQALVGTAIGLGPEYFRTLLQSNCGVSVLDFIPRSEGGSPHICLNGLNQTPGSPIAGGKSGGRESSKRIILICNGSTQGNTEDVFPFGGDQPLNMLGVIQSQKSAELLLDLKVNSIISSPNKACVGTATIISQVQEAADCLGADCVPRYVEMKQMGNFDVETLFKQSEMDISNFPPFQPGWLNRVDDGLRTTLWDQSGKTWQSLLDEIDESNTEVVVAVGHPAKHIALMGHCLNLTKEWLGSFHLDAGSVSVVDFPDGPKGKGVIRCINYTAHLGRWSIPITRSTEDGEEF

SEQ ID NO: 182764 - protein, 50 aa, Glycine max
  Clone ID: PAT_MRT3847_13604C.1.pep
LFFSFYFFFLLSLLNDVCWLPTNNEAMKVNWGKWKLVGFFLLAEVKLDFR

SEQ ID NO: 182765 - protein, 65 aa, Glycine max
  Clone ID: PAT_MRT3847_136050C.1.pep
KNKIKWIITSEREKENRLLFSERITYDPAHIVNQGNTVEKEKPEITGHFLSGTHATVISLIKKMQ

SEQ ID NO: 182766 - protein, 143 aa, Glycine max
  unsure (1)..(143): unsure at all Xaa locations
  Clone ID: PAT_MRT3847_136051C.1.pep
HGKYMACCLMFRGDVVPKDVNASVATIKTKRTIQFVDWCPTGFKCGINYQPPTVVPGGDLAKVQRAVCMISNSTAIAEVFSRIDHKFDLMYAKRAFVHWYVGEGXEEGEFSEAREDLAALEKDYEEVGTESSGGDAGGDAAEG

SEQ ID NO: 182767 - protein, 110 aa, Glycine max
  Clone ID: PAT_MRT3847_136052C.1.pep
HKFINHSHLSSHHIIVIVSLTHHGRSNAFAPLFCQPPHRDLNNNLHLHDAAQRQHDPTYTHGTTELSSSSSETHTEYYTCSHYLVPLQDPQAQILSSMPYTYSTMWIKAY

SEQ ID NO: 182768 - protein, 95 aa, Glycine max
  unsure (1)..(95): unsure at all Xaa locations
  Clone ID: PAT_MRT3847_136053C.1.pep
MIKMGCFHLIVDSPCFVVVVVGVLRVSLXDAQLDRSFYRDTCPNVHSIVREVVRNVFKIDPGNRAIRRRRQLXECFVQRSDASVLWNSTAIIDSE

SEQ ID NO: 182769 - protein, 102 aa, Glycine max
  Clone ID: PAT_MRT3847_136054C.1.pep
KCAKVCIVVAISKACDFVTRRYLGFGKRLKRPTPIIFIFKFQTSTLIWTGPKSAKKHQKGGKKGFWEVFPSPSNGKTCKKLLFEVEITFLQKQILVSRVLLY

SEQ ID NO: 182770 - protein, 109 aa, Glycine max
  unsure (1)..(109): unsure at all Xaa locations
  Clone ID: PAT_MRT3847_136055C.1.pep
VAXTXTXARNSARAAXLXXXCXXLXCXAVMXXXXLVPSXGHVXECXXXXXXVXXXPDXXWXCARSXCSGVRXILGXASXTFXXQTVCKCLXXAANXYGINDXXXQXXAA

SEQ ID NO: 182771 - protein, 123 aa, Glycine max
  Clone ID: PAT_MRT3847_136056C.1.pep
LGELRSSISCECSIVLVHLQALNTVQTYTLSLPIVSASYEYGVRRAIQHEQLLGALLLGWDMHDCFVIRRDAYMLKYDTRSLLEDEAEQSNSQLSGGSIASTRLKDAVEKERPSVTICADVFA

SEQ ID NO: 182772 - protein, 110 aa, Glycine max
  Clone ID: PAT_MRT3847_136057C.1.pep
AASIAVPLCKSVGRIAINLGVVYCGAIRVMEEWNCVKNNEMCGSRRKEESGAELKSKLTVCRPWPSLLVCSVSNGTSRENSSSQRLYSLQYTQTNCFKIFLFLLFLIFKA

SEQ ID NO: 182773 - protein, 25 aa, Glycine max
  Clone ID: PAT_MRT3847_136058C.1.pep
VLLNEAFMEGDYPGRVIICVLRYAL

SEQ ID NO: 182774 - protein, 174 aa, Glycine max
  Clone ID: PAT_MRT3847_136059C.1.pep
ARVRMVRACCLGLILSRIAVIGPQGTPRPAAASCELVALSHRGRAGAALSSRVRLNRLPGALDTARPRRDGTGRPAPGIGRAEARADSRCLSVQRRRTAPGPTERPRTLDGPGVTPPGVNRRVSRPYVLGTVLAFRFKIDCPLSGNPSPRSETRYRVPLQTLSEVGPSDVVVHH

SEQ ID NO: 182775 - protein, 45 aa, Glycine max
  Clone ID: PAT_MRT3847_13605C.1.pep
LLQGFIVVPELVKHVDTYIKYGTKEFQALLYAVFQVISGSTGNRK

SEQ ID NO: 182776 - protein, 300 aa, Glycine max
  unsure (1)..(300): unsure at all Xaa locations
  Clone ID: PAT_MRT3847_136060C.1.pep
MSMNLVVGVLRPPLIAFRRNKISIISRVNSIESSSSSPMDQPKRVVVCGGGVIGVCTRLSPKNSRXANFLAEKGAAVTLIEKSDVACAASGKAGGFLALDWCDGGPLEELARASFNLHRSLSEELEGPRSYGYRALTTLSLTVTESEGSSSATSTLPSWVDGPARGAKTIGTTETTAQVHPRLFTRTLIDRAVEKHGVKVEIAKLERLVVAEGRVGSVVLEGGRVLEADAVVLALGPWSSKLVLLSSLFRVYGLKAHSLVLEPREHSSITPHALSLTYYPSGRETPLVDLEVYPRPLEPN

SEQ ID NO: 182777 - protein, 53 aa, Glycine max
  Clone ID: PAT_MRT3847_136061C.1.pep
ASQQKQQAKLRLKITMVVLKVSLMRLILVGVQAELMKLNVDMTHQTSSYNDGK

SEQ ID NO: 182778 - protein, 374 aa, Glycine max
  Clone ID: PAT_MRT3847_136062C.1.pep
MDHPKRVVVCGGGVIGVCTAYFLAEKGADVTLIEKSDVACAASGKAGGFLALDWCDGGPLEELARASFNLHRSLSEELDGPRSYGYRALTTLSLTVTESEGSSSATSTLPSWVDGRARGAKTIGTTETTAQVHPRLFTRTLIDRAVEKHGVKVEIAKLERLVVAEGRVGSVVLEGGRVLEADSVVLALGPWSSKLVLLSSLFRVYGLKAHSIVLEPREPSSITPHALFLSYYSSKRGKSLDPEVYPRPTGEVYICGMSKEEEVPDDPEEIRGNPESIAMLKKVAKTVSSYLGEGVARMKAEQACFLPCTDDGVPVIGEVPGVKGCYVATGHNCWGILNGPATGAAVAELVIDGHSSIVDLKHFSPARFLGRRKA

SEQ ID NO: 182779 - protein, 232 aa, Glycine max
  Clone ID: PAT_MRT3847_136063C.1.pep
MAISGDLRVSATLPLYRSHSPPLRTSSQSSPKVDFHRFLNRACSISEFTPKCPYLTIVRCNMRGYCKPVAAVLGGPKFTSNSVSQETENFLLDAVKMNFFERLNLAWKIIFPSATSRKNSNARIAKQRLKMILFSDRCEVSDEAKRKIVSNVVRALSDFVEIESQDKVQLSVSADTDLGTIYSVTVPVRRVKPEYQEMDEFGTITNVEYKDTGETSGSVDVTFDFYVPDERS

SEQ ID NO: 182780 - protein, 56 aa, Glycine max
  Clone ID: PAT_MRT3847_136064C.1.pep
HADGVCPHVFVTDLGFVGGDNADLVARGCPSFFFLWGGPLFSRKSKSCAPPRLKKS

SEQ ID NO: 182781 - protein, 232 aa, Glycine max
  Clone ID: PAT_MRT3847_136065C.1.pep
MAISGDLRVSATLPLYRSHSPPLRTSSLPSPKVDFHPFLKGACSISEFTPKCPCLTIVRCNKRGYCKPVSAVFGGPKFTSDSVSQEAENFLLDAVKMNFFERLNLAWKIIFPSATSRKTSNARIAKQRLKMILFSDRCEVSDEAKRKIVSNVVRALSDFVEIESQDKVQLSVSADTDLGTIYSVTVPVRRVKPEYQEMDEFGTITNVEYKDTGESSGSVDVRFDFYVADESS

SEQ ID NO: 182782 - protein, 119 aa, Glycine max
  Clone ID: PAT_MRT3847_136066C.1.pep
SCSYPQDINELVHKKESQPQISSCLSYELHWRRKRHRNPIPDHGHQSQSSRCWCKEQHQASAATHKSKTTQSTRKQAQRRTALSTAPVGQAAQYCAPGPPGRHTRLLVQGVGGALGTPG

SEQ ID NO: 182783 - protein, 130 aa, Glycine max
  Clone ID: PAT_MRT3847_136067C.1.pep
ARGTQHNTPWDRHTTHHQREEREREKTRERERKRERERERWQTRRGTARSWARSTRTSKRETSTRLSNSTSFSTAGSSGRGSTKMRTTSCGRASPPSSPKDSRRWPPSSSRSSSTTSKPTKHRSIKAIFG

SEQ ID NO: 182784 - protein, 144 aa, Glycine max
  unsure (1)..(144): unsure at all Xaa locations
  Clone ID: PAT_MRT3847_136068C.1.pep
KNVLKFLVDMDNVGIPLPRADLERLAWACTREDHYIVVKELYNRIRERYDKISLSVCNHAIWLMGKAKKWWAALEIYEDLLDKGPKPNNLSYELIVSHFNFLLSAANEKGIWRWGVKLLNKMDDKGLKPVCREXNAVIVGCSKV

SEQ ID NO: 182785 - protein, 88 aa, Glycine max
  Clone ID: PAT_MRT3847_136069C.1.pep
ALASAHASVTCWGTEKCGHIFMILMSSSIVLCDKNLILFNQKLLLKSFVSHGSSSNFVIQFGSKTRRLNGFISKAEKHSRKSSWWQNF

SEQ ID NO: 182786 - protein, 167 aa, Glycine max
  Clone ID: PAT_MRT3847_13606C.1.pep
LEKLWNWNPLLLPPRFSSLKHAFPSTTTRLVAHNSVSETVPIHKEKEQTLPSVKPTYSPTPPNRGLRTPHSGYHFDGTTRKFFEGWYFKVSIPERKQSFCFMYTVESPLFRKPLTQLELAQYGPRFTGVGAQILGADDKYVCQHSPQSHFFWGSRHELMLGNTFEPN

SEQ ID NO: 182787 - protein, 59 aa, Glycine max
  Clone ID: PAT_MRT3847_136070C.1.pep
PKAKNQKNCLLVYSIGQFQFSLFLINKNVVYLKFIRKSILMGDSSSEAPNYLHYSNLFG

SEQ ID NO: 182788 - protein, 103 aa, Glycine max
  unsure (1)..(103): unsure at all Xaa locations
  Clone ID: PAT_MRT3847_136071C.1.pep
SXXSLXYXXHIXLXXXYXXXSXFFXXCXXXXHXVXXXXXFXSVXSXXIXXSHXXSXSXTXXTXISXXHXXXXXIDXGXXHFGFSSSRIXSXSSRILXFXXTXX

SEQ ID NO: 182789 - protein, 490 aa, Glycine max
  unsure (1)..(490): unsure at all Xaa locations
  Clone ID: PAT_MRT3847_136072C.1.pep
ARCEGRANCFILFLFLCQPAHSSPRSNRKWQRIVGILAIDIYFPPACVQHRATLTLKFDSSRTYAIGQGHISLSICAEVGDVNEVLMAVYSSLLEKFAMDLKQMVRLEXVGRKTGNDKRKAIKPFIIQIXEKYGNTYIDVFKXTNASYXETAVFFVVANGVERSPWDGAFAIVIYIDRAVXAVGFARNTGXSAVFAMLIGTDAPISFECIXRGSHMAHAYDFYKPNLASEYPVVDGKLSQTCYLMALDSCYNHLSHKYEKQEGKQFSISDAEYFVFHSPYNKLVQKSFARLVFNDFLKNASFVDEAAKEKLEPFATLSGDESYQSRDLEKASQQVAKPQYDAKVQPTTLIPKQVGNMYTASLYAAFISLIHNKHSTLDGKRVILFSYGSGLTSTMFSLLLREGQHPFSLSNIDKMMDVAGKLKSRHEFPPEKFVETMKLMEHRYGGKEFVTSKDTSLLSPGTFYLTEVDSMYRRFYAKKTSENGLVTNGH

SEQ ID NO: 182790 - protein, 55 aa, Glycine max
  Clone ID: PAT_MRT3847_136073C.1.pep
AACVDMVRIPQSRELSLLLGRPRPNMTGARHSCSTGCSTAGSALVLGSKPIRTRG

SEQ ID NO: 182791 - protein, 64 aa, Glycine max
  Clone ID: PAT_MRT3847_136074C.1.pep
DLNTTTAASQMGSSSVPMALSLYSVNNNIHLPSEAFFMLLPLHLPMMTLFFTKAGLNYKPHIHA

SEQ ID NO: 182792 - protein, 86 aa, Glycine max
  Clone ID: PAT_MRT3847_136075C.1.pep
QHLGAYVNLGAFYLVGIPVGILLGFVAHFRAKGLWIGIVTGSIVQSILLSLITALTNWKKQAMMARERVFDAKPPDVNGSYHMTSA

SEQ ID NO: 182793 - protein, 44 aa, Glycine max
  Clone ID: PAT_MRT3847_136076C.1.pep
GSSKQVKGSSADSLPRAGHSVMAMGISLTLKQPRGHGLSLIFTL

SEQ ID NO: 182794 - protein, 59 aa, Glycine max
  Clone ID: PAT_MRT3847_136077C.1.pep
RSAKVDVSLSELNVLSEYHLLSETSTRLVDRRNLEGNLSRRHALSVLSARSASRLSPCG

SEQ ID NO: 182795 - protein, 40 aa, Glycine max
  Clone ID: PAT_MRT3847_136078C.1.pep
TLYKKIYLCKEIIKEPYFPTKKHSPGLIRLLLLIKLKTSF

SEQ ID NO: 182796 - protein, 44 aa, Glycine max
  Clone ID: PAT_MRT3847_136079C.1.pep
LNPGISGGGFLGTIPYSILQQTVSNHMTTVPTPLNYDSSKQRFC

SEQ ID NO: 182797 - protein, 65 aa, Glycine max
  Clone ID: PAT_MRT3847_13607C.1.pep
RHGGTPHMHSMPLLLTNTLFNIMTLFFERTSLDAPLDCFVFTTLCCVTLSLIMQIYYLTAPLYYT

SEQ ID NO: 182798 - protein, 41 aa, Glycine max
  Clone ID: PAT_MRT3847_136080C.1.pep
VLMCTAMCSALLAPAAYIVVASAPPPVRYARVTGPSPCMNA

SEQ ID NO: 182799 - protein, 145 aa, Glycine max
  Clone ID: PAT_MRT3847_136081C.1.pep
MPLHDSPVGYVSDLKILFIVKVSSLISLAYSRSWSSASSSGVMEISLLKVLSDAISSFSHLSFSERMKSEPVSKYYQKAEKMLKLLKPIIDTTVFSDLASNKLLSKLFEEPSLAVDELRELSLNWHPLSSKFYFVIQDDPLISTI

SEQ ID NO: 182800 - protein, 75 aa, Glycine max
  Clone ID: PAT_MRT3847_136082C.1.pep
LVRAKMPHRTTYIFPRQFPERGGLDESSKQLLDHEKKKIVNSIKHDTFTAEGDPPKRSPTTQDNDCVVLSSGNTL

SEQ ID NO: 182801 - protein, 144 aa, Glycine max
  Clone ID: PAT_MRT3847_136083C.1.pep
RNGNLAYVERFDLGGNSGNKSKARAIWVGVGAGVASVAIVALIVGLVFCFCNGRKKQSSDTKNNPQGWRPLFLYGGAAVNSTVGAKGSAGTQKPYGSVGSTRVGKKFTLAEINAATNNFDDSLVIGVGGFGKGVKGGVENGVPW

SEQ ID NO: 182802 - protein, 50 aa, Glycine max
  Clone ID: PAT_MRT3847_136084C.1.pep
TNVSPPLIFCQYFWSSNSFPILSLIYFYCSNLVFVLFIFSPSFFFIYFEQ

SEQ ID NO: 182803 - protein, 77 aa, Glycine max
  Clone ID: PAT_MRT3847_136085C.1.pep
FLKWENQEEKILKPRVFFGIGPLPNHFRRQPGFLKQLFKNPGLNQALGHRNNNFPLGRGLNQWFFKDPVFGIVRPVF

SEQ ID NO: 182804 - protein, 121 aa, Glycine max
  unsure (1)..(121): unsure at all Xaa locations
  Clone ID: PAT_MRT3847_136086C.1.pep
KKPNRKGPNQGKEKKTKGPTAKQKXSNKTPTPVFFXGGGDTXKPHKXPKTTPXGGAQDQQTXXNNHPPQKXTQXPPEXGTASSHQGTTNDXXEXKAQRAHXQKKKXKEXXPKXKARQRRQA

SEQ ID NO: 182805 - protein, 170 aa, Glycine max
  unsure (1)..(170): unsure at all Xaa locations
  Clone ID: PAT_MRT3847_136087C.1.pep
KMKRKRGHKKGKAKGTTNHGSSSANANSKEEETSGLDDKDHSGMEVDTPSSTGTDQQHNYNVANINPDGSVDKAAIGRVKVKLKTPKLLDSQPTSSDAPTPTQSDTERMEDSAXLLPDMKLSTLSKRAASIKIKSSSNHQTFSASTQHNNKQELDASLVGYRKGNENGCS

SEQ ID NO: 182806 - protein, 212 aa, Glycine max
  Clone ID: PAT_MRT3847_136088C.1.pep
MTSFWIPQLGGQKYAMTGMTMNWTLTADQLGTFRGRNSNFNGEGFSRQTFKVHSVSQNDFDKWVKEAKGKKTLSQDTFDKQLLPSTSNKELTFSGTHMAFVDPAADPEYIFYAYKRYNFEQKDPNFTAEEDLYKDVKDKPIKLARKVHITNPNYERHGMKPMILGNNEKYDNEFKKEEDHNSKEMEKISKGAKDENASKLHKKEHDDHGGGH

SEQ ID NO: 182807 - protein, 243 aa, Glycine max
  unsure (1)..(243): unsure at all Xaa locations
  Clone ID: PAT_MRT3847_136089C.1.pep
MSRSPSFSVRTEVSPSVDSESLQQWVVAFCAIRFDLEQGQLVEECYPHGCFSHDEELEIAYSSFPDSVSQHQNQNRSSIHDCIFFFRILRHLKKSLDEKGVADSSNASKFLYGYVFNRQRHDERLKRGGEQKSVVILSYSPYSSVFRPLLQILGPLFFDIGKKALEHIAAYVSKWPAPVPGKVMDLPIGNATLKVNXPPAHSFPVEGGVSFEEGASSVAPFLPNSQPVHKXSFHDSDIFGSFR

SEQ ID NO: 182808 - protein, 85 aa, Glycine max
  Clone ID: PAT_MRT3847_13608C.1.pep
KNGVPFDSTPARPQDEYHYWAPGKIHLPKGKKEWARLSHKIPGLGAVYSVSSQVKWGPRRTKVSPNLPPPPEIVYLFFKSKGPPV

SEQ ID NO: 182809 - protein, 221 aa, Glycine max
  Clone ID: PAT_MRT3847_136090C.1.pep
MGSLGAVNNSIEDAKFSSSRRLKNQPNYSSSGRMSSIAEIGDKGYRESSPDSEAFADGNDFMAGFQVGHWDDTAMMSDNVGGLKRFSEEDSKPFSGLNAVETQNETGQTHAPLAHQLSLPNTSAEIAAIEKFLQFSDSVPCKIRAKRGCATHPRSIAERVRRTKISERMRKLQDLVPNMDKQTNTADMLDLAVDYIKDLQKQVQTLSDCHAKCTCSHEKQQ

SEQ ID NO: 182810 - protein, 265 aa, Glycine max
  Clone ID: PAT_MRT3847_136091C.1.pep
MEQGSFSMGLRHSGNNSNLTRHSSSPAGLFSQINIENVYAGVRGMGTLGAVNNSIEDAKFSSSRRLKNQPNYSSSGRMSSIAEIGDKGNRESSPDNEAFADGNDFITGFQVGHWDDAAIMSDNVGGLKRFRENDSKPFSGLNAAETQNETGQTHAPLAHQLSLPNTSAEIAAIEKFLQFSDSVPCKIRAKRGCATHPRSIAERVRRTKISERMRKLQDLVPNMDKQTNTADMLDLAVDYIKDLQKQVQTLSDCHAKCTCSHEKQQ

SEQ ID NO: 182811 - protein, 80 aa, Glycine max
  Clone ID: PAT_MRT3847_136092C.1.pep
SRTSVPSSASTPTPSPSAALSSSLSNARPPLALPRSRLSARTSPPPSLLTRRPPRLPRRSTRPTRPRTSLASTPTKRVCG

SEQ ID NO: 182812 - protein, 107 aa, Glycine max
  Clone ID: PAT_MRT3847_136093C.1.pep
YQQGVVFKATVADAKFCIELKGAWYFNRAPNSHTNTRVLSNQTFYQKFVNKIQIIHYGHQYQPSTTIAKDDSSIGPSCSYSCYRIILPDTVFQRYIHQLPLSDVIKS

SEQ ID NO: 182813 - protein, 65 aa, Glycine max
  Clone ID: PAT_MRT3847_136094C.1.pep
KKTNLMNFYKLENNDGLQLYIKSKKKKKKGLSGEMKRRESQRLLLFPLCYRTKIYTRGPRGGPGI

SEQ ID NO: 182814 - protein, 100 aa, Glycine max
  Clone ID: PAT_MRT3847_136095C.1.pep
NSFLFLSTLRISPSSSDLTSLPVVLTVPLGFQLYPAFFPPQSIFPPHTLHPEGPPPCSPFFDASDFVLRPLFFFFKPIFFFPPPLFSLALLFFFFSFFFF

SEQ ID NO: 182815 - protein, 36 aa, Glycine max
  Clone ID: PAT_MRT3847_136096C.1.pep
KNAKFYIYERIIHPYVSSSLVFTDFACHKFIWRKIC

SEQ ID NO: 182816 - protein, 78 aa, Glycine max
  Clone ID: PAT_MRT3847_136097C.1.pep
PTPTTSSPSTTISTVARPRTLPWTTTATTTPTITSTTPRGSSLAALRSLSDSLPFSILLRRGTHQSREIVTQSNQFSL

SEQ ID NO: 182817 - protein, 94 aa, Glycine max
  Clone ID: PAT_MRT3847_136098C.1.pep
SNLFRLVDKEAISFKLCITQGLCLYCSIMTTLSLFIYFMLSRCLMVHSSYIKNQSTCLQLITFGTLRKRDIQHVIHTLIVVLQSWCLSCDVVSH

SEQ ID NO: 182818 - protein, 42 aa, Glycine max
  Clone ID: PAT_MRT3847_136099C.1.pep
SLHTNSHKRLLFKGKKIKIGFLSKSPNFRTLYYPPLLSSFFF

SEQ ID NO: 182819 - protein, 61 aa, Glycine max
  Clone ID: PAT_MRT3847_13609C.1.pep
LSIYRMKNAPDTNDNIDLLHTIDCEGLHGAGQALPDRIDYNDKLVLINTHKFFDGNYTADS

SEQ ID NO: 182820 - protein, 91 aa, Glycine max
  Clone ID: PAT_MRT3847_1360C.1.pep
MQTLVQTLTGKTITLEVESADTIDNVKAKIQDKEGIPPDKQRLIFAGKQLEDGRTLPVQNLKRDSALYRVLRHRGDMHLCVNIVSGKTITL

SEQ ID NO: 182821 - protein, 53 aa, Glycine max
  Clone ID: PAT_MRT3847_136100C.1.pep
KRLQADNFFFTAEEVFLFWCCIKYVQCRSARFFCASSTDVLFLPKLSCSDLFG

SEQ ID NO: 182822 - protein, 96 aa, Glycine max
  Clone ID: PAT_MRT3847_136101C.1.pep
LEYGEDDRRGYACRYGFRYNFFKFKCQTGSIVQRSINFEVSKINFKKVIFLYLLVNKDVFMCKTYNFVCGYNAFSVFGYRSCTILVFQFLIVSINL

SEQ ID NO: 182823 - protein, 296 aa, Glycine max
  unsure (1)..(296): unsure at all Xaa locations
  Clone ID: PAT_MRT3847_136102C.1.pep
METKKLHPRFSLGRQSSLAPERAGAGDSSEALDPAVRLMYLANEGDSDGIKELLDAGSNVNFTDIDGRTSLHVAACQGRTDVVDLLLRRGAHVDPQDRWGSTPLVDAMYYKNHQVVKLLEKHGARPPMAPMHVQNAREVPEYEIDPSELDFTNSVCITKGTFRIALWRGIQVAVKTLGEELFTDDDKVKAFHYELTLLEKIRHPNVVQFLGAVTQSTPMMIVTEYLPQGDLGAYLKRKGALKPVTAVKFALDIARGMNYLHEHKPEAIIHRDLEPSXILRDDSGHLKVADFGVSKL

SEQ ID NO: 182824 - protein, 114 aa, Glycine max
  unsure (1)..(114): unsure at all Xaa locations
  Clone ID: PAT_MRT3847_136103C.1.pep
RXFSXXSFVPCSXAAVXSLXFPSPSXSXGRSSRFXXSWFLLSSWASLXSPVAXALRFRAXVLSPSXXSCVLXPSPXASASASAXSSSLXPXRFPXSLXXLFCPPLLFLGCFSAF

SEQ ID NO: 182825 - protein, 114 aa, Glycine max
  Clone ID: PAT_MRT3847_136104C.1.pep
IKTQTQKKHKGGRKKQKDRRPPTGQENRGPSRKTQKKERQKPTTKNTEKSQKKPEQAQEQQKPTGKTPKRNTHKGTPQPTGHKDKAETKGGRDKTATERDKPEGGDKREQQRRP

SEQ ID NO: 182826 - protein, 34 aa, Glycine max
  Clone ID: PAT_MRT3847_136105C.1.pep
GFFFMGKKLKLGLRFQPWHFSGLKLNLVVLGIKG

SEQ ID NO: 182827 - protein, 50 aa, Glycine max
  Clone ID: PAT_MRT3847_136106C.1.pep
PGTNPPTLNKAYLTMLSALAVTQTCSGQHRTLLQANHGLTHNWRPTHHTD

SEQ ID NO: 182828 - protein, 60 aa, Glycine max
  Clone ID: PAT_MRT3847_136107C.1.pep
TGGLHEKDPLTQTWGGPMVFYLLRGFTLSRKRPVTLPNLWTHRRAHGFNRRTCSGGKTRG

SEQ ID NO: 182829 - protein, 100 aa, Glycine max
  Clone ID: PAT_MRT3847_136108C.1.pep
LFPLPRVFPLIPPRDFCGGLVAPPGGLKFFSTPLRGPLENKFLWGCSPCWSGLFCRGAKFFFSKGPFGKFLNKGVFCLYQCLLFFSSIVCVFSPIKVPFG

SEQ ID NO: 182830 - protein, 72 aa, Glycine max
  Clone ID: PAT_MRT3847_136109C.1.pep
HEKPLTIPMSRMNTAQSHTTSQPSSADVLMPWAMHVLQSSQDQTCLGNWEWKEAKLDPTTRRLWGACDSVKV

SEQ ID NO: 182831 - protein, 105 aa, Glycine max
  Clone ID: PAT_MRT3847_13610C.1.pep
VVLPLHIGQCLPVFVKGPLLSLVVCNVPVDCVDHHLHDPLQIPHSLQLSSRIYGVVDRAPCPMSKVFQSCHAIYHFLQLGFSPSECSSSDLKSFRLSLYHTLRLL

SEQ ID NO: 182832 - protein, 71 aa, Glycine max
  Clone ID: PAT_MRT3847_136110C.1.pep
WEAAKILERVRATNLSTIQRNLWDPVTRSALLFNSQVQKGDATWQILRALSEKLDRSFRSSRVSRQLDFDT

SEQ ID NO: 182833 - protein, 67 aa, Glycine max
  Clone ID: PAT_MRT3847_136111C.1.pep
FKIVYSSYNNFIFLFTRKNDITKNDLAPVTLVLVFFFSLPPKIFLSPSRKTTNQFLPCHHPHKPRHH

SEQ ID NO: 182834 - protein, 41 aa, Glycine max
  unsure (1)..(41): unsure at all Xaa locations
  Clone ID: PAT_MRT3847_136112C.1.pep
ENISDLFFIWYKKNCLLREKFNXCKTIKKTHSQVLSYVFQN

SEQ ID NO: 182835 - protein, 391 aa, Glycine max
  Clone ID: PAT_MRT3847_136113C.1.pep
ACEKLISKLVGREFGDVDVIDIKPWVMHAEVAERFICSGNRILLAGDAAHRFPPAGGFGMNTGIQDAHNLAWKIASVIKGIAPTSMLNTYEIERKPIALFNTRLSLENYKAAMSVPAALGLDPTVANIVHQFIVDGIGSILPSGLQKVALDGIFGIGRAQVSEFVLNESNPLGSSRLAKLRHIFEEGKSLQLQFPAEDLGFRYLQGALMPESKDVESPPEVLTGRRRDYTPSAQPGSRLPHIFVRVNPLSEETVSTLDLVSGDKVEFILIIAPVEESYHLAREAFKVAEEQEIFLKVCIFWSTDSVEGLEKGSKAALSPWKNYLDVVEVWSSTSNWWDMCNMTNRGAILVRPDEHIAWRTSSGLAGDPRVEMQRVFSAILGVHGSNKQIHG

SEQ ID NO: 182836 - protein, 69 aa, Glycine max
  Clone ID: PAT_MRT3847_136114C.1.pep
DLTDLFSATAYYGSFIVNAAYSGTDRKGILAADESTGTVGLRLASISVENIESNRLALRELLFTAPGVL

SEQ ID NO: 182837 - protein, 34 aa, Glycine max
  Clone ID: PAT_MRT3847_136115C.1.pep
NFSTSQTQRQEIKLIKTCFVNSCIFSRYLLEGIE

SEQ ID NO: 182838 - protein, 474 aa, Glycine max
  unsure (1)..(474): unsure at all Xaa locations
  Clone ID: PAT_MRT3847_136116C.1.pep
SVPVWPAACFVWSASAGPVPGDGSSSAWCVADGWAALGVGPLPRRPRPWSASGRLDPVTFSTPWXAYGLAGDGDACAWVCPEMLGRGAKPNMVIYNTLLRAXGEPSAPGVKKPFCNSLIDLCVNLNLLDKACELLDLGLTLXSEDALFVYKEMKEKGMEMNTHLYNTLLGMCADLSLANEAFEIFEDMNTSATCLCDSWTFSSLITIYSCTGNVSEAERMLNEMIESGFQPTIFVLTSLVQCYGKVGRTDDVVKTFNQLLDLGISPDDRFCGCLLNVMTQTPKEELGKLNDCVKKANPKLGSVVRYLVEGLEEGGGEFKKEASELFNSIADEVKKPFCNSLIDLCVNLNLLDKACELLDLGLTLEIYXIHSKSQTQWSLHLKSLSLGASLTALHAWINDLSKTLESGEDLPPLLGINTGHGKHRYSDKGLASVVESHLNELNAPFHEAPDKAGWFLTTQVAAKSWLESRELVTA

SEQ ID NO: 182839 - protein, 531 aa, Glycine max
  Clone ID: PAT_MRT3847_136117C.1.pep
MGFQENGNGEMGLSGIPLGAKNKYKRMTSELPDDNDDVFLHQQQVEERRSSTRKYVIACAIFASLNNVLLGYDVGVMSGAVIFIKEDLKISEVQVEFLIGILSIISLFGSLGGGRTSDIIGRKWTMALAAVVFQMGGLTMTLAPSYAVLMVGRFLAGIGIGFGVMISPIYIAEISPNLNRGSLTAFPEIFINVGIMLGYVSNYAFSGLSAHISWRVMLAVGILPSVFIGFALFVIPESPRWLVMQNRIDEARSVLLKTNEDEKEVEERLAEIQQAAGFANSDKYDDKPVWRELLFPPPPLRRMLITGLGIQCFQQISGIDATVYYSPEIFQAAGIEDNSKLLAATVAVGISKTIFILVAIILIDKLGRNTAARRRQKGMTVCLFCMGATLALLGKGSFAIALSILFVCGNVAFFSVGLGPVCWVLTSEIFPLRVRAQASALGAVANRVCSGLVAMSFLSVSEAISVAGTFFAFSAISALAIAFVVTLVPETKGKSLEQIEMMFQNEYEIQGKETELGDVEQLVQNQTDLTN

SEQ ID NO: 182840 - protein, 201 aa, Glycine max
  Clone ID: PAT_MRT3847_136118C.1.pep
MAYYSSAYSGSENYGGYNFNSYALNYDYAQIPSYMAYTSYEYNQNQPYYGYDSSLYYAPNYPAETYQTQTTSYSATTYSDPKSVVYVPNNGMSQLVISYSKAEFNVPEFDDYDPTPYGGGYDIDQTYGKALPPSDKICYPRSGSSPITEPQPLFSGPIVPLPTIEEGIEEKPSHPRMELSSKQKPKRSLSHKIVAKITLKK

SEQ ID NO: 182841 - protein, 96 aa, Glycine max
  unsure (1)..(96): unsure at all Xaa locations
  Clone ID: PAT_MRT3847_136119C.1.pep
FGRAPNKIDYTMYYEILCVFNNAPQDDLKKAYIKAAIYNHPDXGGDPYKFKELAQAYEVLYDPVNLEIYDHFGEFALNDRMVGRCSLDPRDIFSSF

SEQ ID NO: 182842 - protein, 122 aa, Glycine max
  unsure (1)..(122): unsure at all Xaa locations
  Clone ID: PAT_MRT3847_13611C.1.pep
PRKGHXPQQGRADNQHQESXGERRKHAPKRXKRRKDXADTPXRERRGEAXAAAXRQKRRQXGQXGETAQAGKRKERGNEEXDKRGXGRGTPDXREGRRNARKRKGEAXPRERARKEAQEQEN

SEQ ID NO: 182843 - protein, 164 aa, Glycine max
  Clone ID: PAT_MRT3847_136120C.1.pep
MAFTLTTLPTPNVSVTSFTRRTVSNSKPTLSCTLSSHPFKREYTSVMIVPTGIGAAIGGYAGDALPVARALSSVVDCLISHPNVLNAAMLYWPMPNALYVEGYALDRFAEGLWALQPVHQNRVGLVLDAGIEDELRIRQLQVADAARASLGLPVVEYIVTDIPL

SEQ ID NO: 182844 - protein, 121 aa, Glycine max
  unsure (1)..(121): unsure at all Xaa locations
  Clone ID: PAT_MRT3847_136121C.1.pep
NLLTSETTIFNGRDHAIWGVDYTGGTHVRKFLPHYIRWHLYTLLIYILPCLLTGGIKFNRNLKNNHIAGLFYDCRYKFWTKHEKRVXLTEXEKMDVIRNTGLPADVLAXRAHEFEKHVPHE

SEQ ID NO: 182845 - protein, 77 aa, Glycine max
  Clone ID: PAT_MRT3847_136122C.1.pep
ALHPAAALSFFWWVFLTFFGFYFFFKNQISFSLNTNRFFCFFKNNKTSFLLPNPFLKRKEKEKEKTITLPRFVGKTP

SEQ ID NO: 182846 - protein, 93 aa, Glycine max
  Clone ID: PAT_MRT3847_136123C.1.pep
KMSLVSYETRGLLLSDLTLSHACLPTCPHEWVCQSVPARTCASLTCIHIWDLASAQFGSFRFCVSAIIIHCFLTFSFPLLPSFHYLYLSWSRP

SEQ ID NO: 182847 - protein, 421 aa, Glycine max
  unsure (1)..(421): unsure at all Xaa locations
  Clone ID: PAT_MRT3847_136124C.1.pep
VLQQLRCCEVLEVVRLSRAGXPIRMGHQEFSCRFGFPLSESNGTLATLSFSIKVXKKCSXHSEVSRNASTKLYPRGPIQALENKRKQVLQGILGIQKCFRGHRARVYFCELKNGVTTLQSFIRGENTRRKYGVTVKSSVTIYSRILEEIHAIILLQSVIRGWLVRRGDASHINRSKRYPENAKPRRKSFMKIIPEVKDLSKEPVQNLLSALAGLQRRVDKADAIVEQKEEENTELREQLRQSERKRIEYETKMKSMEEAWQKQMASLQMSLVAARKSLAPENATVQPLRRDFVLPRGYDSEDATSMGSQTPGGSTPMLSGSLSVSDAGRQVNGTLTTVGNLMKEFEQQRQNFDDEVKALNEVKPEQSANMNSFEELRKLKQKFEGWKNQYKVRLRETKTRLYKSETEKSRRSWWGKFSSKA

SEQ ID NO: 182848 - protein, 69 aa, Glycine max
  Clone ID: PAT_MRT3847_136125C.1.pep
KPVLTYEQENLIRCTENRSLLPIDTANNTNGNCSGNKDWKHGHKERHHHEPRSYPWQCPPKDKELGLAS

SEQ ID NO: 182849 - protein, 49 aa, Glycine max
  unsure (1)..(49): unsure at all Xaa locations
  Clone ID: PAT_MRT3847_136126C.1.pep
XXRHSYXKLGIRXEXNXRSFAXELTHXXVDXKEXPRLXXKRSLXRTDSX

SEQ ID NO: 182850 - protein, 181 aa, Glycine max
  unsure (1)..(181): unsure at all Xaa locations
  Clone ID: PAT_MRT3847_136127C.1.pep
KSIEREINSVNDNPLIDVTRXNKALNGGNFQGTPIGVSMDNARLAVASIGKLIFAQFTELVNDLYNNGLPSNLSAGRNPSLDYGFKASEVAMAAYCSELQYLANPVTSHVQSAEQHNQDVNSLGLISALKTVEAVXILKLMSSTYLVALCQAIDLRHLEENFKXTVKNTVSRXAQKTLITE

SEQ ID NO: 182851 - protein, 252 aa, Glycine max
  Clone ID: PAT_MRT3847_136128C.1.pep
MVGLVLFFGDHISETITSFRESRLSPEWLKNAAEEMAKKARNYINQVCNIFTYMTAILDPRIKGDLIPDSLNSENFLDEARTHFIRNYSASHFSSMSSGYNAQEIGDGGSVSFAEEIARKKRRTSMSSATDELTQYLSEAPAPIPTDVLEWWKVNSTRYPRLSVMARDFLAVQATSVVPEELFCGKGDEIDKQRICMSHDSTQAILCIKSWIQVGIKFKFKSTEIDYERLMELAAAAAATDNSPSSSDKKQR

SEQ ID NO: 182852 - protein, 97 aa, Glycine max
  Clone ID: PAT_MRT3847_136129C.1.pep
SASNHPQPAISTRELLFEEKNRLGSIPPSCHNKCNDCHPCMAVQVPTLPSHDSNPPDLTKTAAMATFLNPSSPQGNRYSNYKPLGWKCHCGDHFFNP

SEQ ID NO: 182853 - protein, 107 aa, Glycine max
  unsure (1)..(107): unsure at all Xaa locations
  Clone ID: PAT_MRT3847_13612C.1.pep
KHHPSLVALGRPSYFGHADELQGERAEFHSMLVFVYARXRSQPLYHTYADPGSRNPAVPLPISLEPESHHFGALSEGADSSCDLGNSPVTVGAVIKVHEALLSRIEY

SEQ ID NO: 182854 - protein, 136 aa, Glycine max
  unsure (1)..(136): unsure at all Xaa locations
  Clone ID: PAT_MRT3847_136130C.1.pep
MYLLCNEEMLQLPATLRMACARQSAHATFYWRAPDAFGAIAXSCINRNLHIQCYLWNTNEXSTRLSNNGLICGSCLXSKARTAINDVTPERPSILLTSSNFWPSNYALPNDNGRWCILPGPYLDLAMPMLLKIVEY

SEQ ID NO: 182855 - protein, 42 aa, Glycine max
  unsure (1)..(42): unsure at all Xaa locations
  Clone ID: PAT_MRT3847_136131C.1.pep
CEGCMSMETHLFYSVSSLFNKVDDMSXXCMGCXRIQVXSVGK

SEQ ID NO: 182856 - protein, 67 aa, Glycine max
  Clone ID: PAT_MRT3847_136132C.1.pep
LSLSLSPFLINNMASGTSAPRLIPERGQVLKRVLKMVFSCFMCAGSSNSHHPKIITSSPVFPAPSRI

SEQ ID NO: 182857 - protein, 52 aa, Glycine max
  Clone ID: PAT_MRT3847_136133C.1.pep
SMECSPYTTLVSNSFHGNITTILGWLGVHATLILNRSLTVYHDDLLKLSAIH

SEQ ID NO: 182858 - protein, 157 aa, Glycine max
  unsure (1)..(157): unsure at all Xaa locations
  Clone ID: PAT_MRT3847_136134C.1.pep
SFRKSKEENGGFFVFVTLVLCGCAAGKECTDIRTRSHMLRYQLLTSKNERLEEEAMSHLHLTPTDXSVWADLQPRKFLTEQHQHDWAVMYKNIKNMGVFKSPEGFLKEVPLXDVRLHKDSILGGAQQTNLEYLLIWSXRKTVGLSTPGTPYGRWEVV

SEQ ID NO: 182859 - protein, 96 aa, Glycine max
  Clone ID: PAT_MRT3847_136135C.1.pep
VPSHYSAITPHSVLKSTNPLSIFLSKSSSAVYGGLSHTLKGPPMESIPTSDAINRYQVERDPLATCKMCKEINNYHQANQQWLENPLVNNYHGSDE

SEQ ID NO: 182860 - protein, 133 aa, Glycine max
  Clone ID: PAT_MRT3847_136136C.1.pep
FPNFFYLKPAWMSTSGVFPSFQYSTTNYNKSSAQEARDDQFFDKENCNVHQPKTSQRLPFQPKIMNTSALSERMEELSYQSTIDCSVDFDQISRFSEDFALPSNFLEPTGLKVCLHTNTTTRRCTYCKDCGIF

SEQ ID NO: 182861 - protein, 147 aa, Glycine max
  unsure (1)..(147): unsure at all Xaa locations
  Clone ID: PAT_MRT3847_136137C.1.pep
LFSTNHKDIGTLYLLFXAXAGVLGTALSLLIRAELGQPGNLLGNDHIYTVIVTAHAFVIIFFIVIPIIIGGFGNXLVPLIIGAPDMAFPRINNISFXLLPPSLLLLLASAIVEAGAGTGXTVYPPLAGNYSHPGASVDLTIFSLHLA

SEQ ID NO: 182862 - protein, 350 aa, Glycine max
  unsure (1)..(350): unsure at all Xaa locations
  Clone ID: PAT_MRT3847_136138C.1.pep
MNKRQEDLRNIATTLDSRFNQTLRNVQGLLKGRSIPGKILLSRRVDPPDNSNSKISSPNYKRSFSHNDAGTSDNTSGXVEAEFKSKSKPISIAYANKVKVSTFXSDPVLKLSRSLQKGARATDSARVMKFTXGLSATVVILFXLRELPWSGFSNNMRPKVWRLLLGYAPPNSDRREGVLRKEXLEYFDCISQYYDIPDTERSDDEINMLRQIAVDCPRTVPEVSFFQQQQVQKSLERILYTWAIRHPASGYVQGINDLVTPFXLVVFLSEYFEGDIDNWSMSDLSSDTISHLLNLGFWGLFLWXELVRRIDEPVSWHIEDQRLEFLQFAFCWCYYLAIHVIPFLLVPSLW

SEQ ID NO: 182863 - protein, 147 aa, Glycine max
  Clone ID: PAT_MRT3847_136139C.1.pep
RTGPENLGLTHVTVHTHRANERGRGPETGRDRTTPQQQHGADGSTRKERQGQQQSDAAQEETRSPDNNNGHNHKQRPGTHTNTNNNNNNNKRRGAKADADTDHATQKHHQGQGNGRRATHTNKNRQGGKRGGTRQEGMHRDHQGGTK

SEQ ID NO: 182864 - protein, 130 aa, Glycine max
  unsure (1)..(130): unsure at all Xaa locations
  Clone ID: PAT_MRT3847_13613C.1.pep
KPNKQKAMEVPTIDXLSLERSKLAELVVKACEXEYGFFKVVNHSVPKKVFARLEEEGKEFFSKTSSEKRQAGPANPFGYGCRNIGPNGDMGHLEYLLLHTNPLFIFERSKTIAKDPTKFRYLVKTFTHFH

SEQ ID NO: 182865 - protein, 92 aa, Glycine max
  Clone ID: PAT_MRT3847_136140C.1.pep
LRPSYRSNMSMHPQPSALIVHAQFPSLYYLYASLLGVLAVLPWVYMGIIYPSVYTRASDAGWLSCLNVVCHAHSASSAVLLVTGTLGHVRSR

SEQ ID NO: 182866 - protein, 462 aa, Glycine max
  Clone ID: PAT_MRT3847_136141C.1.pep
TQAEFARGYESPLPWPESKLKILYKNVAHPKLAAYVKRHNWLMESGEYLTFPQNQSEFKGGILHYLESIEEMVPDIEWGKNIRVVLDIGCTDSSLAAALFDKEILTLSLGLKNDLVDLAQVALERGFPAVISPLGRRRLPFPSQSFDAIHCGGCSIPWHSNGGKLLLEMNRILRPGGYFIMSTKHDSIEEEEAMTTLTASICWNVLAHKSDDVGEVGVKIYQKPEGNDIYELRRKKVPPLCKENENPDAPWYVSIKTCLHTIPIGIELHGAEWPEEWPKRLESYPDWVNNKEKVVADTNHWNAVANKSYLNGLGINWTSIRNVMDMKSVYGGLAVALSQQKVWVMNVVPVHAPDTLPIIFERGLIGIYHDWCESFGTYPRTYDLLHADHLFSRLKNRCKQPVTIVVEMDRILRPGGWIIIRDKVEILNPLEEILKSMQWEIRMTFAQDKEGILCARKTMWRP

SEQ ID NO: 182867 - protein, 41 aa, Glycine max
  Clone ID: PAT_MRT3847_136142C.1.pep
NKHSTESTHYLQTTFEKILLIILPWPEAKHISSRFGSSSSR

SEQ ID NO: 182868 - protein, 52 aa, Glycine max
  Clone ID: PAT_MRT3847_136143C.1.pep
KNKMGKKFFGGPKPLIKGEGHPFPSQKKNTQNPLNHPRLFGPKNNPILYRAH

SEQ ID NO: 182869 - protein, 178 aa, Glycine max
  unsure (1)..(178): unsure at all Xaa locations
  Clone ID: PAT_MRT3847_136144C.1.pep
IRLEGSNFSKEEQQALQTWNQLNHLIDNVQGLPNAAEAIKEAASAWNSFISSIEEQKQGHGNDSSRAKEKQCPHFLNKMNSTDXGNSSYKLQLPCGLTQGSSITIIGIPNGLLGNFRIDLTGEPLPGEPDPPIVLHYNVRLHGDKITEDPVIVQNTWTQAHDWGEEDRCPSXTPERLR

SEQ ID NO: 182870 - protein, 40 aa, Glycine max
  Clone ID: PAT_MRT3847_136145C.1.pep
HFNPSGCSSSKENPNGHYFHCKLGPPGVAILDHKRGIFSF

SEQ ID NO: 182871 - protein, 349 aa, Glycine max
  Clone ID: PAT_MRT3847_136146C.1.pep
IFLRLRIADKEGHIRNIYFPFDTETDTALSVATEMVAELDITDQDVTSISDMIDGEIASLVPEWKPGPGIEETNHYLNKIVCHNCVSNQGRKNLQLPQCCRHGCASMHGRFEEITFPSECDNHVRGDAPIKSSQSDCLQRQESWNHHESCELSPVESDESHSGEQFDKPVLAEDKGKKGIWENKFAHDPGNPPRSLSGNYFSAIRFLCCGPEIEYEKEVRQEMRWIKAKHNRESRELGDKRFGIATESSHTSNREHKTEQCIMPPLPQTANGVHNGIHLKPLGNIWNYESSCRSQVQKNHPNLDTQRAQNCEVMCSHKEGMVTEKSFYTGSLRDTLHRTVSLPVDAVDV

SEQ ID NO: 182872 - protein, 56 aa, Glycine max
  Clone ID: PAT_MRT3847_136147C.1.pep
TYMNGRKQYLEKAYQSQTKRQWRPKKNLLRQKLKRWHDHNKEPEKGSDPMKPKLPF

SEQ ID NO: 182873 - protein, 104 aa, Glycine max
  unsure (1)..(104): unsure at all Xaa locations
  Clone ID: PAT_MRT3847_136148C.1.pep
TLRVFRRRSPQRHSLECTAFFYSKVNGPSLRQPSVEHMCGMFSYVKCPTNACFLPRLKTYLLNLVSQRAISKVNICFLGCRGIAPVCYFNLKCWGFRCXXFXXV

SEQ ID NO: 182874 - protein, 101 aa, Glycine max
  unsure (1)..(101): unsure at all Xaa locations
  Clone ID: PAT_MRT3847_136149C.1.pep
VSGSGICAKRVVVDARQHRLGRLSSNVANELLHGHKVAVVRCEQICISSSLVRQNMTYVRFLCXRMNTITSHGAIDFCAESIIVXVTVHGMISHSTTRGEA

SEQ ID NO: 182875 - protein, 63 aa, Glycine max
  unsure (1)..(63): unsure at all Xaa locations
  Clone ID: PAT_MRT3847_13614C.1.pep
DKDDATSPLTKPVPLKNEIHTNNISDGNFQFFQEKHFDDNQPLGHTFEGYASTLYNNAXNSSV

SEQ ID NO: 182876 - protein, 90 aa, Glycine max
  Clone ID: PAT_MRT3847_136150C.1.pep
RPGRVETESLQIIAVRMDRNGVLLHHHHHPMSAPLASTPTSLFALPHLPSLTPTFTPRYPDAATTLSFSLATSALYSSVPIADPPPTRHT

SEQ ID NO: 182877 - protein, 68 aa, Glycine max
  unsure (1)..(68): unsure at all Xaa locations
  Clone ID: PAT_MRT3847_136151C.1.pep
PAHSADVAPRPPXFYLLVFFFFLREKVFVGHRGECILCLKTLLCLLTLKEKLRSGGAKGIKITFSLIC

SEQ ID NO: 182878 - protein, 149 aa, Glycine max
  Clone ID: PAT_MRT3847_136152C.1.pep
KGKNKPQPPVPKFHKWAMARRGGKFGKTNFGQNPPNILGGDHSPGLNPKQNYFSWGKKPWFPQKGPLLLSPPPGVKNGGLYYSGWVLKKNPPGIPSTKGWGKKKHAPPGDPQGDWPPIAPYEAWLNSFGGEGKNPGGTPKPPQDPKINF

SEQ ID NO: 182879 - protein, 30 aa, Glycine max
  Clone ID: PAT_MRT3847_136153C.1.pep
CPLAVLAALFFLVKLLEPNSSSHSIKPLYD

SEQ ID NO: 182880 - protein, 109 aa, Glycine max
  unsure (1)..(109): unsure at all Xaa locations
  Clone ID: PAT_MRT3847_136154C.1.pep
RMNGGFNKLGRGLVXFIRCFNXRKCCPXDKAIKRVSVWNIGLTXAAFRDLQEACVYKQYTLSXLYVKMHYCVSXAIHSHVMRVXRSCTVRWKHERTHTFIKLRDYAPRS

SEQ ID NO: 182881 - protein, 88 aa, Glycine max
  unsure (1)..(88): unsure at all Xaa locations
  Clone ID: PAT_MRT3847_136155C.1.pep
YNNLTGTVPLSMQNXFNLRLSFNNLKGPIPYGFSGSELIGNKGVCSDDFYYIATHQFKRCSAQDNLVVMAGSNKVRHKHNQLVIVLPI

SEQ ID NO: 182882 - protein, 209 aa, Glycine max
  unsure (1)..(209): unsure at all Xaa locations
  Clone ID: PAT_MRT3847_136156C.1.pep
MASSQSRKRVDAVDSRAASVLVRAKDGSAFARCDDCKKNVPVALIDMHSCSLEAKIKMNLDAQVVEQAAEAKKPERKKPKSKEPXQKKAKVGKGKKVKDPNMPKRPPTAFFVFLDDFRKSFKEANPDSKDVKRVGKEAGEKWRSMTDEEKKPYLDKVAELKEEYEKAMESYEAGQDEEDQTVSDKETSDKEAAAKEVAIEVEEELTDED

SEQ ID NO: 182883 - protein, 200 aa, Glycine max
  Clone ID: PAT_MRT3847_136157C.1.pep
MASSQSKKRVDAVDSRAASVLLRAKDGSAFARCDDCKKNVPVALIDMHSCSLEAKIKMNLDAQVVEQAAEAKKPERKKPKSKEPMAKKAKVEKVKKVKDPNMPKRPPTAFFAFLDDFRKSFKEANPDSKDVKRVGKEAGEKWRSMTDEKKKPYLDKVAELKAEYEKAMESYEAGQDEEDQAGSDKEAAAKEVEEELTDEE

SEQ ID NO: 182884 - protein, 266 aa, Glycine max
  Clone ID: PAT_MRT3847_136158C.1.pep
PRVRPRVMEGKPENQNHAIVFTRGEAVQTIDMNQDNYLEEAMKMRNLLEEFHANHGLRPPSILGVREHVFTGSVSSLAWFMSNQETSFVTLAQRVLANPLKVRMHYGHPDVFDRIFHITRGGISKASRVINISEDIYAGFNSTLRLGNVTHHEYIQVGKGRDVGLNQIALFEGKVAGGNGEQVLSRDIYRLGQLFDFFRMLSFFFTTVGYYVCTMMTVLTVYIFLYGRAYLAFSGLDEDVSKNAKLQGNTALDAALNAQFLVHEVV

SEQ ID NO: 182885 - protein, 485 aa, Glycine max
  unsure (1)..(485): unsure at all Xaa locations
  Clone ID: PAT_MRT3847_136159C.1.pep
HHEYIQVGKRKDVGLNQIALFEGKVAGGNGEQVLSREVRGLGQLFDFFRMLSFFFTTVGYYVCTMMTVLTVYIFLYGRAYLAFSGLDEDVSKNAKLQGNTALDAALNAQFLVQIGVFTAVPMIMGFILELGLLKAVFSFITMQLQLCSVFFTFSLGTRTHYFGRTILHGGAKYRATGRGFVVRHIKDAENYRPVFSFILVQLQLFALLLIFXIGSRTHYFGRTILHGGAKYRATGRGFVVRHIKFAEISGFEWQKTVEDFDDWTSWLLYKGGVGVKGENSWESWWDEEQMHIQTLRGRILETILSARFFLFQYGVVYKLHLTGNNTSLAIYGFSWAVLVGIVLIFKIFTYSPKKSADFQLVLRFSQGVASIGLVAAVCLVVAFTPLSIADLFASILAFIPTGWGILSLAIAWKKIVWSLGMWDSVREFARMYDAGMGMIIFAPIAFLSWFPFISTFQSRLLFNQAFSRGLEISIILAGNKANVES

SEQ ID NO: 182886 - protein, 211 aa, Glycine max
  Clone ID: PAT_MRT3847_13615C.1.pep
MPEMDERVVIQQPLSAIAEAFEKLSKRVKERNNGNDIRLDTFCEAASLVSVLFRSLGLAFKFAELEYVAKLHGLLEASKTCSTLPDILNLDVASDTVKTSGSFSRNLRRVRQGLDLVRAIFEQLLSTDDSSLKEVASTAYGQVCAPYHTWAVKTAVYAGMYTLPTRDQLLMKLNETEQSADKKMRRYIAASLPIIEYIDKLYLARNITLDW

SEQ ID NO: 182887 - protein, 120 aa, Glycine max
  Clone ID: PAT_MRT3847_136160C.1.pep
MASSALLLRAPHPRSISTQLCINGQISINGSSSSSSSSCFPCSITTQRGSCSSVITCSSSNGRDPNSVDEEDVKQVERILEEKRRAALSAKIASGEFTVKQKSGLLSIMEGLAKVGVPGE

SEQ ID NO: 182888 - protein, 33 aa, Glycine max
  Clone ID: PAT_MRT3847_136161C.1.pep
LCYFNLSFGEFCDILIWLIMNGINSTRRTFFNI

SEQ ID NO: 182889 - protein, 62 aa, Glycine max
  Clone ID: PAT_MRT3847_136162C.1.pep
LASEPWTPVPPVGSLVLSVIPMLSSPNDESPANVEPAKAWRDRRDDFKKRVTPCVRKSQQML

SEQ ID NO: 182890 - protein, 97 aa, Glycine max
  Clone ID: PAT_MRT3847_136163C.1.pep
PIARRKVVTLIAETNLTTLTLRTSTQPLPTLISTSARSATTRSTTTTSTTTITTKTPSLTTGSLIAASVIFLRPFSTHHAIWPIFPGITLRPPWVLL

SEQ ID NO: 182891 - protein, 127 aa, Glycine max
  unsure (1)..(127): unsure at all Xaa locations
  Clone ID: PAT_MRT3847_136164C.1.pep
MAIEHEDDLIDEMNPRPFDEGDIALLKTYWLRPYSTGIXYAGKDINDMGYKEKDFCGIKEPDAVFSAPSQWDLVLDKHMMHEEHPLXVHRCTKIIILTSEDAKSVINVKHIAELVAGLGDKVSSTDV

SEQ ID NO: 182892 - protein, 63 aa, Glycine max
  Clone ID: PAT_MRT3847_136165C.1.pep
KYGYDTPARLLCHKLIHFLGLLGLFLLYWQLEFEPIGTIKSIAIAALVHFLSLKIKLLSFKYF

SEQ ID NO: 182893 - protein, 127 aa, Glycine max
  unsure (1)..(127): unsure at all Xaa locations
  Clone ID: PAT_MRT3847_136166C.1.pep
RSWVRNMTVLQGRMNLDKKKMNRFNPEDALPXILTYVDRXLNLLRRFSSTINERIVYMEHVXDHLLASXMKGYISKGAFLKIDRFXSPVHSEVKSTLMQLLNPMGNNDEILGIQVCAYKGGEAIIVT

SEQ ID NO: 182894 - protein, 191 aa, Glycine max
  Clone ID: PAT_MRT3847_136167C.1.pep
EKDAELRRSAFKPNSPACKAVVDQVLKIIEKEDRKLLIPCVKAIGNLARTFRATETRIIGPLVRLLDEREAEVSREAAISLTKLACSENYLHLDHSKAIISASGAKHLVQLVYLGEQTVQISALVLLSYIALHVPDSEELARAEVLGVLEWASKQPNLTQDQTLEALLQDSKGRLELYQSRGSRGFQKLHH

SEQ ID NO: 182895 - protein, 120 aa, Glycine max
  Clone ID: PAT_MRT3847_136168C.1.pep
KVSREAAISLTKFASSENYLHLDHSKAIISAGGAKHLVQLVYLGEQTVQISALVLLSYIALHVPDSEELARAEVLGVLEWASKQPNVTQDETLEALLQESKGRLELYQSRGSRGFQKLHQ

SEQ ID NO: 182896 - protein, 68 aa, Glycine max
  Clone ID: PAT_MRT3847_136169C.1.pep
QCWSRCMCPSQQYCQGPVSRHASIKCIIVPGTHILLGGTLVGIIRCEHQGFVRHFSTLKSAAVCKLRR

SEQ ID NO: 182897 - protein, 58 aa, Glycine max
  Clone ID: PAT_MRT3847_13616C.1.pep
RLVIQRIGKHLYKINSKLVVISLKIYIKNKLILREIIYRVKHNSARTKLIWKAIKRNF

SEQ ID NO: 182898 - protein, 380 aa, Glycine max
  unsure (1)..(380): unsure at all Xaa locations
  Clone ID: PAT_MRT3847_136170C.1.pep
VSVELECIYTPGKRWRRIFEIIQPVEINSYASDCNSVDLLCVVIQNVTPAHVPDIVIFIDAITIVFEEATKIGPPSSLPIACIEAGNGHSLPNLALRRGEEHSFILKPATSMSKNLKAPDESSQFSKVQSPNSAKSSISSKSPDRTKIASIDDQYAIMVSCRCNYTASRLFFKQASSWRPRSSRDIIISVASEMSQESPYPYEKNSQLHVHVLNLLACNMAYXELTLTVLTSASFTSLPSVLSLSLAISQVKEPSGFQQSGHRISVERHVGATQGGSFTSLIKDNEKQNDDVRPQSVSVNDDVISSSGLSCTHLWLQSRVPLGCIPSQSTATIKLELLPLTDGIITLDSLQIDVMEKGVTYIPERSLKINATSSISKGIL

SEQ ID NO: 182899 - protein, 63 aa, Glycine max
  Clone ID: PAT_MRT3847_136171C.1.pep
SWVMNDESTKVLNIWSSVIDTLDFKKKLYVRDIEIYEKKNKKCVYIGHMMKVKVCESPLTWKY

SEQ ID NO: 182900 - protein, 57 aa, Glycine max
  Clone ID: PAT_MRT3847_136172C.1.pep
IHTVIHSPFQQRDMNDYIGPMKYLSIDEMTRNKCLFITPLVTFQNQEASPFCRLLAA

SEQ ID NO: 182901 - protein, 85 aa, Glycine max
  unsure (1)..(85): unsure at all Xaa locations
  Clone ID: PAT_MRT3847_136173C.1.pep
YGGPHYRETNGVNCPSLPKKDKPIPRDVHHSSRSIIAGGSNLRNGQQTACEASLFHHEEKGIPWXIAKLGVRKGMWGTVHKIETR

SEQ ID NO: 182902 - protein, 330 aa, Glycine max
  Clone ID: PAT_MRT3847_136174C.1.pep
MPPNITTVVANVTTEQLPKARGGSGRAFVTFLAGNGDYVKGVVGLAKGLRKAKSMYPLVVAVLPDVPEEHREILKSQGCIVREIEPVYPPENQTQFAMAYYVINYSKLRIWEFVEYKKTIYLDGDIQVFGNIDHLFDLPDNYFYAVMDCFCEKTWSHTPQFQIGYCQQCPDKVQWPSHFGSKPPLYFNAGMFVYEPNLDTYRDLLQTVQLTKPTSFAEQDFLNMYFKDKYKPIPNMYNLVLAMLWRHPENVELDKVQVVHYCAAGSKPWRFTGKEENMDREDIKMLVKKWWDIYEDETLDYNNNSVNVERFTSALLDAGGFQFVPAPSAA

SEQ ID NO: 182903 - protein, 151 aa, Glycine max
  Clone ID: PAT_MRT3847_136175C.1.pep
VEKGSPGSLSRLRPEENQVLPQNAVDPMESMDSTRFASPQHWEDELNNEVKVLSLKNGRVPQKDQIGRKADRYPMSPSLLHDNSLATISGKDNLGYESGSGAGGCGFLCWNKSKPRRVVKVKGGTPVRARRAATFTLFGDCTKPKKRERRR

SEQ ID NO: 182904 - protein, 96 aa, Glycine max
  Clone ID: PAT_MRT3847_136176C.1.pep
NPCFFQRMGGVPLPRQGVSPFGSPGWVWWHNERRLFIVLGAPPPPLGGEPGVPSPLGFFFPPQFMPRGLLRNPLVCVITIKLRYYKNPKTKKNHTK

SEQ ID NO: 182905 - protein, 68 aa, Glycine max
  Clone ID: PAT_MRT3847_136177C.1.pep
MTTEWWFLLSYAMRTLLLGEVRTLSKTSIESAWCLTQVRYPSCSGGLCIIGLNAPVIFPGSRKQISSL

SEQ ID NO: 182906 - protein, 129 aa, Glycine max
  Clone ID: PAT_MRT3847_136178C.1.pep
MQAPLPTTITSSSDVKLGSSKVEKREKAASSKGTLGARKRTYDPDLFFKVNGKLYQRLGKIGSGGSSEVHKVISSDCRIYALKKIKLKGRDYATAYGFCQEIEYLNRLKGKDNIIQLIDYEVTDKALLE

SEQ ID NO: 182907 - protein, 59 aa, Glycine max
  unsure (1)..(59): unsure at all Xaa locations
  Clone ID: PAT_MRT3847_136179C.1.pep
RGLSVFSRCWRGGSSFSLRXSSSVFSAAVLPLGFSAFALRGPSPSLAPAARVPXGPFIR

SEQ ID NO: 182908 - protein, 94 aa, Glycine max
  Clone ID: PAT_MRT3847_13617C.1.pep
SLCFTPCPKDLPHKTPPNPRRNPIRIRRKQPPQPPTAPPPMLLLPPPPGAPPPGAAPPEPAPCARLHASTRRRSRRGQRPRGGSLAARSRRRAR

SEQ ID NO: 182909 - protein, 103 aa, Glycine max
  unsure (1)..(103): unsure at all Xaa locations
  Clone ID: PAT_MRT3847_136180C.1.pep
LKATFTNALGSANGLSASAPLHLLPSKRQYSLTDRAIQSEKPTYQVIQPINGDXFIGSLETPVTYSPLIAWDLSNLPAYRTAVSPLLIQIDVSLAHGYLMMVP

SEQ ID NO: 182910 - protein, 41 aa, Glycine max
  Clone ID: PAT_MRT3847_136181C.1.pep
MPFTYVITFLNVTKHVTKLCLPTKLSLNHPNRKLCINVEFP

SEQ ID NO: 182911 - protein, 62 aa, Glycine max
  Clone ID: PAT_MRT3847_136182C.1.pep
GFQEFPSELHVFFLGLVVGSLPTPPGFARSFPSLFVEFVACLGHLHHRLHQANFLERPKGFV

SEQ ID NO: 182912 - protein, 102 aa, Glycine max
  Clone ID: PAT_MRT3847_136183C.1.pep
MAINIIHDTGINRAHLCQKILKVYIRCVVLKRVSFVGHYFRFICNILFVCSVSGRPSQYRKLPVRHPSSSPSYYADYDFFSATTTTGGYYFYSDILNLNISL

SEQ ID NO: 182913 - protein, 64 aa, Glycine max
  Clone ID: PAT_MRT3847_136184C.1.pep
KNYTVLDTGGVFYMGTLTTAAIACFSVGIKPDCKRRISSCKLFCTGTSTLVSDTGMPWKTLLLL

SEQ ID NO: 182914 - protein, 231 aa, Glycine max
  unsure (1)..(231): unsure at all Xaa locations
  Clone ID: PAT_MRT3847_136185C.1.pep
MDALDSIPNLPPLPPYDPSEYHKPPQHQSETGENGNGTKNGEPSENGQVAADNNGLHLQISKPLLSEGMTRSGTDRDQSGGEEETTSKRRRRSRWDPQPESNDQSGGGDSGSGPKKRKSRWADDEPKPVIQLPDFMGGIEFDPEIQALNSRLLEISRMLQSGLPLDDRPEGARSPSPEPVYDNMGIRINTREYRARERLQKERQEIISQIIKKNPAFKPPADYRPXKLQKK

SEQ ID NO: 182915 - protein, 224 aa, Glycine max
  unsure (1)..(224): unsure at all Xaa locations
  Clone ID: PAT_MRT3847_136186C.1.pep
MDAVDSTPNPPPLPTYDPSEYHNPPQHQSETGQNGNGTNLGKPSENGSQVAADNNGLNPQISKPLLSEGLTRSGTDRDQSGGEEETTSKRRRRSRWDPQPESNEQSGGDSGTGPKKRKSRWADDDPKPVIQLPDFMGGIEFDPEIQALNSRLLEISRMLQSGLPLDDRPEGARSPSPEPIYDNMGIRINTREYRARERLQKERQEIISQIIKXNPAFKPPGDYR

SEQ ID NO: 182916 - protein, 51 aa, Glycine max
  Clone ID: PAT_MRT3847_136187C.1.pep
LVIRLPHYFIQHFFFFYLIETNVNCGGCCHKYSIHQTYLSANQDLHNNPKK

SEQ ID NO: 182917 - protein, 71 aa, Glycine max
  Clone ID: PAT_MRT3847_136188C.1.pep
APEVLLRAPCYTPGVGMHKSSFFCCELVFIFGSYHGLVLEAKVKICSFCFLNLVFAWGLLKANPNTICMRS

SEQ ID NO: 182918 - protein, 88 aa, Glycine max
  Clone ID: PAT_MRT3847_136189C.1.pep
NGIPTQHLFEILRRATLWRLQYNESCELCWGELFSNLVLESVSGIAWRVCSSKDNLILRHSISFRSINVDTISSNSVIHSVATQQCDF

SEQ ID NO: 182919 - protein, 78 aa, Glycine max
  unsure (1)..(78): unsure at all Xaa locations
  Clone ID: PAT_MRT3847_13618C.1.pep
FAQQTLLFTSESTNKTHPTQLCNQISNTPLIYILXQDPHNKVTSQTFSNTNILITLQQITTKDNTLYDNNQRYICRNI

SEQ ID NO: 182920 - protein, 35 aa, Glycine max
  Clone ID: PAT_MRT3847_136190C.1.pep
LHVFTFSRLGMKSSKEVRAFLLGVDVHYSTGIRIL

SEQ ID NO: 182921 - protein, 66 aa, Glycine max
  Clone ID: PAT_MRT3847_136191C.1.pep
LPFTESTDPYSKPWKIVNLKPDALDSYTKDGTIWPQSAICNALCIVDQLRKRVRTVHCKSIHLGLI

SEQ ID NO: 182922 - protein, 42 aa, Glycine max
  Clone ID: PAT_MRT3847_136192C.1.pep
NKTIVTGAGDETLRFWNVFPSPKSQNTDSEIGASSLGRTIIR

SEQ ID NO: 182923 - protein, 90 aa, Glycine max
  Clone ID: PAT_MRT3847_136193C.1.pep
IRNETPHESHECLRLWQPSCNFLSSLQCSLIGKACHCYVIFSHDKFFHHGALYSDISFCSFCTATQTLKYATLIESKCPEQSPNNCSSKR

SEQ ID NO: 182924 - protein, 39 aa, Glycine max
  Clone ID: PAT_MRT3847_136194C.1.pep
AHSVYDFTQFSCFGLGTESRFIAVYSYGAEYYQSLATSR

SEQ ID NO: 182925 - protein, 43 aa, Glycine max
  Clone ID: PAT_MRT3847_136195C.1.pep
MHSRCDFILHPIKYRRIVIYRKFSFFFNFYNDYLNSLFWNNVR

SEQ ID NO: 182926 - protein, 90 aa, Glycine max
  Clone ID: PAT_MRT3847_136196C.1.pep
LNKLYIVLSHAPAILAEKRVWIPHWRTNRSNTGVLDGFFWDTEKLVFLKHWRFSAYDHITRALLTGNHTCPGAPHHHHSLVFPCAGGPNF

SEQ ID NO: 182927 - protein, 58 aa, Glycine max
  Clone ID: PAT_MRT3847_136197C.1.pep
NLTSNCIEMSDVSRCLACHILDVVFDERVCQDVGRVLHRIPRHIFSWFTLGNLSAGKK

SEQ ID NO: 182928 - protein, 205 aa, Glycine max
  Clone ID: PAT_MRT3847_136198C.1.pep
MSAQVGVRTRAQAALAMEAVSSAEPSSKRKKISNSTNQEPKLSKTPRTSSSSAVKPATVTEMVQPVSPEMVQQRCLSPTSSEIPASCCSSNGSIGLDQDRIKLLDLEVESAQVETSTCNGGHEIERREMKRSSELRENSQEPEPMEINSHRVLSKAKAMPTELELEEFFAASEKDIQKRFQDRYNYDIVKDVPLEGRYEWVQLKP

SEQ ID NO: 182929 - protein, 50 aa, Glycine max
  unsure (1)..(50): unsure at all Xaa locations
  Clone ID: PAT_MRT3847_136199C.1.pep
LYLPPGFRFHPTDEEPLXSTYLRCKCASEHICXAITVEIDLFMYHPWDLP

SEQ ID NO: 182930 - protein, 62 aa, Glycine max
  Clone ID: PAT_MRT3847_13619C.1.pep
LARLTETSLISSNITLPNIHTMQVFILPYIYMFNTVRAYTFTHMIQQMFSTTSSSSKIHTMS

SEQ ID NO: 182931 - protein, 101 aa, Glycine max
  Clone ID: PAT_MRT3847_1361C.1.pep
LPPIVHTVLTHYIVYPRSYNSTTIYYYTAPYSLKVLLFAFKPASTITIIVSNFLLGGCLPYLSSNCVFALPNLSLRILPPPPPNARRTSYSDDRKPSWKGI

SEQ ID NO: 182932 - protein, 134 aa, Glycine max
  unsure (1)..(134): unsure at all Xaa locations
  Clone ID: PAT_MRT3847_136200C.1.pep
ENLLKCNQAVIALQGRYGGDQEEILRTFHEGTIERPYCYCLLDGIKKYPSKGLQKDSGKKTDEKSRLKALEILVNYDHLMPTRHASDGYRXDGGTPDVRGTRDWNVTDLQETEKQVQDRFKTVKNNRTFTKLTF

SEQ ID NO: 182933 - protein, 63 aa, Glycine max
  Clone ID: PAT_MRT3847_136201C.1.pep
FFRLLWLTFFGSCCFNWFLVVGDFGEFLPLVLRWLILGQVPQLLVVLHEQEPQLLLVLLQEPQ

SEQ ID NO: 182934 - protein, 156 aa, Glycine max
  Clone ID: PAT_MRT3847_136202C.1.pep
SPTSISYQTRLIKVNGGMQVHPLKLPKTPEPPVVDGGDAHGTKVMGSTNGKGSQIRRSLRTIGKLINGPDKRSQQNNMVEVKSPIKGTGHTNHVKSPISAAEKTKKRQSLTGTQPPLSNNSRRSSLGGKPVVAYDKDGNARTPPSHSDTKTAKRWL

SEQ ID NO: 182935 - protein, 262 aa, Glycine max
  unsure (1)..(262): unsure at all Xaa locations
  Clone ID: PAT_MRT3847_136203C.1.pep
RNFQYPQYVFLRVSPATLSLILDYCHFHQVPGRSNKERKSYDEKFIRMDTKRLCELTSAADSLQLKPLVDLTSRALARIIEGKSPEEIREIFHLPDDLTEVSGXEEKLEPLKNTTDDPRIRLLNRLYAKKRKELKERERLKNVEVEEEHVDERSVDDLLSFINGNDGDPKEVKTSKNKKKNRRKKEQQQKNSSLKEASEVNKEVNGQSIRHQSAEADRIAETSNSHTEDVFAHREFDDGDIDDGIDPALKEKIDSIVAVADH

SEQ ID NO: 182936 - protein, 61 aa, Glycine max
  unsure (1)..(61): unsure at all Xaa locations
  Clone ID: PAT_MRT3847_136204C.1.pep
LLPPRIPTGHQRYPLLWLCPSSXSXRNXRLXTXWLXSXXXPXSXXQXXLLGXKNXXFLXRN

SEQ ID NO: 182937 - protein, 445 aa, Glycine max
  Clone ID: PAT_MRT3847_136205C.1.pep
MGPGALQSTYVEKKRFTPESDSSSLTEWKWEGTIAKGGTPVCCARCFPVGKVLDMMLPEFLDCTAKTGLDMLSKHYYQAVGVWVVFFVPGSDADMECYNEFMHYLEEKKRAAVAKLDDKTTLFLVPPSEFSEKVLKVPGRLSISGVILRLENPDLNHGPEHIQREMTNKNLLSYNENILHLKSTFPSVRVPTFPSIPEMGNSGISNLSFLGNKFAAAPSVSDSARAVASMSEFHDERSHNYPTQQRTSSQNLQNFSNKALPLQPSSGAGEPIADEHQPIIPRAAQDVNAIQHPSGISGIPFYGDSKLSYPDIRHLDPLSVPVGALAPEQLAQLAATLLEQQRQSGGSSSTSALADPQQINRFGTSDTSSRFISSDNSSRPPQKYATENNVVNSDLSASQMGQSQMLQMQKQQQIVNVPQLSQIVQREPQREANGNQLDSSLQEDD

SEQ ID NO: 182938 - protein, 97 aa, Glycine max
  unsure (1)..(97): unsure at all Xaa locations
  Clone ID: PAT_MRT3847_136206C.1.pep
MVAYQAVIKLWHEKQHRSSSADCKRERCXWSIGHQPCIVRXTRSTRPDMAQESDSKAKQDYAIYRVSVMKWGGIMHCTKGVGPGKPTYHGDSEVIFY

SEQ ID NO: 182939 - protein, 90 aa, Glycine max
  Clone ID: PAT_MRT3847_136207C.1.pep
HATNLGYSPTTRVRGWTVSGNVYNRNKLKSADVPTSATTERGQYKAKVLAGVVSFVVGVTTVASSKIFVVVKKVNNNQRKTVPPGIFGSK

SEQ ID NO: 182940 - protein, 187 aa, Glycine max
  Clone ID: PAT_MRT3847_136208C.1.pep
VSLIDSVLHSFKFHIYIGTKHTPLRSSQFLTPLSIPKPYIFAQRRISFPIPHSPIKCKMEDDEKPTGNSHGIADMDVADAALQGQRVASSPAPLQQDQVMVEQGHDIKNGDSGPAHLPEASVINNNQFEVEDAQTVSHQELTTPKPKEKNVREMKNVLNDTEVLTSSKDIRAFCCCSYFVDFLLSRH

SEQ ID NO: 182941 - protein, 72 aa, Glycine max
  unsure (1)..(72): unsure at all Xaa locations
  Clone ID: PAT_MRT3847_136209C.1.pep
RVSKHFSKHIFYRCMLRGFRLHRCPYXIRSSITVSYHSGMLAILVLKSLLLLIVHDHSVSRFIMSCYCWSFS

SEQ ID NO: 182942 - protein, 59 aa, Glycine max
  Clone ID: PAT_MRT3847_13620C.1.pep
KRRGESVGNGLCMVVRIEKIDRCAVLKSCCFVRHMDTLFTGPPPPPLYRPHRRSSRNPS

SEQ ID NO: 182943 - protein, 46 aa, Glycine max
  unsure (1)..(46): unsure at all Xaa locations
  Clone ID: PAT_MRT3847_136210C.1.pep
QILETFFVHCFTHATSPLGNVGQNXAYYWTFISYIAYYGDHPLYTP

SEQ ID NO: 182944 - protein, 255 aa, Glycine max
  unsure (1)..(255): unsure at all Xaa locations
  Clone ID: PAT_MRT3847_136211C.1.pep
MILQQIIKLLTLTLIWWSSINVECAVAGTRDTRVINSGCSTINASNPGSFFGNVNETISELRGEIRNQSLHFGTSLKSKGDVNTYTMFQCRNYLSRNDCLACINTASTQIRDICKKANGARLIYNDCFLRYESERFYQQTNEIGGGVTCGNKSTNATGFREVGQQALLDLQKATPKIKGFYAATKTQVAGGSANIYAIAQCVETASPQKCLDCMQVGYNNLQSCLPSTDGSAYXAGCFMRFSTTPFFADNQTINI

SEQ ID NO: 182945 - protein, 125 aa, Glycine max
  Clone ID: PAT_MRT3847_136212C.1.pep
GSSTRITFACGSMVIIQNQDECWSEPESSVSLSRGWGFRGPMTDPMAWAMMWTCRYYWRLNHREYRQCDAQRQRATWCGLLWTYETTPMWFITFSRATSKQCTMTSDSRTGLMRTMIRRNRCRGS

SEQ ID NO: 182946 - protein, 58 aa, Glycine max
  unsure (1)..(58): unsure at all Xaa locations
  Clone ID: PAT_MRT3847_136213C.1.pep
ASDINRRGPSIWDTYTKQAPXMIYDHNDGSIXVESYDQYKIDINMVKEVELDSYRLSM

SEQ ID NO: 182947 - protein, 165 aa, Glycine max
  Clone ID: PAT_MRT3847_136214C.1.pep
ARDEFFDVSEPKNYDEFENEWHSAPLSEQHSQTDYHPKMSSADGLAKKLQDLSVQKKGYMDLQETSSRDNSEPCPYGATLQKDSSCNLPCSWDESDASLFYIRGKTYLKDKKKVKAERTLMQMVGADWIQSNSRQDDLCSRPGSIVQQYEKNGRPEFFFVVNFQV

SEQ ID NO: 182948 - protein, 73 aa, Glycine max
  Clone ID: PAT_MRT3847_136215C.1.pep
FSLGSVSALLVFFSAPGGFLVVAPLCWFFLCLLGLRLFLRSFRGVFVSFPPVCFCPLGGYNKEGGRRLLWRLP

SEQ ID NO: 182949 - protein, 180 aa, Glycine max
  unsure (1)..(180): unsure at all Xaa locations
  Clone ID: PAT_MRT3847_136216C.1.pep
MKPYLRAIFLLFLILLDQSISASAFLNLNGLLNIEKWPSGEKSLEMGKIGKETTDHIKDLLKKLIESPPEPPKQINIEVEGLSVVKDYLSDYGYIESSGPFNNIFDQETMSAIKTYQKFSNLPVTGVPNKQLXQQMFSLRCGVPDVNFDYNLTXDDNTSYPKARHRLFPNRNLTYRFFPK

SEQ ID NO: 182950 - protein, 161 aa, Glycine max
  Clone ID: PAT_MRT3847_136217C.1.pep
KTTEGEGSRRQAKYAVHALAAITKDDGLKSLSVLYKRLVDMLEEKTHLPAVLQSLGCIAQTAMPIFETRESEIEEFIINKILKSDSKEDHSRISWDDKSDLCVLKIYGIKTIVKSYLPIKDAHVRPGIDGLLDILRNMLSYGEISKDLQSSSVDKAHLRLA

SEQ ID NO: 182951 - protein, 80 aa, Glycine max
  unsure (1)..(80): unsure at all Xaa locations
  Clone ID: PAT_MRT3847_136218C.1.pep
XSTLXXIIRGFPXXXXXQXXEDXMXXEAASXXGTTTVPTXYTDXLXVPMNNTXRXGXLSNXXLFXLXXVLLXTLAHSVRX

SEQ ID NO: 182952 - protein, 214 aa, Glycine max
  Clone ID: PAT_MRT3847_136219C.1.pep
TRPVKRYENAVDEAVLEKDSIKKAFDEEKKKVVKLELLIAKTKEVAAKSDAELGQVRSERNKLVEKEKELEGNVSVLREENEALQGMLAKARKESKDLNAKVEVWCSNSNKALSLLKTTAAALVCQHKERGGDEVVAASDENPVEEIQPYAQELDAIKKAFKTKDEMVDDMKQQLVSLNKSVAEAHKSKSLWTVISSATTIFAAVLAAYVARGR

SEQ ID NO: 182953 - protein, 225 aa, Glycine max
  Clone ID: PAT_MRT3847_13621C.1.pep
SEESEACSKSCRLAGVGDSDQKLADGISLYSIVSDSYTKAGILAPLITEHANGGKCIVFTQTKRDADRLSYVMAKSLRCEALHGDISQTQRERTLAGFRNNNFNVLVATDVASRGLDIPNVDLVIHYDLPNSSEIFVHRSGRTGRAGKKGSAILFFTQDQFRAVQTIERDVGCKFTELPKIDAPSGSAEMFSGMAGGRFGSMRDRQSGGTGFGRSPGFGRSGSTG

SEQ ID NO: 182954 - protein, 130 aa, Glycine max
  Clone ID: PAT_MRT3847_136220C.1.pep
MSNSDPKTRPRPGPWPPAPAPVVKAMPPASWAKKTGFKPKFSGEANASDSGQISLQPKPREPDTNVDLEAGRAGAPANGVAHQNKVPPLPPSEDQLVKKRRTPTASPVPPSLVPMAKPLRSLHRRRGGRR

SEQ ID NO: 182955 - protein, 130 aa, Glycine max
  Clone ID: PAT_MRT3847_136221C.1.pep
LFQKQLPKMPREYITRLVLDKNHISMAIVKKGWRVVGGICYRPFESRGFAEIVFCAVDSSEQIKGYGSHLMNSLKDHVRKAHPTINHFLTYADNYAVGYFKKQGFTKQISLPRERWVGYIKDYEGGTIMQ

SEQ ID NO: 182956 - protein, 50 aa, Glycine max
  Clone ID: PAT_MRT3847_136222C.1.pep
TPYWISGRFLVLGKGKFQKLGFPFFKMLGGAARSHNFGGGFPPKSGTGFP

SEQ ID NO: 182957 - protein, 42 aa, Glycine max
  Clone ID: PAT_MRT3847_136223C.1.pep
YTRTYAPRTHSGENLTHYTNLDRVLCYPYTLLSYLRWTILQK

SEQ ID NO: 182958 - protein, 89 aa, Glycine max
  Clone ID: PAT_MRT3847_136224C.1.pep
KIGRGTKGQTSFLKKNVIRRRGDTRHEPQPGREKPAEPNERGSKKERGRGNGGGAKGEKKATQKDERKRQRKKKGKPGGGGQKGTAQHQ

SEQ ID NO: 182959 - protein, 50 aa, Glycine max
  Clone ID: PAT_MRT3847_136225C.1.pep
IRKQFGGGGLLAGISSSPGQWGRVYGYILEGKKLEFYIKNPPKKKGKGAA

SEQ ID NO: 182960 - protein, 131 aa, Glycine max
  unsure (1)..(131): unsure at all Xaa locations
  Clone ID: PAT_MRT3847_136226C.1.pep
ESWGNWLSIYWCFGHLKNRQRIGHAVLVPEXIPSGTDNVSGSSTQAPIIPFHFVAPTSCAASFLHSEPPSVAQSPSAILSLTPEEPFSIFAIGPYAHETQLVSPPVFSTFTTEPSTAPFTPPPESNHLTTP

SEQ ID NO: 182961 - protein, 28 aa, Glycine max
  Clone ID: PAT_MRT3847_136227C.1.pep
NLAKFLMNNQILLNPISNNPLKHSYKTF

SEQ ID NO: 182962 - protein, 68 aa, Glycine max
  Clone ID: PAT_MRT3847_136228C.1.pep
IIAITKCSLEFRLTSPPSHFTHPRKPHLSSTAAYAHVSSPYCGSYLVSSLLHRSASFSINFTYQPLPN

SEQ ID NO: 182963 - protein, 218 aa, Glycine max
  Clone ID: PAT_MRT3847_136229C.1.pep
MAMSVARLRKDEIQRLEKEIDSLRHPTVELHESETSAALKNLLEERERMVTFLETSAAAPPSPLGTAFNGVVEELKNFTTRVAHVLPVSDDEGSTGEIVSVLGGPAVRDICSKCLRLFDQSTIEAFTVRNLAGHRLPLDPLQAKSEWFGGDATFPWECIHHFWQQGGQINGRKVIMVMDNNKDEGNGGCITVYVVYGSIFGSKPVAVILMMQGNCSGQ

SEQ ID NO: 182964 - protein, 68 aa, Glycine max
  unsure (1)..(68): unsure at all Xaa locations
  Clone ID: PAT_MRT3847_13622C.1.pep
KYTTTFLEQKNQFLTNKKPFVISLSXLTKPKKLFRGSKFNFYSHIFGPQINYIPRFGKFLPAREPSKW

SEQ ID NO: 182965 - protein, 104 aa, Glycine max
  unsure (1)..(104): unsure at all Xaa locations
  Clone ID: PAT_MRT3847_136230C.1.pep
AARTEEEYDYLFNDVLLSDSGVGKYNLLSVFTRYEXCLLYISTIVVEFSTSTLHVEGRTVIAQLLYAAGRERSSTITTAYYXGGLATVLVYDDANPTTFLNDIR

SEQ ID NO: 182966 - protein, 49 aa, Glycine max
  Clone ID: PAT_MRT3847_136231C.1.pep
YTILYNDQKITGTENHMPGIVWYSNTLTSIRRGGVMDTRTVVLDQGGSL

SEQ ID NO: 182967 - protein, 49 aa, Glycine max
  Clone ID: PAT_MRT3847_136232C.1.pep
LEAMCLFSNAKNFSLSVDLLVLRVGWSFHCPVKFQQSTSAEPDAAPIEL

SEQ ID NO: 182968 - protein, 66 aa, Glycine max
  unsure (1)..(66): unsure at all Xaa locations
  Clone ID: PAT_MRT3847_136233C.1.pep
GSSGDALSLLAQNIATTLAGLIFTSAASWQXHLFFLSRIPXIGINGYMHLNLMKGSYADAXMMYEE

SEQ ID NO: 182969 - protein, 502 aa, Glycine max
  Clone ID: PAT_MRT3847_136234C.1.pep
HKAIKLCEEALIATDPTITSLGPNIEAAVYKTGVVCAAFLANIATSDATVTFNGNSYHLPAWSVSILPDCKNVVLNTAKITSASMISSFTTESLKDVGSLDDSGSRWSWISEPIGISKADSFSTFGLLEQINTTADRSDYLWYSLSIDLDAGAQTFLHIKSLGHALHAFINGKLAGSGTGNHEKANVEVDIPITLVSGKNTIDLLSLTVGLQNYGAFFDTWGAGITGPVILKCLKNGSNVDLSSKQWTYQVGLKNEDLGLSSGCSGQWNSQSTLPTNQPLTWYKTNFVAPSGNNPVAIDFTGMGKGEAWVNGQSIGRYWPTYASPKGGCTDSCNYRGAYDASKCLKNCGKPSQTLYHVPRSWLRPDRNTLVLFEESGGNPKQISFATKQIGSVCSHVSESHPPPVDSWNSNTESGRKVVPVVSLECPYPNQVVSSIKFASFGTPLGTCGNFKHGLCSSNKALSIVQKACIGSSSCRIELSVNTFGDPCKGVAKSLAVEASCA

SEQ ID NO: 182970 - protein, 102 aa, Glycine max
  unsure (1)..(102): unsure at all Xaa locations
  Clone ID: PAT_MRT3847_136235C.1.pep
PFPLLLLRVFYLASGPVSFGIAYCEKQNPSHNKCLRSCNTEKDSYRNQACHARCNLLKADEEDECEXCQIPRPRPQHPERERQQHLENEEDKGDHPLPFPFP

SEQ ID NO: 182971 - protein, 89 aa, Glycine max
  unsure (1)..(89): unsure at all Xaa locations
  Clone ID: PAT_MRT3847_136236C.1.pep
RFRNXXXXKMAXLITVVWXAVALXTVHXGGRVVGGGGGXPIRMVAGVEXEXVRVIGXXXXXLXFARFMXXFGKSYEXXXRXGRGXRYSX

SEQ ID NO: 182972 - protein, 60 aa, Glycine max
  Clone ID: PAT_MRT3847_136237C.1.pep
HAPKKEPFPRQTRFGEMLNPTYKCNKWALDSNYKERIVARIWLPESLFIIPRARGGKEIT

SEQ ID NO: 182973 - protein, 67 aa, Glycine max
  Clone ID: PAT_MRT3847_136238C.1.pep
PHRLEITLKLKHIINKNSNHFESSLSFSLVLLETNHLLNLKLPKTCLSSVFSFMYWSYIGVFNFGMT

SEQ ID NO: 182974 - protein, 68 aa, Glycine max
  Clone ID: PAT_MRT3847_136239C.1.pep
MTTSRRLADRKVEKFEKNITKRGFVPDTTTKKGKDYPVGPVLLGCSVFVVIGSSLFQIIRTATSGGMA

SEQ ID NO: 182975 - protein, 170 aa, Glycine max
  Clone ID: PAT_MRT3847_13623C.1.pep
MGASASVTEKSIHEFMVKDAKGRDVNLSTYKGKVLLVVNVASKCGFTNSNYTQLTELYSKYKDRGLEILAFPCNQFLKQEPGSSQEAEEFACTRYKAEYPIFGKVRVNGPDTAPVYKFLKANKTGFLGSRIKWNFTKFLVDKEGHVLARYGPTTSPLSIENDIKTALGEA

SEQ ID NO: 182976 - protein, 114 aa, Glycine max
  Clone ID: PAT_MRT3847_136240C.1.pep
CFQYKKIFLATLLQKIVTAKWKTATAEEKKPYEGIYHAGKEAYLQVIAKEKRETDSMRFLEDEQRQRTAMELLEQYMQFKQETEKDGKKNKLHIPTFGPFFFLVWLLMCFIHVH

SEQ ID NO: 182977 - protein, 349 aa, Glycine max
  Clone ID: PAT_MRT3847_136241C.1.pep
PKLKKKKRKQKQEQKRKMLVSESSGSKVDLPEELLNVLPSDPYEQLDVARKITSVALSTRVDALQSESSALRAELADRNRLIAELQSQVESIDAALSEAADKLARADQDKENLLKENASLSNTVRKLTRDVSKLETFRKTLMKSLREDEDTSEGTPDTAAKLHSQASFTSTSQFGDDDASSTLSSRTSSMRINTSDMGNYLAEDRESDGSKSRASHNLLLASQTSTPRITPPGSPPSMSALVSPTRTSSKPVSPRRHAISFSTSRGMFDDRSSVGSQTGRTRVDGKEFFRQVRSRLSYEQFGAFLANVKELNSHKQTKEETLQKANELFGPENKDLYTIFEGLITRNVH

SEQ ID NO: 182978 - protein, 57 aa, Glycine max
  unsure (1)..(57): unsure at all Xaa locations
  Clone ID: PAT_MRT3847_136242C.1.pep
WPAQGVVFFPFGNRSLLCRNHLQYSCRPVWKPFVPFKKVXPPVXAVGLYPGGLRSTG

SEQ ID NO: 182979 - protein, 67 aa, Glycine max
  unsure (1)..(67): unsure at all Xaa locations
  Clone ID: PAT_MRT3847_136243C.1.pep
XXXYXXXXXXSXAELSRXXXXXXXXXXEXXXTXGXQEGXXXXGATXCGSPEXXPEAXXXDGXGXWRT

SEQ ID NO: 182980 - protein, 37 aa, Glycine max
  unsure (1)..(37): unsure at all Xaa locations
  Clone ID: PAT_MRT3847_136244C.1.pep
KLPIYDCTDASKVXKELQEARTAYLNDSSLIIGFDNS

SEQ ID NO: 182981 - protein, 115 aa, Glycine max
  Clone ID: PAT_MRT3847_136245C.1.pep
MEISSFHQFPDESLSEALDHFHGLLRKTPTHGYSESVQLNIFIDGLQPQSKQLLYASAMGKIKLKTPEEAMELIENMAANDHAILRDRAYTPTKRSLLELTAQDATLAQNKLLSR

SEQ ID NO: 182982 - protein, 83 aa, Glycine max
  Clone ID: PAT_MRT3847_136246C.1.pep
VELMQSMWTFPSTVGEAMRHCRVVITELGFGDPLANHVPQTDSMSCIDDLWYTKRLSSHGDENVDELMMNGQVRNVFVDPRDF

SEQ ID NO: 182983 - protein, 373 aa, Glycine max
  unsure (1)..(373): unsure at all Xaa locations
  Clone ID: PAT_MRT3847_136247C.1.pep
MAPLSLPLNLKWTPLSVKATATATTTSKVPEVPLPEKIRNSRILVLGGTGRVGGSTAIALSNLCPDLQILVAGRNREKGEVLTAKLGGNSEFARVDIDDVNSLETALKNVDLVVHAAGPFQQAERCSVLEAAINTQTAYLDVCDDTSYAWRAKSFMNRALDANVPAITTGGIYPGISNVMAAELVRAANESEDKPERLRFYYYTAGTGGAGLXTSFLLRGSSCTVGRMLLCMHHTISIWNSIRIGEWKRKTDKXQSLVQLFDPVVRAVDGIAGERVSMRVDLECASGRNTVGIFSHRRLSVSVGIATAAFALAILEGSTQPGVWFPEEAQGIPIEAREVLLKRASQGTFNFIMNRSPWMVETNPKEFGLGIYL

SEQ ID NO: 182984 - protein, 213 aa, Glycine max
  Clone ID: PAT_MRT3847_136248C.1.pep
MAPLSLPLNLKWTPLSVKATATATTTSKVPEVPLPEKIRNSRILVLGGTGRVGGSTAIALSNLCPDLQILVAGRNREKGEVLTAKLGGNSEFARVDIDDVNSLETALKNVDLVVHAAGPFQQAERCSVLEAVRGRVGAYLDVCDDTSYAWRAKSFMNRALDANVPAITTGGIYPGISNVMAAELVRAANESEDKPERLRLVDPLTIPKYDFFI

SEQ ID NO: 182985 - protein, 109 aa, Glycine max
  unsure (1)..(109): unsure at all Xaa locations
  Clone ID: PAT_MRT3847_136249C.1.pep
AQACFCSKVLSRDIRSGFSAKSAGHDVGPPPPPWGGFFFITFFXXXFTPSFSAMXGAXXPLLLGGXGVVLWRPGWCPFCGLCLLPRLRPPGRRRVXCWSGFPSPRKSGP

SEQ ID NO: 182986 - protein, 46 aa, Glycine max
  unsure (1)..(46): unsure at all Xaa locations
  Clone ID: PAT_MRT3847_13624C.1.pep
ADEWHRMAHFRYFFLSAGERYSRTKLVKFPPAWRALACVLXYRAVK

SEQ ID NO: 182987 - protein, 313 aa, Glycine max
  Clone ID: PAT_MRT3847_136250C.1.pep
MILLFPITPSLEIENDVAKRNSKCSSSSSSSSESGSSSSDSDSVSSSGSELDMAKTSEPLSATKENIGFGLTSDQNKGDPGNSETGKDSTNVGGQVEESSQSRPVATEPESHQEGESAASKRQVSPEKLYRAALLRSRFADTILKAQEKALEKDEKRDPEKLRIEREDLERRQKEEKARLQAEAKAAEEAQRKAEAEAAAEAKRKRELEREAARQALQKMEKTVDINENSQFLEDLEMLSAVHDEHLPSFKEETSTDQPQDGLGGIKLQGNPLEQLGLYMKDEDEEEDEEEEDELPPSGAVGPSNDVEEGEID

SEQ ID NO: 182988 - protein, 58 aa, Glycine max
  Clone ID: PAT_MRT3847_136251C.1.pep
HSRCWWWRARVLPVFDLRIVPCFMQKEQQVLHMFHPPPTSYTSPSALLSVSAAKRTRG

SEQ ID NO: 182989 - protein, 73 aa, Glycine max
  unsure (1)..(73): unsure at all Xaa locations
  Clone ID: PAT_MRT3847_136252C.1.pep
XXPPXXTLLXGGXCAPXPIEXXSKHTNSGDSPCRPFLXXSSSASSXHGLYXXFLIXHLKXIXGLXFQXFVINX

SEQ ID NO: 182990 - protein, 93 aa, Glycine max
  Clone ID: PAT_MRT3847_136253C.1.pep
CVVCFCEMSEKIKVDSFFNLCFVIMCQFCVFSFSNVCFDRLGFCGSLWSRVIYCCILYHLSSKKISFQGDYSFFVNCKNYRLSVFLQMNYYEL

SEQ ID NO: 182991 - protein, 58 aa, Glycine max
  Clone ID: PAT_MRT3847_136254C.1.pep
LVVSHKKLLSPIHPLRVIIQTTKNGPCVPRAPYRICTTYQSRIPTNVRILHVSKPWHQ

SEQ ID NO: 182992 - protein, 86 aa, Glycine max
  Clone ID: PAT_MRT3847_136255C.1.pep
RILFPSFPISDSETKILNNYYLEPQLHTQSLLIGNLPIAIALLHKLTKINLGLHSKNKTFKIVSKTPFLLPISQTQFQFQNSIKKP

SEQ ID NO: 182993 - protein, 95 aa, Glycine max
  unsure (1)..(95): unsure at all Xaa locations
  Clone ID: PAT_MRT3847_136256C.1.pep
XSXXSVQXXXXXXXXXYLGMXXXXLXXIPXPXPDSXYXMIXXAXXLXXIXXCRPFXRXXKLXXXECNXXXXYXQQYFXWHVGYXPXTRGXXXHXT

SEQ ID NO: 182994 - protein, 68 aa, Glycine max
  unsure (1)..(68): unsure at all Xaa locations
  Clone ID: PAT_MRT3847_136257C.1.pep
YWYLKIGVVSALVGASMELFMIKTGXLYDKVTVLESEKRAWENSPDAQAIREALNPWRQIDTEKTKKS

SEQ ID NO: 182995 - protein, 50 aa, Glycine max
  Clone ID: PAT_MRT3847_136258C.1.pep
QKLISVHSELSIILTVLHLQYTWIFQFGPERLPICPQSLPDINCSHSAPL

SEQ ID NO: 182996 - protein, 74 aa, Glycine max
  Clone ID: PAT_MRT3847_136259C.1.pep
ILKMKFLDWYLKIGVVSALVGASMELFMIKTGFYDKVTVLESEKRAWENSPDAQAIREALNPWRQIDTEKTKKS

SEQ ID NO: 182997 - protein, 89 aa, Glycine max
  Clone ID: PAT_MRT3847_13625C.1.pep
MGASASVTEKSIHEFMVKDAKGRDVNLSTYKGKVLLVVNVASKCGFTNSNYTQLTELYSKYKDRGMVFLGLQSSWCTCMLLDSKFVPFQ

SEQ ID NO: 182998 - protein, 54 aa, Glycine max
  Clone ID: PAT_MRT3847_136260C.1.pep
FDAWGRDRVMSILFPRSSSATKRKRVIRELVQGRDYATQSKFLLYKPIGPDCSV

SEQ ID NO: 182999 - protein, 110 aa, Glycine max
  Clone ID: PAT_MRT3847_136261C.1.pep
SFFSRITQIRMDEFLYCIKKHNFGTLGLFVPISPRSFRISLTGCFSAPLAVTLTNFARCFQILLFPRALWSYKGVWPQTHPFTPQFFLPPISKLGFPHKKPPLNPPFAPF

SEQ ID NO: 183000 - protein, 97 aa, Glycine max
  Clone ID: PAT_MRT3847_136262C.1.pep
VMSRQAPACASKEQGCRMVPKVFGPPLRGATLGFSPLSKVFLGRVRGLLDRPVGLGRLGYFLDQFPANVGGQAWKAVSSRVSPGTVQIVGGVLSFNV

SEQ ID NO: 183001 - protein, 124 aa, Glycine max
  Clone ID: PAT_MRT3847_136263C.1.pep
GPETPGRPTRPSRRTTERSKRGEGREAPTKKGEPDSHDNKANVPDRAHEASGKGASLQLMRATTPEPGTRGKPGKAAHPERRESTNTSLTSATDTEPTGTPERDESKGAPGALKTRNNHHSQNN

SEQ ID NO: 183002 - protein, 191 aa, Glycine max
  unsure (1)..(191): unsure at all Xaa locations
  Clone ID: PAT_MRT3847_136264C.1.pep
VEPPHPPKPPKKPPSPPKVEPPLPPKPPKNPPPLPPKPPKXTPPKEPPPTPPKKPCPPIFKKPLPPIPKLPPLPPVPIYKKPLPPLPPLPKLPPLHPVPIYKKPLPPLPPLPKFPPLHPVPIYKKPLPPLPPLPKFPPLHPVPIYKKPLPPLPPLPKLPPLKPLPPLPKLPPKHFFHHPKWFPVPPSSSHP

SEQ ID NO: 183003 - protein, 77 aa, Glycine max
  Clone ID: PAT_MRT3847_136265C.1.pep
TSVKLNSKFLSPYFQFLINSTNYTLILDLLNLDKLIKILETYNVNRCNSSRILVPAVVLSRNGLYGENQPRDLCCPQ

SEQ ID NO: 183004 - protein, 134 aa, Glycine max
  Clone ID: PAT_MRT3847_136266C.1.pep
LVAGGLPHGINCQQNLAKECEEEAGIPRSISVNAIPVGAVSSKAIDGYRYKRDVLFCYDLKLPKDFIPKNKDGEVDSFKLIPVTQVAEIIRKTQFFKANCALVIIDFLFRHGYITPEYDGYLDLLRSLRIGDCS

SEQ ID NO: 183005 - protein, 68 aa, Glycine max
  Clone ID: PAT_MRT3847_136267C.1.pep
FFFSLFYFNFVILAGGQSERPRVRGRLGSPGNFGPAPSGVQTLPIGGRVKARGYHGDTCLLSKIVYRE

SEQ ID NO: 183006 - protein, 157 aa, Glycine max
  unsure (1)..(157): unsure at all Xaa locations
  Clone ID: PAT_MRT3847_136268C.1.pep
SLFHNFGQNSFTGIQLLPIARDRLGKKSGYTFLVGENNLTGPFPTFLFEKCDELEALLLNVSYNRISGQIPSNFGGICRSLKFLDASGNELAGPIPLDLGNLVSLVSLNLSRNQLQGQIPTSLGQKKNLXFLSLVGNRLNGXNPTSLRQVYSLKVLD

SEQ ID NO: 183007 - protein, 59 aa, Glycine max
  Clone ID: PAT_MRT3847_136269C.1.pep
QPHCSKTLILRLPRRWLNLPSHGIQRHVPHGKLSQDRDLGQGRDQSRGRCLDKSHDPVL

SEQ ID NO: 183008 - protein, 63 aa, Glycine max
  Clone ID: PAT_MRT3847_13626C.1.pep
LSKGHRHGCRPLVKRGIEVLFPSPQPGPSEEVSVIHQLRNVERLIMKDHIISELPYGPSSCYP

SEQ ID NO: 183009 - protein, 220 aa, Glycine max
  Clone ID: PAT_MRT3847_136270C.1.pep
MARKKIREYDSKRLLKEHFKRLSGKELPIKSAQITASTDFTELQEKEPWLSSSKLVVKPDIVIWKMGRIWLMVAGGGASVIYADTVGDLGYAPELGNYAEYSGAPKEDEVLQYARVVIDCATSNPDGQKRALVIGGGIANFTDVAAMFSGIIRALKEKEQKLKEAKMHIYVRRGGPNYQKGLAQMRALGEEIGIPIEVYGPEATMTGICKEAIQFITAAA

SEQ ID NO: 183010 - protein, 61 aa, Glycine max
  Clone ID: PAT_MRT3847_136271C.1.pep
FAPVPSRSTQLAVQALQRHPVSYTKFAMLDGVISRHVSLPVRATNVVDHPNDNVPLSNFSS

SEQ ID NO: 183011 - protein, 66 aa, Glycine max
  Clone ID: PAT_MRT3847_136272C.1.pep
NRFGLLTVAIILQLSVLMEAHQRMQELVHRDVMIQLAAEVATDFPILLHSTIAFINMPFCRLLAAV

SEQ ID NO: 183012 - protein, 136 aa, Glycine max
  Clone ID: PAT_MRT3847_136273C.1.pep
QAGTECHGHLSASVIGISSMSGIMRHAQGHFSYNAAKGGTVHLTKLMSAEFQKLKIRVNSIAPGYFPSEMTAKESNDEQKSHVPDEKIQEKGHVPHGRAGHDEEMAQAVLFLTKNSYVNGEIIAVDGGVLNVVAGR

SEQ ID NO: 183013 - protein, 91 aa, Glycine max
  unsure (1)..(91): unsure at all Xaa locations
  Clone ID: PAT_MRT3847_136274C.1.pep
FLSFVAVAVGSXTXFHNFPLXLNGYSXLSWSLXLVATPDXNDEISDSGTXXNKXVXQXVYXVGXVHXGDCWXLVWWXXAXGXTVXXXSXAY

SEQ ID NO: 183014 - protein, 89 aa, Glycine max
  Clone ID: PAT_MRT3847_136275C.1.pep
IGGTKGQMLKVVDNSRFLILFRHHLFVRKFFEGIIIFFFSTEKKKMCRICGGCQLFNAHKVVQAKKSIMVYRKVPSFWVWVPTQLSIPC

SEQ ID NO: 183015 - protein, 64 aa, Glycine max
  Clone ID: PAT_MRT3847_136276C.1.pep
KKGINSCPPLNPSILFPNKLLFPANAFFLNYFLCYKSWLTGLSLQIKIAVILVNLFFFIIKLKR

SEQ ID NO: 183016 - protein, 42 aa, Glycine max
  Clone ID: PAT_MRT3847_136277C.1.pep
IIKHLVWNPKSSLWDLLQSTLSYQHRTYAQAVNKVIAKPLAS

SEQ ID NO: 183017 - protein, 174 aa, Glycine max
  unsure (1)..(174): unsure at all Xaa locations
  Clone ID: PAT_MRT3847_136278C.1.pep
MGKKKPTARDEENASQQGGGGKSKKKAVVIDDDEYSVGTELSEEQAPASEEKPAAAGKKKGKKGNAKAKNNDDDVDEDEDVSGIVFAGKKKGKNKKGGGSSAFTASGFDLLGDEEDDDEEKSGLTGEVDGEEEDEPVVSXTGKKKSSKKGGGSLFSASAFDDGEEEEDETVISF

SEQ ID NO: 183018 - protein, 296 aa, Glycine max
  Clone ID: PAT_MRT3847_136279C.1.pep
PPSATTPSSEPALSKDIPLNPTTNTSLRLFLPNPPPPSAAKLPLIIYFHGGGFILYHPSSLIFHRSCAALAASLPAIIASVDYRLCPQHRLPAAYHDALEALHWAQAQAQAQAQSDPWLRDYVDFSKTFLMGSSAGGNIAFFTALNSLSLSLSPLKILGVIMNIPYFSGVHRSDSELRLVDDRILPLPANDLMWSLSLPEGADRDHVYCNPTAVDNEHGDAIGRLPPCFINGYGGDPLVDKQKELVKILEARGVRVDARFVEDGFHAVGLFDQAKAFAVGQNIKNCIPSITSQSSM

SEQ ID NO: 183019 - protein, 87 aa, Glycine max
  Clone ID: PAT_MRT3847_13627C.1.pep
MSSRGESSGGGQSSLNYLFGSEEQPKPPPPKTVSYPLPPYGIDIDNNHNPPTGQGQHLGNVLTNRPSTKVQSVPGGHSSLGYLFGDK

SEQ ID NO: 183020 - protein, 44 aa, Glycine max
  unsure (1)..(44): unsure at all Xaa locations
  Clone ID: PAT_MRT3847_136280C.1.pep
LXXFRYXFXVWXYGLVSXXXYLLXXXQFNVXVIRIGIESPLXMK

SEQ ID NO: 183021 - protein, 75 aa, Glycine max
  Clone ID: PAT_MRT3847_136281C.1.pep
RKVNSQCPSLQPISLYLSPCLAPLLPSVNAIVKEAMRLHPVAPMLVPRLAREDCNLGGYDIPKRTQVLVNVWTIG

SEQ ID NO: 183022 - protein, 175 aa, Glycine max
  unsure (1)..(175): unsure at all Xaa locations
  Clone ID: PAT_MRT3847_136282C.1.pep
PRVRPPPPATAPTPTPPPPVLRPPPPSAVPASPPPPDSVPSPPPSPNGVPASPASPPSHQLLAPPPPASSTGTSSTSSSPSKSSSNATVVGIGVAVGAVVLIGLAVGLIYCFAGRKRRRRSPLPSQGFPGEFYDPXRGPMTPLHMSHVQSTTPSSTPXLMNSWQQSSHGLESPLP

SEQ ID NO: 183023 - protein, 88 aa, Glycine max
  Clone ID: PAT_MRT3847_136283C.1.pep
SASANLIIFLMQCSCAHVSKLVVLMLIGLNEIMHSGGAILLFRTVYIHGASSEDIAPLSSVELLFLIIVAPVDGTVGNTRKVQMDRCT

SEQ ID NO: 183024 - protein, 64 aa, Glycine max
  Clone ID: PAT_MRT3847_136284C.1.pep
NFNFFVAGLMDPKGPMSGCPLIMPPWMGPPRWELFKQKKGPPKGNFCLKGSLLWGVKGNLLNHP

SEQ ID NO: 183025 - protein, 157 aa, Glycine max
  Clone ID: PAT_MRT3847_136285C.1.pep
RARNSARGLFLQVHSHVDVFDFSSNKWVDQIKMPKEMAHSHLGIASDGRYIYIISGQYGIQCSGPTTASFSLDTATKKWKPLPPLPAPRYAPATQLWKGRLHVMGGSKENRHTPGIDHWSLAVKDGEALEQQWRDEVPIPRGGPHRACIAVNDRLFV

SEQ ID NO: 183026 - protein, 340 aa, Glycine max
  Clone ID: PAT_MRT3847_136286C.1.pep
MASDKKIRIGINGFGRIGRLVARVALQRNDVELVAVNDPFITTDYMTYMFKYDTVHGQWKHFDVKVKDSKTLLFGEKPVTVFGIRNPEEIPWGEVGADYVVESTGVFTDKDKAAAHLKGGAKKVVISAPSKDAPMFVVGVNEKEYKPELDIVSNASCTTNCLAPLAKVINDRFGIVEGLMTTVHAITATQKTVDGPSNKDWRGGRAASFNIIPSSTGAAKAVGKVLPALNGKLTGMSFRVPTVDVSVVDLTVRLEKPATYEQIKSAIKEESEGKLKGILGYTEDDVVSTDFVGDNRSSIFDAKAGISLNDNFVKLVSWYDNEWGYSSRVIDLIVHIASVA

SEQ ID NO: 183027 - protein, 340 aa, Glycine max
  Clone ID: PAT_MRT3847_136287C.1.pep
MASDKKIRIGINGFGRIGRLVARVALQRNDVELVAVNDPFITTDYMTYMFKYDTVHGQWKHFDVKLKDSKTLLFGEKPVTVFGFRNPEEIPWGEVGADYVVESTGVFTDKDKAAAHLKGGAKKVVISAPSKDAPMFVVGVNEKEYKPELDIVSNASCTTNCLAPLAKVINDRFGIVEGLMTTVHAITATQKTVDGPSNKDWRGGRAASFNIIPSSTGAAKAVGKVLPALNGKLTGMSFRVPTVDVSVVDLTVRLEKPATYEQIKAAIKEESEGKLKGILGYTEDDVVSTDFVGDNRSSIFDAKAGISLNENFVKLVSWYDNEWGYSSRVIDLIAHIASVA

SEQ ID NO: 183028 - protein, 69 aa, Glycine max
  unsure (1)..(69): unsure at all Xaa locations
  Clone ID: PAT_MRT3847_136288C.1.pep
LNFSTFKSHIFVKTLTGKTITLEVXESSDTIDNVKSKIHXDRNGIPPDQQRLINAGKQLEDGRTLADYN

SEQ ID NO: 183029 - protein, 57 aa, Glycine max
  Clone ID: PAT_MRT3847_136289C.1.pep
KYKNKPIHYEVLVSNISFINNTEIMYIIHCDSWYKLQIILNSLNQNENSRNKELICS

SEQ ID NO: 183030 - protein, 99 aa, Glycine max
  Clone ID: PAT_MRT3847_13628C.1.pep
KVSPLSEKHHEAQKGYRPKPTYQEKQSLSLPQFETKGRGTLHCFVHNLKPIKFFTSPAGSPKFKGIILDIKQRNPNGPKNKGVTSHTSKFVRWGGGTPC

SEQ ID NO: 183031 - protein, 133 aa, Glycine max
  Clone ID: PAT_MRT3847_136290C.1.pep
EQAFGLFKTDLTMAYDVGLDKSGSTHKNPPTSPVTPAPKMGTQWCIPKVEVTEAQLQANIDYICGSQVVDCGPIQPEGACYEPNTISSHAAFAMNLYYQKFGRNPWNCDFSQTAMLTSQNPSYNACVYPGGST

SEQ ID NO: 183032 - protein, 43 aa, Glycine max
  Clone ID: PAT_MRT3847_136291C.1.pep
LEENSSPDGSGDGNGIGGAQAISAVAEFLLLGYIDVLIWRMKR

SEQ ID NO: 183033 - protein, 68 aa, Glycine max
  Clone ID: PAT_MRT3847_136292C.1.pep
ISRSFQTVGLLTGLFKACMCFRLMLGSCVFVVAAVCLLCVYGFFRTLKPSCLDSFTIYSKINKKVLPF

SEQ ID NO: 183034 - protein, 535 aa, Glycine max
  unsure (1)..(535): unsure at all Xaa locations
  Clone ID: PAT_MRT3847_136293C.1.pep
HGTRLEGFSCGKKESIIAFLLHLMRKYSKLFRSEFSDDNDSQGSQPCSPTVQRSLEDGIPGGHCHAFDRQLSKLSSFNFKPNNRKSGQMLIQXKTXKCPISLQLIRDSCIIXLSEGMNNCPKTQQKLSHLCLTPNYRVKGLVSSWCEQNGVPIPEGPPESLDLNYWVKALLNLLILTTXRLALSDTESTNSRSVNSVSSCKLKGVKVVPVEESGISEQTGGNATESFSAQEEDNERYLSFLKVLTEGNNWKRKCRVVEQLRLLLRDDEEARIFMGTNGFVEALMQFLQSAVLEANVMALENGAMALFNLAVNNNRNKEIMIATGILSLLEEMISKTXSCLDEAKHVIGTSQAVQFLIQILQAKTEVQCKIDSLHALYNLSTVPSNIPNLLSSGIIXGREKMMLAPGLISALASTLDTGEPIEQEQAASCLLILCNRSEECCQMVLQEGVIPALVSISVNGTSRGREKAQKLLMVFREQRQQDHSPVKTDQRESESSDLSMPPPETKLLSKSISRRKVGKAFSFLWKSKSYSVYQC

SEQ ID NO: 183035 - protein, 409 aa, Glycine max
  unsure (1)..(409): unsure at all Xaa locations
  Clone ID: PAT_MRT3847_136294C.1.pep
KINYCFSLHLMRKYSKLFRSEFSDDNDSQGSQPCSPTVQRSLEDGIPGGHCHAFDRQLSKLSSFNFKPNNRKSGQMLLPPEELRCPISLQLMSDPVIIASGQTYERICIEKWFRDGHNTCPKTQQKLSHLCLTPNYCVKGLVASWCEQNGVPIPEGPPESLDFNYWRLALXVDTESTNSRSVNSVSSCKLKGVKVVPVEESGISEQTGGNATESFSAQEEDNERYLSFLKVLTEGNNWKRKCRVVEQLRLLLRDDEEARIFMGTNGFVEALMQFLQSAVLEANVMALENGAMALFNLAVNNNRNKEIMIATGILSLLEEMISKTSSYGCAVALYLNLSCLDEAKHVIGTSQAVQFLIQILQDKTEVQCKIDSLHALYNLSTVPSNIPNLLSSGIICSLQSLLVGQGDCM

SEQ ID NO: 183036 - protein, 88 aa, Glycine max
  unsure (1)..(88): unsure at all Xaa locations
  Clone ID: PAT_MRT3847_136295C.1.pep
MGLGTGPKLGFQKAQELFVEKLAQVGLVFALIGELIPEKGALXARLTFELGEPILKCDPLVLSKVLFLFIPAWNPGNGKLVTDEGKDV

SEQ ID NO: 183037 - protein, 109 aa, Glycine max
  unsure (1)..(109): unsure at all Xaa locations
  Clone ID: PAT_MRT3847_136296C.1.pep
XXXYVSSEFGSXSXXXSXXQRLAPKRTSXXXXAXXXXXRAXQYXXAACTRWFXPXVXXXXXANXXLGPFHXXXPXXXPPNTNKXEPQQAHDXPXQXXXGHLXRXQRVQV

SEQ ID NO: 183038 - protein, 121 aa, Glycine max
  Clone ID: PAT_MRT3847_136297C.1.pep
MADYDERYEGNGEEEELHNSLPHPHPQPDSSPHPTHDDLTDSKSHHGSRDYDRDSSRSRDKEREKGRDREKKREKGRDRERDRSTDRDSERSMDKDRDWEKSKDRERDRDRDRDGGEKERD

SEQ ID NO: 183039 - protein, 75 aa, Glycine max
  unsure (1)..(75): unsure at all Xaa locations
  Clone ID: PAT_MRT3847_136298C.1.pep
GSSQECVARTFRVVNPQNPFGLNTRLGKLTLPQGTYRSGKRVPISIRGGAXGAMKASFTSMPNAELEMWRDDGGN

SEQ ID NO: 183040 - protein, 99 aa, Glycine max
  Clone ID: PAT_MRT3847_136299C.1.pep
NVTSGGGRGGSPPPAGISSAVNNRPSDITKKIPPALGKGKQIVFLPRVDPFPVALRAVFLGVKNEILSSNPPNPMVTRLLETCKSLKNLVNKCPLAFVT

SEQ ID NO: 183041 - protein, 67 aa, Glycine max
  Clone ID: PAT_MRT3847_13629C.1.pep
KHMLTKQTPLTSTQIYTKFTNAQIPLWNLKREEGNLHTDKTSLTKLHYKEHTYNFRRSHYKNHKFSK

SEQ ID NO: 183042 - protein, 102 aa, Glycine max
  unsure (1)..(102): unsure at all Xaa locations
  Clone ID: PAT_MRT3847_1362C.1.pep
WGSLFLRPGFWFFFLLAGFFLGTFFRVNLFSTVGARQGLLFFGRCLVGLLFFRDVRVIAPFGSWAWVFSRLFPRRACHVFXTIGKKWEGCCEPAQKFLKKAA

SEQ ID NO: 183043 - protein, 92 aa, Glycine max
  Clone ID: PAT_MRT3847_136300C.1.pep
EVLIVIWSLEVIITKCVTKCDVIKEHIGNQFSELNDRTNIEIGSERRRVQIERKNVVCVLFLFSFSVFFLYPSLFHLFFLGAKQKIEFNIKR

SEQ ID NO: 183044 - protein, 276 aa, Glycine max
  Clone ID: PAT_MRT3847_136301C.1.pep
FGSSQYLMHPEIRSFPSREFYEDSLEDGDEVKSRTIHAWHDYRCFGPFCFFDIHEGKEARPPGSGSWINVEEVDFVLFLYQKLISLYPTLKSGNQVAIISPYSQQVKLFQKRFEDTFGMSAEKIVDICTVDGCQGREKDIAIFSCVRASKDKGIGFVEDIRRMNVGITTAKSAVLVVGSASTLRRSEQWNKLVESAEKRNCLFKVSQPYSSFFSDESLTSMQTKVAEPSQVTGPDDMVDNDVQPDNAAAFDAQAQTEDNDDGEGDIDMNDAGFDDD

SEQ ID NO: 183045 - protein, 70 aa, Glycine max
  Clone ID: PAT_MRT3847_136302C.1.pep
QKKKKMPQIFLNSSASYFTFWVSILLPHLKVKRQNVLTHTNTIVLLLISPSFTTSFVAVKKTYKIFNSWC

SEQ ID NO: 183046 - protein, 74 aa, Glycine max
  unsure (1)..(74): unsure at all Xaa locations
  Clone ID: PAT_MRT3847_136303C.1.pep
MVLLGELWDDVVAGPQPERGLGKLRXLTTLKTIDQGHISKLQKTLSMPSTPTIPMTPMSPTRPGCARKAVNVWR

SEQ ID NO: 183047 - protein, 102 aa, Glycine max
  Clone ID: PAT_MRT3847_136304C.1.pep
PLELHSIRNASASLDCLSLSTNTLYERDTLSADRNASYNALSVSAALEPIYQDITTVGYIILIIDSYDYVLLKNECRLHLLSTKLTYLLPYACIWRQCRRRN

SEQ ID NO: 183048 - protein, 73 aa, Glycine max
  Clone ID: PAT_MRT3847_136305C.1.pep
IKFWNLLGHPLVRPAMLKSSLKGSRLTESPNNMLFKDFRLIFIFCQTVVFSRYEIKHFWAFKMWGRFFLKKEM

SEQ ID NO: 183049 - protein, 41 aa, Glycine max
  Clone ID: PAT_MRT3847_136306C.1.pep
LYFILGGTEVLTTWGCPKHVFYGGGFFSLPLGEENILYYRT

SEQ ID NO: 183050 - protein, 874 aa, Glycine max
  Clone ID: PAT_MRT3847_136307C.1.pep
MTTSNPFPFAPQSFPNLIAEKLDDSNYLHWKQQIEPVIKSHKLQRFVVNPSIPQRYLTDEDRVANKVNPTFEAWEVQDQMLLTWLQSTLSKSVLSRVIGSIHSYQVWNKIHEYFHMQTKVRARQLSTDLRSTSLDGKMMHEFLSQIKNIVDELAGVDNLVPHEEHVNAILEGLPQDYAPMISVIESKFETPPVAEVKALLLTYESRANRFRKQSFSPSINYTRGYVLPNSNDTRTCNNSSGGYGCGSEGRGNNGGRRGDGLIQIIILINPSQSNNRTSNTWVNPNLKNSSQDINVTSATPSAMLANVSSTGVAHSAWIPDSGVSFHVTAKSPSSSADLSSSSRVVFNSSDVNKVSNVSLTPSSHTLWHTRLGHPNAHVLKLVLNHFLFNKSPDYKFLRTFGCACFPFLRPYSTYKLDFRSQECVFLGYSSSHKGYKCLSTSGKIYISKDVIFNEIRYPYCDLFKQSPTQATSFSQYFTLNPDLSPPCHNSPLTSPTPTHQLSISSPISVDVPSQQPSLSSNNSLHNNETSPTYVSQPESDSSSPRESLKHGEPVSRTTNAYPMQTKSKSGIYTPRIHHSLFLAHSEPKGVKQALADPNWLSAMQLEYAALLKNHTWDLVPLPSNRKTVGCKWVFQIKENVDGLIITLALTNNWELFQLDVNNAFLNGLLDETVYMVQPPGFEVQDKSLVCKLNKVLYGLKQAPRQWFDRLKITLIQFGFQASKCDPSLFIYKHQAHNIFLLIYVDDIILTGSSSSLIQQITTQLHSAFSLKQLGQLDYFLGIEIKYLPDRSLLMTQSKYIRDLLHRTHMAEAHSISSPMASSCKLSKTGGDLFQDPTLYRSIVGALQYDTLTRLEITFVVNKVCQFMENPLDTH

SEQ ID NO: 183051 - protein, 72 aa, Glycine max
  Clone ID: PAT_MRT3847_136308C.1.pep
KSYFEFHGPLGERMLDLVTQERRDQKVPFKAIVVDKVSVWFSSSFFVGPVQNVRHIRLEVMYPQYPLCRLLV

SEQ ID NO: 183052 - protein, 51 aa, Glycine max
  unsure (1)..(51): unsure at all Xaa locations
  Clone ID: PAT_MRT3847_136309C.1.pep
RAGAHPQTEFLKTIHMLAEAXFRGLLKYSPFTNCLKVVLFLGELVEFLEAS

SEQ ID NO: 183053 - protein, 98 aa, Glycine max
  unsure (1)..(98): unsure at all Xaa locations
  Clone ID: PAT_MRT3847_13630C.1.pep
GSLSWTQAIVHRLTNRKRHYYATKSNQLRVVKTPGGKXKHQTTKMRAXGPNCPVTGXRIQRICHLRPALYTRAKSARKPRTALQPYIGVLCGGADTQR

SEQ ID NO: 183054 - protein, 69 aa, Glycine max
  Clone ID: PAT_MRT3847_136310C.1.pep
QNGVVHFGSFDKDLWLKTDKQHGKWGIVRPTIRSILVSHGDKASQRPMEREHLPSHESSHFQIRTCLEP

SEQ ID NO: 183055 - protein, 103 aa, Glycine max
  unsure (1)..(103): unsure at all Xaa locations
  Clone ID: PAT_MRT3847_136311C.1.pep
LTISPPKSPPPASLSKQPPISPPSLSPPTSPPLLSPFDTPPLXPPISPPPPPPRDSPPLRPPTISPPKMTPISPPLPSPPISPTLPPTDSPLICQLTDSPSPS

SEQ ID NO: 183056 - protein, 70 aa, Glycine max
  Clone ID: PAT_MRT3847_136312C.1.pep
EKSERRRRKKRKTRPRCYRIAILIDFYIVLRLLFVCHPVSFCFKDLNAIYAPLRVLFLVLCIFISFFYHQ

SEQ ID NO: 183057 - protein, 101 aa, Glycine max
  Clone ID: PAT_MRT3847_136313C.1.pep
TKGAFFKPTPGSLSLLFVFSIHILYLVSVVALLVLLNNVFRFRYCYKHQQQVAYVFLVLCFSLSFSYYFLYIALPFISIFTFFFFNETFNFSNQTQIPFHL

SEQ ID NO: 183058 - protein, 384 aa, Glycine max
  Clone ID: PAT_MRT3847_136314C.1.pep
SHSPHLPNHNITKSNNKLSHSINGLSSCPSSPLLPSATKSSPFLISTSKIASFRVLAASSIPDARSDEPPETSDFLKTLQLGAMFATWYLLNIYYNIYNKQVLKVYPFPATITAFQFGFASLVINLVWTLNLHPRPSISGSQFAAILPLAVAHTMGNLLTNISLGKVAVSFTHTIKAMEPFFTVVLSALLLGEMPTFWVVSSLVPVVGGVALASMTEVSFNWIGFTTAMASNVTNQSRNVLSKKLMTNEEETLDNINLYSVITIISFLLLVPCAILVEGVKFSPSYLQSAASQGLNVRELCVRSVLAAFCFHAYQQVSYMILQMVSPVTHSVGNCVKRVVVIVSSVIFFQIPVSPIRLEGTGLALVGVFLYSRAKRIKSVQKTN

SEQ ID NO: 183059 - protein, 37 aa, Glycine max
  Clone ID: PAT_MRT3847_136315C.1.pep
TELMLDPWNNKRGMVELHHGDYFLTSQPHLDSYCIGT

SEQ ID NO: 183060 - protein, 146 aa, Glycine max
  Clone ID: PAT_MRT3847_136316C.1.pep
MAAGSSSNWVMESGDVPHVLAVDDNLIDRKLVEKLLRNSSCKVTTAENGPRALELLGLTSGGQNTMNGRSKVNMVITDYCMPGMTGYELLKKIKESSVTKEVPVVIMSSENIPTRINKCLEEGAQMFILKPLKQSDVKKLTCQLMN

SEQ ID NO: 183061 - protein, 95 aa, Glycine max
  Clone ID: PAT_MRT3847_136317C.1.pep
ISSSFLPYPPPLGAPHEHNLHVVSLWMERFNYAFLIQPIGLSFSLPFQWFNGRPLVGRWDALARLVQSFRVFPRLVLKKKQKQKNSINTCIFTFL

SEQ ID NO: 183062 - protein, 68 aa, Glycine max
  Clone ID: PAT_MRT3847_136318C.1.pep
CLALAKHQRSPSLGFLNPVVLLVGVGISSFLDYLMVSLVEGARSFWILRYSLDVLGLNTCFCSCYRLL

SEQ ID NO: 183063 - protein, 274 aa, Glycine max
  Clone ID: PAT_MRT3847_136319C.1.pep
CEKTTEGQNELKMKELLNQIDSKAETIEQMSQELEVKSKQLEDAQRQKDEKDASFSKQIQMLRSQIKMLMAEGALSETNLTKNTTETQKGERLMIPNDEEWILGTLLSEVETFKNQHNEIKQSLRKEQVEKENMKKQISQLEGELKKKEAELSAMEKKLKNNKGRAAIVSVVPPSAKAHIKKSKSEMHKGMDAANAAVSKFEGGTLGKSAGSEGHTNELLNEVAQLKERNKIMESELKDMEERYSEISLKFAEVEGERQQLVMALRNLKNGKKN

SEQ ID NO: 183064 - protein, 133 aa, Glycine max
  unsure (1)..(133): unsure at all Xaa locations
  Clone ID: PAT_MRT3847_13631C.1.pep
LEGAVALFPFAPPPVFPTSPSDSPVRAPXXFLPSPPLLDPPELLGPSPPFCATXGYPAPPITDCLLKRPTFHXXPRFPSAPPKEHSPPRELLCXAPPPLWKLSSERTTTSFXEPDRKSSTNGNAXNATPLPQI

SEQ ID NO: 183065 - protein, 252 aa, Glycine max
  unsure (1)..(252): unsure at all Xaa locations
  Clone ID: PAT_MRT3847_136320C.1.pep
MATNCTQWEKMLHLKEEEEGKEEEEEEIEALSLCDLPVNLIGHEDQSKAKPDSQINETQEEDFDFRLWSGPFSTEPEMCAADEVFFQGQILPLHLSLKRCESLDHVSVREFCSNSSSSSIRSQNSSSSSSSTTTTTTPIISETRIQNQNQNHFLTHPSPQRQLKVTVPRQTSFGNHGRKSSAWXFLRLGVVPAPEIALQDLKVRSTNGVNKNHTARSNSMGSNNSNANANGTVKTSYSGKTKNHVFKKIGGF

SEQ ID NO: 183066 - protein, 269 aa, Glycine max
  unsure (1)..(269): unsure at all Xaa locations
  Clone ID: PAT_MRT3847_136321C.1.pep
MAHHNNIRVSICFLFASSLLSLFAQISSGKEFVLTLNRSNFSDIVTYHNFVVVEFYAPWCGHCMKLAPEYEKAASILSSNDSPVILAKVDANEEKNRELARQFQVQGFPTIKILRNGGKVVQDYKGPREADDIVDYLKKQSGPATAEIKSADDASALIGKNKVVIVGVFPKFSGEEYENFNALAEKLRSEYDFGHTLDAKYLPRGESSVTGPVVRLFKPFDELXVDSHDFHMEALEKFVAESSVPVVTVFNNDPSNHPFCCQIFLNIQT

SEQ ID NO: 183067 - protein, 58 aa, Glycine max
  Clone ID: PAT_MRT3847_136322C.1.pep
FALKCKIIETVTFWLKLATEGPESTKSWWKGFKHVNTFFGDQPPYHLHLLKIYNTAIY

SEQ ID NO: 183068 - protein, 384 aa, Glycine max
  Clone ID: PAT_MRT3847_136323C.1.pep
VLLVQSSLSHGYALSQLPGGWLAKIFGGGSVLEVGVLIWSVATALVPFLAGYMPGLLLSRVLVGIGEGVSPSAATDLIARSIPLEERSRAVALVFGGLSVGSVMGLLLAPPLIQNLGWESVFYIFGLLGIAWFLGFQVLEGGETQLNAESLSAAQDIMTQSWKTSLRELNGSLKDVPWKAFFQNRAVWAMIYAHFCGSWGHYNCLSWLPTFFSEELNLNLTEAAWVSILPPLASIFVTSLAAQLADNLISRGVEATVVRKICQSIAFLSPAICMTLSSLDLGLPPWEIVGILTSGLALSSFALSGLYCTHQDMSPEYASILLGITNTVGAVPGIVGVALTGYLLDSTHSWSISLFAPSIFFYVTGTIVWLAFASSKPQSFSELN

SEQ ID NO: 183069 - protein, 311 aa, Glycine max
  Clone ID: PAT_MRT3847_136324C.1.pep
MVVLIEQSELTRPQAEENNDDLVLDGGFSLLKSPSHVGFTVPDINSYGHSFRNYYDESERNKSVEELYRQQHTNQTYEFAKKMREEYGKLNKVEVGIWECCEMLDKIVDASDPDLEESQIQHALQTAEAARNDYPNEDWLHLTALIHDLGKVLLLPSFGGLPQWAVVGDSFPLGCAFHEANTHFKYFKDNPDSNNPAYNTKKGIYDEGCGLDNVMMSWGHDEYMYLVTKGNNTTLPSEALFIIRYHSFHPLYQTGAYKHLYSEEDVKNLKWLEIFHKYDLYSKSNVLIDVEKVKPYYMSLIKKYFPPKLIW

SEQ ID NO: 183070 - protein, 149 aa, Glycine max
  Clone ID: PAT_MRT3847_136325C.1.pep
MDLPLLSKSLQFSLRNKNYLLLIALFGASGYAAYNSPYVAQKRRRIAKLLRAFVSLAELISNSADTVTVISNDLNRFLASESDEIPNSLKQLAKIAKSNEFSMSLARVSEAVTLGILLGYKSQPGNDKKDTKITAEASGFSDRVWGRFF

SEQ ID NO: 183071 - protein, 72 aa, Glycine max
  Clone ID: PAT_MRT3847_136326C.1.pep
ILQMKLQGDKSGRKGHLSVATEVFEVAPSVHMVELRKTGGDTLEFHKFYKIFSSGLQDIVWHDTEGKKNMKN

SEQ ID NO: 183072 - protein, 85 aa, Glycine max
  Clone ID: PAT_MRT3847_136327C.1.pep
KFLSLIIYFVARLLYVILTVLSFTPSFQDIYHSFVSNSQCLHLISFLSIVSTSYFFSATFYFLCLFSFLFTLYLVSFYFYSADFI

SEQ ID NO: 183073 - protein, 98 aa, Glycine max
  Clone ID: PAT_MRT3847_136328C.1.pep
VSSFFAIFLGGGITTGAGVASYPLVAARRRMMMTSAEDVENNNSLHAFLPIVANDGAASLLFGGGADILLAAAGAAVLAAYDNLLLVLFGKKYCSAGG

SEQ ID NO: 183074 - protein, 58 aa, Glycine max
  Clone ID: PAT_MRT3847_136329C.1.pep
PLKMPPNITELDVAHLMTPAVSFNSRAEPIQTPHLTMGYTRIYRSEPTLSSIKGPGPP

SEQ ID NO: 183075 - protein, 340 aa, Glycine max
  Clone ID: PAT_MRT3847_13632C.1.pep
MIFSRGNTAMSAILLLLGILSSTGVEFTGAQSVGVCYGGNGNNLPTKQAVVDLYKSNRIGKIRLYYPDEGVLQALRGSNIEVILGVPNDQLQSLTNAGAATNWVNKYVKAYSQNVKFKYIAVGNEIHPGDSLAGSVLPALENIQKAISAANLQGQMKVSTAIDTTLLGNSYPPKDGVFSSSASSYIRPIVNFLARNGAPLLANVYPYFAYVNNQQSIGLDYALFTKHGNNEVGYQNLFDALLDSLYAALEKVGAPNVKVVVSESGWPSEGGVGATVQNAGTYYRNLINHAKGGTPKRPSGPIETYLFAMFDENQKDGPEIERHFGLFRPDKSPKYQLSFN

SEQ ID NO: 183076 - protein, 375 aa, Glycine max
  unsure (1)..(375): unsure at all Xaa locations
  Clone ID: PAT_MRT3847_136330C.1.pep
MEPNALGGGIFPNISSGLLGVENPLQQQPNLQNQQNPHPLHHPQMVSYATNHDTDTHHQQQPPQQPIKHGYNFSAIKSNKSQSTLSDEDEPVFTAEDNCSGDPKRKVSPWHRMKWTDTMVKLLIMAVHSTGDEAGSECTDPTKKKASGLLQKKGKWKSVSKGMMEKGYYVSPQQCEDKFNDLNKRYKRVNDILGKGTACRVVENQTLLDTMDLSPKMKEEVRKLLNSKHLFFREMCAYHNSCGHNXQLWQYFQRATINRGSTTTSTSTAAVFALIRERGGESEXMLKEDEDEDDDSEEFSDEDEEESGEGGSRGMEEDENDVIRRRARNKGGXGVSSSQMMQQLSGEVSGVLQDGGKSAXEKKQWMKKRGVQLEE

SEQ ID NO: 183077 - protein, 101 aa, Glycine max
  unsure (1)..(101): unsure at all Xaa locations
  Clone ID: PAT_MRT3847_136331C.1.pep
FXXXFXGXPXFAPXKWXXXGAFPXXKVFXXXLTPXXXIXVXLAXPQPLPXLQEXPXXQXLPXXXIFXXXXXPXHTXXXXRRXTXXXNTPRAEFRAYVRVHA

SEQ ID NO: 183078 - protein, 67 aa, Glycine max
  Clone ID: PAT_MRT3847_136332C.1.pep
INHLGCAAVCPALMFWPHRHGLCLGYRLLLPFPSLVPPLGFPTLRRCPPSAPLLLNLGPLYSRVFDV

SEQ ID NO: 183079 - protein, 20 aa, Glycine max
  Clone ID: PAT_MRT3847_136333C.1.pep
CAEPDSRISETLYSSLSALI

SEQ ID NO: 183080 - protein, 46 aa, Glycine max
  unsure (1)..(46): unsure at all Xaa locations
  Clone ID: PAT_MRT3847_136334C.1.pep
FCLCLSFSFXAAXXSCLLXSXSSFXXLXSPCXSLCWVASRCFTPPF

SEQ ID NO: 183081 - protein, 63 aa, Glycine max
  Clone ID: PAT_MRT3847_136335C.1.pep
IRELSYIKGLRYMHNLVEPGCYVIKRNLNCAMSHAICDVPELPLIYLDNFQTTQMLMTERKLL

SEQ ID NO: 183082 - protein, 105 aa, Glycine max
  Clone ID: PAT_MRT3847_136336C.1.pep
LLWGTMLYELSIVEFKLGLPVWHESREDAAEKFELAGASATDIAVMLKNHCSNNTDGLGFKIDEIVQAWNEMYEAKKWQKGVSSFRLEPLFRRRISKVYHAFELV

SEQ ID NO: 183083 - protein, 71 aa, Glycine max
  Clone ID: PAT_MRT3847_136337C.1.pep
KMFSKETILILGLLTMVALISSNVTARNLAETSPMSTTGEVAKEKKVTDVKYEQNPSHGVCSTSNCFGWGI

SEQ ID NO: 183084 - protein, 98 aa, Glycine max
  Clone ID: PAT_MRT3847_136338C.1.pep
TADHLVEHLSAAVNMLHLCVVNSRCCECCKCCFLRRQASLFDRRSLVVVVVDWCIMVLHNTTTVIFGGAVLIGVHKLPAVFVEQIFLPPNNINSRPVE

SEQ ID NO: 183085 - protein, 90 aa, Glycine max
  unsure (1)..(90): unsure at all Xaa locations
  Clone ID: PAT_MRT3847_136339C.1.pep
XXXYDVXKDXDXPDXGXSXXAXILXXSAXNYSRQRRXPGRGXTRXDXNSXKPGEFXXHPRXEAFGHLKXSDVLXXGIKSXAQDVLPXXMQ

SEQ ID NO: 183086 - protein, 117 aa, Glycine max
  unsure (1)..(117): unsure at all Xaa locations
  Clone ID: PAT_MRT3847_13633C.1.pep
LSLACAMNSSFWGRATSDIHTIRSQDCELWTPACTKALTLPFNPNPCPDAWSWEFLQRTGSHCDIIXVTGWTATPMQDVQVXTTDWFTXSQECAPRTYRDIKPQNPMELNKWMETLT

SEQ ID NO: 183087 - protein, 100 aa, Glycine max
  Clone ID: PAT_MRT3847_136340C.1.pep
VCFFFLSQDHYTRSSLTRSSYMSRHTSNPNEDRLHIDVNVVERPMSEKPYDLLLMILGLSLTLVAIIIACVDNETNSISYADMHVKATAKCEYVHCHSVC

SEQ ID NO: 183088 - protein, 69 aa, Glycine max
  Clone ID: PAT_MRT3847_136341C.1.pep
ILNFDFFCVVGKKKNLITFFFVAPVVRTLWKKGYGGSLDREQAFFSRCIDIPFFLMGVIASERGEEDYS

SEQ ID NO: 183089 - protein, 67 aa, Glycine max
  Clone ID: PAT_MRT3847_136342C.1.pep
RSLSTLGIRMFFHNSVLSTGVGFSHAQFHIFRPEPHFFYHSHCSFLDGLILLLVEFVLIDYCDSSLT

SEQ ID NO: 183090 - protein, 86 aa, Glycine max
  unsure (1)..(86): unsure at all Xaa locations
  Clone ID: PAT_MRT3847_136343C.1.pep
MRALLLLGFLLVSLESTLSIPPXKQLKKXKYKAEKHTVVLTVTGEPCHFPFQYHRQLXHKXXHRXRSXPQPWCATTPNFDQDQRWG

SEQ ID NO: 183091 - protein, 69 aa, Glycine max
  Clone ID: PAT_MRT3847_136344C.1.pep
KRGYRIHSGMVQWGILVNGIAPVFSLYTSHGPRSMFLNPRVTHYLHYFGIWECFGARTWKVSFTSSKLC

SEQ ID NO: 183092 - protein, 55 aa, Glycine max
  Clone ID: PAT_MRT3847_136345C.1.pep
IHRIFNSGYRGGLPQQSKSIHNLNTLKSHQRFVFFFFCVKNRRQNHKEKERERPP

SEQ ID NO: 183093 - protein, 292 aa, Glycine max
  Clone ID: PAT_MRT3847_136346C.1.pep
PPVKLHQGCLGHALSKIERPFVCAVDDCQASYRRKDHLTRHLLQHEGKIFKCPVENCNSEFSLQSNMKRHTEEIHDDSSTTTSSDKSHKQHMCPEIGCGKVFRYASQLQKHEDSHVNLESVDMVCLEPGCLKHFTNVQCLQAHVKSSHQYMTCDICGTKQLKKNIKRHLRSHEAEGSSSETFQCEFKGCSCTFSRKSNLDKHKKAVHFNVKPFACGFTDCGMRFAYKHVRDNHEKTAKHVFTLGDFEEADEEFRSRPRGGRKRTCPTVEMLIRKRVTPPSQLEHWLFMQDSE

SEQ ID NO: 183094 - protein, 184 aa, Glycine max
  Clone ID: PAT_MRT3847_136347C.1.pep
EYCGICRSKKTLITSHINLHHKEEYEKARAERDPEAEASKSNSCEECGATFKKHAYLLQHMQSHSLERPFVCAVDDCQASYRRKDHLTRHLLQHEGKIFKCPVENCNSEFSLQSNMKRHTEEIHDDSSTTTSSDKSHKQHMCPEIGCGKVFRYASQLQKHEDSHVNLESVDMVCLEPGCLKHFT

SEQ ID NO: 183095 - protein, 123 aa, Glycine max
  Clone ID: PAT_MRT3847_136348C.1.pep
MMTVLPLPVVTKQKLSFNLFMVLCQQKSNLDKHKKAVHLNVKPFACGFPDCGMRFAYKHVRDNHEKTAKHVFTLGDFEEADEEFRSRPRGGRKRTCPTVEVLIRKRVTPPSQLEHWLFMQDSE

SEQ ID NO: 183096 - protein, 156 aa, Glycine max
  unsure (1)..(156): unsure at all Xaa locations
  Clone ID: PAT_MRT3847_136349C.1.pep
PALIVSSFPNDFGMEIANVVYVAPDEILYPVPRSLYTLDPLQRAYMSKSQCNKMTTVQSEDSVVTVQVDSKASKVTCMMKGGTGLFGLDKRGSDWMMDVDVAVSDEQPRQVFVCSPFLPGTLMKTXINLNDYLPNKPYRGTVKLNVFHGTIAXWAS

SEQ ID NO: 183097 - protein, 41 aa, Glycine max
  Clone ID: PAT_MRT3847_13634C.1.pep
ENRHTRCIVGKNLQERYQKRHYSLKSHTTVILRKEYMIVLL

SEQ ID NO: 183098 - protein, 105 aa, Glycine max
  Clone ID: PAT_MRT3847_136350C.1.pep
KKPPLYTFFPKLKKGGEFLKKASLPNKRGMPKFPFWIKQTNHPKKTPIPKPSEDSPFLKKLGKTLGKKKTGLKIFPPISKILENPQKKSKTWNRLGISKKETKSP

SEQ ID NO: 183099 - protein, 41 aa, Glycine max
  Clone ID: PAT_MRT3847_136351C.1.pep
IWEKFYFKCAGGLSLLGFLILMSIFWFMCFKIPPYVNMIII

SEQ ID NO: 183100 - protein, 210 aa, Glycine max
  unsure (1)..(210): unsure at all Xaa locations
  Clone ID: PAT_MRT3847_136352C.1.pep
CCSNPFVTLHLFSHNSSSKFKCVSSKVPVFAQKPRESSYYIERGLEFCAGDAFFRQESATGRDLGVLAASLHKKENGRLRVLDALCGCGIRSLRYLAEAEADFVAANDGNEDYGSTIVENLMRVSAEEEGRWVVTHLEANRVMMDYYLQKSFFDXIDVDSFGSDSSFLRSAICTLKLGGLLYVTSTDGFSSGGHRPHHSLAAYGAYVRPM

SEQ ID NO: 183101 - protein, 132 aa, Glycine max
  Clone ID: PAT_MRT3847_136353C.1.pep
LLSLNVKANYYGVVILIYISEYAYTLKVDEKSDVYSFGVVLLELLTGRRPVGNFGEEGLDIVQWTKLQTNWSNDKVVKILDERLCHIPVDEAKHVVFSPMLCVQEQSVERPTMREVVEMLAQAKKPNTFQKQ

SEQ ID NO: 183102 - protein, 83 aa, Glycine max
  Clone ID: PAT_MRT3847_136354C.1.pep
QIIIIIIIIIIIIIISVSHIIREILIDIINCLARIQDKKNSKLFSKQYICKAFTSIPAFHLVKLTLCLCILSLLTFVFLFSLS

SEQ ID NO: 183103 - protein, 104 aa, Glycine max
  Clone ID: PAT_MRT3847_136355C.1.pep
TDASVWLSRDPELRGVGLSIDGVNLIIRHGYNNLSIGSGGGLDHVVYVACNFCMNASQIQVANPRKWVVVIMEQDKQLFMHIADVGLFQTVQEKSGHSLCLSYC

SEQ ID NO: 183104 - protein, 171 aa, Glycine max
  unsure (1)..(171): unsure at all Xaa locations
  Clone ID: PAT_MRT3847_136356C.1.pep
ARGAYYWAHDEKLLISDFISNGNLTHALRGRHGQPSTNLSWSTRLRITKGTARGLAYLHECSPRKFVHGDIKPSNILLDNDFQPYISDFGLNRLISITGNNPSTGGFMGGALPYMNSSQKERTNSYKAPEARVPGCRPTQKWDVYSFXVVLLEILTGRSPESSPTTSTSME

SEQ ID NO: 183105 - protein, 149 aa, Glycine max
  unsure (1)..(149): unsure at all Xaa locations
  Clone ID: PAT_MRT3847_136357C.1.pep
TSWITRKFTWIELKLSWVYTKSNSILKKVSDVVAGDARSTEDWLLHAQELVPVVIDKAREVKGFAGRWKMIVAQLEQIPLRLSDLSSHPCFSKNALCKEQLQAVSKTLGEAIELAELCLKEKYEGXPRMQSDLDSLSGSLVWTLTVGGL

SEQ ID NO: 183106 - protein, 64 aa, Glycine max
  unsure (1)..(64): unsure at all Xaa locations
  Clone ID: PAT_MRT3847_136358C.1.pep
MAXXVSTVGXVNXXXLNLNXSXXGASXPSSXXFGTXLKKVIASRVXNXKVSGGSFKIVAVEEKK

SEQ ID NO: 183107 - protein, 33 aa, Glycine max
  Clone ID: PAT_MRT3847_136359C.1.pep
TLFHTMLPNWRPPYAMAQSMKSIHWVCLYRGFT

SEQ ID NO: 183108 - protein, 102 aa, Glycine max
  unsure (1)..(102): unsure at all Xaa locations
  Clone ID: PAT_MRT3847_13635C.1.pep
RHAYVSSEFGSSXNPGXXAPTSMXXXVVLVXTIXIXLCHVXXXHIKYXXXHNYKIEHTETDAVSSRSNGRPXTAGAVXKSAKYIAQXLQDXEGDGDGVXAXX

SEQ ID NO: 183109 - protein, 51 aa, Glycine max
  unsure (1)..(51): unsure at all Xaa locations
  Clone ID: PAT_MRT3847_136360C.1.pep
LISGAKLXXLCVCVRKREXVRXKKRNQDSSLHFLSESEDPKSRVFXSSLGI

SEQ ID NO: 183110 - protein, 129 aa, Glycine max
  Clone ID: PAT_MRT3847_136361C.1.pep
MEGDLQRALSLRLHRRGDRSNQSPAKDFEVGFFSSGRVPQDYPMKIVWKKGFVRLVLVAGILWMLLILLALLFHIWSCQTSVSFLSAMCNKDSKVFNMLDNMGLVSKPHRCPIPLSNDPDKIVIPTGRT

SEQ ID NO: 183111 - protein, 82 aa, Glycine max
  unsure (1)..(82): unsure at all Xaa locations
  Clone ID: PAT_MRT3847_136362C.1.pep
HVLSNALQEMLLARCGVRTDYXSFPDAHKXKEYLNDHKXFLFSFAPAPAATSGAPATAAKEDENNEEPAEESDYDMGFSLFD

SEQ ID NO: 183112 - protein, 39 aa, Glycine max
  unsure (1)..(39): unsure at all Xaa locations
  Clone ID: PAT_MRT3847_136363C.1.pep
VSSTRLAAXCASSTGEEGGXVEVTXPFFVDSXXFPXLGT

SEQ ID NO: 183113 - protein, 93 aa, Glycine max
  Clone ID: PAT_MRT3847_136364C.1.pep
EIVDFNDRAGATQKMQRKLQKVCLKTGSPIESHAATVLTPDALSKLQEELVLAPQYASFLVDEGRFQVRHHSQSDGGCKVFWVACQEHISCSC

SEQ ID NO: 183114 - protein, 84 aa, Glycine max
  Clone ID: PAT_MRT3847_136365C.1.pep
KTAFVETSFEMKLLNHNSNIGIHLLNQVLIKLYTQLIRFPHFSSPLRGCLVQGIFFMPGNLCFPTLDSQETKTFSCDKHPLNGW

SEQ ID NO: 183115 - protein, 111 aa, Glycine max
  Clone ID: PAT_MRT3847_136366C.1.pep
LLHYNFLFFAFTNETSLNLSGKNPKSWALGVGPLTLPPSKCTGPAKLFDLDCPRRQNVEDSNTNAEPHFGPWIDFATPPGVPKSTLLYALDGADKKIFFFFPAPTQKRCCF

SEQ ID NO: 183116 - protein, 35 aa, Glycine max
  Clone ID: PAT_MRT3847_136367C.1.pep
RDGNNMRVLPCHHEFHRTCIDKWLKEIHRYVKIGI

SEQ ID NO: 183117 - protein, 118 aa, Glycine max
  Clone ID: PAT_MRT3847_136368C.1.pep
APPAFPFILSGHYFLWKFERITIFPREPLFPFFPPPFIRPPIRKTCSPSGTRPEFPGGPPGPLNFLGTPGPLTQPLGVFFPGGLFKKRFFPPSLLKSQKFFKRVLKSPRPKKNRPPKV

SEQ ID NO: 183118 - protein, 36 aa, Glycine max
  Clone ID: PAT_MRT3847_136369C.1.pep
CDHQKFDLFQLKNYLIYSHSRRHRNQHRHQIHLGPC

SEQ ID NO: 183119 - protein, 35 aa, Glycine max
  Clone ID: PAT_MRT3847_13636C.1.pep
LRIPNLAGFFKTHIENALESIGDIYLMTLEGKASI

SEQ ID NO: 183120 - protein, 73 aa, Glycine max
  Clone ID: PAT_MRT3847_136370C.1.pep
MRGAGVEGIKDKAFEKLWKLKVPIKYEVFAWRLLRDRLPTKVNLHRRQIQVMDRSCPFCRNVEEDAGHLFFHC

SEQ ID NO: 183121 - protein, 63 aa, Glycine max
  Clone ID: PAT_MRT3847_136371C.1.pep
TKTNRSITNIMYKKRKSLSSYLLIPIDRLSSSNTRSTTALFLRFILLSTNIFLNLYYYICVFI

SEQ ID NO: 183122 - protein, 76 aa, Glycine max
  Clone ID: PAT_MRT3847_136372C.1.pep
FLLTDQYYCYCFYIGFFLQSRIFFYLKLQKYICEFQCIKWEAKIYCLRNNSNPEACSTFNPNIQITACMGFAIMLF

SEQ ID NO: 183123 - protein, 331 aa, Glycine max
  Clone ID: PAT_MRT3847_136373C.1.pep
YYYAHLIIGFSKLTEVLRDSFVRNSKTVMISCISPNAGSCEHTLNTLRYADRVKSLSKSGNPRKDQATNPVPPAIKEVSSTSSLPASVGADDFNGQCQEVKTMDMGRKVVEKESSLYSSAADVDKQSSFSSSYPFNGREEKSSTSAPMDRERFEVKNSYGGDSTSQKMNSYSLNVTDEKVQRVSPPRRKGTKEEKSERSVNWVKRDANGSDHSTASSKQQSTGNYSITTGSGQSETESSSDVNISAILEEEEALIAAHRKEIEDTMEIVREEMKLLAEVDQPGSLIDNYVTQLSFVLSRKAASLVSLQARLARFQHRLKEQEILSRKRVPR

SEQ ID NO: 183124 - protein, 64 aa, Glycine max
  unsure (1)..(64): unsure at all Xaa locations
  Clone ID: PAT_MRT3847_136374C.1.pep
RPPPXISLFFLFFFQTNTETYKVYTICTTGLTLSIVLQTINCNMSHITYTNSKESKNDLPFNVF

SEQ ID NO: 183125 - protein, 127 aa, Glycine max
  Clone ID: PAT_MRT3847_136375C.1.pep
PRAESARDDGNRPTCECLRGYLPKSPDQWNMSISPNGCVPRNKSNCQNSYTDGFFKYAHTKMPDTSSSWFNTTMNLDECRKSCLKNCSCTAYANLDIRGGGSGCLLWFNNTVDMRYFPKFGQDIYIR

SEQ ID NO: 183126 - protein, 81 aa, Glycine max
  Clone ID: PAT_MRT3847_136376C.1.pep
AAGALWHPSVMLATQFLPLSMQGSPAILALFFRSHLICGSLPPLVTFFMVIGSHLSAHSFSLGLLLLVVYSRNRSRGRSLV

SEQ ID NO: 183127 - protein, 174 aa, Glycine max
  Clone ID: PAT_MRT3847_136377C.1.pep
MFSALKLKPASVGSRLFCVGSLQTQINKTIWHQLKSPTHQTLHHLLDQCSSMKRLKLVHAQIILHGLAAQVVTLGKLLSLCVQEGDLRYAHLLFDQIPQPNKFMYNHLIRGYSNSNDPMKSLLLFRQMVSAGPMPNQFTFPFVLKALCCQTLSIGESCYLFNAQAIKLGMGASC

SEQ ID NO: 183128 - protein, 37 aa, Glycine max
  Clone ID: PAT_MRT3847_136378C.1.pep
RTSRSTSVVSVTTDSLAPLASHRNLKLVCTFLLLSSV

SEQ ID NO: 183129 - protein, 195 aa, Glycine max
  unsure (1)..(195): unsure at all Xaa locations
  Clone ID: PAT_MRT3847_136379C.1.pep
LEVHQDTLTYMFDFELYDFVADPNFDQFINLFRGENEDANCDHFGSDLINDCFANNQQQLLSCPANPFDQNNNNNAVNVYDPSSTFSSFSYYDRELKGEGGEELDEEHSSGTMTTTTNNAVGKPKVKTDMSKTLISERRRRGRMKEKLYALRSLVPNITKMDKASIIGDAASYVHDLQARAXKLEAEVAGLEASL

SEQ ID NO: 183130 - protein, 100 aa, Glycine max
  Clone ID: PAT_MRT3847_13637C.1.pep
ARAGSARSFPLVFFPSLSLCLLLVVEPKEQDIASSSLLFSNFNFSSGSLKRFLFSWVSTQKNLLLRRKRRCTFLASKTLAPQMVVFASGLSPTKHLPFHI

SEQ ID NO: 183131 - protein, 165 aa, Glycine max
  Clone ID: PAT_MRT3847_136380C.1.pep
RGINYYKEGDYLYPKFDAVEAYRKAIKTWGKWIDDNINPRKQIVYYRGYSNAHFRGGDWDSGGSCYGETEPAFNGSILNNYPLKMKVVEEVIRGMKVPVKLLNVTKLTNFRKDGHPSVFGKNTMGGKKVSTRKQDCSHWCLPGVPDAWNELIYATLVFQQTNSWK

SEQ ID NO: 183132 - protein, 127 aa, Glycine max
  Clone ID: PAT_MRT3847_136381C.1.pep
ATQMTRKAAFRLFLLIHGNTHTSTSTISYSHSSYTYRGRRIMMMEQLQTPTTTHINTEFRNLLLLSGARFSTKTSTALDPPLTLAPLGSPCRGPLPGFFYSAPASPMHSPLLPHYLTRTPFLPHLWA

SEQ ID NO: 183133 - protein, 67 aa, Glycine max
  Clone ID: PAT_MRT3847_136382C.1.pep
ISRSFQTAGWVPGPFKACMFFQVRLGSCVFLEAAVGLTCVYGVIRTLNPGSLIPFPIFCEFSISVLP

SEQ ID NO: 183134 - protein, 53 aa, Glycine max
  Clone ID: PAT_MRT3847_136383C.1.pep
RPTAVARRMTGAKPPTADMRRAGSFHHPEGDRSGGGHAACDGPIGGSGISKYP

SEQ ID NO: 183135 - protein, 74 aa, Glycine max
  Clone ID: PAT_MRT3847_136384C.1.pep
YTHRSVTVKRLVITNTQRKKKLDLGRHSPGVRILKGAIFISLVSLLIGESRNIYIGGICMRIVHGSCRLRPSNM

SEQ ID NO: 183136 - protein, 60 aa, Glycine max
  unsure (1)..(60): unsure at all Xaa locations
  Clone ID: PAT_MRT3847_136385C.1.pep
MDGHMGMRKISSHCSIPDLDDSDILRLLEKPKLNIERQRSXDERSLSELFIGLARAGLDN

SEQ ID NO: 183137 - protein, 146 aa, Glycine max
  unsure (1)..(146): unsure at all Xaa locations
  Clone ID: PAT_MRT3847_136386C.1.pep
MLQARAACRKDSARRTVNRGGIEPELFCCDDSPFLLSTASPLTLPTDTSSTSSSSTFSKTCVLSESDSSSSNCVSPSSNAXVSPARFSASVSKTPSSSSKASPSSNAXVSPARFTASVSKTPSSPKGTVSSKNPQTSSSSPSASNG

SEQ ID NO: 183138 - protein, 555 aa, Glycine max
  Clone ID: PAT_MRT3847_136387C.1.pep
MDGHMGMRKISSHCSIPDLDDSDILRLLEKPKLNIERQRSFDERSLSELSIGLARAGLDNYDTYSPGGRSGFNTPASSTRNSFEPHPMVADAWESLRKSLVYFRGQPVGTIAAVDHQSEEVLNYDQVFVRDFVPSALAFLMNGEPEIVRNFLLKTLHLQGWEKRVDRFKLGEGVMPASFKVLHDPIRKTDTLIADFGESAIGRVAPVDSGFWWIILLRAYTKSTGDLSLAESPDCQKGMKLILTLCLSEGFDTFPTLLCADGCCMVDRRMGIYGYPIEIQALFFMALRCALSMLKQDDAEGKECVERIVKRLHALSYHMRSYFWLDFQQLNDIYRYKTEEYSHTAVNKFNVIPDSIPDWVFDFMPMRGGYFIGNVSPARMDFRWFALGNCVAILSSLATPEQSMAIMDLIESRWDELVGEMPLKISYPAIESHEWRIVTGCDPKNTRWSYHNGGSWPVLLWLVTAACIKTGRPQIARRAIELAESRLLKDGWPEYYDGKLGRYIGKQARKYQTWSIAGYLVAKMMLEDPSHLGMISLEEDKQMKPVIKRSSSWTC

SEQ ID NO: 183139 - protein, 51 aa, Glycine max
  Clone ID: PAT_MRT3847_136388C.1.pep
IFSSHKNIPIIHSNKRCHWGNNYTVRSAKLKSFFKIKPSETLSMLVMGGLI

SEQ ID NO: 183140 - protein, 114 aa, Glycine max
  unsure (1)..(114): unsure at all Xaa locations
  Clone ID: PAT_MRT3847_136389C.1.pep
MDGHMGMRKISSHCSIPDLDDSDILRLLEKPKLNIERQRSFDERSLSELSIGLARAGLDNYDTYSPGGRSGFNTPASSTRNSFEPHPMVADAWESLRKSLVYFRGQPVGTIAAX

SEQ ID NO: 183141 - protein, 82 aa, Glycine max
  Clone ID: PAT_MRT3847_13638C.1.pep
ALEHSYQVLSVILLYLKGTHCLLGGFINKITVLTYYLEPRSENRQKKRNILFLDCRRTEQRRYIFLQGLIPSQQRVSSFTQI

SEQ ID NO: 183142 - protein, 83 aa, Glycine max
  Clone ID: PAT_MRT3847_136390C.1.pep
ILQLEKQLDAKQNLEMEIEKLKGKLQVMNHLEYKDNAAVHNKIKEINDKLQEKVDNLENIEAINQTLIIKEHQINDELQESHK

SEQ ID NO: 183143 - protein, 82 aa, Glycine max
  Clone ID: PAT_MRT3847_136391C.1.pep
GMAIFGPRFKCALYRGRWLACRARSGNKSRGERILVRWRPFFTRIRGRGVPCGVGLIKACRSFSNVGSRHKVSYEKANTFLF

SEQ ID NO: 183144 - protein, 62 aa, Glycine max
  unsure (1)..(62): unsure at all Xaa locations
  Clone ID: PAT_MRT3847_136392C.1.pep
RQGHATDCSGRQSXTLEGKRVRPKRRSKRRPRQKIEPRGLVQQGMMDTIKDGIVLRTVFIHM

SEQ ID NO: 183145 - protein, 117 aa, Glycine max
  unsure (1)..(117): unsure at all Xaa locations
  Clone ID: PAT_MRT3847_136393C.1.pep
MDYEPYYSSGTDDDLPPTHPNRIPRGERLAGNGRLPAGSIPYPRMHGEIDMETQIHQLEKEAYSSILRAFKAQADAISWEKESLITELRXELRLSNEEHRELLRHVNADDVIQNIRE

SEQ ID NO: 183146 - protein, 87 aa, Glycine max
  Clone ID: PAT_MRT3847_136394C.1.pep
PLIRHSLHRVLALFSWSAICFPSRFNVHCELGIGHLSYVFFVIGAGCFQHPSPRVVDQAYVFLGYLGPIYLRATKFFFRFRCLAWRI

SEQ ID NO: 183147 - protein, 73 aa, Glycine max
  Clone ID: PAT_MRT3847_136395C.1.pep
EQINNTPHYLHSICHGNKLAIPHIISSINNARERSMLLTIKSLGRLTKVGPTRKIKLISHEDMNLNLNVNVRT

SEQ ID NO: 183148 - protein, 39 aa, Glycine max
  Clone ID: PAT_MRT3847_136396C.1.pep
FNPTLISWGPMTITSASKQSLFNHHLFSLPLFFSFYPFN

SEQ ID NO: 183149 - protein, 62 aa, Glycine max
  Clone ID: PAT_MRT3847_136397C.1.pep
VLGKNLFESGCSRGFEQIKKDLYGDNDLELITYHRMGASLFYPEHFPLIIAFVRSIKQPEMH

SEQ ID NO: 183150 - protein, 69 aa, Glycine max
  Clone ID: PAT_MRT3847_136398C.1.pep
SFSRTMTPSLCGSYLNPSTKPPPTHALFCSRCTRQDAASAIIYTQCVNGTYRYGYRRHHAPMLPRYQQC

SEQ ID NO: 183151 - protein, 70 aa, Glycine max
  Clone ID: PAT_MRT3847_136399C.1.pep
KKCLKNYILSISLTFSFELQFVIMVIFSLICLMILPDEIKCLFLFQQKFNFLRSQQKKRWKIITVFRFLN

SEQ ID NO: 183152 - protein, 50 aa, Glycine max
  Clone ID: PAT_MRT3847_13639C.1.pep
VFFTCQGTSYFLEKCLSISGWCYYQVFFHLIKRLLCESEASKSNSISFGQ

SEQ ID NO: 183153 - protein, 82 aa, Glycine max
  Clone ID: PAT_MRT3847_1363C.1.pep
PQFWLQACQLSKGSCLPGHIFCGPFHPVWGIPAQKGNRPVKHPLSAALSGVKNFVSQRKGNLFCRAGLAVHHTTKHPQNKSL

SEQ ID NO: 183154 - protein, 63 aa, Glycine max
  Clone ID: PAT_MRT3847_136400C.1.pep
IMPSNLRSASDRIQDYIYILPLPELSLSFKSDSITGLSSMLCSVLHILEPLLLPPPIYITAIK

SEQ ID NO: 183155 - protein, 67 aa, Glycine max
  Clone ID: PAT_MRT3847_136401C.1.pep
MKGGKTKTLSIKAGAKLAANNTGASTKTRKPVRKAKANYDSNKANRPPRASLVTMAEARKVPNMEHG

SEQ ID NO: 183156 - protein, 68 aa, Glycine max
  unsure (1)..(68): unsure at all Xaa locations
  Clone ID: PAT_MRT3847_136402C.1.pep
FTSLAFCSKPSSIIFIYATLLASKTGTINHXSINQMQIKEALHSSYIENNHNYLDTEKKINLNIQFNI

SEQ ID NO: 183157 - protein, 45 aa, Glycine max
  Clone ID: PAT_MRT3847_136403C.1.pep
CICFSGSGYRGPHCQGVGGLFAGHPICGVFKKGTQRRLMYLRGLT

SEQ ID NO: 183158 - protein, 91 aa, Glycine max
  Clone ID: PAT_MRT3847_136404C.1.pep
AGVAIVIISSLGYNYKIMESVYDENEIVTNEEFIGVRQVCIKVLIEGKVNSKALIRYIIGCIIDMSYKQCRNDGADYKIQTQFHRDYLGLG

SEQ ID NO: 183159 - protein, 90 aa, Glycine max
  Clone ID: PAT_MRT3847_136405C.1.pep
GFVVVEVIGKVYKDIKELIWVYFLLSLVPYSFHRKELVILFLHTFLPLIFPHSSYSISLSFLFSFLVVIKDCINLIYVQTKTKNIRYKMN

SEQ ID NO: 183160 - protein, 141 aa, Glycine max
  Clone ID: PAT_MRT3847_136406C.1.pep
MAYTAVAMPTSPAATSATMDIAKEHNGLRRSQSSKELCTRSIMRRSYSDNHLCCSINRIQATSVPPKLKSNRSMGISPFQFSGSMLPNSLRSFLFDPETSKDVSVEEKVVSIEENMVESSKEEIANRANWVERLMGIKKHW

SEQ ID NO: 183161 - protein, 62 aa, Glycine max
  unsure (1)..(62): unsure at all Xaa locations
  Clone ID: PAT_MRT3847_136407C.1.pep
IRTXXIFXXGLPPTLTXXXFRLYFEXYGXVTXVVVMYDXNTGRXRGFGXISFDTEXAVXRVT

SEQ ID NO: 183162 - protein, 57 aa, Glycine max
  Clone ID: PAT_MRT3847_136408C.1.pep
KPSFLLLGLLYARITRYQALTQELSIRSIHHPVSRPKNPRSRRSIAKLRATHSPTIK

SEQ ID NO: 183163 - protein, 387 aa, Glycine max
  Clone ID: PAT_MRT3847_136409C.1.pep
FKMLLKPFYTIITEPYHIWPSLSDDQWMKVEVALRDLILSDYAKKNNVNTSALTQSEIRDIILGAEITPPSQQRQQIAEIEKQAHEANQVTAVTTKTTNVHGEELIVTTTSPYEQAAFGSKTDWRVRAISATNLYLRVNHIYVNSEDIKETGYTYIMPKNILKKFICIADLRTQISGYMYGVSPPDNPQVKEIRCIVMPPQWGTHQQVHLPSALPEHDFLNDLEPLGWMHTQPNELPQLSPQDLTSHAKILENNKQWDGEKCIILTCSFTPGSCSLTAYKLTPSGYEWGRVNKDTGSNPHGYLPTHYEKVQMLLSDRFLGFYMVPDNGPWNYNFMGVRHASGMKYGVKLGTPREYYHEDHRPTHFLEFSNMEEVEITAEGDREDTFS

SEQ ID NO: 183164 - protein, 159 aa, Glycine max
  unsure (1)..(159): unsure at all Xaa locations
  Clone ID: PAT_MRT3847_13640C.1.pep
MVSRNVSLRQIFAERSKERLLSRHELPLNGSNNRAGGILRVLADRTATVYKGVCEFFRQLQEMARSDRRKVAFAAKAGLSLALASLFIYVKEEQLSKYSIWAVLTVVLIFEFSVXATLSKGLNRSFGTLSAGGLALGIAELAILTGDFEEXIIVLCIFI

SEQ ID NO: 183165 - protein, 167 aa, Glycine max
  Clone ID: PAT_MRT3847_136410C.1.pep
MIASSFCNADSMFSREEGIDVRKMMEHKRSPCSVDQSSYTSIASKRQKADLSISTKERKEKIGKRIVALQQLVSPYGKTDTSSVLKEAMEYIGFLHKQVKLLSAPYLESSPAAKMQGMEPCSLRSRGLCLVPVSFTIGVAETNGADIWAPIKTTTSPKFEKDVSQFH

SEQ ID NO: 183166 - protein, 35 aa, Glycine max
  Clone ID: PAT_MRT3847_136411C.1.pep
KVVTTLILLLNSLTSTYKVSVAIIMIYISTSFILN

SEQ ID NO: 183167 - protein, 213 aa, Glycine max
  Clone ID: PAT_MRT3847_136412C.1.pep
MEMTTSTLVLLRHNLVPTAMAVPATSSAPVLRPIPTNRSFSSPFRSLPTPTTRKPLTVFAMAPKKKVNKYNENWKKEWFGAGIFYEGSEEVEVDVFKKLEKRKVLSNVEKAGLLSKAEQLGFSLSSIEKLGVFSKAEELGLLSLLDRAASFSPSLLASAALPAFVAAIAAIVLIPDDSATLVAVQAVVAAALGVGAVGLFVGSVVLGGLQEAD

SEQ ID NO: 183168 - protein, 36 aa, Glycine max
  Clone ID: PAT_MRT3847_136413C.1.pep
MTVATNYVVRSRIHRDGLLVLKKEQQCGRDRRFECT

SEQ ID NO: 183169 - protein, 194 aa, Glycine max
  Clone ID: PAT_MRT3847_136414C.1.pep
MAVPATSSAPVLRPIPTNRSFSSPFRSLPTPTTRKPLTVFAMAPKKKVNKYNENWKKEWFGAGIFYEGSEEVEVDVFKKLEKRKVLSNVEKAGLLSKAEQLGFSLSSIEKLGVFSKAEELGLLSLLDRAASFSPSVLASAAIPAFVAAIAAVVIIPDDSAALVAVQAVVAAALGVGAVGLFVGSVVLGGLQEAD

SEQ ID NO: 183170 - protein, 75 aa, Glycine max
  Clone ID: PAT_MRT3847_136415C.1.pep
EDDQRGVPDSRARVNNNPEPYDVPRRGEKFIRPLVIGNGTRRRRPVNVKPTLTNNTHPGTPCTGSAFLLGCLILT

SEQ ID NO: 183171 - protein, 238 aa, Glycine max
  Clone ID: PAT_MRT3847_136416C.1.pep
MAHLADLCQKLKVIEQCQVSPPPGSVPPTSLPLAFLDLPWVYCDTVQSIFFFEFPHSCNHFLQTVLPNLKHSLSLTLQQFFPFVGNLVIPPKPNFPHILYTSENSISFTIAESTADFPHLIADTARDVKDSHPFVPILPTPTTKEDGTWLLPLMAIQLTIFPEYGFSICISFRHVVADARAFLHFMKFWSYVCRTKHDVAATQDLLPLLNRDIIKDPKGLKFVSEELWNSPIESIIKT

SEQ ID NO: 183172 - protein, 76 aa, Glycine max
  Clone ID: PAT_MRT3847_136417C.1.pep
KSSMGFKVQVLVCLDYKMTGMVFSNLGEDLILSSVANERKVRPVLIIITLLVSASSVGVPNIKFAKKRATAVRYTG

SEQ ID NO: 183173 - protein, 217 aa, Glycine max
  unsure (1)..(217): unsure at all Xaa locations
  Clone ID: PAT_MRT3847_136418C.1.pep
MAGYRADDDYDYLFKVVLIGDSGVGKSNLLSRFTKNEFNLESKSTIGVEFATRTLNVDSKVIKAQIWDTAGQERYRAITSAYYRGAVGALLVYDVTRHATFENVDRWLKELRNHTDANIVVMLVGNKSDLRHLVAVSTEDGKSYAEKESLYFMETSALEATNVENAFAEVLTQIYRIVSKKRVEGAENGTASVPAKGEKIDLXNDVSALKRXXCCSA

SEQ ID NO: 183174 - protein, 36 aa, Glycine max
  Clone ID: PAT_MRT3847_136419C.1.pep
YKVMEWLSQFIDQHLWYHSLASSGWNGVCVRGVLAE

SEQ ID NO: 183175 - protein, 142 aa, Glycine max
  unsure (1)..(142): unsure at all Xaa locations
  Clone ID: PAT_MRT3847_13641C.1.pep
KKTRVSLAGGPKPSPGPRRAKFPPPPRDKTKRFPRFPQGKSPPMPKKPLIPGGPSQNQGPTPVFEGGGXGCQLGETPPPGPLPRRGPPQKTLGPPRPGLWGKRRRPPNPHRGKAPSPGGERGPRGPQTQKYRGGGGPTKDPG

SEQ ID NO: 183176 - protein, 217 aa, Glycine max
  Clone ID: PAT_MRT3847_136420C.1.pep
MAGYRADDDYDYLFKVVLIGDSGVGKSNLLSRFTKNEFNLESKSTIGVEFATRTLNVDSKVIKAQIWDTAGQERYRAITSAYYRGAVGALLVYDVTRHATFENVDRWLKELRNHTDANIVVMLVGNKSDLRHLVAVSTEDGKSYAEKESLYFMETSALEATNVENAFAEVLTQIYHIVSKKAVEGAENGTTSVPAKGEKIDLKNDVSALKRVGCCSS

SEQ ID NO: 183177 - protein, 118 aa, Glycine max
  unsure (1)..(118): unsure at all Xaa locations
  Clone ID: PAT_MRT3847_136421C.1.pep
LHNSSASTSSDSKXXXADLEDIXSQRGACGVGLIADLENKESHEIVKDALNALSXXEHRGGXGAYNDSRDGSRLMTGGXRELFDKRANTHXIXAFDKLHTGAGMVLLPXEAQLLNEAK

SEQ ID NO: 183178 - protein, 67 aa, Glycine max
  Clone ID: PAT_MRT3847_136422C.1.pep
CQKIYLGRVSFLYLGRYLPALVRLPLTGLIVKSGRSIRSSSQRRERAMIMARRPKRKIIQCSGRRIR

SEQ ID NO: 183179 - protein, 201 aa, Glycine max
  Clone ID: PAT_MRT3847_136423C.1.pep
RVRSKLRVLDLRNNSLTGSVGLNFARLSNLFTLDLGSNHFNGSLPNSLSYCHELTMLSLAKNELTGQIPESYANLSSLLTLSLSNNSFENLSEAFYVLQQCKNLTTLVLTKNFHGEEIPENLTASFESLVVLALGNCGLKGRIPSWLLNCPKLEVLDLSWNHLEGSVPSWIGQMHHLFYLDLSNNSLTGEIPIGLTELMGL

SEQ ID NO: 183180 - protein, 66 aa, Glycine max
  unsure (1)..(66): unsure at all Xaa locations
  Clone ID: PAT_MRT3847_136424C.1.pep
PSAGYDKDGDGCGTGKELGSVTRSLGQHPPAGELQDMIXIEGDADGNGTIGFXEVLTLLARKTKGQ

SEQ ID NO: 183181 - protein, 84 aa, Glycine max
  Clone ID: PAT_MRT3847_136425C.1.pep
FLLLRGSGMMSFLLFSPCWSCVSKYNAYGFEIAMTRGRPFGFCIGLNMRAVTISLPTSGEILLFLEPLLSSSHDHASTYISPKV

SEQ ID NO: 183182 - protein, 61 aa, Glycine max
  Clone ID: PAT_MRT3847_136426C.1.pep
NVYFPLVIHLDLFCFWLGNACFFSCQAKQGGMGILIGMVLDRGLVVMDGLINKLIAGFCRK

SEQ ID NO: 183183 - protein, 70 aa, Glycine max
  Clone ID: PAT_MRT3847_136427C.1.pep
VPSPIARVILHSTLSQDLRNPSPPGHCDLQTINTELEVCVRKLNQLTPPLTDSKPVFVVSFCGCSGEWLL

SEQ ID NO: 183184 - protein, 79 aa, Glycine max
  Clone ID: PAT_MRT3847_136428C.1.pep
RTYSCYVNCLTSPPSSSVTLLHSISHYHSYTFITFPKTRSDPPGPVPWHWLARMNSVFSEQILADILTKLNSTQHCIDT

SEQ ID NO: 183185 - protein, 74 aa, Glycine max
  unsure (1)..(74): unsure at all Xaa locations
  Clone ID: PAT_MRT3847_136429C.1.pep
MPLYSNNLILSSSCTSINKCDSFTMYPNLIYTKTNTTXTFLMLYQPLKTQSDXTQLPIPPNNNSCTYEPNYSCN

SEQ ID NO: 183186 - protein, 43 aa, Glycine max
  Clone ID: PAT_MRT3847_13642C.1.pep
TARAGPTNARKPGSFRKWNPILRDHNRMVNFILTRQFGFQFGS

SEQ ID NO: 183187 - protein, 52 aa, Glycine max
  unsure (1)..(52): unsure at all Xaa locations
  Clone ID: PAT_MRT3847_136430C.1.pep
GIXGARHASAPLWLPPTYSEDDQVHRGGFEISNLMSLIVQNSESDPHDPSSP

SEQ ID NO: 183188 - protein, 154 aa, Glycine max
  Clone ID: PAT_MRT3847_136431C.1.pep
ADFERDLESWNISLVQGGVDSRNLFHNYIMVWIQDMQLSLLDLCKAEKVPWAGVTTNHSTSPFAEEMYEKIKDNLTLYEVVINRWPQYSLYLENAVANIERAIVKSLEKQYSDILTPLKDSIQKRLHLQVQKIARRQSATVHLGPNQLGIFLNT

SEQ ID NO: 183189 - protein, 51 aa, Glycine max
  Clone ID: PAT_MRT3847_136432C.1.pep
LGGCSETPLFGSVMSMEITPLKFPMFLSLQFAQLEDFKLLLQKFKWVGSDH

SEQ ID NO: 183190 - protein, 102 aa, Glycine max
  Clone ID: PAT_MRT3847_136433C.1.pep
MPELRRGVRRGRGRGQKASEPARKELKARAAPRGRPRTRLAAKELERQEPLIPIPIPEPLIPIPEPAKEEKKKVGVGVNMGDESGGLSGNKPEEDATTPPFP

SEQ ID NO: 183191 - protein, 91 aa, Glycine max
  Clone ID: PAT_MRT3847_136434C.1.pep
LLLVPCAGGALPLGWGSFFIFFPTILWSDKNLSFDGLIQILFPGFKLIPGVRLDVFLSRIAGGILDFGCPLNKPFRGVGPFYFSQFGVPPM

SEQ ID NO: 183192 - protein, 39 aa, Glycine max
  Clone ID: PAT_MRT3847_136435C.1.pep
AINIRFTYHASCCFKENKKSSFVNNKQHGWLNVSKKQNG

SEQ ID NO: 183193 - protein, 62 aa, Glycine max
  Clone ID: PAT_MRT3847_136436C.1.pep
VSFLKFGEISVAFHIGLQVHDMKAVRLIPRQSSIHLENKEKCIVPVMMISIMSNNECHDPDA

SEQ ID NO: 183194 - protein, 242 aa, Glycine max
  Clone ID: PAT_MRT3847_136437C.1.pep
MFTLSRVFPLTSPSRHRLLEVLSSRKVEVGDRLRQEGRDFTYSAGISTATNNYAAKGYASDRIFAPYTVYKGKAAFSLIPCLPTFTKLNSGTVVVDRRGSIMMTFMHSIGERKYDWEKRQRFALSATEVGSLITMGAQDSCDFFHDPSMLSSNAGQVRKSLSIKPHANGYFVSLTVVNNLLNTKDYFSVPVTTAEFAVMKTACTFALPHIMGWDQITNQQSRGIDGLQAKGDSKVSELEWER

SEQ ID NO: 183195 - protein, 114 aa, Glycine max
  unsure (1)..(114): unsure at all Xaa locations
  Clone ID: PAT_MRT3847_136438C.1.pep
GNAPLKLVLGETKIVVFLQFYVGNVVMVPGGRNRGRVGVVQPREKLKGGFWPIPVRDAPGPEFAPRMGHVFPLGKGTKPWFSFPQGKGFXLSPLWEARKRISPPQATGGLIFRI

SEQ ID NO: 183196 - protein, 133 aa, Glycine max
  unsure (1)..(133): unsure at all Xaa locations
  Clone ID: PAT_MRT3847_136439C.1.pep
MIKPLNMSSATKGDRKTALDVASWMFNIVTSVGIILVNKALMATYGFSFATTLTGLHFATTTLLTVFLKWLGYVQTSHLPLPDLIKFVLFANFSIVGMNVSLMWNFVGFYQIAKLSMIPVSXFPEVILDNVRY

SEQ ID NO: 183197 - protein, 65 aa, Glycine max
  Clone ID: PAT_MRT3847_13643C.1.pep
QKKISLKLVMTISVSKAHKTGCLTFPDFIFFFSGAPNQWSKECSTEQLHDIHPQLINKKESLPSF

SEQ ID NO: 183198 - protein, 165 aa, Glycine max
  unsure (1)..(165): unsure at all Xaa locations
  Clone ID: PAT_MRT3847_136441C.1.pep
MSSATKGDRKTALDVASWMFNIVTSVGIILVNKALMATYGFSFATTLTGLHFATTTLLTVFLKWLGYVQTSHLPLPDLIKFVLFANFSIVGMNVSLMWNSVGFYQIAKLSMIPVSCFLEVILDNVRYSRDTKLXISLVLLGVAVCTVTDVSVNANGSIXAAVAVW

SEQ ID NO: 183199 - protein, 82 aa, Glycine max
  Clone ID: PAT_MRT3847_136442C.1.pep
MALGGTAPPRGSAAATASMRRRRTTGGAASGGAAGTMLQFYTDDAPGLKISPNVVLVMSIGFIAFVAILHVMGKLYFVRREA

SEQ ID NO: 183200 - protein, 71 aa, Glycine max
  Clone ID: PAT_MRT3847_136443C.1.pep
SLSLSLSLSLSLFRFALISLYQFPILLGIPFRIDYSSDCSNFSVQFGVVKVQCGRGVVKLVVSIGFWVLMH

SEQ ID NO: 183201 - protein, 82 aa, Glycine max; identical to SEQ ID NO: 183199
  Clone ID: PAT_MRT3847_136444C.1.pep

SEQ ID NO: 183202 - protein, 90 aa, Glycine max
  Clone ID: PAT_MRT3847_136445C.1.pep
KGFGVLKQGRDSWNQLKRCGHRFDLLPLVLAFCTGEKAFLFIISKHSRVSKSRRAPSLLKELDISFCPSECPRLEGLSYHIVLSPRMAPC

SEQ ID NO: 183203 - protein, 47 aa, Glycine max
  Clone ID: PAT_MRT3847_136446C.1.pep
PSRTLGIKRKEICMKNSNFHSTNLELLSCPDQHISHEDLHGVRLKIH

SEQ ID NO: 183204 - protein, 110 aa, Glycine max
  Clone ID: PAT_MRT3847_136447C.1.pep
QRFFFKRATGATQINLGGEKTSDRRKNFMGEDPPDGGKNPQKRTNMFSQFICTLIFKRTLCFTVGIGNGKKKKRESSCFPKNITSDKITRRVQKHWLHYLCGGQTNHPTR

SEQ ID NO: 183205 - protein, 75 aa, Glycine max
  Clone ID: PAT_MRT3847_136448C.1.pep
SPQTIQTDNSRLNTMTNAKCLQESLHSVSNGNLRFTQHEQQLFILQITLMAYKNIQISTSTVVRLVIKIQAKARC

SEQ ID NO: 183206 - protein, 213 aa, Glycine max
  unsure (1)..(213): unsure at all Xaa locations
  Clone ID: PAT_MRT3847_136449C.1.pep
MGRTGKWLRSLLTGKRSDREKEKEKEKCGTNMCLLNGITSTTETENPTTPVSTTTTTKEKRRWSFRRSPASRELNLAESGAIASSVTVQNAENDQREHDPDSNGLSTRCSEEAAAIKIQSXFRSYLARKALYALRGLVKLQALVRGHLVRKQARETLRCIQALVIAQARARAQRARMVLEDQNLSPYRITTEENFFMLMHNEMDSGFGRKCQD

SEQ ID NO: 183207 - protein, 58 aa, Glycine max
  unsure (1)..(58): unsure at all Xaa locations
  Clone ID: PAT_MRT3847_13644C.1.pep
MDTSKSKQGPEHLLVLVHGIMASPKDWTYXEAVLKRRLGDDFFIYASSTNSYTKTFDG

SEQ ID NO: 183208 - protein, 71 aa, Glycine max
  unsure (1)..(71): unsure at all Xaa locations
  Clone ID: PAT_MRT3847_136450C.1.pep
YYPFALFAERELMLIKIAVNAAAQCDVLDIASILGAKTVRFMXSSLPLKLTADXDKMVALHRLLQPYGLCE

SEQ ID NO: 183209 - protein, 44 aa, Glycine max
  Clone ID: PAT_MRT3847_136451C.1.pep
SSRVGSSKQSTVIDILLGISQDFEIAGYTLMPAFFVPHANAQSF

SEQ ID NO: 183210 - protein, 62 aa, Glycine max
  Clone ID: PAT_MRT3847_136452C.1.pep
LELELGLKWVLFFSIGIEVKLETAYRHFCTTTGDLDRATTKHRDADLEAGFSMFLFSCILRS

SEQ ID NO: 183211 - protein, 24 aa, Glycine max
  Clone ID: PAT_MRT3847_136453C.1.pep
LQCNCSLCLVIIVAWSLTFLLLNP

SEQ ID NO: 183212 - protein, 105 aa, Glycine max
  unsure (1)..(105): unsure at all Xaa locations
  Clone ID: PAT_MRT3847_136454C.1.pep
NPGFSKPKFGPYWFKHGKVFGVFLKGGPPXKTQAIAKVAKVHPPVPDVNPLAKEALPFASKKKGFFLGRIKMLGGLHKLVLPAFFLPWFIPSGVFPFNGVPRDFI

SEQ ID NO: 183213 - protein, 43 aa, Glycine max
  Clone ID: PAT_MRT3847_136455C.1.pep
LKNQNERESLENEETAISPDVTHRGKVTLVEKNQREEKSFRLE

SEQ ID NO: 183214 - protein, 82 aa, Glycine max
  Clone ID: PAT_MRT3847_136456C.1.pep
FKSLAHPTNLPPLHFYLKHLQLPTLTFTSLPLNTPTFSPLKPLSSPTLISISTLSPTSPSLITYKSLTHSPFLNITPPIPPF

SEQ ID NO: 183215 - protein, 87 aa, Glycine max
  Clone ID: PAT_MRT3847_136457C.1.pep
FLYAHEEQNNTCSEIKDGLNEKQLELRDPFSQEEVLMNTLLVNKNQLPQYSRGVLILLRSNTPTILILHADSSEQANVFDIYNLPVI

SEQ ID NO: 183216 - protein, 86 aa, Glycine max
  unsure (1)..(86): unsure at all Xaa locations
  Clone ID: PAT_MRT3847_136458C.1.pep
GNDDSFIYXPHXXVYXKQLYKVRHXXCHKIXHELXTHMQVDXFRSDXXPPAEIXKKPPXXXXVFMXHHTIVXVSLXHQXPXXPFSS

SEQ ID NO: 183217 - protein, 138 aa, Glycine max
  Clone ID: PAT_MRT3847_136459C.1.pep
SDLNPLLHQLVHTCKDLLTGKADFENFIEEVAFALDWSINNSVTSTNAAIARDKIKKQFSSHLSQNQSKTDVEDKQSSRLPSFAYPDEQCELFNTQNDQCDLLEEIRKLKYDLRSTKTAKKDLEEKLLSVTDERQNLA

SEQ ID NO: 183218 - protein, 134 aa, Glycine max
  unsure (1)..(134): unsure at all Xaa locations
  Clone ID: PAT_MRT3847_13645C.1.pep
LGKRPELRYLPGAIVAAVFGIIFDMPVIXVGAIFKGPCVLFKGWKRLVHESQWVGESPFLGDQYVCPFAGLAIGLGPPAFGGASLAFLLAQFVLWGFARFITYQESSFLFCLGYIVATCALYDEYSNDIFDMKE

SEQ ID NO: 183219 - protein, 45 aa, Glycine max
  Clone ID: PAT_MRT3847_136460C.1.pep
PTKATRKFLILFFCFFSRKKVMKYPQLSADFFQTLNFIHAALGFK

SEQ ID NO: 183220 - protein, 62 aa, Glycine max
  Clone ID: PAT_MRT3847_136461C.1.pep
TFGSICLGTTGANAVPLSFLIPCTTLSSTFTYINNLARVRSYLYVIRHTDMHYSNMNTNYAC

SEQ ID NO: 183221 - protein, 55 aa, Glycine max
  Clone ID: PAT_MRT3847_136462C.1.pep
SQHQKASLRLLSQMVKNLCRKLLPYGSTMTHQAYGIVTNLIIYNGLGNFLIEHGF

SEQ ID NO: 183222 - protein, 60 aa, Glycine max
  unsure (1)..(60): unsure at all Xaa locations
  Clone ID: PAT_MRT3847_136463C.1.pep
ARNXAXXISHXXXMEXXWXXXVLXXIXXRXVVQMXRXXXXXGXVKXATXXGLXSNXXGXI

SEQ ID NO: 183223 - protein, 35 aa, Glycine max
  Clone ID: PAT_MRT3847_136464C.1.pep
QTIPLIQILPIYHQHNNLLQSKLNDIIYLFLFQIP

SEQ ID NO: 183224 - protein, 41 aa, Glycine max
  Clone ID: PAT_MRT3847_136465C.1.pep
IYEQQMKIMGTNKLKDPEETRTLLQFTIFTTQHELNLMIKN

SEQ ID NO: 183225 - protein, 117 aa, Glycine max
  Clone ID: PAT_MRT3847_136466C.1.pep
GNSHGLSQLPQNLLIIPVPHHSSRTTSLYLLQNMFQRWILLDELVTGKNEGSGGSEEAKERCGFVAAEGSYFVFVWRETEIYCGFVAAELMQKKRTIYIFYLGQSGGKERWCRPDAW

SEQ ID NO: 183226 - protein, 93 aa, Glycine max
  unsure (1)..(93): unsure at all Xaa locations
  Clone ID: PAT_MRT3847_136467C.1.pep
HSGKSTTTXGHLXYKLGGIDKRVIERFEKEAAEMNKRSFKYAWVLDKLKAEREXXITXDIAYGSFXTTKYYCXVIDAPRTIVIXXRNMIXGIP

SEQ ID NO: 183227 - protein, 103 aa, Glycine max
  Clone ID: PAT_MRT3847_136468C.1.pep
REPGLWVEVFFIIRGGRSENSHHIRSRSSTNLNIHPYCSHHGLDRQASPFRPNRRGHFERTKALRTPSPYVTHPDQNKHQFNLHEPLLGPIEAHFRLLFHDNR

SEQ ID NO: 183228 - protein, 48 aa, Glycine max
  Clone ID: PAT_MRT3847_136469C.1.pep
IKNLEYAHINIGQNHTCAVMKFLIICHRLAICNCPSDSFIPTCSLHYV

SEQ ID NO: 183229 - protein, 33 aa, Glycine max
  Clone ID: PAT_MRT3847_13646C.1.pep
ILLKYSFNLLLLEYKRKLNEYFSEYPCLCIIYT

SEQ ID NO: 183230 - protein, 60 aa, Glycine max
  Clone ID: PAT_MRT3847_136470C.1.pep
MVIIEVQMTEVGTEYVVKSILTTHKSGAPILPKGEFGTGINPDMEFVRMCFAQFGATWKI

SEQ ID NO: 183231 - protein, 71 aa, Glycine max
  Clone ID: PAT_MRT3847_136471C.1.pep
FFRFFTPHLVIHQKYRLYNKRTLENRLTKPIKSEAFPHKLVQFGEIQEKVVLKFSQEEFPTARSTQERSAT

SEQ ID NO: 183232 - protein, 91 aa, Glycine max
  unsure (1)..(91): unsure at all Xaa locations
  Clone ID: PAT_MRT3847_136472C.1.pep
GEVVVLWHNFFAHQGIFTRIYATRSLPLVAKKKGRREKRKDEPGRPRCVHLTLKEQDTAGGVRVXGGKVKWRGLRXDTGKYSWGSEAVTLK

SEQ ID NO: 183233 - protein, 91 aa, Glycine max
  Clone ID: PAT_MRT3847_136473C.1.pep
KGAVGPTQKKGGGPPLRAPRVYPLRFRVLIFGEIVTGNNFSQGKGFSSITPGFKSAPQKEKWGPPRDRGGKKFGGGGAKKGGGPLFFFFGA

SEQ ID NO: 183234 - protein, 129 aa, Glycine max
  Clone ID: PAT_MRT3847_136474C.1.pep
FEELESNAGIDFLEFRPSEIAAAVAISVVGEGQTVHTEKAISVLIQLVEKERVLKCVKMIQELASNSGGSAKGASASVSVPSVPESPLGVLVTACFSYKSDDTNAASYANSSHNISPDAKRRKLNKTFG

SEQ ID NO: 183235 - protein, 64 aa, Glycine max
  Clone ID: PAT_MRT3847_136475C.1.pep
PRPIRVILRTLCISLTRGHFHEKPSLSWEPNPLNGGPLSLRTLPWPLWTLTCASIDHTPRPPKW

SEQ ID NO: 183236 - protein, 126 aa, Glycine max
  Clone ID: PAT_MRT3847_136476C.1.pep
PPRHPYATPYFTFTPRNTTVPVPIRLVPHTLATIATTSPEVLSTIPWVTVPTTSFIFYNHDPCLFYPHTIILSLRSWVFACFARYVISNYQFSPFVNPFPRAFPYRYFPPPPPQRRRTSYSDDGNL

SEQ ID NO: 183237 - protein, 52 aa, Glycine max
  Clone ID: PAT_MRT3847_136477C.1.pep
NNSNDNLSLNNNIKLFYMTLNSFLFTNSNCWRFNKIMKLKTTGADEHYSVMA

SEQ ID NO: 183238 - protein, 112 aa, Glycine max
  unsure (1)..(112): unsure at all Xaa locations
  Clone ID: PAT_MRT3847_136478C.1.pep
MDVKKYWFGSRSQRTQNIRLGRNYTKPHYRSYSPSSCDGTKTTVWQMLWRKLKRSSDKKKVFSSHTTMEGVYDQETYSMNFDQGTGWMEPDNLPRSFSARFADPSXILPPKH

SEQ ID NO: 183239 - protein, 50 aa, Glycine max
  Clone ID: PAT_MRT3847_136479C.1.pep
IIMAHTYTLSPLSPTLYLVITNNNSHFQLRCYFVLVTVRSSLVCLLKNTS

SEQ ID NO: 183240 - protein, 76 aa, Glycine max
  Clone ID: PAT_MRT3847_13647C.1.pep
IVSRGQITGSDTTFRGTPQTNIARGKIISPSTRTTTLRNLYWCRNIYLFMIILIYGRLSIGNILGPTIYIEGGLRG

SEQ ID NO: 183241 - protein, 51 aa, Glycine max
  Clone ID: PAT_MRT3847_136480C.1.pep
LYDTGSLLIRSIKKSDSNQWSVRWSSRFLNETRAAAGTAVVTTLPRVSGSL

SEQ ID NO: 183242 - protein, 151 aa, Glycine max
  Clone ID: PAT_MRT3847_136481C.1.pep
HILGLTPFQEFKPFPKPEKQSIKKLESSLKLFQAGNAPALAIKANVEKTKKKVHHYPKQGLLCRGDGLPHLIVSGDQKHWGEFITPGILFLYILGLIRWVGPNFLDGNQDQKKPTLEENIIHGSLASCVVFKGFNWPLAAFRELHYRDLIA

SEQ ID NO: 183243 - protein, 67 aa, Glycine max
  Clone ID: PAT_MRT3847_136482C.1.pep
ASSHPKTIHGTTNSHIHNLPFFLSLLNFLQPNLTFFAHTISLLLASGSPFVYLSSFQVHVMCNRDPF

SEQ ID NO: 183244 - protein, 40 aa, Glycine max
  Clone ID: PAT_MRT3847_136483C.1.pep
EKKSLLIISKLYAIKTRNLFIFYFGINHITTSVKRFIIQV

SEQ ID NO: 183245 - protein, 68 aa, Glycine max
  Clone ID: PAT_MRT3847_136484C.1.pep
IFSKFGPYFCSFIAYQFNISLLFSPFNWFKNFGVDFRFLFMSFFFSGSFKVSGENFFFSDGHFFSVQE

SEQ ID NO: 183246 - protein, 91 aa, Glycine max
  Clone ID: PAT_MRT3847_136485C.1.pep
FSQEEWLVRDAQREYGSGADVIQRERLWSLYHLLTTMPFYHLLTTMPFYHLLTTMPFYHLLPTMPFYHLLTTIPFFIFSRPCKHINQPKGS

SEQ ID NO: 183247 - protein, 105 aa, Glycine max
  Clone ID: PAT_MRT3847_136486C.1.pep
GRVVMFNPVISYRVRRGDVAVHEVRRPPMRDSLGIAESLKLGTFSRVLLMGLLVDFSSFLPLVGVSIARCYCGNLIVDPPSFRDLLRDLDVLDEEDLIVGGGNNR

SEQ ID NO: 183248 - protein, 45 aa, Glycine max
  Clone ID: PAT_MRT3847_136487C.1.pep
THTHTHTHTHIYIYIYQVAICVEYMLSQVSFIVTTWLCFLKLIYV

SEQ ID NO: 183249 - protein, 35 aa, Glycine max
  Clone ID: PAT_MRT3847_136488C.1.pep
CFIAIRPSKKKKKKKKKKKKKKKKKKKKKKKKRKK

SEQ ID NO: 183250 - protein, 39 aa, Glycine max
  Clone ID: PAT_MRT3847_136489C.1.pep
IKNIFYIQTLDTPSQATNMIKLCTSTYTKQEYFLYDINQ

SEQ ID NO: 183251 - protein, 142 aa, Glycine max
  unsure (1)..(142): unsure at all Xaa locations
  Clone ID: PAT_MRT3847_13648C.1.pep
VARAYLLHLVCCTLFSNKSVTNVHVVHLEAFRDLGQSGGYAWGAAALVHMYEQLDEASXDHNMTNWGYLTLLQCWIYEHFLSVHQCITDDAYEEMSPCASRWLTTKAHMKGITGAPYRAHCDALTVTDVCWLPYSDHRGVRV

SEQ ID NO: 183252 - protein, 49 aa, Glycine max
  Clone ID: PAT_MRT3847_136490C.1.pep
VPPNNLKHSLLYIFKYFIFSKITVIFHQLYLFTAIQSLMIHFLNVDGML

SEQ ID NO: 183253 - protein, 235 aa, Glycine max
  Clone ID: PAT_MRT3847_136491C.1.pep
MGNCSSGAGAPTTYSDDHPHHNGITVLPPNSNPSPQLPKPPPTSSSSSSLGRVLGRPMEDVRSIYIFGRELGRGQLGVTYLVTHKATKEQFACKSIATRKLVNRDDIDDIRREVQIMHHLTGHRNIVELKGAYEDRHSVNLVMELCAGGELFDRIITKGHYSERAAANSCRQIVTVVHNCHSMGVMHRDLKPENFLLLNKNDDSPLKATDFGLSVFFKPGDVFRDIVGSAYYFAL

SEQ ID NO: 183254 - protein, 46 aa, Glycine max
  Clone ID: PAT_MRT3847_136492C.1.pep
FMQSLNIFQWVIKVGKQKLVVDWHYPNYSDIKSSQLVFGLTTFNPS

SEQ ID NO: 183255 - protein, 68 aa, Glycine max
  Clone ID: PAT_MRT3847_136493C.1.pep
MASGLLNMNVTSCMVAVLMVSFGHIISLAEAEIPCGRVQITVAPCIGYLRVPGGGVPAACCNGVRSIN

SEQ ID NO: 183256 - protein, 74 aa, Glycine max
  Clone ID: PAT_MRT3847_136494C.1.pep
CILKIKFNKIYKLGFVKKKKQKKKGGPPICSPVPREFIPGRELAGGPFSPKGSRLRLWRNQGQNFSLGKFFTRP

SEQ ID NO: 183257 - protein, 53 aa, Glycine max
  Clone ID: PAT_MRT3847_136495C.1.pep
HLNSMSAGHAETEHHTHDIASILKTRISRQHYMLHMLLEARVLLSNEIVWSLI

SEQ ID NO: 183258 - protein, 142 aa, Glycine max
  Clone ID: PAT_MRT3847_136496C.1.pep
MEGLLWKQKYPYTGKDGETANSDKVPIKATIDGYEQVEQSDNGLLCSIVKQPISICLNATDFQLYESGIFDGQQCSSSSKYTNHCVLIVGYDSSNGEDYWIVKNSWGTKWGINGYIWIKRNTGLPYGVCGMNAWAYNPTIRK

SEQ ID NO: 183259 - protein, 88 aa, Glycine max
  Clone ID: PAT_MRT3847_136497C.1.pep
MYSLQTKDSFSPFKEFFFPLVSSLPRGFPIWPHQHIKKRGFLFCKQTPLKTPPKAPFFVKVKLPLCKRGLLFPKVSKGFWKKESLFVP

SEQ ID NO: 183260 - protein, 94 aa, Glycine max
  unsure (1)..(94): unsure at all Xaa locations
  Clone ID: PAT_MRT3847_136498C.1.pep
TGRGYTTGEQGKTGGPPKKWGGGKFPFNKGGKKKKGQPGGPPKKGAHPXRGMGPPPPGDNKNRGGGGYQKGGPPPGRGPNAPGLQGGSFFLPQK

SEQ ID NO: 183261 - protein, 105 aa, Glycine max
  unsure (1)..(105): unsure at all Xaa locations
  Clone ID: PAT_MRT3847_136499C.1.pep
GSGENNPHRYRPGTVALREITKYQKSTELLFRKLPFQRLVREIGQHFKTDLRFQSHDVLALQEAAEAYLVWALXEDTILCAIHAKRVTIMPNDIHLGRRIRGERA

SEQ ID NO: 183262 - protein, 51 aa, Glycine max
  Clone ID: PAT_MRT3847_13649C.1.pep
STCTGRSTATKDGNFENLFSKRNSPVAHAVGFWDYHSFIAAAALFEPQGFG

SEQ ID NO: 183263 - protein, 44 aa, Glycine max
  Clone ID: PAT_MRT3847_1364C.1.pep
ACNSARDFQENKKDGATLAGHLRGLSLHSHNGSSSHSGSFDFSD

SEQ ID NO: 183264 - protein, 68 aa, Glycine max
  Clone ID: PAT_MRT3847_136500C.1.pep
LPQPYRTSFSVLRWSFGAALGEAKKDKPEPGVLYMKVGEQKFVLGTLSRGKILQIFLELVLEKEFELS

SEQ ID NO: 183265 - protein, 68 aa, Glycine max
  Clone ID: PAT_MRT3847_136501C.1.pep
LHKPQRMSPANLKCNQRVSKIKHNQYTLFTQPCNIISLSNLLTATSPPNEDTLYTLLQMHPPQQAYLD

SEQ ID NO: 183266 - protein, 57 aa, Glycine max
  Clone ID: PAT_MRT3847_136502C.1.pep
SLETKWGLDKKKIKNQKGSELFFHITNGWFCARMAWSPDHVVKDGFKVPSFHQVRQV

SEQ ID NO: 183267 - protein, 90 aa, Glycine max
  Clone ID: PAT_MRT3847_136503C.1.pep
VQGRVQTVVEDLATQGERAQAILGWRDSRATSIFIIFSLIWAVFIYITPFQVVAILIGLFMLRHPRFRSKMPSVPVNFFKRLPSKSDMLI

SEQ ID NO: 183268 - protein, 61 aa, Glycine max
  Clone ID: PAT_MRT3847_136504C.1.pep
HCCIINWFEHGHTSTRYHSIRINYGQGCFLPLLTENHVVPGSVHFLHGLGHRLRHAAGRGP

SEQ ID NO: 183269 - protein, 35 aa, Glycine max
  Clone ID: PAT_MRT3847_136505C.1.pep
ICQILILSQKTTSAVEMVNAVSLQLELWFFNLKPP

SEQ ID NO: 183270 - protein, 74 aa, Glycine max
  Clone ID: PAT_MRT3847_136506C.1.pep
LSAVTKHGTMFITMVFRCPPLLGGCTPPHCVASVVCTTSTAESLLVVVVSSLTLLSPDDATLANLRSNALVFFS

SEQ ID NO: 183271 - protein, 70 aa, Glycine max
  Clone ID: PAT_MRT3847_136507C.1.pep
LIPFCRTFALILAQILGALRRILHPFILRMPRFTFCKRTAMPLCDYAGEVHEPLLFHEAPISVIHYAQIQ

SEQ ID NO: 183272 - protein, 74 aa, Glycine max
  Clone ID: PAT_MRT3847_136508C.1.pep
ASDILERFAYALSLKVVQTMAVCSSRQHFIIRSVYLSTTSPGVLSMSPHQIPKHKIRSYKVLARSNNHFLPDAW

SEQ ID NO: 183273 - protein, 51 aa, Glycine max
  Clone ID: PAT_MRT3847_136509C.1.pep
ISFLKKLIPNNVLLHKSTCETLILPAFLLPEKEKAYLINFQHLLFCSQKTC

SEQ ID NO: 183274 - protein, 226 aa, Glycine max
  Clone ID: PAT_MRT3847_13650C.1.pep
HQRRECRNDSVSLRHLHHHLSLVTERERRGRNQSALEWAMAELMKNPMKLKKAQDEVRKFVGNKSKVEENDINQMDYMKCVIKETLRLHPPAPLLAPRETASSVKLGGYDIPAKTLVYVNAWAIQRDPEFWERPEEFIPERHDNSRVHFNGQDLQFITFGFGRRACPGMTFGLASVEYILANLLYWFNWKLPATHTSGQDIDMSETYGLVTYKKEALHLKPIPFFL

SEQ ID NO: 183275 - protein, 482 aa, Glycine max
  Clone ID: PAT_MRT3847_136510C.1.pep
MLLPTFDADACDGEDPSNFPMVLVQIPMCNEREVYSQSIGAAAQLDWPKDRILIQVLDDSDDGNLQLLIKEEVASWKEKGVNIVYRHRLIRTGYKAGNLKSAMSCDYVKDYEFVAIFDADFQPNPDFLKLTIPHFKGKPDLGLVQARWSFVNKDENLLTRLQNINLCFHFEVEQQVNGYFLNFFGFNGTAGVWRIKALEESGGWLERTTVEDMDIAVRAHLNGWKFIFLNDVKVLCELPESYEAYKKQQHRWHSGPMQLFRLCLPAILTSKISVWKKANLIFLFFLLRKLILPFYSFTLFCIILPLTMFIPESELPLWVICYVPIIMSFLNILPSPKSVPFLVPYLLFENTMSVTKFNAMISGLFQLGSAYEWVVTKKTGRSSESDLLALAERESKSSNEEKILRRHSESGLELLGKLKQSEAPSKKKRNRLYRKELALALLLLTASARSLLSAHGVHFYFLLFQGLSFLIMGLDLIGEQVS

SEQ ID NO: 183276 - protein, 111 aa, Glycine max
  Clone ID: PAT_MRT3847_136511C.1.pep
NPRGFKEGFFSLSRAESGFSKVFISHLGPVDFIFSASFSAIKIETLVSLSRQTSCPLSLFRGSFFIKSYPRTLFYGFCFPVLASNQALSPRVFGVLGVQPKKRRTFGFCSG

SEQ ID NO: 183277 - protein, 93 aa, Glycine max
  Clone ID: PAT_MRT3847_136512C.1.pep
QRPLLHGICISTNSKRYLIMEAGPSTIQGDRNSNLMNQAFQHQQLTHQIKTYQRNFMNSIIAPKTNPLSIWKTHPKRIMSEMHKKLIPPYSLY

SEQ ID NO: 183278 - protein, 53 aa, Glycine max
  Clone ID: PAT_MRT3847_136513C.1.pep
IPINCEALSFLIIVDADTWLIHDCSWSHTTNGCRHQNRILGESLSLCVHSPNW

SEQ ID NO: 183279 - protein, 384 aa, Glycine max
  Clone ID: PAT_MRT3847_136514C.1.pep
MFRHRFLLILYPAQGHIHPAFQLAKRLVSLGAHVTVSTTVHMHRRITNKPTLPHLSFLPFSDGYDDGFTSSDFSLHASVFKRRGSEFVTNLILSNAQEGHPFTCLVYTTLLSWVAEVAREFHLPTAMLWTQPATILDIFYYYFHEHGEYIKDKIKDPSCFIELPGLPLLLAPRDLPSFLLGSNPTIDSFIVPMFEKMFYDLDVETKPRILVNTFEALEAEALRAVDKFNMIPIGPLIPSAFLDGKDTNDTSFGGDIFRLSNGCSEWLDSKPEMSVVYVSFGSLCVLPKTQMEELARALLDCGSPFLWVIKEKENKSQVEGKEELSCIEELEQKGKIVNWCSQVEVLSHGSVGCFVTHCGWNSTMESLASGVPMVAFPQWVEQKT

SEQ ID NO: 183280 - protein, 72 aa, Glycine max
  Clone ID: PAT_MRT3847_136515C.1.pep
MFRHRFLLILYPAQGHIHPAFQLAKRLSFLPFSDGYDDGFTSSDFSLHASVFKRRGSEFVTNLILSNAQEGH

SEQ ID NO: 183281 - protein, 460 aa, Glycine max
  Clone ID: PAT_MRT3847_136516C.1.pep
MFRHRFLIVMYPAQGHINPAFQFAKRLVSLGAHVTVSTTVHMHRRITNKPTLPHLSFLPFSDGYDDGYTSTDYALQASEFKRRGSEFVTNLIASKAQEGHPFTCLVHTVLLPWAARAARGFHLPTALLWTQPATILDIFYCYFHEHGDYIKGKIKDPSSSIELPGLPLLLAPRDLPSFLLGSNPTIDSLAVSMFEEQLHDLDMQAKPRILVNTFEALEHEALRAVDNFNMIPIGPLIPSAFLDGKDPTDTSFGGDIFRPSNDCGEWLDSKPEMSVVYVSFGSFCVLSKKQMEELALALLDCGSPFLWVSREKEEEELSCREELEQKGKIVNWCSQVEVLSHRSVGCFVTHCGWNSTMESLASGVPMFAFPQWIEQKTNAKLIEDVWKTGVRVDKQVNEEGIVENEEIIKCLEVVMGSGEKGQELRNNAKNWRGLAREAVKEGSGSSDKNLRAFLDDLCPH

SEQ ID NO: 183282 - protein, 76 aa, Glycine max
  Clone ID: PAT_MRT3847_136517C.1.pep
MFRHRFLLIVTVSTTVHMHRRITNKPTLPHLSFLPFSDGYDDGFTSSDFSLHASVFKRRGSEFVTNLILSNAQEGH

SEQ ID NO: 183283 - protein, 478 aa, Glycine max
  Clone ID: PAT_MRT3847_136518C.1.pep
MVLQRFLLVTYPAQSHINPALQLAKRLIAMGAHVTILLTLHVYRRISNKPTIPGLSFLPFSDGYDAGFDALHATDSDFFLYESQLKHRTSDLLSNLILSSASEGRPFTCLLYTLLLPWVADVARQFYLPTALLWIEPATVLDILYHFFHGYADFINDETKENIVLPGLSFSLSPRDVPSFLLLWKPSVFSFTLPSFENQIKQLDLETNPTVLVNTFEALEEEALRAIDKINMIPIGPLIPSAFLDGNDPTDTSFGGDIFQVSNDYVEWLDSKEEDSVVYVSFGSYFELSKRQMEEIARGLLDCGRPFLWVVREKVINGKKEEEEELCCFREELEKWGKIVTWCSQVEVLSHSSVGCFLTHCGWNSTMESLVSGVPMVAFPQWTDQMTNAKLIEDVWKIGVRVDHHVNANGIVEGKEIEACLDVVMGSGDRASEFRKNAKKWKVLARDAAKEGGSSEKNLRAFVDDVRQKFMHTHVGEY

SEQ ID NO: 183284 - protein, 149 aa, Glycine max
  Clone ID: PAT_MRT3847_136519C.1.pep
GLSDDPPCPPCLLDAAGEPIVTLRRKIMSAHDQWQVFRGESTELKDLIFSVKKSSVFQLKTKLDVFLANNTKEEVCDFKVKGSWFERSCVVYAGESLTIAAQMHKKHTVQSIALGKDNFIVTVYPNIDYAFIVALILILDEINQDKKKD

SEQ ID NO: 183285 - protein, 179 aa, Glycine max
  Clone ID: PAT_MRT3847_13651C.1.pep
TAARRRQKGITSRSIISSILSLLFLSATPDDGDDGERNAVVAPIAALLLVVLLAASVVVEAQENSDVKTLVKHMHGKKYCDKGWECKGWSIYCCNLTITDYFQTYQFENLFSKRNSPVAHAVGFWDYHSFIAAAALFEPQGFGTTGNKTMQMMEIAAFLGHVGSKTSCEYYSPIDNLLI

SEQ ID NO: 183286 - protein, 67 aa, Glycine max
  unsure (1)..(67): unsure at all Xaa locations
  Clone ID: PAT_MRT3847_136520C.1.pep
MSATMEQQRHHKAPQQHDEAEEIQPGPLPVEQLQASGIXAATDVNKLKDAGICTVESVAYTPRKDLL

SEQ ID NO: 183287 - protein, 27 aa, Glycine max
  Clone ID: PAT_MRT3847_136521C.1.pep
LDRWITEEPNHVKRIVYVYQINYYLRI

SEQ ID NO: 183288 - protein, 71 aa, Glycine max
  Clone ID: PAT_MRT3847_136522C.1.pep
SIEGVVSNVFFFTSFSMWVSLPKKKNKTCALYPQCDWLLRNGRPPSPKKPISRLGHITIVVHGIYGWSLRG

SEQ ID NO: 183289 - protein, 91 aa, Glycine max
  unsure (1)..(91): unsure at all Xaa locations
  Clone ID: PAT_MRT3847_136523C.1.pep
VSPKPEAVHPPIDLKPGIALLDPDDEIFFDIYGXYEPVHEPTLHIWFGSPSEXVTTHFESTVYDVPSMHPLITGKVTNLSVDLSQASAAEE

SEQ ID NO: 183290 - protein, 106 aa, Glycine max
  Clone ID: PAT_MRT3847_136524C.1.pep
KKNVRDYSFSFGTLLTLVVVMFGRLSFGIAVILLIVATSMSRRQAYGEGWLNGECYLVKGGIYVGLAILIIVSVESLMGSALLPMKTNDEADQGNKIHAQTERSDT

SEQ ID NO: 183291 - protein, 254 aa, Glycine max
  Clone ID: PAT_MRT3847_136525C.1.pep
SNKGDQTKIFDEEHRDHDNTSVVEEPESIQEKIIQQTGTTPSAAEPKEASNKDDQSQIFDEEHRDHDNTSVVEEPESIQEKIIQQTGTTPSAAEPKEASNKDDQSQIFDEEHRDHDNTSVVEEPESIQEKTIQQTGTTPSAAEPKEASNKDDQSQIFDEEHRDHDNTSVVEEPESIQEKIIQQTGTTQVTGEQHVQPAADISSSSKRSAGTVPTPVRPSSENSPAAPTPVHPTGLGRAAPLLEPASRVVQQPRA

SEQ ID NO: 183292 - protein, 49 aa, Glycine max
  Clone ID: PAT_MRT3847_136526C.1.pep
LLLPNEQVKTLHTLLSALAEQSLALTLGSALEDSQSQHTPLTSGESIDR

SEQ ID NO: 183293 - protein, 83 aa, Glycine max
  Clone ID: PAT_MRT3847_136527C.1.pep
RKRPHMLRCFHTFKVMDFSMWTNTIATNTVFQMYIFPLLNFFSSSKAIISYILCTVLFYNDKNALLVFCVYILFIFYLLKKSI

SEQ ID NO: 183294 - protein, 171 aa, Glycine max
  Clone ID: PAT_MRT3847_136528C.1.pep
MPLAVLHPHDFLRKNPSNQYQTIIPHSPNMNPNKSHRTSRNRKKRPDPSPQGVVSPARLTLSPKPQVKNKPQQQLVMGQVKILKRGQLLTQTTPDPPPQTEIVDQKLTPQTETVEKKDLTSIVDGLYAGYSMLVMSPPPSSVPLPAFITKKIAVVSDATSDLRKMLRLDFP

SEQ ID NO: 183295 - protein, 100 aa, Glycine max
  unsure (1)..(100): unsure at all Xaa locations
  Clone ID: PAT_MRT3847_136529C.1.pep
MASSTISDPAVTXVNHAQADIVTTFTDLKSKTALPTRNTNNDITSIGSNTGRVHFMQAYPAHNKNNTDTVSYLAHLYDAQXSKDEEYLIMNGWMNCLQFK

SEQ ID NO: 183296 - protein, 127 aa, Glycine max
  Clone ID: PAT_MRT3847_13652C.1.pep
QQHRRDLKIGLVGPNKQNKMVPTPTTPIPTQTTSWNLIHLEKTKIIATGCLIRWNPFVVGHHQNHSLWCMHPGQHEFEPFGGMLEMPCLDSSANTLSGEGGFKPKGKGSHGLLIASFTTLSTTSSAG

SEQ ID NO: 183297 - protein, 52 aa, Glycine max
  unsure (1)..(52): unsure at all Xaa locations
  Clone ID: PAT_MRT3847_136530C.1.pep
RYISPLETRTNFPLCICNFYGNFSSFXNIKSIFPLFFKLKKKKKNKKKKKKY

SEQ ID NO: 183298 - protein, 47 aa, Glycine max
  unsure (1)..(47): unsure at all Xaa locations
  Clone ID: PAT_MRT3847_136531C.1.pep
CXQXGLVKENPSTLQXATECSSVTKVTLKTQKLIGERILIHFXVHNS

SEQ ID NO: 183299 - protein, 78 aa, Glycine max
  Clone ID: PAT_MRT3847_136532C.1.pep
SLMISSPSVTNVYRSGAGMDGSFTDLKFMAGFPTRNTNKDITFIASSGGREQCMQVWTPRYKRRWGTLFYTDSTYDAQ

SEQ ID NO: 183300 - protein, 73 aa, Glycine max
  unsure (1)..(73): unsure at all Xaa locations
  Clone ID: PAT_MRT3847_136533C.1.pep
FLLNVSHVXXVVILLIRXGFXQRLSXXXLLGRHGCDAELGFRLXTKTXXRXTXHXTXXXXXXXSXXPSLRTRA

SEQ ID NO: 183301 - protein, 110 aa, Glycine max
  Clone ID: PAT_MRT3847_136534C.1.pep
AKTIPHHNFWSEQWLRRGLPQRSPLGHHRFPPSPVPTSSRILCRNINPATELTNNPATSAGWPRPTDMSSGGPQLVRLKTADVLIKMPTITLAIIFDNISIVTSYSCNYY

SEQ ID NO: 183302 - protein, 176 aa, Glycine max
  unsure (1)..(176): unsure at all Xaa locations
  Clone ID: PAT_MRT3847_136535C.1.pep
SSKISSPAATTVKRAYAGMIAPFTGLNHXAGFPTXKTALDITSIAIYPAKXQCLQEGPPFCKKKXETPSHLPHLDDAQRAKEVEYLPTHAWIPRVQFQLXHRFVSRDCYRTPXYYHGRYWTMYILPLSAYTDASHVLKDLQDANTAYPNGFIRIIGFDNAHQVQCISFIAYKPPCF

SEQ ID NO: 183303 - protein, 37 aa, Glycine max
  Clone ID: PAT_MRT3847_136536C.1.pep
VMSDRVDLVETFLNRKVNCVVWIMIHYKSAVSLTSRV

SEQ ID NO: 183304 - protein, 116 aa, Glycine max
  unsure (1)..(116): unsure at all Xaa locations
  Clone ID: PAT_MRT3847_136537C.1.pep
ILGWLRDIFPSXVRLYVRNDAVAALASGTMGKVHGCVLIAGTGSIAYGFTEDGKEARAAGAGPVLGDWGSGYGIAAHGLTAVVRAHDGRGPSTMLTSSILQTLGLSSTEALIGYIC

SEQ ID NO: 183305 - protein, 142 aa, Glycine max
  Clone ID: PAT_MRT3847_136538C.1.pep
GPELTTIRSPLNSPKEGLSFHTCFAKPWWEVRLILHHALSVLLYLKPLIAFQNELSEMQGEVQEIIVARSAENKCRKVSIQETKLIFSRNTANINNIRAHVLARILSFSLIARRGKFRTSTFTFASRKDQLPTFTRQLTSSN

SEQ ID NO: 183306 - protein, 113 aa, Glycine max
  unsure (1)..(113): unsure at all Xaa locations
  Clone ID: PAT_MRT3847_136539C.1.pep
MAKVLESEIKRGLLDRDYNNQPPAQFYNPAKLQRWTFFQALIAKFVATLFFFYLTILTVIGYNNKTATAAKPXSGFGVFGIVGPFEGIIFALVYGTAGLXGGHINPAGTFGWF

SEQ ID NO: 183307 - protein, 66 aa, Glycine max
  Clone ID: PAT_MRT3847_13653C.1.pep
KISEGWIRSMSNQFAMTRLRSPTSPLFYACSAPTLDCGTLFTRALFTPRFVVSFGGVLMSKYEGFG

SEQ ID NO: 183308 - protein, 53 aa, Glycine max
  unsure (1)..(53): unsure at all Xaa locations
  Clone ID: PAT_MRT3847_136540C.1.pep
YIKNTQSRKLSHTMTDLPAIENDXWSRTPSYKSLFKRRIHIKSYNEISSNDIH

SEQ ID NO: 183309 - protein, 52 aa, Glycine max
  Clone ID: PAT_MRT3847_136541C.1.pep
ISLVSRVAIVSPDPPMRHHQLMDNTTYLTKSCSQSPSSIPTITKTTVTMTTT

SEQ ID NO: 183310 - protein, 49 aa, Glycine max
  Clone ID: PAT_MRT3847_136542C.1.pep
NGSNLTYSWLTHRRRDAVQPNWYFTQHWPGTIDPTGNTRLSYPRSGSWL

SEQ ID NO: 183311 - protein, 169 aa, Glycine max
  Clone ID: PAT_MRT3847_136543C.1.pep
MKREGRQHGMVRSYRILPNSLNPRPNTRFITQFDAPPTAGFFVKVSSKPTNHSKFTGKCGTPRCTGCHLHPACKSKDKTKGTQKRKHWRVIVDQPNSDFFGLSATVTLDNLSHDYYEDESGDRVDYSGTLDDYDGENNNGNKCVSEIGGSFQMDQVAEDEDWLLVESCS

SEQ ID NO: 183312 - protein, 104 aa, Glycine max
  unsure (1)..(104): unsure at all Xaa locations
  Clone ID: PAT_MRT3847_136544C.1.pep
LYGGKAAATATAHSVSSRAYLEGNAVKEPRILISELCQHFYAXGWVXGTGGFFSIGCHQXSIYKPDQLIAMSPSGGRNETMRPEDMFVLSHTGSCWRLHIPSYR

SEQ ID NO: 183313 - protein, 339 aa, Glycine max
  Clone ID: PAT_MRT3847_136545C.1.pep
MGSLENNGVDKARDEQEPILMEQSQRFCMFPIRYKQIWEMYKKAEASFWTAEEVDLSYDVQHWETLSVSEKHFITHVLAFFAASDGIVLENLAARFLSDVQIPEARAFYGFQIAMENIHSEMYSLLLETYIKDSREKHKLFNAIENLPCVARKAEWALSWIHSSTSFAERLVAFACVEGIFFSGSFCAIFWLKKRGLMPGLTFSNELISRDEGLHCDFACLLYSLLRKPLISDQVHKLVHEAVEIETEFVCDALPCALIGMNSVLMSQYIKFVADRLLVALGYQRKYNVENPFDWMEFISLQGKANFFERRVGDYQKASVMSSLQDAGKNFVFKLDEDF

SEQ ID NO: 183314 - protein, 183 aa, Glycine max
  unsure (1)..(183): unsure at all Xaa locations
  Clone ID: PAT_MRT3847_136546C.1.pep
MEVNIEKTLLMCKSFMKEVKIWGCLKQTGVSLRYMMEFGSNPTQKNLLISAQFLHKELPIRIARRAIELHSLPHGLSHMPPVLKXWYLDSFREIISFPEIKNMNDEKEFTELIKAIKVRHNNVVPTMALGVQQLKNVFEDPDEIDEFLDRFYMSRIGIRMLIGQHVELHNPNPPPNCVGYIHT

SEQ ID NO: 183315 - protein, 164 aa, Glycine max
  Clone ID: PAT_MRT3847_136547C.1.pep
TRRREDDRRVRLREDDRRVRLGEDDRRVRVQENNRRGVGRGLMGYLGNKGSISISMSVHETSFCFICSHLTSGQKEGDELRRNSDVMEILKKTRFPRVQGVDNEKSPQTILEHDRIIWLGDLNYRIALFYRSANALVEMQNWRALLKNDLLSVERWWWWCWVGC

SEQ ID NO: 183316 - protein, 276 aa, Glycine max
  Clone ID: PAT_MRT3847_136548C.1.pep
YVGHPNPLKEGQDLFRKGLLSEAVLALEAEVLKNPENAEGWRLLGIAHAENDDDQQAIAAMMRAQEADPTNLEVLLALGVSHTNELEQTAALKYLYGWLRHHPKYGTLAPPEMADSLYYADVARLFNDAAELSPDDADVHIVLGVMYNLSREYDKAIASFERALKLKPQDYSLWNKLGATQANSVQSADAIMAYQQALDLKPNYVRAWANMGISYANQGMYDESVRYYVRALAMNPKAENAWQYLRISLSCASRNDMLEACDSRNLDLLQKEFPLQ

SEQ ID NO: 183317 - protein, 154 aa, Glycine max
  Clone ID: PAT_MRT3847_136549C.1.pep
ERFRELEDYWNESQGNLRLGPPAPDGWISEFSQQREKYDNPDSWANSFEQQYGANGWVSEFEHSQLSSVDQMRGMNMSNFAAREQTRMLANTLAQNGDPKFQNSKFLQFVSKMSRGELIIDDNQVKENALPASGDWATEYNQQYNHGHAWAGEF

SEQ ID NO: 183318 - protein, 107 aa, Glycine max
  Clone ID: PAT_MRT3847_13654C.1.pep
NPFPGMHQDAWACPVLPIPPQAPGFPYSQNMPALLNADAADHTFTMPQSSFEHYLAEKVVDKVVKEAINKPWLPLPLGLKPPSTESVLAELSRQGISNIPPKGSKSC

SEQ ID NO: 183319 - protein, 69 aa, Glycine max
  unsure (1)..(69): unsure at all Xaa locations
  Clone ID: PAT_MRT3847_136550C.1.pep
IEPAIHAMAVKFSDVDLPQIAADESPDVAQEFQVQAIPHFVLXNHRKQVDKVLGAKMHELDNNIEHHPS

SEQ ID NO: 183320 - protein, 489 aa, Glycine max
  unsure (1)..(489): unsure at all Xaa locations
  Clone ID: PAT_MRT3847_136551C.1.pep
YDNADSWANSFEQQYGANLXEDDRRDSQLSSVDQMRGMNMPNFAAMEQTRMLANTLAQNGDPKFQNSKFLQFVSKMSRGELIIDDNQVKENALPASGDWATEYNQQYNHGHAWAGEFLNDKVYHGPDQWANEFTSEGRQHDAVDDQWVNEFSKLKVNDWADEFGQQFGEGALGDSTSDSWAQAYDEFLNEQVAAKQQLDXASRGVYVFSXLNPYVGHPNPLKEGQDLFRKGLLSEAVLALEAEVLKNPENAEGWRLLGIAHAENDDDQQAIAAMMRAQEANPTNLEVLLALGVSHTNELEQTAALKYLYGWLRHHPKYGTLAPPEMADSLYYADVARKFNEATELSPDDADVHIVLGVMYNLSREYDKAIASFERALKLKPQDYSLWNKLGATQANSVQSADAIMAYQQALDLKPNYVRAWANMGISYANQGMYDESIRYYVRALAMNPKAENAWQYLRISLSCASRNDMLEACDSRNLDLLQKEFPLQ

SEQ ID NO: 183321 - protein, 75 aa, Glycine max
  unsure (1)..(75): unsure at all Xaa locations
  Clone ID: PAT_MRT3847_136552C.1.pep
QRKRKKKRKMCRLFFTVAFLRVPLPLXGPPIRSLTRFVEPMEYVVRDPRPPRNRVYPRLRVAWFRMLDIMLCNPR

SEQ ID NO: 183322 - protein, 143 aa, Glycine max
  unsure (1)..(143): unsure at all Xaa locations
  Clone ID: PAT_MRT3847_136553C.1.pep
ALSNIPYYEKHRYGADELNETLYEEWVHNGYAPALPNTLKNDNKLXSLGYNIAFSPRKYLANKGRAIAKPNKGCFHTWDRVIVKGPHFMTPNALLYKSAMRENLLRHGYRIVGIIGDQWSDLLXDHRGESKTLKLTNTMYYIE

SEQ ID NO: 183323 - protein, 78 aa, Glycine max
  Clone ID: PAT_MRT3847_136554C.1.pep
MSIMVQLMNHNVDSLFLIGVVMSEESPESRLVILFLSSGYSFGLIHERALTFTCSYWQKWFREHAECLDMRMCLLQSV

SEQ ID NO: 183324 - protein, 48 aa, Glycine max
  Clone ID: PAT_MRT3847_136555C.1.pep
QKPCYQPDLCRLQLSVVWLVREYHVEMGCCIVSMYIYKKILRFEQLVK

SEQ ID NO: 183325 - protein, 152 aa, Glycine max
  Clone ID: PAT_MRT3847_136556C.1.pep
MTTTVSTDFLPLFNPHPNRTNSHSNSRTLPILNETTNINRTLSSVSKPQTHTLDFKDTHLLKSLSRSCKAGNFNESLYFLRHLVNKGHKPDVVLCTKLIHGLFTCKTIDKAIQVMHILENHGHPDLIAYNAIITGFCRAHRIDSAYQVLDRM

SEQ ID NO: 183326 - protein, 195 aa, Glycine max
  Clone ID: PAT_MRT3847_136557C.1.pep
RLEHTVLYELQNKKLNWIWYVNQPEPEVKGTSVTMKVNNDMIQKMHQEAEQVWIPELVKVIKETKDPFLNFIYDSDPLEKIFWDNVVLVGDAAHPTTPHCLRSTNMSILDAAVLGKCIEKWGPEKLGSALEEYQFVRLPVTSKEVLYSRRLGRLKQGLVLPDREPFDPKLIRPEDCQELLLRNTPFFNDEPLSLL

SEQ ID NO: 183327 - protein, 65 aa, Glycine max
  Clone ID: PAT_MRT3847_136558C.1.pep
TIICKDKDLINEYEILKVQQRYNSNYSLAVLQSSMDMILYESIPPEIFSFQIQIHSLLFSSLLRL

SEQ ID NO: 183328 - protein, 508 aa, Glycine max
  Clone ID: PAT_MRT3847_136559C.1.pep
MNLLLAAVTLLVFYAAKFFYSNFWVPWRTERHFKRQGIGGPGYRPIFGNTSEIRRLYAEAKSEASASPPPFHHDIMGRVAPFYDRWSRAYGKTFLYWFGSTPRLAVTEPDMIKEVLMNTRGEYVKVPFNPQSKLLFGQGLVGLEGDQWALHRRIINLAFNLELVKGWVPDIVASVTKKLESWEDQRGGRDEFEIDVLRELHDLSADVISRTAFGSNYEEGKHIFNLQEQQMHLFSQAVRSVYIPGFRYLPTKKNKDRWRLEKETRESILKLIETKSNTRENARNVLSSLMCSYKNDAGGEEKLGVEEIIDECKTIYFAGKETTANLLTWALLLLAKHQEWQSKARKEVLHVIGRNRLPAADNLNDLKIVTMIINETLRLYPPAVMLMRQASKDVMLGSINIPAKTQLFLALTAVHHDREIWGEDYHNFNPMRFSPRVRPRVRFFPFGLGPRICVGQNLALVEAKIALALIIQSYSFVLSPNYMHAPILFVTLQPQYGAQIIFRKISYC

SEQ ID NO: 183329 - protein, 104 aa, Glycine max
  Clone ID: PAT_MRT3847_13655C.1.pep
GPEASPDLKTVQYVTQDGGSPMIVPVPYYRHILASQGLLIVGHQLANDKRTKPHGRTWPRACSIYSQEFSTAMAMLSENNPPAGSKGEVKKQGNVAIEHHGQSP

SEQ ID NO: 183330 - protein, 118 aa, Glycine max
  Clone ID: PAT_MRT3847_136560C.1.pep
MASLKVAFVVAVLYMVVVSAHMAHARINCGRVAVAVSPCLGYLRRGGRPQARCCNGVRNLHALAKTTVDRRTACNCLKTFARGLGRGVNANNAAALPRKCRVNIPYKISISTNCNTIR

SEQ ID NO: 183331 - protein, 460 aa, Glycine max
  unsure (1)..(460): unsure at all Xaa locations
  Clone ID: PAT_MRT3847_136561C.1.pep
MAKTLISSQSFIGTPLPSLPRHHLPHRTRLVATKVLVSLHEIPPIHSISRNIDFAGIVTRAEGLLYTLADAAVAADPAVAADSAASTTDAAVQKSGGWFGFISEAMEFVLKVLKDGLSAVHVPYAYGFAIILLTVIVKAATLPLTKQQVESTLAMQNLQPKIKAIQDRYAGNQERIQLETSRLYRQAGVNPLXMGCLPTLATIQVCIGLXQAISNLANDVLXIPSLGGPTTIAARQSGAGISWLFPFVDGHPPLGWQDTAAYLVLPILLVVSQYVSMEIMKPPQTDPSQKNQLLILKFLPLMIGYFSLSVPSGLTIYWFINNVLSTAQQVWLRKLGGAKPVVNENAGGIITAGRAKRSDSQLARNGERFKQLKEEEKKKKVSKALPVEEVQSLASVSASDDGSDTESDNKGQEDAEEAYASKVGEEVQNYSRGSKSNRGKEEASVRSGSVLYKGPHTISL

SEQ ID NO: 183332 - protein, 289 aa, Glycine max
  unsure (1)..(289): unsure at all Xaa locations
  Clone ID: PAT_MRT3847_136562C.1.pep
RVRPRVRTSRLYRQAGVNPLAGCVPTLATIPVWIGLYQALSNVANEGLLTEGFLWIPSLGGPTTIAARQSGAGISWLFPFVDGHPPLGWQDTAAYLVLPILLVVSQYVSMEIMKPPQTDPSQKNQLLILKFLPLMIGYFSLSVPSGLTIYWQVRFGPKTPVXFINNVLSTAQQVWLRKLGGAKPVVNENAGGIITAGRAKRSDLQPVRNGERFKQLKEEDKKKKVSKALPVEEVQPLASVSASDDGSDTESDNKGQEDAEEAYASKVGEEVQNYSRERRSKRSKRKRAV

SEQ ID NO: 183333 - protein, 79 aa, Glycine max
  Clone ID: PAT_MRT3847_136563C.1.pep
LFFFFFFFLNRAHYVYITRNYYMHKQCILGESLETRPFFCGSGLATRTNRQDRTNTQKYGETTRLKKPKTYRTHGRTHE

SEQ ID NO: 183334 - protein, 122 aa, Glycine max
  unsure (1)..(122): unsure at all Xaa locations
  Clone ID: PAT_MRT3847_136564C.1.pep
QCTTTAKATVCIQPQLWQPSSGILKTHDISDANPEDAPTCFAXLKSDSNDMSASGGKKYLFNKMTSKTMATIMRPQPTAEFIAXXPEDNNDIAIGMADIYILIQDARVDEGNTXLTGHHKRM

SEQ ID NO: 183335 - protein, 68 aa, Glycine max
  Clone ID: PAT_MRT3847_136565C.1.pep
GITKLPISAIPERSQPHSIPDLSARTFCGTMQINLTINEITSYLVLNSDELVIQNTHLTNSQRQVSSF

SEQ ID NO: 183336 - protein, 55 aa, Glycine max
  Clone ID: PAT_MRT3847_136566C.1.pep
NKHKLPPIKTMNLVVPPHRPDMYFAGLHDEAVGYKHKNHMKRLVSQQLMLKTRVN

SEQ ID NO: 183337 - protein, 238 aa, Glycine max
  Clone ID: PAT_MRT3847_136567C.1.pep
TPIEHQSAALNTNSTPMGQEEEKSQENKVEEKKVEEEEKKEEEKKSDEKKFKEKSAPPEIVLKVFMHCEGCARKVRRSLKGFPGVEDILTDCKSHKVVVKGEKADPLKVLKRLQKKSHRKVELLSPIPKPPPEEEKKPQEDQEKPHPEEKKEEPRVIPVVLKVHMHWEAWAQEIKRRIEKMKGVESAEADLKKSEVSVKGGFETAKLVEHGSKRPGKHAVIVKQEAEKKKEEKKAEEE

SEQ ID NO: 183338 - protein, 32 aa, Glycine max
  Clone ID: PAT_MRT3847_136568C.1.pep
CEGASERTTARLVYVLMLSASFLHLYKLMKKL

SEQ ID NO: 183339 - protein, 76 aa, Glycine max
  Clone ID: PAT_MRT3847_136569C.1.pep
WGPRAGQFGPGKKILKGKSQVKVKSPARFKGPLKLIGQKIKRRGKDGFSINWGIFGWYPVVGFPLSFSNKPPNSFS

SEQ ID NO: 183340 - protein, 132 aa, Glycine max
  unsure (1)..(132): unsure at all Xaa locations
  Clone ID: PAT_MRT3847_13656C.1.pep
MIPLWVMNVVSSYATNTLPVVFDRGLIGPXHDWCEAFSTYPRTYDLLHLDGLFTAEXHRCEMKNVLLEMHRILRPWGHAIIRESSYFTDAITTIGKGMRWECRKEDTENGSDMQKILICQKKLWYSSNQGSR

SEQ ID NO: 183341 - protein, 101 aa, Glycine max
  Clone ID: PAT_MRT3847_136570C.1.pep
SLVGAPAMVIAFSLGMGAMPWIIMTDILPIYIKGLARRVTSLANWMISWLVTLTTNMLMDWTSGGTFTIYAVICALTVLLVTIRVPDTNGKTIEEIQWSFR

SEQ ID NO: 183342 - protein, 58 aa, Glycine max
  Clone ID: PAT_MRT3847_136571C.1.pep
ARGPHSHLCYIKRAPTRSWQQCACVANPNYLISMVLQKHTVEEGDPREGDINLITQYE

SEQ ID NO: 183343 - protein, 102 aa, Glycine max
  Clone ID: PAT_MRT3847_136572C.1.pep
AISKFIVRIIGSCLLFFDAAVIMVTWTCHGARYQKFPLRMKTGYGERSSQVKCARFTLAVVSHIIRAFKTTPEQCVDTSMDYINGEQFRSYSKTLNQQAFIY

SEQ ID NO: 183344 - protein, 178 aa, Glycine max
  unsure (1)..(178): unsure at all Xaa locations
  Clone ID: PAT_MRT3847_136573C.1.pep
MLLDKNDTQETHYEVLNVKEDANYEEIRASYRSAVLSLHPDKLLKTSETSSSNQTAEERFLKVQKAWEILSNSSSRSFYDNDLRSSRQDVLAADVAEDLSLQDMMIEDDGEALELFYQCRCGDYFSVDSLELKNMGYSLLREGSGISIMNVDTSPGSVILPXGSCSLKARLLINMDVN

SEQ ID NO: 183345 - protein, 133 aa, Glycine max
  Clone ID: PAT_MRT3847_136574C.1.pep
PSVGWQLWQVDQNPGENLFRRRVTTITGSKRNWGYNDWPASQPPPKERSSIWGWDLEANNDTETLEEYHKESGKELSYGTLKAVFAIKASSDHLILRIHWMMFHLHWGTLQSRMKDLCLQQGLQLVLMLVFRT

SEQ ID NO: 183346 - protein, 48 aa, Glycine max
  unsure (1)..(48): unsure at all Xaa locations
  Clone ID: PAT_MRT3847_136575C.1.pep
ATLXXSSXRVRMNLRGGARGVRGEXXLRSASSLXRRXGLFLGXSCGGS

SEQ ID NO: 183347 - protein, 336 aa, Glycine max
  Clone ID: PAT_MRT3847_136576C.1.pep
MNHVEHIAYDMVMITLSISLIVLAIILFLACKKKPVESEETLPVKLCARAYPLMEIDAATDGFNPRRIIGQGRLGTVYAGTLDKEEQQLVALKRIHPFLVLSNAGFGFSSVLKWLSLAQHPNVVPIIGFSEAPGERVIVMEFVHMASLDFYLHQNQDGASLLDWNKRFRIAAGVARGLQYLHEVVAPNIVHGCVKSSNILIDVNFCARICDYGLNFLAPVEKRGIVGYVDDEYWSERRGGVATKESDVYGLGVVLLELLSGKGCEGGMLVKWALPLIRETSFSELLDPRLVIPSDMKPLVRLAKVASACVGNSRKCRPSMAQVATILNNLETEVCL

SEQ ID NO: 183348 - protein, 110 aa, Glycine max
  unsure (1)..(110): unsure at all Xaa locations
  Clone ID: PAT_MRT3847_136577C.1.pep
LEAVGEAAYAEXTWGDNXQLTIPANGADIINLYANQIPTMVILISGRXMTLXPQILENIDALDAAWVPRNEGXGIIYVIFCKHDFKDKLPKTWFKRVEPTISQIGVDNKH

SEQ ID NO: 183349 - protein, 63 aa, Glycine max
  Clone ID: PAT_MRT3847_136578C.1.pep
KKYFGPIFKNPPKGYRGSLAGGLKHWIKFLFLLSSSRFLILKFLLSLPNSINLGINGTFSLVF

SEQ ID NO: 183350 - protein, 84 aa, Glycine max
  Clone ID: PAT_MRT3847_136579C.1.pep
GAFSPSATGQLVVSLFFGILCRTPSHFLCGQRSLSGPYTILILCAYLLTLNPLSSFFYVSPPPPPPLPLPPPPPPPPPPPKRRT

SEQ ID NO: 183351 - protein, 172 aa, Glycine max
  Clone ID: PAT_MRT3847_13657C.1.pep
LELWSNENGGVDVSLKDGLFSQIGKESALLEHSLIPEFSDGEGDYTEEFAGFMGRNTSHGVSKSTTTSPLRSRTQATVDSIKIFETPRKLIHSLQDSSDLSLGCSKKEQNGRYRSLSSDDNMEWSPSCKYNQNGFSDDMNKCDSEVIEGCAEVEFQGGSESVSLTNDNNILC

SEQ ID NO: 183352 - protein, 101 aa, Glycine max
  unsure (1)..(101): unsure at all Xaa locations
  Clone ID: PAT_MRT3847_136580C.1.pep
GWVSSXCGGLPXVVRGLXGGFPPPXXXXLGFFGXRCPXXXXXXGCXXXARXXGCLXXPFWRCXVPXGPXFVXXGFFVAFXXFLLXXLRFVALXLKTSXXXF

SEQ ID NO: 183353 - protein, 84 aa, Glycine max
  Clone ID: PAT_MRT3847_136581C.1.pep
IIILPFPLKRKYHKWVFWRFEDEITSPVAPATLYKALVSDAVNIIPKALDSLKSVANCKGNGSFCHIHSDIFCFLFVKPMFVCS

SEQ ID NO: 183354 - protein, 70 aa, Glycine max
  Clone ID: PAT_MRT3847_136582C.1.pep
SLFSSPSLLISFLSPITSSFAATILTSSSSIQLSNLVTPSSSCSGSSTSDSTDSSTSKHSEYPSVVFSQP

SEQ ID NO: 183355 - protein, 47 aa, Glycine max
  unsure (1)..(47): unsure at all Xaa locations
  Clone ID: PAT_MRT3847_136583C.1.pep
QIKKMEVSKRNKFLCEXXGKYAVKRRAVRIWXCKDCGKMNAGGAYTM

SEQ ID NO: 183356 - protein, 125 aa, Glycine max
  Clone ID: PAT_MRT3847_136584C.1.pep
LSCFRKNVGVFLLFGETFLLVFGKKKPSKFLCAPLKGKLGYFQGGGKKGPKGKPGFLVNQNLVGEWLGFPIFFPQRGRGGGPLSLNPLNLWGVSPPFGKPPRNQVFPKANGGGLFQPGSKGLLFL

SEQ ID NO: 183357 - protein, 60 aa, Glycine max
  Clone ID: PAT_MRT3847_136585C.1.pep
NGANFFLKELIGGLAPKNEGPKSPVSFCFVTGASPVFFSRGVSAEPNPPLLNLMFYSKKT

SEQ ID NO: 183358 - protein, 65 aa, Glycine max
  Clone ID: PAT_MRT3847_136586C.1.pep
TRGKGFFIRWILWLLKQHISASKGYGNIFSYLGEQGVNINWAGLMLNFKNQNTFILLKILFGKKK

SEQ ID NO: 183359 - protein, 98 aa, Glycine max
  Clone ID: PAT_MRT3847_136587C.1.pep
FFPTLYLHASPKSPSKQMSWGGGKKNAPGPPPKNKQAFPKIHLKQGAPKNSPHRVPPPGGKPPPKIFWVETPAPFPKKSKAEKPPGGGPSPPLFLLGG

SEQ ID NO: 183360 - protein, 204 aa, Glycine max
  Clone ID: PAT_MRT3847_136588C.1.pep
MSDKNNMVIASKTATGSSSSSSRMSTKTFSGLGNLVKLLPTGTVFLFQFLIPVVTNSGHCTTLHKYLTGSFLVVCAFNCAFASFTDSYTGSDGERHYALVTAKGLWPSPASESVNLSAYKLRFGDFVHAFFSLVVFAVLGLLDTNTVRCFYPAFESAEKILMQVVPPVIGAVASTVFVMFPNNRHGIGYPTSSDSNDTQHKSQT

SEQ ID NO: 183361 - protein, 99 aa, Glycine max
  Clone ID: PAT_MRT3847_136589C.1.pep
LRSLYKIYSYFFLSHLNGITIFTSNITLFSCKFNSLPKEYIPAKLLLKNKYSNKEIRSTLPITGSIFSTFIKKTRSLTGKTDKMPLLAHLIATWINTNH

SEQ ID NO: 183362 - protein, 58 aa, Glycine max
  Clone ID: PAT_MRT3847_13658C.1.pep
LFKAGNMGLIIFDTSLTKFMTLINPYSYPISLGTRRFHIHQYMDPPIQLKLCRLNFIP

SEQ ID NO: 183363 - protein, 74 aa, Glycine max
  Clone ID: PAT_MRT3847_136590C.1.pep
SLTYAVKVYQYRPSVCSSRVALAGPTAVLYDPLFTSGFIRRLSPEKLYLWIIPYLSFQNIMVASVCMYHNGFES

SEQ ID NO: 183364 - protein, 63 aa, Glycine max
  Clone ID: PAT_MRT3847_136591C.1.pep
RIPTLSQVNTVMAHRISRHGHYIAKGASALDEYANIRSSLTQDIFEYVDLSDYGYAQLYRAYA

SEQ ID NO: 183365 - protein, 93 aa, Glycine max
  unsure (1)..(93): unsure at all Xaa locations
  Clone ID: PAT_MRT3847_136592C.1.pep
FNINLQQLDKWVWTNDTTGKHTVRSEYQSLDKNQKDDNTEGIFHAIWKLKIPNKVAFFVWRLMRNRLPIKLTLTRRNTXINDTLSPFCTYNNR

SEQ ID NO: 183366 - protein, 65 aa, Glycine max
  Clone ID: PAT_MRT3847_136593C.1.pep
HHTGDSLTSIHPSLAHLFAPPNYSQTLYLLGKGDFKVKPTILFLLFFFNLWGLQPIITFLNRTRG

SEQ ID NO: 183367 - protein, 81 aa, Glycine max
  Clone ID: PAT_MRT3847_136594C.1.pep
AKDVEVAERGSFSGKDYQVPPPAPLIDAEELTKWSFYRALIAEFIATLLFLDITGLTVIGYKHQTDHADACGGVGILGIAW

SEQ ID NO: 183368 - protein, 62 aa, Glycine max
  Clone ID: PAT_MRT3847_136595C.1.pep
DTQSDSHVYDSSNVALQGIGCMDHASACYNPAQERDAILVVTYAYTKAISQSDAAHDAWICC

SEQ ID NO: 183369 - protein, 54 aa, Glycine max
  Clone ID: PAT_MRT3847_136596C.1.pep
NLQILCVGGYLVYSKIFDSLILVLYIVLVNHSSAPVDAMLYVNQYHLYCFHYYL

SEQ ID NO: 183370 - protein, 60 aa, Glycine max
  Clone ID: PAT_MRT3847_136597C.1.pep
FGLADFVDLVLSVLKNHFKPRIALCTSKQANAQNLMLKVDIRLRNAHVFLKGSIEWDVSV

SEQ ID NO: 183371 - protein, 185 aa, Glycine max
  Clone ID: PAT_MRT3847_136598C.1.pep
ISEQDSGVIMFRLKSCEGPVRYLYQQTWHHLYHNNIMAYLVGYDPCSHLSKAFSQYPSLSFSDRGSYLSFPFLRNLVYANVFGVSRSIGFGTRGCSFDTSGSCSGNSDRIFVRAKTRSRGFASNRRQPMLADLEQRNSVRSDESDATLVKVDNGSINGSPAKPPCFSDHRLSQKLVVAVDVDEDM

SEQ ID NO: 183372 - protein, 49 aa, Glycine max
  Clone ID: PAT_MRT3847_136599C.1.pep
KFHPHKISVIEHKKDFYEIVLKLFYMIFKQNVFIGELIVVSIIKVRDYR

SEQ ID NO: 183373 - protein, 45 aa, Glycine max
  Clone ID: PAT_MRT3847_13659C.1.pep
AAVVDVRASFSTQDFIEGGVEGQGIHTDGFGQGQQHVVIGDSATF

SEQ ID NO: 183374 - protein, 78 aa, Glycine max
  Clone ID: PAT_MRT3847_1365C.1.pep
FLVKLASNFTKRKKDHPKRKRTRLFLLGFFLTTQKIRKMLTCTDPRLFNAEFLCGQPLKTEKKWQKEEREGYYGIVRK

SEQ ID NO: 183375 - protein, 208 aa, Glycine max
  Clone ID: PAT_MRT3847_136600C.1.pep
MILIISLIFSLLSFSHASVLDFCVADYAGPIGPAGYSCKKPSKVTADDFAYSGLGIAGNTSNIIKAAVTPAFDAQFAGLNGLGISAARLDLAAGGVIPLHTHPGASELLVVIEGSILAGFISSANIVYLKTLKKGDVMAFPQGLLHFQINAGKSSALAIVSFSSSNPGLQILDFALFKSSFPTPLIVQTTFLDAALVKKLKGVLGGSG

SEQ ID NO: 183376 - protein, 101 aa, Glycine max
  unsure (1)..(101): unsure at all Xaa locations
  Clone ID: PAT_MRT3847_136601C.1.pep
MGVEKQLLRSGTGPKPIPGQNVTVHCTGFXTKDPGQNPFTFKIGQGSVIKGWDEGVLGMQIGEVARLRCSPDYAYGAGGFPAWGIRPNSVLEFEIEVLSAQ

SEQ ID NO: 183377 - protein, 104 aa, Glycine max
  Clone ID: PAT_MRT3847_136602C.1.pep
MGVEKQLLRPGTGPKPIPGQNVTVHCTGFGKNGDLSQKFWSTKDPGQDPFTFKIGQGSVIKGWDEGVLGMQIGEVARLRVLLSILCSYFFLFPLEKYYIQYVNC

SEQ ID NO: 183378 - protein, 131 aa, Glycine max
  Clone ID: PAT_MRT3847_136603C.1.pep
QQGWRYTWEAQSHIPTLRLTLFPNDKTLNPSLQCKDLAVDLHSSHSFLTLTASFLSLRVPLPAVLVDGDSPVAFRPLSDHIEVKLLLLLPVDHPILSALDLSQTPPPDPLDSQSDVKILSSAGEVDFYCRT

SEQ ID NO: 183379 - protein, 112 aa, Glycine max
  Clone ID: PAT_MRT3847_136604C.1.pep
MGVEKQLLRSGTGPKPIPGQNVTVHCTGFGKNGDLSQKFWSTKDPGQNPFTFKIGQGSVIKGWDEGVLGMQIGEVARLRCSPDYAYGAGGFPAWGIRPNSVLEFEIEVLSAQ

SEQ ID NO: 183380 - protein, 73 aa, Glycine max
  Clone ID: PAT_MRT3847_136605C.1.pep
TPSNWHEQFYILLGCMYRIKNDTKGNYTLHTTMPMYLQLQVIALLKIVNCQCLKMVPFNNIHLKGNLAMTYRK

SEQ ID NO: 183381 - protein, 70 aa, Glycine max
  Clone ID: PAT_MRT3847_136606C.1.pep
CKIMLPYAGIEPQNERDESKRTLVKSFLLRISRLANLEKYVQCAYCKSRYMFGIVELGQSFEYHKVWALY

SEQ ID NO: 183382 - protein, 37 aa, Glycine max
  unsure (1)..(37): unsure at all Xaa locations
  Clone ID: PAT_MRT3847_136607C.1.pep
ITDRYHPKRSCYAVRVKQSLNEYXKNMFAPRIAIKES

SEQ ID NO: 183383 - protein, 60 aa, Glycine max
  unsure (1)..(60): unsure at all Xaa locations
  Clone ID: PAT_MRT3847_136608C.1.pep
SRGIGQYSRSQMYHKSGQFGYXATNGCVFTRHGAKSQPETPAEKSPPFYPAVDGTKLLVN

SEQ ID NO: 183384 - protein, 295 aa, Glycine max
  Clone ID: PAT_MRT3847_136609C.1.pep
FPFVRLRVRLSIIGSLRHRNLVRLQGWCHEKGEILLVYDLMPNGSLDKALFEARTPLPWAHRGKILLGVASALAYLHQECENQVIHRDIKTSNIMLDEGFNARLGDFGLARQTEHDKSPDATVAAGTMGYLAPEYLLTGKATEKTDVFSYGAVVLEVASGRRPIEKDANGGGKGGISCNLVEWVWSLHREARLLMAADPRLEGEFDEGEMRKMLLVGLACSHPDPLTRPTMRGVVQILVGEAEVPLVPRTKPSTGFSTSHSHLLLSLQDSVSDCDGIITISTSTSENSFNLGDIV

SEQ ID NO: 183385 - protein, 153 aa, Glycine max
  unsure (1)..(153): unsure at all Xaa locations
  Clone ID: PAT_MRT3847_13660C.1.pep
QIFVKTLTGXTITLEVESSDTIDNVKAKIQDKECIPPDQQRLILSGKQLEDGRTLADYNIHKESTTYLVLRLRGGAKKRKKKTYTNPKKIKHKHKKVMLGILXFYTVDDSGXVHRLTMECPYAESGAGTYMAVHYDRHYCCKCGVTYVYQKAD

SEQ ID NO: 183386 - protein, 358 aa, Glycine max
  Clone ID: PAT_MRT3847_136610C.1.pep
MMTSHEEDLDLLLSLDERVAETPPSSPTISDDDDDELELPNQRERDKPDMSVFKSALQDCLPYDPPKPTNKPVINVDSHLEKFSGLRIRNQLLTPAELKEHFSDIRFVRLSVIKNSLVGDTVSGSWATVGVLTEKGTQKTSSTGKSYCIWKIGCLDETTVSLFLFGDAYQMNMQEQAGTVFALFNSTVRKDNAGNGFSLSIYSTRQIMKMGTSVDYGVCKGKRTDGMACTLVINKRHGTYCKYHKSKASEKYSSMRTELKGGNLRTAFRPMGYLKSEGIYLVDPLADKTNLKKSQPVKLLSRDGIRKALSNAGKVTTASHSQGIRFLFEVAAKSDPKMKNKGSNFQMFKTNGQRRGNH

SEQ ID NO: 183387 - protein, 48 aa, Glycine max
  Clone ID: PAT_MRT3847_136611C.1.pep
LFLFLNPISLTTTFGISIDFCYFLILRCFTFQKCLKYNICFHIRKFIK

SEQ ID NO: 183388 - protein, 60 aa, Glycine max
  Clone ID: PAT_MRT3847_136612C.1.pep
DVFWSKPNGCPTRLLSKISRCSIDSSGGNISTFSVQRISNSSIHLPPLGSTPSRKIKWYI

SEQ ID NO: 183389 - protein, 54 aa, Glycine max
  Clone ID: PAT_MRT3847_136613C.1.pep
VVQVCYSYTYILGCTNQILDIASMQLWKHHFLSFLSLRKGVFQFATKRYRKKNK

SEQ ID NO: 183390 - protein, 70 aa, Glycine max
  Clone ID: PAT_MRT3847_136614C.1.pep
SGLDSFHPHTNFGATSILDFSSFFSSRSLFHYVTNLLLLTTAKTHLVLRSIRHCQRQFLATATTLLLRSN

SEQ ID NO: 183391 - protein, 116 aa, Glycine max
  Clone ID: PAT_MRT3847_136615C.1.pep
MASSEGFLTDGQRELLKIASQNAENLSSSPKSPSSLLSDHHVKAPAGGKSQTSGIAVRHVRRSHSGKYGKVKKDGAGGKGTWGKLLDTDIDSHIDRNDPNYDSGEEPYQLGWNYCC

SEQ ID NO: 183392 - protein, 47 aa, Glycine max
  Clone ID: PAT_MRT3847_136616C.1.pep
TLPIWSLRTFTAILFISQLLILTPPLTYRNIKLLIISQQSFLMNPWL

SEQ ID NO: 183393 - protein, 116 aa, Glycine max
  unsure (1)..(116): unsure at all Xaa locations
  Clone ID: PAT_MRT3847_136617C.1.pep
INKALFFILYISLLSYLINLNLSYTTYKLIAXYILIYRSRMDLSCNPMTISLPLNNPSHLPKXHYHCTITCQSTVENNEMILYPHAIFMHPFTSANNILVICDAYTPSGKPISTYN

SEQ ID NO: 183394 - protein, 60 aa, Glycine max
  Clone ID: PAT_MRT3847_136618C.1.pep
MPIRNIAIGRPEKATHPDTLKAGLAEFISTLIFLFARSSSGIAYNKLTDNGAANPGGLNS

SEQ ID NO: 183395 - protein, 43 aa, Glycine max
  Clone ID: PAT_MRT3847_136619C.1.pep
YFQGQWVNNDLSAHHISNNVPVEVYHSKNVRCFGLLLSNATDR

SEQ ID NO: 183396 - protein, 59 aa, Glycine max
  Clone ID: PAT_MRT3847_13661C.1.pep
SNLWSYVPINKHDRAHHTMAFSSDPPKQKTRPRFRANQDLEGLFLIKHLLHTSLCLLVS

SEQ ID NO: 183397 - protein, 28 aa, Glycine max
  Clone ID: PAT_MRT3847_136620C.1.pep
PNTQCQMRQTWMPGDQLAATVMGTALSS

SEQ ID NO: 183398 - protein, 203 aa, Glycine max
  unsure (1)..(203): unsure at all Xaa locations
  Clone ID: PAT_MRT3847_136621C.1.pep
LPASTSFTLLDKKSNGNMAFRDSQKTSEEQGNVFKGSSAGQVETARPXASSTSQLFPPSLHQCQTSFVSSRSRASDITENNNTSNATQDASYGKITHILSSSSDFSNAKVQKCDPPMNSNGSSSTIMNFSHFARPAAMVRANLHSIGLKSGLSSSRSDSMEMKNKGAAATSSNPPESILVDSSVECLKEPIIQCQQGCGAIQG

SEQ ID NO: 183399 - protein, 119 aa, Glycine max
  Clone ID: PAT_MRT3847_136622C.1.pep
EYLILRKEDMDLSTFELSTIAEATNNFSSRNKLGEGGFGPVYKGTLIDGQDVAIKRHSQMSDQGLGEFKNEVVLIAKLQHRNLVKLLGCCVQGGEKLLIYEYMSNKSLDYFIFDEARSK

SEQ ID NO: 183400 - protein, 155 aa, Glycine max
  unsure (1)..(155): unsure at all Xaa locations
  Clone ID: PAT_MRT3847_136623C.1.pep
MPMHHLLISFLIFSLTPTPTTSLNSDGLSLLALKAAVDSDPTGVLSSWSETDGTPCHWPGVSCSGDKVSQVSLPNKTLSGYIPSELGFLTSLKRLSLPHNNFSNAIPPSLFNATSLIVLDLSHNSXLGSLPTELRSLKFLRHVDLSDNLPHGSLP

SEQ ID NO: 183401 - protein, 123 aa, Glycine max
  Clone ID: PAT_MRT3847_136624C.1.pep
EGKQILLEEIGWITRCDQTKPKQYKKLLLSSVIGTISTTYPPWQQENLVPDCIISCISTRTPIYTIVLLFPAKYYAFIAACILSTPGESIINAVSSPVQGLISPRAVKLPLCMPLVQLDIKIF

SEQ ID NO: 183402 - protein, 66 aa, Glycine max
  Clone ID: PAT_MRT3847_136625C.1.pep
KLSVNNLLTTNIALIVKKYTPEAPEATLCIHNNNKNHATKFASQPKDGSAYQGYSKFFRYYAQIHI

SEQ ID NO: 183403 - protein, 47 aa, Glycine max
  Clone ID: PAT_MRT3847_136626C.1.pep
AKHSSHDVSTYGYHRYLGSMRFLPCSVSASNAFIIPECSLAPSARIP

SEQ ID NO: 183404 - protein, 125 aa, Glycine max
  unsure (1)..(125): unsure at all Xaa locations
  Clone ID: PAT_MRT3847_136627C.1.pep
MADEEKPNGEEQVKDNNNNNLYDADQRLILEPCKIKACLIPLFPETSRTYSRQLLQWSSQGYSLRRILFISIGIVALGALLRLGAFTLFXLAATGNAIFVFLLKSLAVAGGFLGLDFAFVTAIYN

SEQ ID NO: 183405 - protein, 49 aa, Glycine max
  Clone ID: PAT_MRT3847_136628C.1.pep
GKSRHFGFIEFESPEVVAKIVADTMHNYLLFEHLLQVYVIPPEHVHPRM

SEQ ID NO: 183406 - protein, 97 aa, Glycine max
  unsure (1)..(97): unsure at all Xaa locations
  Clone ID: PAT_MRT3847_136629C.1.pep
SPSLAVKAVKLGPSRLTXGMLSLRNTVTNQVSLGSPWYRPHRVTYLGPFSAQPQAYLANXYPTEYGXNTAELSADLHSFSQNLDLLVMHYRWAMVGD

SEQ ID NO: 183407 - protein, 73 aa, Glycine max
  unsure (1)..(73): unsure at all Xaa locations
  Clone ID: PAT_MRT3847_13662C.1.pep
YIKLLSRAWTIGFMKRRYLDKMAXTKANLNNAGLHTWDLVILMDPHIITSNALKYXSAFIENLMRRGYKIGGI

SEQ ID NO: 183408 - protein, 147 aa, Glycine max
  Clone ID: PAT_MRT3847_136630C.1.pep
MLNHVSNNNSCSWLLFVARHYSRIQPPRPVSVEPVISVSNNIARLDAPKEGPKPRQLLSLPPFPGHPLPDKSSISGSRQRDYVTAVNWIKYYFKGTWGSVIESHFREGLVQMEADDSSTQKEEQMKPMPKIRPNEVMKRGARVHVPV

SEQ ID NO: 183409 - protein, 146 aa, Glycine max
  Clone ID: PAT_MRT3847_136631C.1.pep
GKKFADKGMDDHDLVTLVGAHTIGQTECRFFSYRLYNFTTTGNSDPTIDQNFLGQLKTLCPNIGDGLRRVSLDKDSPAKFDVSFFKNVRDGNAVLESDQRLWGDSNTQSIVQSYAGNIRGLLGIRFDYEFRKAMVKLGGVEVKTGS

SEQ ID NO: 183410 - protein, 135 aa, Glycine max
  Clone ID: PAT_MRT3847_136632C.1.pep
MGRVRTKTVKKSSRQVIERHYSRMTLDFHTNKKLLEEVAIIPSKRLRNKIAGFSTHLMKRIQKGPVRGISLKLQEEERERRMDFVPDVSAINTDHIEVDKETLDMLHSLGINDIPGITQVDPVPVQQNFPFTRRY

SEQ ID NO: 183411 - protein, 51 aa, Glycine max
  Clone ID: PAT_MRT3847_136633C.1.pep
TSWVRNFIMGLEELVPYCKRPIGLTQAGPCFVQFKTLSCCIFILRGSFPLN

SEQ ID NO: 183412 - protein, 74 aa, Glycine max
  Clone ID: PAT_MRT3847_136634C.1.pep
SPPNPTRKLCTINTAMLDLLLNIHRSAQVSSSFSSLTPICHAPIHMSILPCMILNIHHCSRPRLSVVKEKCLTT

SEQ ID NO: 183413 - protein, 70 aa, Glycine max
  Clone ID: PAT_MRT3847_136635C.1.pep
WLLLLIIGIAPPQMNEHQRKQRTYPFGKIHTPKRNRNFYRIERIWGFSAVEKRAEKDWNFSEALIVIMRL

SEQ ID NO: 183414 - protein, 632 aa, Glycine max
  Clone ID: PAT_MRT3847_136636C.1.pep
MAVPPSVAAAPASLYVGDLHPNVSDNHLVDAFSDFESLASVRVCKDSSTGKSLCYGYVNFVSPQDAIRAIELKNNSTLNGKAMRVMWSRRDPDARKNAIGNLFVKNLPESIDNTGLQDMFKKYGNILSSKVVMSEDGKSKGYGFVQFESEESSNVAIEKLNGSTVGDKQLYVGKFVKKSDRILPGPDARYTNLYMKNLDLDVSEATLQEKFSSFGKIVSLVIAKDNIGMSKGFGFVNYDNPDDAKKAMEAMNGSKLGSKILGSSRAQKKAEREQILHHQFEEKRKEQILKYKGSNIYVKNIDDHVSDEELRDHFSACGIITSAKIMRDDKGISKGFGFVCFSTPEEANKAVNTFHGFMFHGKPLYVALAQRKEDRKAQLQLQYAQQVAGLSGPSTAIIPGGYPPYYYAATGVISHVPPRAGLMYQHLPMRPGWGANGFALPARSFQQSPVPAVSNNTRQHRQNRGRLNGNPIAQGNTHSVTYLPQAQQISQPVISSSTQQRTGQAKYLPSGRQRDMEKGSGSSSSGSNSGRGSQGSEMLHSMLAGAAPEQQKEILGEHLYMLVHKLKPTLAAKITGMLLEMDNGELLLLLESPESLSAKVEEAVQVLKNSKTKVSGQDVLHSNFLSAEVAVN

SEQ ID NO: 183415 - protein, 60 aa, Glycine max
  Clone ID: PAT_MRT3847_136637C.1.pep
INYIGWFFFVEGPNHKFWIHLASACSAILKKHKTMYTMYIAESLFAHIDPTQGGKTYLKV

SEQ ID NO: 183416 - protein, 68 aa, Glycine max
  Clone ID: PAT_MRT3847_136638C.1.pep
IIVLPFFLPKKGVPGVQHLIPNPSGPFTKREGKIHKPGKKQIQLEDYRAFLTEGKETHLKEAIGGFPL

SEQ ID NO: 183417 - protein, 42 aa, Glycine max
  Clone ID: PAT_MRT3847_136639C.1.pep
IRKRVQGKENKGLEGQKGAPFSFFNNHPIVSSCQLYYFTLTF

SEQ ID NO: 183418 - protein, 132 aa, Glycine max
  Clone ID: PAT_MRT3847_13663C.1.pep
REKSLLQECERKRGHKYKVPNNRHPKPKHCFFRCADFPSKWQLLASRQQGHTKTNRRKEKENAKRECECERQNTTTTSSQLLKEKKSQSGRRRGRCIIFHYTLLLRLIQIEKKKKELNHRREAFMMLCGHSV

SEQ ID NO: 183419 - protein, 71 aa, Glycine max
  Clone ID: PAT_MRT3847_136640C.1.pep
KGKFFFFSPRGVKLLEVLKIQTFGLFPPLKGQAPFHLQRFFKNCCGFPNPGEGGPFNHGFPRQIFPTGFTY

SEQ ID NO: 183420 - protein, 79 aa, Glycine max
  Clone ID: PAT_MRT3847_136641C.1.pep
LHTINPRGLALLVNDKSTSLNRLSCIGGSVLKGKWVRGVRVPTEMLVGSAFVTCKPVNKGLFPTWLYSPRPKRCTAVAL

SEQ ID NO: 183421 - protein, 83 aa, Glycine max
  unsure (1)..(83): unsure at all Xaa locations
  Clone ID: PAT_MRT3847_136642C.1.pep
MNPSRGRPQYRPMQSQEKKPKPQXQQAMKRPRXDSTNRKFCYYDTDSLTQAGCLCQSCTRYRAQXGTLRNVPLGGGCRKLRAC

SEQ ID NO: 183422 - protein, 173 aa, Glycine max
  Clone ID: PAT_MRT3847_136643C.1.pep
MLLQTQFLSCWVQHLSPGQTQGRLFLRINIKSEKASSDDSGPSKTGVGFGSSDTAAVPVSSKKKKKAQRERASIIRRSPLEKPAFVSEQQVGKAKEENKNESAFLLAWLGFGVVILVEGIALAASGFLPEQWDQFFVKFLYPSFTPTVFLFVAGAVAYGVFKYLQNEKITEQK

SEQ ID NO: 183423 - protein, 113 aa, Glycine max
  unsure (1)..(113): unsure at all Xaa locations
  Clone ID: PAT_MRT3847_136644C.1.pep
IAGICGSLRKESYNKGLILRAQKLCAEHVKGATINIIDWSKLPVYNQDDEVDPPQSVLDFRKELADHDAILIATSXYNWSIPGPLKNALDWAEGAGITFNVTTGEKEPRPIGD

SEQ ID NO: 183424 - protein, 96 aa, Glycine max
  unsure (1)..(96): unsure at all Xaa locations
  Clone ID: PAT_MRT3847_136645C.1.pep
MGYKMAILILGLLXMLLLISSXMAARNLKEGEAGPXTNELADAKLVAGEADQETNEVIDTRGVGAGEADQETREVPDTRLYAGEAVLQTNEVADTK

SEQ ID NO: 183425 - protein, 778 aa, Glycine max
  unsure (1)..(778): unsure at all Xaa locations
  Clone ID: PAT_MRT3847_136646C.1.pep
MSNLLCCNIKIKGRMEAKLSKKTVLELSEDHKVDEKGRISTYKVEFIVDSDFGIPGAVTVVNGFDNEFFLESITMAQNVHFACKSWVQPNKLDPEKRIFFVNKVYLPCETPIGVKELREKELKQLRGDGWGLRVSSDRIYDYDVYNDLGDSDKGDRFARPTLGGQHNPYPTRCRTGRPPSTVDTKMESRPSDESELIYVPRDEELGDIKQEVIDQGKLMAMLKNXPALVDKIMGNEGVFNIDYFIKESGQSIMFNLGGAVQEFFKFDPPKTFSREKSHFLLDDEFGRQVLAAFPLGIERLKVFPPASKLDPSKYGSVESALKEEHIIGHIEGMSIQQALEENKLFMLDYHDVYLPFLDRINALEERKAYATTTILFLTKMGTLKPIAIQLALPTGNPNTSSKQVLTPPKDATSKWLWQLGKAHVCSNDAGVHTLVHHWLRIHACMEPLIIATHRQLSVMHPIFKLLHPHMRYTLKTNAIARQTLINAEGTIETDHTPGRYCMQFSSAAYKDWWRFDMEGFPADLIRRGLAVPDATQPHGIRLLIEDYPYAADGLLIWSSIKKLVRTYVNHYYKNSNAVSSDNELQSWYREFINLGHPDHKNASWWPKLDIPEDLTSMLTTVIWLVSAQHAVLNFGQYPYGGYVPIRPPLMRKLIPKEEDPEYSDFVMDPQRYFLSSLPSLFQASRFMAVINIGSAHSPDEEYIGQTKDLSSWSGEPEIIDAFNQFSMEMKSIEMEIKRRNADPKLRNRCGVNVLPYELLIPSSERGATGRGVPNSVTA

SEQ ID NO: 183426 - protein, 49 aa, Glycine max
  Clone ID: PAT_MRT3847_136647C.1.pep
ERELVSSFFIFFLFFYLHIVICNFPETTSSRPSYPYSGKDEPTHVTQNL

SEQ ID NO: 183427 - protein, 63 aa, Glycine max
  Clone ID: PAT_MRT3847_136648C.1.pep
SYSESHELIVVHASSTIVSGSPRMDCLALFVHPSSSNLIRSPMNRLTFMYPSPSCPKQHELIP

SEQ ID NO: 183428 - protein, 73 aa, Glycine max
  Clone ID: PAT_MRT3847_136649C.1.pep
FVHDDSFFLFFSFNVIFFYFFFFFFFFLFLFFFFFFFFFTSTHIYIYTYKYITSIMYIFMTIAVIQLKSLLKY

SEQ ID NO: 183429 - protein, 34 aa, Glycine max
  Clone ID: PAT_MRT3847_13664C.1.pep
WSKILTTKTSIYQSYNNLQLYKQKTLQNSGIDML

SEQ ID NO: 183430 - protein, 148 aa, Glycine max
  Clone ID: PAT_MRT3847_136650C.1.pep
QCNGAGGAPPATLAQFEVHHGSNDYASYGVSLVDGFNVPMTVTPHEGKGVCPVVGCRDDLLATCPHVLQHRVPAVHGPVVACKSGCEAFHTDELCCRNPFNNPSTCKGSIYSSFFKHACPATFTFAHDTPSLMHQCSSPRELKVIFCH

SEQ ID NO: 183431 - protein, 140 aa, Glycine max
  Clone ID: PAT_MRT3847_136651C.1.pep
PRVRVQVALAASSIKLEIDRHKNAETWFTKGTFERFVRYVSTPEVLEMVNTFDAEMSQLEAARRIYAQGAGDQRSDPQGGNGAGAITVADATTKELLRAIDVRLSAVCQDLTTACARAPASDNNPHVVSHLKHFADRFGG

SEQ ID NO: 183432 - protein, 72 aa, Glycine max
  Clone ID: PAT_MRT3847_136652C.1.pep
GEKLRLKSRINFSKVVFNNGPVQKNGGEKKVPPSKVAVTNEQAQKNEGENKVSVSARKTVKKKKVNPPYQRN

SEQ ID NO: 183433 - protein, 73 aa, Glycine max
  Clone ID: PAT_MRT3847_136653C.1.pep
DTRPYGCEKTSVGFVHQSVSFYFKVLNSLYAPLGVPFVALHIFIFILLPSMISFPCVKRVSTNRLCRNLILSL

SEQ ID NO: 183434 - protein, 127 aa, Glycine max
  Clone ID: PAT_MRT3847_136654C.1.pep
MAPSIVLSLLPLLLVSTCCYAQPLEEGFISGVISDKGLEYAKELLIEKGIASIVMLQLPEIENSAQVPLVGNAKVVLSDITIKDVEVNSSSVKTGESGIALVISGAIANMSMRWRYTVSSWLIPFGI

SEQ ID NO: 183435 - protein, 80 aa, Glycine max
  Clone ID: PAT_MRT3847_136655C.1.pep
HVGADASGAIDRKPLDIARGGLLDSHWFMESIHVYDHSGDGSAHHIYNLGPLGGDHLSDMIVDPYYLDGEGNTFTSLKGV

SEQ ID NO: 183436 - protein, 163 aa, Glycine max
  Clone ID: PAT_MRT3847_136656C.1.pep
MAAVPSTFALTKSALSINKLDHSLVKIKPYSFSLNLNRLGRMETSLTRRPLTIQATYSDGGRPSSASVFVGGFLLGGLIVGTLGCVYAPQISKALAGADRKELMRKLPKFIYDEEKALEKTRKVLAEKIEQLNAAIDDVSAQLRSEEASNGVAVNSDEIEAAT

SEQ ID NO: 183437 - protein, 163 aa, Glycine max
  Clone ID: PAT_MRT3847_136657C.1.pep
MASLPTTFAITKSASSINKVDHSLVKIKPYNFSLNLNRQGTMQTSLTRRPLTIQATYSDGGRPSSASVFVGGFLLGGLIVGTLGCVYAPQISKALAGADRKELMRKLPKFIYDEEKALEKTRKVLAEKIEQLNAAIDDVSAQLRSEEASNGVAVNSDEIEAAT

SEQ ID NO: 183438 - protein, 99 aa, Glycine max
  Clone ID: PAT_MRT3847_136658C.1.pep
FPRQLFKHYTGIPYDAGMESSYKRVKFGFAYWLTKIVKRCNRDETVLNIINANEAVYKVHHYAKCKRLCTLCLYRYMVLLVGEWWMYAQIKCLAWTVHC

SEQ ID NO: 183439 - protein, 64 aa, Glycine max
  Clone ID: PAT_MRT3847_136659C.1.pep
VFSAASSLVLCLGSQVEPLSCSLLSVACAPESCCLVMWGLCPVLFSLFEAFLRSALLFHWKARA

SEQ ID NO: 183440 - protein, 47 aa, Glycine max
  Clone ID: PAT_MRT3847_13665C.1.pep
PTRPSENIIPLIQNHTIHQHRIRLKLTEANQIHIYNHIENTNPIIHI

SEQ ID NO: 183441 - protein, 73 aa, Glycine max
  Clone ID: PAT_MRT3847_136660C.1.pep
LVLIINCTMASENGEKVEIGLNAVPQETHKPKKDWVLLSLRMVAFFATASATLVMTFNKQTKSFVVATVGSTP

SEQ ID NO: 183442 - protein, 58 aa, Glycine max
  Clone ID: PAT_MRT3847_136661C.1.pep
LAGRVKGFQVSTFRVNYSGPLFSFPGLLIFIIYRLEGIFFLDFNSLLIFFKKNLNINF

SEQ ID NO: 183443 - protein, 46 aa, Glycine max
  Clone ID: PAT_MRT3847_136662C.1.pep
KKKKKKKKKKKKKKKKKKKKKKKKKKKKKKKKGRPAKLVNLVKPGK

SEQ ID NO: 183444 - protein, 189 aa, Glycine max
  Clone ID: PAT_MRT3847_136663C.1.pep
MDYDFRSRSGPQPPIYRPPPPPSPMYRPSPYQQNPTPSSGFGVRVGIKPEYRITPPPHLSSLAGDNPRSNFQFDFGLERKILAEAEKDNPNWSKFGSENVPTKVSDSSTAKVTALDPIVSKFMAMGLSQEAVPIAVENYGDNPTKVQEFVNGYTLLREMGFSSNSVADALVMNDNHAVKALAHFLNGSS

SEQ ID NO: 183445 - protein, 91 aa, Glycine max
  Clone ID: PAT_MRT3847_136664C.1.pep
MSVSHDMSGSFQKFSSCVLSFPSLEISLSAALVEEARVFPTTHPRQGPQERSRAFCRTIHIPNEIRESDLFFTKSTLETYPSTSCDSRMNK

SEQ ID NO: 183446 - protein, 189 aa, Glycine max
  Clone ID: PAT_MRT3847_136665C.1.pep
MDYDFRSRSGPQPPMYRPPPPPSPMYRPSPYQQNPTPSSGLGVRVGIKPEYRITPPPHLSSLAGDNPRSNFQFDFGLERKILAEAEKDNPNWSKFGSENIPTKVSDSSTAKVTALDPIVSKFMAMGLSREAVLIAVENYGDNPTKVHEFVNGYTLLREMGFSSNSVAEALAMNDNHTDKALAQLLNGSS

SEQ ID NO: 183447 - protein, 165 aa, Glycine max
  Clone ID: PAT_MRT3847_136666C.1.pep
VSKFTLQIPFRNFTSFNARHFFSLSLSLSLSLNHSLLCEIEKKTVSFERNATLNDIFQQRFTKTPTLVNGFSNLYAMEVDPTVEHEDMGGTDGMDSLFSELAGAIPRIDEAMSFAEMLKAIAMEGTENRVSLLTIHSKYWGLIFAKIPLWVMKCREVYLVAKRSV

SEQ ID NO: 183448 - protein, 78 aa, Glycine max
  Clone ID: PAT_MRT3847_136667C.1.pep
MDLSDLNSADLQKFYSEEQQRAMVNEMVAKLTSECWDKCITGTPGNKFSSSESNCLSNCAQRYLEMSMLIMKRFQGMQ

SEQ ID NO: 183449 - protein, 206 aa, Glycine max
  Clone ID: PAT_MRT3847_136668C.1.pep
MPVPPQSFKSNENDAVSSNDSNFSVGSFLRQRSSHLSAAIVKRVSSLRQSMEEKTNDDEEENLEVTEFSLSGVKVTVTPKPEEEKETSFKGRISFFSKSNCRDCTAVRRFFKEKGIRYVEINVDVFGERERELRERTGSGSVPQIFFNEKLIGGLVALNSLRNSGEFDRRVAEIVAGKVAGGDSPAPPVFGFDYVEEERADEMVGV

SEQ ID NO: 183450 - protein, 51 aa, Glycine max
  Clone ID: PAT_MRT3847_136669C.1.pep
HYPPETSRKHFQAAPPARAPEKAQPSQIPHRGKNGHPFIRKPVLYAARIIT

SEQ ID NO: 183451 - protein, 63 aa, Glycine max
  Clone ID: PAT_MRT3847_13666C.1.pep
LMSCNTSRCKVVTNLYSIFCQKLSSTTRVLINEVEMTEMCWVSNASVLENLMYTCNNLYENRY

SEQ ID NO: 183452 - protein, 78 aa, Glycine max; identical to SEQ ID NO: 183448
  Clone ID: PAT_MRT3847_136670C.1.pep

SEQ ID NO: 183453 - protein, 34 aa, Glycine max
  Clone ID: PAT_MRT3847_136671C.1.pep
ILLLALQFANLLFIAASYHIETWFHLAFLLDKQG

SEQ ID NO: 183454 - protein, 68 aa, Glycine max
  unsure (1)..(68): unsure at all Xaa locations
  Clone ID: PAT_MRT3847_136672C.1.pep
YNAAAGSIGDHCMHIFLLKLGKKDQGLSNEYLTLKTILPFSTPSFPPLTNQWPGGGFYHLVCXTRKHS

SEQ ID NO: 183455 - protein, 86 aa, Glycine max
  Clone ID: PAT_MRT3847_136673C.1.pep
ETHLLKQRVWAGRIPVVFCLDPNEVTTLHAPRPFYAMIPRMSYLVSQTRDVVEYFRDAAPPMSTMQGASIWFEANGVPLHWHRPFG

SEQ ID NO: 183456 - protein, 89 aa, Glycine max
  Clone ID: PAT_MRT3847_136674C.1.pep
QKGLTKGFLKTTWGISPKLADGKQKLDAFLVREKVLDPFFQAKVPAPLENIYLWEGRGILFERGYMGKNPPGGEDFGRGFKNKEVQTFF

SEQ ID NO: 183457 - protein, 75 aa, Glycine max
  Clone ID: PAT_MRT3847_136675C.1.pep
YLIVVIYYHTALSLSLQPFFILFHVCVTLAVNNKFYSIFLVYSLSVHNFESSHFPFPLSRLILMLFVNFNGINLQ

SEQ ID NO: 183458 - protein, 113 aa, Glycine max
  Clone ID: PAT_MRT3847_136676C.1.pep
KYPQKHEGQLTRMRQQMVSNMVLYQYALSKGLQSYIQADRFAPSRWAAPGVLPVFDEDTKDGESSLFDQERSISKIERMDCHTDGYEDEMEDGELESDSSSYRVLSSKTLADV

SEQ ID NO: 183459 - protein, 51 aa, Glycine max
  Clone ID: PAT_MRT3847_136677C.1.pep
PRGISIAHYQEIKKRKSAYINRDYVTSYYAYPETTRNEIGIPSGYRASNSL

SEQ ID NO: 183460 - protein, 108 aa, Glycine max
  Clone ID: PAT_MRT3847_136678C.1.pep
DIAQRFNHLYERDYFSLPEVVIEEDVATLPGLDGRKMSKSYNNTIPLFEGGKSALRASVMRIVTDSREPGEPKDAESSHLYTLYRAFATSEQSAAFRQQLEAGMGWGD

SEQ ID NO: 183461 - protein, 51 aa, Glycine max
  unsure (1)..(51): unsure at all Xaa locations
  Clone ID: PAT_MRT3847_136679C.1.pep
YHSTNPIKLFTYSISIIEFLSLSQSFLNFNWIRSFXTRGRTNWPXAWVDRG

SEQ ID NO: 183462 - protein, 112 aa, Glycine max
  unsure (1)..(112): unsure at all Xaa locations
  Clone ID: PAT_MRT3847_13667C.1.pep
LFPLYLSLDHRFPFYDNVFALVPASHXLDVEGKSEKLEFLWFNIDKVLRAGGLFWLDNFFCANKEKKQTLTRLIERFGYKKLKWVVGKKVNSVGSGKPKVVLSAVLQKPVRA

SEQ ID NO: 183463 - protein, 73 aa, Glycine max
  Clone ID: PAT_MRT3847_136680C.1.pep
GGTLIPILEVGCLFPLIPHARGFIFFTSPLRLWLGCPDTFLSYQKSLRNVILIFPGSSPLPYKGIIIEISPNM

SEQ ID NO: 183464 - protein, 66 aa, Glycine max
  Clone ID: PAT_MRT3847_136681C.1.pep
KETYFIGLSTLVEPKIFYPTKNKTPLLFQNFITGPAQILIWKGGPLWARHLGPQPWGNSLGYPPLL

SEQ ID NO: 183465 - protein, 128 aa, Glycine max
  Clone ID: PAT_MRT3847_136682C.1.pep
RTQLNFFFLARKNFFYGAPKINFRARGLTTGEGENPGGTPIKSLGKKPPFPQGGKKQKGPPRSPFQKVAHPKGQRDPPLNRPLNPGGGGGSPQGARYICRPLRPRPFGFFPFFSRPVRGFPPKSLKWG

SEQ ID NO: 183466 - protein, 55 aa, Glycine max
  Clone ID: PAT_MRT3847_136683C.1.pep
LHKCLVTEMVLVMNPGCSCIFLLSCCRVAFYVPRRDWICNGFAMNLLIKFVILYN

SEQ ID NO: 183467 - protein, 108 aa, Glycine max
  Clone ID: PAT_MRT3847_136684C.1.pep
SGGPPFPPPALPGFVPSLGPPHPFCGPRFSPPCAGDPPGVPPFFPLGVSPLCPWCVFPVGAPPCPLPLYVPPFWGCGPPLCRGLFPAGFVGFPLAFPSVSRAPCSLLR

SEQ ID NO: 183468 - protein, 182 aa, Glycine max
  unsure (1)..(182): unsure at all Xaa locations
  Clone ID: PAT_MRT3847_136685C.1.pep
MAIIHYSAASRCCMPSLHRASPSRSVLAPSIFFFRDAAPTLRLDVSVRSQPPGSDGFGEPINNKHASRDASVGLSASSSSSVIDFLTLCHRLKITKRKGWVNHGIKGAESIADHMYRMAXMALIAGDVPGLNRERCIKIALVHDIAEAIVGDITPSDGVPKAEKSRMELEALNKMCELLGGG

SEQ ID NO: 183469 - protein, 229 aa, Glycine max
  Clone ID: PAT_MRT3847_136686C.1.pep
MARLFRSLRKTLTLTLTLTHQFQHQPCISRRSYISDMRKSAFEGNILRLLRNEIQYELQSSPPNNPVTKFNSFIVDGRAGERWITLKRQYADEDIKLEVTMFDGAVPAPTPTPNGGVVNSDEMQMHITVIVNISKGEGRVLEIMCSAWPDSIEIKRLFIRANEKIIAEPYAGPEFTELDDELQDKLYDFLEVRGINDELAGFLHQYMKNKDKVELIGWMERVKSFIERK

SEQ ID NO: 183470 - protein, 72 aa, Glycine max
  unsure (1)..(72): unsure at all Xaa locations
  Clone ID: PAT_MRT3847_136687C.1.pep
PXHPLIXTCLLSLYPXPMFXXXXWXVXXXVSFNLYFSSASSLIXXFCPYRFXFIXICXXXPISPCXTLXXQY

SEQ ID NO: 183471 - protein, 52 aa, Glycine max
  Clone ID: PAT_MRT3847_136688C.1.pep
HIPHGSNKHIGTKFHFLHDQVTKENLELEYCKSVKQVTDILIKSFKLVKFHE

SEQ ID NO: 183472 - protein, 136 aa, Glycine max
  Clone ID: PAT_MRT3847_136689C.1.pep
SLQSTGSQLTPSPTQQQQQHSMPVKGVDTATAKLKMCTLQESKDKDLLQMAREMELVMKPLSAYNNWAAFDKQESSSEDEKYVVVSQKADGKRGLVANGTTADDKLVNNVAPASAMAATSSLVSRSATKNPISELK

SEQ ID NO: 183473 - protein, 126 aa, Glycine max
  unsure (1)..(126): unsure at all Xaa locations
  Clone ID: PAT_MRT3847_13668C.1.pep
VIVITSDDESNEXQAVKGNMARETSAINTAMAFSSVLSATIIADCGLPRDFVMNIDATDMEYELAAAEYIDDIDILYNETEKYGCVHDYMSSQPDMHAKMTXILVDWLTYMHRKFELKPETLYSNM

SEQ ID NO: 183474 - protein, 87 aa, Glycine max
  Clone ID: PAT_MRT3847_136690C.1.pep
GKKTPRGRKLFWKCCFFQEKFKSGKWGFKAPPRANFLVFPKLELAFPKSLEKPKNGGVFVPPEAAQKIFERGPWALKKMGKLAYKKI

SEQ ID NO: 183475 - protein, 199 aa, Glycine max
  unsure (1)..(199): unsure at all Xaa locations
  Clone ID: PAT_MRT3847_136691C.1.pep
MYRAVASRLTLPKGNGRTLGASRGLFNWLTGESSNPLPPLDTPLRGVSLPPSLPDYVEPSKTKITTLPNGLKIASETSPNPAASIGLYVDCGSLYETPLSSGASHLLEKMSFKSTANRSHFRVVREVEAVGGNVGASASREQMGYTFDALKTYVPQMIELLVDCVRNPAFFXWEVNEELXKVKSETGELSNNPQGLLLE

SEQ ID NO: 183476 - protein, 478 aa, Glycine max
  Clone ID: PAT_MRT3847_136692C.1.pep
MGGTVVAEVPTKRGRGRRALKEKTPSTNDANIIIATPISPSSEKAAQVVPSKKKQDSKKQQSFEKELLEMQEMLQQMRLEKEKTEELLKVKDEALKLKEEELENRGREQEKLQTELKKLQKLKEFKPTMNLPVLKDNEEKKDKKKKGCSEKKRPSPPYILWMKDQWNEIKKANSEAEFKEISTMLGSKWKTVTAEEKKPYEEIYHAEKEAYLQMIAKEKRETEAMRLLEDEQKQKTAMELLEQYMQFKQEAEKDGKKNKKEKDPLKPKHPMSAYFLFTNDRRAALAAENKNFLEVPKITSEEWKNMTEEQKRPYEEMAKKNKEQYALEMEAYKQKKDEEAAHFMKEEEEQMKLQKQEALQLLKKKEKTENIIKKTKQNRQKKKQNKDDKNSDPNRPKKPASSFILFSKEARKTLQEERPGISTSTLNALVSLKWKELSEEDRQFWNGQASKAMDAYKKELEEYNKSLAATACQEQKTE

SEQ ID NO: 183477 - protein, 149 aa, Glycine max; identical to SEQ ID NO: 154625
  Clone ID: PAT_MRT3847_136693C.1.pep

SEQ ID NO: 183478 - protein, 149 aa, Glycine max; identical to SEQ ID NO: 154625
  Clone ID: PAT_MRT3847_136694C.1.pep

SEQ ID NO: 183479 - protein, 334 aa, Glycine max
  unsure (1)..(334): unsure at all Xaa locations
  Clone ID: PAT_MRT3847_136695C.1.pep
MASTVSTKANQFRYSTRLLFSHLLRQGRPSTLSPPFSSHLQPLHHPYKVRNQSYGNGSLRLCQRFLSSSSSPPAANVSGEKPASDSDHSAKDGSGQGKESGSGGDEGQKSDAGKSVRGGPVSWLSFLLLVLTGAGLVFYYDREKKRHIEXDYYGIRSNTEAVKQGPSVGTAAIGGPFHLVNHHGKHVTEKDFLGKWTLLYFGFTHCPDICPEELQKLAAAVDKIKEKAGIETVPVFISVDPERDTVEQVGEYVKEFHPKLIGLTGSPDEIKNVARAYRVYYMKTAEEDSDYLVDHSIVIYLMSPEMKFVKFFGKNNDVDSLADGVIKEVKQYKK

SEQ ID NO: 183480 - protein, 65 aa, Glycine max
  unsure (1)..(65): unsure at all Xaa locations
  Clone ID: PAT_MRT3847_136696C.1.pep
MIQKIQLRLLTTFLIMLYTLPIRSMHIIVXNITTLFSTDTLETKAVKEQKPSLKNQLIIFYNSHH

SEQ ID NO: 183481 - protein, 59 aa, Glycine max
  Clone ID: PAT_MRT3847_136697C.1.pep
NINIKPIRLKQITYLTNYIILPPASHNDQYTKILPNRFKTCWLFCWRAIPNPHKDPPQR

SEQ ID NO: 183482 - protein, 99 aa, Glycine max
  unsure (1)..(99): unsure at all Xaa locations
  Clone ID: PAT_MRT3847_136698C.1.pep
LRNRKRDLIDRIIDIPEEIEPELGFECCIYKVPTSLLNVQEEAYTPLLISIGPIHHNKXGLNEMQEQKRKYFRFFWNRLENKLELENYIGFLEQHRANI

SEQ ID NO: 183483 - protein, 119 aa, Glycine max
  unsure (1)..(119): unsure at all Xaa locations
  Clone ID: PAT_MRT3847_136699C.1.pep
ILSGNGKTIRGIFETSIQLVRPCLVLNWDQHKKFFSIKKGHASFVKKRKKGLVKYFLKIALVKSQISXIKKRKNPPGSKFILEKKSGPXPKKPFFSIDLREKIPQSLSKNHGTIRMLSL

SEQ ID NO: 183484 - protein, 69 aa, Glycine max
  Clone ID: PAT_MRT3847_13669C.1.pep
TVKHQARAHLMLRVYQWSFNSYHRTSSVAQLVIVFGLTPNGVNFQFGGLELYAYKAPFRVESKRVYHRN

SEQ ID NO: 183485 - protein, 295 aa, Glycine max
  unsure (1)..(295): unsure at all Xaa locations
  Clone ID: PAT_MRT3847_1366C.1.pep
PRPYKYVIFPSLEKQLWKEENGKKLKELENGKKLKILCLHGFATNGSFLKKQNSIWDPSTCSQFDMVFPNGTXPARGYSDTIGLFPFPYFETVQFXNRNNEXYYNFDDFISYLSVYVTPWGPFDGYLGFSQGATPFSTFXIGYRAQGKLLKEHPPIKFLISISGCKFRNPSICDVAYKDTIKAKSVHFIGEKDWLKLPSEDLTSAFDKPLIIRHPQGHTVPRLDEVATSQLRKWITEEVLCQPKVGISVCEHETDHEEKKSEKGTKLEPCGTNQDKGVNGVEINKGSETVEVAQA

SEQ ID NO: 183486 - protein, 114 aa, Glycine max
  unsure (1)..(114): unsure at all Xaa locations
  Clone ID: PAT_MRT3847_136700C.1.pep
MKTPKRQSSPANAARPVESDSGEIVTRFKNGGRRRIKIKRMKYTCQTKIRVRNDAGAGGVSQPPAVDSEREKREIDEHVEISLALASSSSEEEERLSSKQNDGVFXYGSASVIG

SEQ ID NO: 183487 - protein, 102 aa, Glycine max
  unsure (1)..(102): unsure at all Xaa locations
  Clone ID: PAT_MRT3847_136701C.1.pep
LSPTAHSQQEVDHDPDDVEDPATLHHLAHVSKDEKXFMHXCHSLMRKKSVCPHGYVXWACEAFXQFYGKELILSLALFWRWRLFMIKLWNYGLLHARTMNXC

SEQ ID NO: 183488 - protein, 83 aa, Glycine max
  Clone ID: PAT_MRT3847_136702C.1.pep
PCFFFLFDFSPFNGTPNLSHMGLFFLTKVFFPLAIDVGIYFSNDNSATFFTLAAHPLKFYVRSCRQKKYWFSVVLNTHSLYIL

SEQ ID NO: 183489 - protein, 95 aa, Glycine max
  Clone ID: PAT_MRT3847_136703C.1.pep
RTMHSYFGSRRNGRSTNRNDLVYYAMGAIDDDIYSNTHWGEHSITCTRHHPCRENMHGDEVIKEPSCGGVPYHTGGPDDGTKPPVLLVRANSRNA

SEQ ID NO: 183490 - protein, 36 aa, Glycine max
  Clone ID: PAT_MRT3847_136704C.1.pep
PLVRSYEVEIVETENDMCLAVHLRFCHVNTSTPSIY

SEQ ID NO: 183491 - protein, 43 aa, Glycine max
  Clone ID: PAT_MRT3847_136705C.1.pep
YIKKLNNPNNTSMCITTFKVCREFQLNWYLGIVSNIKFLYNPL

SEQ ID NO: 183492 - protein, 35 aa, Glycine max
  Clone ID: PAT_MRT3847_136706C.1.pep
NKLIFRFYIKPCFKYLVIKYNNLIRYCLLLTYLIT

SEQ ID NO: 183493 - protein, 31 aa, Glycine max
  Clone ID: PAT_MRT3847_136707C.1.pep
IYYDQTATYHLIFWLNVISFVRSLSYACTYN

SEQ ID NO: 183494 - protein, 95 aa, Glycine max
  Clone ID: PAT_MRT3847_136708C.1.pep
WPKKRMVFFNLPPSWGGEAKLLEPDHFPPGWKPPKGFPGSPLLFFPLWQPFIPPPTKTKIRVFLFPQGSFSQWEITKPPGPGERFPLLRREKQNL

SEQ ID NO: 183495 - protein, 56 aa, Glycine max
  Clone ID: PAT_MRT3847_136709C.1.pep
TFTKLSNLISIIYHNLNLKKKNDMDNHIQAYKNFKLPVILVPSIYHMLLKCIYICR

SEQ ID NO: 183496 - protein, 96 aa, Glycine max
  Clone ID: PAT_MRT3847_13670C.1.pep
RSLDKSNVFFVYFPKIFSITPGVGVNKKSFYPIKKSQRQFEVKKPPFFIEAISFKRSFLGRKLIKNNLFPPFRFSPIRARAKRIARKKKKQKKKNT

SEQ ID NO: 183497 - protein, 149 aa, Glycine max
  Clone ID: PAT_MRT3847_136710C.1.pep
MDALNFLKFWRNATTTTTSEPHLVVETDTESDEEDSFFDLELTLHDFHNKENTTTTKIDDDPKQTTTTTTTELKSICSKDDELSKIDNDVPRKTPLPMSSPPEPISKRKVLPIEPISKPQSPIALLRSAPSFRIFMFRKRNRAPPQKTE

SEQ ID NO: 183498 - protein, 57 aa, Glycine max
  unsure (1)..(57): unsure at all Xaa locations
  Clone ID: PAT_MRT3847_136711C.1.pep
XLEXMXCFXLYALAXLSXQXHSXPQVVXXAHISCXXXLXLXXASXXRAXFRAXVRVX

SEQ ID NO: 183499 - protein, 38 aa, Glycine max
  Clone ID: PAT_MRT3847_136712C.1.pep
LVIIMGNIWVIYKLCQVLKFPATPTVSRLVASVITRAC

SEQ ID NO: 183500 - protein, 61 aa, Glycine max
  Clone ID: PAT_MRT3847_136713C.1.pep
GFCDNTTYPLFNLLMPCPNEKHYATSIKMRPSTVITTIGTLRNLNQNEQHYTTLCYPLFYF

SEQ ID NO: 183501 - protein, 74 aa, Glycine max
  Clone ID: PAT_MRT3847_136714C.1.pep
ITFYMFHNTRFKTYHIFLVLMLNLKPRIFCSNHNLFEDLKPPFSNTTTNRADFLNVLDVRIEESGSDKYEQIYS

SEQ ID NO: 183502 - protein, 57 aa, Glycine max
  Clone ID: PAT_MRT3847_136715C.1.pep
ASLYISVWHFMATLYLGQTNYRYVFDTHGDPLETDNEYYIRPDITYIGGQLTLININ

SEQ ID NO: 183503 - protein, 142 aa, Glycine max
  Clone ID: PAT_MRT3847_136716C.1.pep
MASVCGGCLALQDAGVPIKGSIAGIAMGMVLDTKEFGGDGTPLILSDITGSEDASGDMDFKVAGNEDGITAFQMDIKVGGITLPIMRKALLQARDGRKHILGAMMNSSPPPAKRLSKYAPLIHVMKVRPDRINLIIGSGGKK

SEQ ID NO: 183504 - protein, 69 aa, Glycine max
  Clone ID: PAT_MRT3847_136717C.1.pep
VQVLSLYSHPCWGVRSSGFFFCWHKRFRGLVNHEGVLVAFFRTRFWVASKYAGAALKKQEQVVGRPLTV

SEQ ID NO: 183505 - protein, 70 aa, Glycine max
  Clone ID: PAT_MRT3847_136718C.1.pep
MSTTAMKKLMRDFKKLPQDPTAGINGAPQDNNIMLLNAAIYAPYDTPSDGSTFKLTVQYTDDYPNEPPTV

SEQ ID NO: 183506 - protein, 64 aa, Glycine max
  Clone ID: PAT_MRT3847_136719C.1.pep
SQATMAMATQASLLTPPALRAQRRRARLRAMEAKRAASPSAARSPSSSPEQSEQQPSTRPRRHQ

SEQ ID NO: 183507 - protein, 75 aa, Glycine max
  Clone ID: PAT_MRT3847_13671C.1.pep
LMHSKQSLAPSLFSKGLYKFLQLNSSLLLVINTLIIFWSASVIRNANFRHVEFYSSQRVTFSPVQSFIILTHSPR

SEQ ID NO: 183508 - protein, 106 aa, Glycine max
  unsure (1)..(106): unsure at all Xaa locations
  Clone ID: PAT_MRT3847_136720C.1.pep
SXARVRXLGIXLERNLAXHXXCHXXSXWLXXRXXXXXXSWXXXXPXYPCGLKXGXXSXXDXXXXXIXXXXXXXXXXXXXXDVHXXXPXXGYPXVLERLXXFVXXPT

SEQ ID NO: 183509 - protein, 46 aa, Glycine max
  Clone ID: PAT_MRT3847_136721C.1.pep
ISVFLHMQRGCFQIQIYDQPVSHQSAALLLRQGSPLLMQRSCIVAL

SEQ ID NO: 183510 - protein, 99 aa, Glycine max
  Clone ID: PAT_MRT3847_136722C.1.pep
FVLSLSCSLCSILCLVPKFYSSMHMLSFQSIVSSYSAFGFTLSICAGSFPIGRSLALLPPFCSLGGCSNPYRFAWSGKAWRCIRGRFRRSACVPPALPG

SEQ ID NO: 183511 - protein, 172 aa, Glycine max
  Clone ID: PAT_MRT3847_136723C.1.pep
GSSDGWFHTGDIGEWQSNGAMKIIDRKKNIFKLSQGEYIAVENIENKYLQCPLIASIWVYGNSFESFLVAVVVPERKAIEDWAKEHNLTDDFKSLCDNLKARKHILDELNSTGQKHQLRGFELLKAIHLEPNPFDIERDLITPTFKLKRPQLLKYYKDHIDQLYKEAKGAMV

SEQ ID NO: 183512 - protein, 47 aa, Glycine max
  Clone ID: PAT_MRT3847_136724C.1.pep
TKSFFDHLDEPSHLEPGIHNFFLKNFKSLYFLIFPTSLGFYFSPDAN

SEQ ID NO: 183513 - protein, 87 aa, Glycine max
  Clone ID: PAT_MRT3847_136725C.1.pep
RSDISNAKGFLCCASCRGCWSISYCTWSDTMDPRVPAMYRPLPFSELQHQWTLCPLKKGKKAYLESWMCSSHLHTYERLDSGGGSWV

SEQ ID NO: 183514 - protein, 62 aa, Glycine max
  Clone ID: PAT_MRT3847_136726C.1.pep
MVKTANRVSSPLQQGGAVTPHVDKLQRFKAAQFWKSPLCLLRHPFIDAADAHCFNDEANPFT

SEQ ID NO: 183515 - protein, 219 aa, Glycine max
  unsure (1)..(219): unsure at all Xaa locations
  Clone ID: PAT_MRT3847_136727C.1.pep
MAEFFFPNKSVGDQNSVEDWRIRGMTPLTPPDLLQHEIRQTDKSRETVVKSRKEAVEVVHGVDEKRRLMVVIGPCSIHDPAMALEYCDRLLELKKKYEDDLLIVMRSYLEKPRTTVGWKGLINDPDIDNTFNINKGLRTARQMFLDLTTKGMPLASEMLDTISPQYTADLLSVGAVGARTTESQVHRELASGLXFPVXFKNGTDGTLGVAVDAIGSVKH

SEQ ID NO: 183516 - protein, 255 aa, Glycine max
  Clone ID: PAT_MRT3847_136728C.1.pep
MNILGQSLHQSNNGSYSCSSPETANSSNLPTTPKAVHSDEEVNTLASAHPKKRAGRRIFKETRHPVYRGVRRRNNNKWVCEVRVPNDKSTRIWLGTYPTPEMAARAHDVAALSLRGKSACLNFADSAWRLPLPASTNAKEIRRVAAAAAVAIAAEDSRGKQLRTNAIDAVADCEVSSSDIGVDENCNNNKASQRFCDLDEITMPDAPVFEDMHEWLQTMAAEPLRSPTFVTYVNVRDVWNFVEDDAEVSLWSFTV

SEQ ID NO: 183517 - protein, 66 aa, Glycine max
  Clone ID: PAT_MRT3847_136729C.1.pep
MTNGNGRCSTDALAIGRYTSPGDGATELCYLSLLIIRQDMICYHTRCEKSIGLMMQTSCMLRRTIF

SEQ ID NO: 183518 - protein, 94 aa, Glycine max
  unsure (1)..(94): unsure at all Xaa locations
  Clone ID: PAT_MRT3847_13672C.1.pep
RKMLIDLHLEQDTTTEVMVDNQAVIAIFKNLVFHGKTKHFSIKLFFLRDVQRDGAVCLKYCKTEDXDQLSDIFTKALPRSRFELLREKLGLSNH

SEQ ID NO: 183519 - protein, 59 aa, Glycine max
  Clone ID: PAT_MRT3847_136730C.1.pep
IKHFGIYWIEHSCFSLARRNWCRRVIIFVIVHILHLPTQWCKYTSVSHIFKSSQPVSSS

SEQ ID NO: 183520 - protein, 32 aa, Glycine max
  Clone ID: PAT_MRT3847_136731C.1.pep
ILKKILLIIAGYQFLNKIKSGRKEIPCNYILI

SEQ ID NO: 183521 - protein, 168 aa, Glycine max
  unsure (1)..(168): unsure at all Xaa locations
  Clone ID: PAT_MRT3847_136732C.1.pep
MEREQLSLHMNGGKGQRSYANNSSLQRTIIRKTRSILEETITRLYCDTFPNNCLKVADLGCSVGSNTLLVTSNIIDIVDNRSTQLNREPPTFQFYLNDLFGNDFNTIFKSLPGFYERLLEDKGXXLVHALLMXTPGSFYGRLFPSNSINLFHSSYSLHWXXXDPLFEV

SEQ ID NO: 183522 - protein, 87 aa, Glycine max
  Clone ID: PAT_MRT3847_136733C.1.pep
YVLSYYSFLAVPKIMLCSIHEMAMVYTKRQAVVIDSSRWARVRYTSFVSDILCICIMYRYVLLTTSANYNVYHVWEPKKKKYGIKIF

SEQ ID NO: 183523 - protein, 68 aa, Glycine max
  Clone ID: PAT_MRT3847_136734C.1.pep
ERDKRTYYRHSELMNQLQSQFTWLFMYQDFEAGHVVPYYVTTSYTTVLTAWLGYSQESITYLPYGLPY

SEQ ID NO: 183524 - protein, 60 aa, Glycine max
  unsure (1)..(60): unsure at all Xaa locations
  Clone ID: PAT_MRT3847_136735C.1.pep
PELLMRGSDERRGSNXLLWQSAYTEHNFNRELWPDLGKDELGDALRSYQQRQRRYGGGHT

SEQ ID NO: 183525 - protein, 85 aa, Glycine max
  Clone ID: PAT_MRT3847_136736C.1.pep
RLREDDRRGDGNNKKRLYQYSKYPTSIAALSFSRDGRLLAVASSYTFEEGPKAGTKADEQDAIYVRSVNEIEVKPKPKVYPNPPA

SEQ ID NO: 183526 - protein, 110 aa, Glycine max
  Clone ID: PAT_MRT3847_136737C.1.pep
WFIGKKGRGHGLGGAQTLPSPFSRVQNPGVYPGKTLEIGPRFGGLGSNGLIARPLVSHSFFPNFLFFPRNPFRAHNSSGGLGPCLFWPGPGSGSFSPIGPYSPRWVLPVF

SEQ ID NO: 183527 - protein, 367 aa, Glycine max
  Clone ID: PAT_MRT3847_136738C.1.pep
MRYVEDKGCYNNNGPTQETPNSSAMYSEFHKGKDATRVSNHHHRATMGKPTPSKWDDAQKWLVGLSKGGEKSHSKSKPRNSNADDLRLIAPVPQKEHDYSSSEKEEEENDACHDFMTNIISANAIAAQYEAEAKRVECDESNWGSNNNNNDNRFSGNTIQVQPICFRDMGTEMTPITSQEPSRTGTPIRATTPATRSPIHSGTSTPMRGQNGLQQVAEGGHGTTRKCGDQGSTSPCKKTHEDHQARKLSPLESRAMAWDEAERAKFMARFKREEVKIQAWENHQIRKAEMEMKKMEVKAERMKALAQERFANKLASTKRIAEEKRANAQVKLNDKALRTTERVEYIRRTGHVPSSFSFSFKLPSICW

SEQ ID NO: 183528 - protein, 75 aa, Glycine max
  Clone ID: PAT_MRT3847_136739C.1.pep
MALEQEGQNRNTNGVVDAGYEGGKAPKWASVSSYCRKHGVNRGPVHCRKRWSNLAGDYKKIKEWESQILEETESF

SEQ ID NO: 183529 - protein, 41 aa, Glycine max
  Clone ID: PAT_MRT3847_13673C.1.pep
LIFFYPPIFYISFHIPYKCLTINYYNLLGLAKIIFFFLSTI

SEQ ID NO: 183530 - protein, 326 aa, Glycine max
  Clone ID: PAT_MRT3847_136740C.1.pep
RKESRDVDGFRAGVGQNRNTNGVDGGDEGGKAPRLPRWTRQEILVLIQGKRDAENKFRRGRTAGLAFGSGQVEPKWASVSSYCRKHGVNRGPVQCRKRWSNLAGDYKKIKEWESQIRDETESFWVMRNDLRRERKLAGFFDKEVYDILDSLPTTLALSLSSSPPPTTTITTTTVPDDPPHLYDSNRSAPGDGEDGLLSDFEQDEEKNPPSNKDIPAPIPISEKQYLRRCQAEDVTNEKQSTSNPEMGSTSQGERKRKRLATDGEEETLQYQLIDVLERNGKMLSAQLEAQNINFQLDREQRKDHASNLVAVLDKLADALGRIADKL

SEQ ID NO: 183531 - protein, 128 aa, Glycine max
  Clone ID: PAT_MRT3847_136741C.1.pep
FFFFFFFEMRIMNFIERSQEHYKRLPRHNILHQKKVGVEHPPPRLDQPKQRLTKLKNQQQCFLSSLYVPKQQCLYVLSCLYNPAKLHLDMYNPLASIPPSTCNLPAVSFKKDILQQKLVRHLDTPFES

SEQ ID NO: 183532 - protein, 276 aa, Glycine max
  Clone ID: PAT_MRT3847_136742C.1.pep
MALEQEGQNRNTNGVVDAGDEGGKAPRLPRWTRQEILVLIQGKRDAENKFRRGRTAGLPFGSGQVEPKWASVSSYCRKHGVNRGPVQCRKRWSNLAGDYKKIKEWESQIREETESFWVMRNDLRRERKLPGFFDKEVYDILDSPAALALALSSSSPPPPTTTKTITLPAEEPLPHLYDSNRSAPGDGEDGLFSDFEQDEVAASSKKNKDIPAPIPISEKLYQPLLRRCQAEDVTNEKQSTSNPEMGSTSQGERKRKRLATDGEEETLQYQLIDVLE

SEQ ID NO: 183533 - protein, 153 aa, Glycine max
  unsure (1)..(153): unsure at all Xaa locations
  Clone ID: PAT_MRT3847_136743C.1.pep
TPHTLSDRVARFGEGVGRFFRELREMARSDPRKVVFAAKAGLSLALVSLFIYIKXEQLSKCSMWAILTVAVVFEFXVRATLNKGFTLSLGTISAGGLALGLAVLAGLPGKPKELIIRLCIFMARVRATCVKLLPGMKTYEYGCPASLVTFGIE

SEQ ID NO: 183534 - protein, 122 aa, Glycine max
  Clone ID: PAT_MRT3847_136744C.1.pep
YFFFFFFFSLFSLLDFFGFFFFFFFSIEKKNFFITRKGPNKNKTPGDLFFFFGGSPIGCLPLPENQKAITHQDKRGSKKLPKEVFFEKKKLFLAVLKKDKRGSFGGRALPPKGGLKESWLPL

SEQ ID NO: 183535 - protein, 146 aa, Glycine max
  unsure (1)..(146): unsure at all Xaa locations
  Clone ID: PAT_MRT3847_136745C.1.pep
LGETNXAXXKXXGQAXTXTXRHXAXXXGXXAGGGAPNXKXRXEADXXXGRALQGGXXTREPNXXRGGGGSXXXTXGXGXXGTLHQGNGDKXXKXXRPXANXXXKASRGSRSXXHXDTXXXPRXXAPQSKDXGREGXXXXTRVKNWN

SEQ ID NO: 183536 - protein, 115 aa, Glycine max
  Clone ID: PAT_MRT3847_136746C.1.pep
FALPTSWWVELSVMVLIIKCPKKFFSTALFLVIKPVFRDPGQGGRVIKTSNLVFWGGGYGKEPPAVKKFFGELLFHWVKTRPWGMKNIFLILGGGAPIFVSNKGRFWDFFFSLEA

SEQ ID NO: 183537 - protein, 71 aa, Glycine max
  unsure (1)..(71): unsure at all Xaa locations
  Clone ID: PAT_MRT3847_136747C.1.pep
ERSLGREAPISYKSTSGIRXNYWQLEIGVQTLKELNRILEEQVQNHAFINVDLDTQLTETELXEANHKVLA

SEQ ID NO: 183538 - protein, 141 aa, Glycine max
  Clone ID: PAT_MRT3847_136748C.1.pep
TYLPLAAYTSKKSRNRESNAWFDLENGKTEKSAGAGFKLNFRGLFKLQLSLPRGLSFRHFPTTLGIFQGPYLPGREGRGCDNPQAYPGGKQAGVQTGRLVSIPQDYLQANGDPQEGKATLGIPTSMTSTAFSTTGDCRHIT

SEQ ID NO: 183539 - protein, 281 aa, Glycine max
  Clone ID: PAT_MRT3847_136749C.1.pep
MGIERTLADRKGRDFCELPRETIASSNSRRNRRRQRKKPPVQKLFETCKVVFASAGTGFVPPHEDIDELQSVLDGIKPEDVGLRPDMPYFRTSATQRVPRITYLHIYECEKFSMGIFCLPPSGVIPLHNHPGMTVFSKLLFGTMHIKSYDWVVDSPPESPTTLKPSENQGPEMRLAKVKVDADFTAPCNPSILYPEDGGNLHCFTAVTACAVLDVLGPPYSDAEGRHCTYYHNFPFSNFSADGLSIPEEEKNAYEWLQEREELEDLEVNGKMYNGPKIVES

SEQ ID NO: 183540 - protein, 101 aa, Glycine max
  Clone ID: PAT_MRT3847_13674C.1.pep
CGFPPGLSLARLRVLGPAAFPAVAPLPRCWVAPEGPARCVSFCLSAPPSRLAVPGVSVAPLRACSCPFWAVVSVCRGPSRYLCPPPASARWVSYLPVLTAR

SEQ ID NO: 183541 - protein, 148 aa, Glycine max
  Clone ID: PAT_MRT3847_136750C.1.pep
CERINKIISSQQSLDRCTFFHLLLGLHLFFFFFFFFFFSLLNAPFFFFCIKLIKLNKSFYKPSTFLKTKKNSSFLCNMHLQFDTIFQGKPSPLSFAVFCMNIITNCRFKTAPIKCLMFHAEENKNTKKGIKIDQGSLEDKRGASNGIE

SEQ ID NO: 183542 - protein, 60 aa, Glycine max
  Clone ID: PAT_MRT3847_136751C.1.pep
RPTVALINKLAVYFMSFSLYTTTLKSIKTLPVTTEIGKPTPKMVTLSLGWSWSPYKGAET

SEQ ID NO: 183543 - protein, 93 aa, Glycine max
  Clone ID: PAT_MRT3847_136752C.1.pep
YLFHDFHYKGHTSDGKYMQWNMTMIKVLSVMMIIGSIPGFATTGLLLSAVAVSKTFFDFAERKIIMVSIFQGTSAVVGLKVYMESIFQVYKHT

SEQ ID NO: 183544 - protein, 42 aa, Glycine max
  Clone ID: PAT_MRT3847_136753C.1.pep
RWCLIPRRSISPMLNLTKILNSDALVRFHGRGGHHEWREEVS

SEQ ID NO: 183545 - protein, 448 aa, Glycine max
  unsure (1)..(448): unsure at all Xaa locations
  Clone ID: PAT_MRT3847_136754C.1.pep
NALTAVKNMSSETQESGSIGHVAEMLKANASEMSNITSASAVILKGGSIGTSRLSDVTTLAIGYVFILTLIFCYFGIVALIRYTKGEPLTMGRLYGFASIAETIPSLFRQFLAAMRHLMTMVKVAFLLVIELGVFPLMCGWWLDVCTIQMFGKTMVHRVQFFSASPLASSLVHWVVGIVYMLLISIFVSLLRGVLRNGVLYFLRDPADPNYNPFRDLIDDPVHKHARRVLLSVAVYGSLIVMLVFMPVKLAMRMAPSIFPLDISVSDPFTEIPADMLLFQICIPFAIEHFKLRTTIKSLLRYWFTAVGWALGLTDFLLPRPDESGNQENGNGEPARQERLQVVQAGVQDQGMVPFAGDDLNRAINTVGEMNAGEDYDNDEQSDSXHYAFVLRIVLLLVIAWMTLLVFNSALIVVPISLGRALFNSIPRLPITHGINAMICMHLSLEAM

SEQ ID NO: 183546 - protein, 45 aa, Glycine max
  Clone ID: PAT_MRT3847_136755C.1.pep
VSFHKCLGIWSFFWNFIAFPRKRVMMKFLQNYKAGFIGLKKKKKK

SEQ ID NO: 183547 - protein, 107 aa, Glycine max
  Clone ID: PAT_MRT3847_136756C.1.pep
MAKRSVAANSSFESTSLASLDQKLAMAKRCSHEGAMAGAKAAVAATIATAIPTLASVRMLPWARANLNHTAQALIISTVAGAAYFIVADKTVLATARKNSFNRPSKA

SEQ ID NO: 183548 - protein, 99 aa, Glycine max
  Clone ID: PAT_MRT3847_136757C.1.pep
PLANSFFSILFSFFLPFPSCSPLYSPTYPPTSILTRYNLSRVVTGLAYLFLNRPLLLAIILIDIRYIDLNDSLFVFSILVSPYTSTPHMCTLSPFATSH

SEQ ID NO: 183549 - protein, 85 aa, Glycine max
  Clone ID: PAT_MRT3847_136758C.1.pep
VLAGTPELYRDLVNLNVVASMVGLLNHDNTDIAIGVVQVLQDLTGEDVFDDNDDYARVLGDALVNNSALGLLVQNLYWLNDYDPD

SEQ ID NO: 183550 - protein, 67 aa, Glycine max
  Clone ID: PAT_MRT3847_136759C.1.pep
VVMGAADASDVVGKIEDFYDLARESMNSLGTCYSMTILGIDNFLSAFLGTSISHVSKKHGHRGWGLN

SEQ ID NO: 183551 - protein, 140 aa, Glycine max
  unsure (1)..(140): unsure at all Xaa locations
  Clone ID: PAT_MRT3847_13675C.1.pep
QPLIAQYNPPPLHRSFASSSELSSVICPSMAYSNTLFFRSPYNVQVVVAEDETEEKLLGRFRREVIKAGIVQECRRRRYFENKHEEKKRKSREAARCNRKRLPMSKTVGQKKQDVPSSKXATKREDDEDNWDLPEGDTLY

SEQ ID NO: 183552 - protein, 47 aa, Glycine max
  Clone ID: PAT_MRT3847_136760C.1.pep
LLLNYCKTATKRVDRFLAALTNYLIEIICFGHMTTVSCNSDKRVLCG

SEQ ID NO: 183553 - protein, 219 aa, Glycine max
  Clone ID: PAT_MRT3847_136761C.1.pep
PEFPLYPVFGATPDKILAQGKPKRNFKKCGEIGGRVISFCVVLLLVWRCGRPGVAAVLAYFLMSFRPVAKRVSLCGLGFCAIGILLPAPCDGLLFTYHAGRGGCSMSRYLVVVGCIMSGFDVEYRGLPFCSRSLGRSGVAADSTSGVAVREGQIEFAAVGVWRGAVARAAARRREGHKRWLEGEGGQVGGGVHIIFMGGRLVEVIACIRIGRLLGALAR

SEQ ID NO: 183554 - protein, 92 aa, Glycine max
  Clone ID: PAT_MRT3847_136762C.1.pep
RSVFQLTLLEIVCLLLWLMALKLSLFQWSRIWESLVLPCFPYLVSLVGHIVPVVDQSWMPDRFSKQIMISPQDGHPSFFFCMVDAGFLHALQ

SEQ ID NO: 183555 - protein, 72 aa, Glycine max
  Clone ID: PAT_MRT3847_136763C.1.pep
QINIPRDIVLVKAKWVFGLTVFCFYFPRKQKMVMKMCLVEFLKIFSVKMKTGNNQKMKTIKSRFQLNSFWIK

SEQ ID NO: 183556 - protein, 92 aa, Glycine max
  unsure (1)..(92): unsure at all Xaa locations
  Clone ID: PAT_MRT3847_136764C.1.pep
ARNSARXXFXXXXVLXPFXILTXCPVXXXGXMXXVLDXQYXXXEHXXXAXXXHMLLTRFVTXPEIADFYXVHFGLXXAXWLSTHSXXTGXXX

SEQ ID NO: 183557 - protein, 93 aa, Glycine max
  unsure (1)..(93): unsure at all Xaa locations
  Clone ID: PAT_MRT3847_136765C.1.pep
AFLLTWRDYGHSFVFAQVIFVEMQEGYLWHLANALPELYXDSPYDAGQVXRKALSRNEWLQKADVPTIEHMGEXHSMQRMKNAPDTNDDMDLL

SEQ ID NO: 183558 - protein, 86 aa, Glycine max
  unsure (1)..(86): unsure at all Xaa locations
  Clone ID: PAT_MRT3847_136766C.1.pep
RDWSDFVXRAMTSQAQARSLVGARPHLFPTLFSFCYACSCWALGGINWLFSYEGHLAKPLFWAIHCARHQFFPSCGSNLDPLLLVK

SEQ ID NO: 183559 - protein, 111 aa, Glycine max
  Clone ID: PAT_MRT3847_136767C.1.pep
SDWKAHSKNCGTREYKCDSGTLFSRKDGSTRHRAFCDALAEESARVTTVPAALSNLRNDHHHHLTNAQASRIPQINFSGFHSSDQLFGGGSSEALLANDHHHQQQKLRLPL

SEQ ID NO: 183560 - protein, 212 aa, Glycine max
  Clone ID: PAT_MRT3847_136768C.1.pep
MDSPFLLPLLLIFLFLSPTPSSSSIDNFHQAFPIVEPDPGHTKLRLSREGLEAIEKITNPIAAVAVIGPYRSGKSFLLNQLLSLSCYEGFGVGHMRDTKTKGIWVWGTPIDLDINGVRTSVFYLDTEGFESVGKSNVYDDRIFALATVLSSVLIYNLPETIREADISRLSFAVELAEEFYGRVKGQDVAFEPAKLLWLIQRDFLQGNRCKKW

SEQ ID NO: 183561 - protein, 50 aa, Glycine max
  Clone ID: PAT_MRT3847_136769C.1.pep
FKIILLLTNKKFIKMQTSHKILQQAQPQKRVERCQPHVSEYTKITFQSNL

SEQ ID NO: 183562 - protein, 87 aa, Glycine max
  Clone ID: PAT_MRT3847_13676C.1.pep
HELLVIECRPGNHREWRRRLEARGGGGGGHKPGTWEELETLLEGYGGCTEYDVGDVPKLVVDTTANLPLEEMCSAALDFIFAHAAKP

SEQ ID NO: 183563 - protein, 388 aa, Glycine max
  Clone ID: PAT_MRT3847_136770C.1.pep
MGVEDTDICIIKEPDHVVVYSDGISHDSGHEAGSDHHNITESYEQINETTEHHSSEESAKEYEVKECTTEISVKVSDVSNVKKCEDKLTSDSEGVLSEKSFKSHKTRGKHKPRDTGKNGSRPPVTGSAQIRPTVPQPFSLATEKRASIATRPAFEEDNKGSNKRKSLNKKNVLSPNLFKQNQLKSPVVSRMPLQPDNKKHPDDDDSCSVASITAASVRSIKSRTTVASAPVFRSTQRAEKRKEFYTKLEEKQQAMEAEKNQSEARTKEEMEEAIKQLRKSLTFKASPMPSFYHEGPPPKVELKKLPATRAKSPKLGRRKSNNGAVNLSEGDKEKGAGIRRKHHTPKTNNYGDKSDVNGLSDPKNKTKHIEGINATEVTGQANLEIGSQ

SEQ ID NO: 183564 - protein, 42 aa, Glycine max
  Clone ID: PAT_MRT3847_136771C.1.pep
IEWVNYYKFLILFFILMNKKIQIAKFIPFFSKYLFKDILTPC

SEQ ID NO: 183565 - protein, 134 aa, Glycine max
  unsure (1)..(134): unsure at all Xaa locations
  Clone ID: PAT_MRT3847_136772C.1.pep
GSGGSTTTFFSSSSSSSSMEIGWPSNVRHVAHVTFDRFHGFLGLPVEFEPEVPRRPPSAMHMFLGVSTESMQLSFDARXNSVPTILLLMQRHLYAQGGLQAEGIFRINAENGQEEXVREQLNRGXVVPDGFDVH

SEQ ID NO: 183566 - protein, 45 aa, Glycine max
  Clone ID: PAT_MRT3847_136773C.1.pep
GAAEIPNSTFHLITIRSPFLGWQMLHKISPNSGFHRRIRISLLGN

SEQ ID NO: 183567 - protein, 47 aa, Glycine max
  unsure (1)..(47): unsure at all Xaa locations
  Clone ID: PAT_MRT3847_136774C.1.pep
MVIXTXRSXXXXWXGYIXTAGXXETKXXKXXTXKTLYDSSWHTRYPG

SEQ ID NO: 183568 - protein, 51 aa, Glycine max
  Clone ID: PAT_MRT3847_136775C.1.pep
ASGSMLHVNSGKSPRSGERPSCTVPCYHSIDADPTPASLAHLSSRVRSVES

SEQ ID NO: 183569 - protein, 85 aa, Glycine max
  Clone ID: PAT_MRT3847_136776C.1.pep
KACLLSFSRCTLRTQIKESYIFKLQKVVIRINKMGNGVYIYIYIYIYIYIYYIYIYKHTHVMLIGFVSLALHRTCNMRKQEKLSS

SEQ ID NO: 183570 - protein, 194 aa, Glycine max
  Clone ID: PAT_MRT3847_136777C.1.pep
WSIRVCIIFFGGPDDREALELGKKMIEHPAVKVRVVRFVEKDDLMNGNDTVLSFSHDENGDKSYSFSTAKMNHQKEKELDEKAVGNFRSKSNEMVEYVEKVSENIVEEVIVIGSSGDYDLIRWCLVAQEWLLVGYLFAEEKVVSLMDFRSQVFAISFFLRCSLDIAMKNYCARLKLATLFLQACITFCFSWCVL

SEQ ID NO: 183571 - protein, 160 aa, Glycine max
  Clone ID: PAT_MRT3847_136778C.1.pep
MGMHIIIFRTVLSVSLFHCVLSVWCGRSLQQQQQRTPTQTQTRIRARTFSSAQPFSFSMANRHTIILMQTSQNRATRTFMDYESITQAMDGICALYERKLKELNPAIRNLSYDITDLYNFIDGLADMSALVYDSSIHAYLPHDRLWIKQRTFQHLKKLAH

SEQ ID NO: 183572 - protein, 136 aa, Glycine max
  unsure (1)..(136): unsure at all Xaa locations
  Clone ID: PAT_MRT3847_136779C.1.pep
TVFTVSLFHSAVCVWSVTANAKTRTFSSAXPSFSMANRHTIILMQTSQNRATRTFMDYESITQAMDGICALYERKLKELNPTIRNLSYDITDLYNFIDGLADMSALVYDSSIHAYMPHDRQWIKQRTFQHLKKLAH

SEQ ID NO: 183573 - protein, 55 aa, Glycine max
  Clone ID: PAT_MRT3847_13677C.1.pep
LIGGVFCYIKQLQIFVDYIKTFITRTSCNLSIHGTIFSSTSSTFQTSVKQCGLTF

SEQ ID NO: 183574 - protein, 91 aa, Glycine max
  Clone ID: PAT_MRT3847_136780C.1.pep
SYPSKPGEEPPKGGEKGKRSKATRGGVNGKKRRKIKGKKERKEGEDRAKKKGPGGEPGRARKGSGAHQSANKVARGKMTQILHKGELQKAK

SEQ ID NO: 183575 - protein, 67 aa, Glycine max
  Clone ID: PAT_MRT3847_136781C.1.pep
VRFYAFGSCHSLHYLWAYGRERNPVDFNKLDTIRHQFKGSSSRHIHNSVGKQYHPVETGEKVKGQEM

SEQ ID NO: 183576 - protein, 167 aa, Glycine max
  Clone ID: PAT_MRT3847_136782C.1.pep
ANNACWAIGELAVKVHQEISPVVLTVISCLVPILQHAEGLNKSLIENSAITLGRLAWVCPELVSPHMEHFMQSWCTALSMIRDDVEKEDAFRGLCAMVKANPSGALSSLVCMCKAIASWHEIRSEDLHNEVCQVLHGYKQMLRNGAWDQCMSALEPPVKEKLSKYQV

SEQ ID NO: 183577 - protein, 95 aa, Glycine max
  Clone ID: PAT_MRT3847_136783C.1.pep
KYYYNSKQTCTFIIIAVHCSPLCYPLLSQAYKSNHFPPDHTWVYKLLGKNLKYQIKITRPVTLFFTEGQNSLSLSFSERGFLVSSTMFAKEKKND

SEQ ID NO: 183578 - protein, 45 aa, Glycine max
  Clone ID: PAT_MRT3847_136784C.1.pep
YLFVSSAGLGISAARPRNIQMIPGTISLDREPGAEKKNQRLTRRF

SEQ ID NO: 183579 - protein, 92 aa, Glycine max
  unsure (1)..(92): unsure at all Xaa locations
  Clone ID: PAT_MRT3847_136785C.1.pep
TLPHPTXRSQLRESCXPIPPLFSSIYILHSLSIHQNSSPQISSASHFLSILHRPFPLAVLVLEIALVCISISVPLGIYHDVYLFLYYLRFRV

SEQ ID NO: 183580 - protein, 76 aa, Glycine max
  Clone ID: PAT_MRT3847_136786C.1.pep
ICCNRIVNEIKEIFWILVLFLICPLCVIAEVCWPPGSPSWSAVSSHGTMAITRLVLVLLHQHMTLLLLQMRRRILD

SEQ ID NO: 183581 - protein, 52 aa, Glycine max
  unsure (1)..(52): unsure at all Xaa locations
  Clone ID: PAT_MRT3847_136787C.1.pep
EVPFGSKFKGGGLNPPLKKGPNPLNFFFKTSKKCYFFQQLGKKFFCSFXXXX

SEQ ID NO: 183582 - protein, 29 aa, Glycine max
  Clone ID: PAT_MRT3847_136788C.1.pep
FFFFFFFFFFFFFFFFFFFFFFKVKLLFD

SEQ ID NO: 183583 - protein, 94 aa, Glycine max
  unsure (1)..(94): unsure at all Xaa locations
  Clone ID: PAT_MRT3847_136789C.1.pep
SAVKSKRVLKLHSLKCXIRNRSKHFLNENLEPTSNLNNQRRESSEQRTPSPQQSNMQCTFAITPNCNSTKITSTVNRNNLGAIRHRKMRGISRR

SEQ ID NO: 183584 - protein, 63 aa, Glycine max
  Clone ID: PAT_MRT3847_13678C.1.pep
WRACQEGTAGGVLGGGSEGAVWKLLYSVSHGVSRSTEQMSAERGAREQRGYKLLWDLVEKSGN

SEQ ID NO: 183585 - protein, 64 aa, Glycine max
  Clone ID: PAT_MRT3847_136790C.1.pep
NLHFPVILHCILYNLSVLLKNQNTVSILYSLFTKLRLQKFPWVFRFCSISLVLFVYMKISMVVL

SEQ ID NO: 183586 - protein, 62 aa, Glycine max
  unsure (1)..(62): unsure at all Xaa locations
  Clone ID: PAT_MRT3847_136791C.1.pep
MAAGVSAAMNELRPCAPISLKHVLAQELIKGLQAVSDSLLLYNTTRVLRSNESXLFLSLCWA

SEQ ID NO: 183587 - protein, 192 aa, Glycine max
  Clone ID: PAT_MRT3847_136792C.1.pep
MGEDRSEIVFFDVETSVPTRTGQGFALLEFGAILVCPKTLTELRNYSTLVRPANLSVISPLSERCNGITAAAVSAAPTFADIAHLVYDLLHGRIWAGHNIIRFDCVRIRDAFAEINQPPPEPKGTIDSLVLLTQKFGRRAGDMKMATLATYFGLGRQTHRSLDDVRMNLEVLKYCATVLFFGVKSPRYIHCK

SEQ ID NO: 183588 - protein, 106 aa, Glycine max
  unsure (1)..(106): unsure at all Xaa locations
  Clone ID: PAT_MRT3847_136793C.1.pep
VWESPFPVVGVFFTNRWIQMFVFEPVKPPNWVGAPFLKFFPENEPAFVFFYGITFKVRGHQGLFMHPSTRDFXAVMKEPPPPLKKKLFVENIAQLEIFPPSKLLSR

SEQ ID NO: 183589 - protein, 67 aa, Glycine max
  Clone ID: PAT_MRT3847_136794C.1.pep
GLKINLFIVKWESPAVGGPAPKVFGKGSTKGSGLLSLIGYCHGPLGAYNGDPFPFYEKTRIIEVSPL

SEQ ID NO: 183590 - protein, 53 aa, Glycine max
  Clone ID: PAT_MRT3847_136795C.1.pep
STKRTQKLSRKTFKGDHTMLGGITDMMLRSHTSSRNRILTQRQSIVPLVVGGT

SEQ ID NO: 183591 - protein, 141 aa, Glycine max
  Clone ID: PAT_MRT3847_136796C.1.pep
KDVEQLQLRLQLERSMRILREGAMGGASSTLSPGHRHFTAQTKDLIAEIELLEEEVINREQQVLSLYRSIFEQCVSRSTSQQSSAVASPAHTRQGSKKHPSIISSAFCSSKKFPLRTLQGLVSNNDSRNKNFGSNHGPLSR

SEQ ID NO: 183592 - protein, 82 aa, Glycine max
  Clone ID: PAT_MRT3847_136797C.1.pep
MLVMKTILNNETMNIPDSMSITDHATVIEVAGTRVKLVLDLHRLNLDLQLITDDGRQRKLKSDTWQGSRKSSIVIRTALRHV

SEQ ID NO: 183593 - protein, 310 aa, Glycine max
  Clone ID: PAT_MRT3847_136798C.1.pep
MMTRLAVVVRKLGVVALSVKTVSDDDKAGSSGAAAANSPSMARQTKNRYAPSNATVAINLKLKPASNLKWHRVLFKISGSALAGNCQNIDPKVAMQIAREVATTCRLGVEVAIVVGGRNFFCGDAWVSATGLDRPMAYQIGMMGTVMNSILLQSALEKLGVQTPRVQSTFSMPEVAEPYSRQRAITHLEKGRVVIFGGVGAGTRNPLFTTDTAAARGLSELNADAVLKGTNVNGVFDCHPRNDNITLDHISFREVVSRGVTSMDMMALAYCEENGIPVVVFNVLEPGNVSRALCGDQVGTLIDQTGRVEH

SEQ ID NO: 183594 - protein, 203 aa, Glycine max
  Clone ID: PAT_MRT3847_136799C.1.pep
TRPYGCEKTTRVIGSGGIATSHWHWFKKIEAIVGNSLSVKTVSDDDKAGSSGGGANSPSMARHPKNRYAPSNATVATNLKPKPASNLKWHRVLFKISGSALAGNCQNIDPKVAMQITREVATACRLGVEVAIVVGGRNFFCGDAWVSATGLDRPTAYQIGMMATVMNSILLQSALEKLGVQARVQSTFSMPEVAEPYSRQRAI

SEQ ID NO: 183595 - protein, 193 aa, Glycine max
  Clone ID: PAT_MRT3847_13679C.1.pep
TFILYLISTLLILVFDSVASIEGFGENYDTASLKRSSFPKDFIFGTSSSAYQYEGATNKGGRGPSIWDTFTQKYPKKIKDQSNGQIAVDSYHRFKEDVQIMNDIGFDAYRFSISWSRLLPGGNLSSGINTRAIIYYDNLINELISKGLKPFVTLLHYDHPQSIEDAYGGFLSPKVVKDFTDYAEVCFKAFGDR

SEQ ID NO: 183596 - protein, 194 aa, Glycine max
  Clone ID: PAT_MRT3847_1367C.1.pep
MEGENGKKLKILCLHGFRTSGSFLKKQISKWDPSLFIQFDMVFPDGKYPAGGKSDIEGIFPPPYYEWFQFEKDFTVYFNLEECISYLCDYITANGPFDGFLGFSQGATLSALLIGYQAQGKVLKEHPPIKFFISISGSKFRDPSICDVAYKDPIKAKSVHFIGEKDWLKLPSEDLASAFDKPFIIRHPQGHTVP

SEQ ID NO: 183597 - protein, 63 aa, Glycine max
  Clone ID: PAT_MRT3847_136800C.1.pep
PKITTWFSPKFNKKITLKKHFTLFFLNLFGEPFGGFPPGGIAVQFGGLPFIKTSLGNYRDLFF

SEQ ID NO: 183598 - protein, 45 aa, Glycine max
  Clone ID: PAT_MRT3847_136801C.1.pep
PTTLKIKWSCLPFHQVQVFWPCGGCVKLRVAPFFFLNVGKLVASE

SEQ ID NO: 183599 - protein, 94 aa, Glycine max
  Clone ID: PAT_MRT3847_136802C.1.pep
CREDDSRASPRETRESETDSRPPSSVRAAPAQRRLRIPNTPCRRCLTPASAPGGVFTSRGARLASAWLSCTDTKSNHPKQDLDGMVQGLTDWSY

SEQ ID NO: 183600 - protein, 70 aa, Glycine max
  Clone ID: PAT_MRT3847_136803C.1.pep
RSLHIHVHQNPLYSPPYPNPNPNPNPSPSTTLSFHLHIRPFLFLKKHGSKKLAPNTHLFWNLYKTKFRAT

SEQ ID NO: 183601 - protein, 98 aa, Glycine max
  Clone ID: PAT_MRT3847_136804C.1.pep
KEAQNFYSVDQNRQKRGYSKNLNTPGGGGFFILSPMLKKAFKGESKKTLLKQNLEKGERSPDLGIKKPENIIKPGEQKKYFITHKALVFGINILKKNP

SEQ ID NO: 183602 - protein, 94 aa, Glycine max
  Clone ID: PAT_MRT3847_136805C.1.pep
KLPPNKLIFITLNNILFLFPSFCFLFLFFFFFSFFFFFFFFFFFFFFLLVYQYSKLLSNQITLRSISSYQNIFKLLSGLNVLLFQLALFFFSHF

SEQ ID NO: 183603 - protein, 145 aa, Glycine max
  Clone ID: PAT_MRT3847_136806C.1.pep
MPPRRCTAAYSAVAQMGSNTSESDAEELVMRCLSCEEEYDVDDSGTCRECYQEANEAEEELRHEIEELKSKVSFLTLPSPNLNASTADVVLVPVDDSDDAPIPAHKHLLVSRFLLFRAMLKNDMTERRSGTIKISDVSYDTFMLC

SEQ ID NO: 183604 - protein, 276 aa, Glycine max
  Clone ID: PAT_MRT3847_136807C.1.pep
MKWDMQMEEIEAIMEKIWDLHDKLSDAIHSISRSHFLTSVKILKNNSPPHLPNAAAPDDRSSGFVFVKDFRPADNDSDGDSAVREAKSLNAIRSALENLEDQLEFFHTIQTQQCVERDAAIARLEQSRIVLAVRLAEHRGKKYKVIEEALAFIGDVRDAGSLVAPDIFYGQPNCSAENIATEKAKRSNILINIFISSFNFVKRSLGLDHMGGIVGNAALVAVSMIALLHLHQVTNHEQPFGQENTVHRNSTVRRTRLVGSSSEAHSSNLDVLLARG

SEQ ID NO: 183605 - protein, 62 aa, Glycine max
  Clone ID: PAT_MRT3847_136808C.1.pep
VAAPYQFHCINLRENSANMLVYQDLLTGKLISLFFFLSQLFLVDLLPKICLCCASDFSIVEY

SEQ ID NO: 183606 - protein, 230 aa, Glycine max
  unsure (1)..(230): unsure at all Xaa locations
  Clone ID: PAT_MRT3847_136809C.1.pep
MKWDMQMEEIEAIMEKIWDLHDKLSDAIHSVSRSHFLTSVKTLKLNNSPPHLPNAAVAAADDRSSGFVFVKDFRPLAVADNDNDDDDSAVREAKSLNAIRTALENLEDQLEFFHTIQTQQRVERDAAIARLEQSRIVLAMRLAEHRGKKYKVIEEALAFIGDVHDAGSLVAPDVFYGQPNCCSAENLATEKVKRSNILINXFVSSFNXVKRSLGLDHMXGIVGHAAXGCR

SEQ ID NO: 183607 - protein, 72 aa, Glycine max
  Clone ID: PAT_MRT3847_13680C.1.pep
PHFRSRKFPMSTTTPYFLGGIIIIFTHFTLSNSSLESTTAMANATEKLSALIKAGVRSNEITQNVKNGFISL

SEQ ID NO: 183608 - protein, 75 aa, Glycine max
  unsure (1)..(75): unsure at all Xaa locations
  Clone ID: PAT_MRT3847_136810C.1.pep
SSYLIIRIRTARGIGKKXALLTKIEPLPVSXRLLFEVQKLNTLSSNTTSPMLTRLIEICKRLRSLDDDCAFAFEN

SEQ ID NO: 183609 - protein, 59 aa, Glycine max
  Clone ID: PAT_MRT3847_136811C.1.pep
LEPSKSNTEIDATIFRLLVLIYLYTQVYDHALARQERLGLWFGVFLKLEIRINFRGSAT

SEQ ID NO: 183610 - protein, 44 aa, Glycine max
  Clone ID: PAT_MRT3847_136812C.1.pep
ASGAAASNRQAMCTRSTQSRHIGRTSVIITLFNCKVSKQRTNTN

SEQ ID NO: 183611 - protein, 51 aa, Glycine max
  unsure (1)..(51): unsure at all Xaa locations
  Clone ID: PAT_MRT3847_136813C.1.pep
QKKKKKSIMNDNRKNQMLASLLSXXXSILSSYLTGPWKVXKISDDLLNPIC

SEQ ID NO: 183612 - protein, 81 aa, Glycine max
  unsure (1)..(81): unsure at all Xaa locations
  Clone ID: PAT_MRT3847_136814C.1.pep
MHSIPIYFIMXVFTFXDXTXSPXAPATLYKALVTDADXVIPKAVXAFXSVENVEXNGGPGTIKKIXFLEDGETKFVLHKIE

SEQ ID NO: 183613 - protein, 83 aa, Glycine max
  Clone ID: PAT_MRT3847_136815C.1.pep
RLGASLECVNAGSKPVSPWAEYVVRCGHKMQSIPMHRLLGSTNIVSSSALRLSIVSCCLFRRVCLFTFDHFSKVWFICVMTDN

SEQ ID NO: 183614 - protein, 35 aa, Glycine max
  Clone ID: PAT_MRT3847_136816C.1.pep
LVEELMLIYKSLGNIQTSEQEKAPKSKRNAGNVVK

SEQ ID NO: 183615 - protein, 177 aa, Glycine max
  Clone ID: PAT_MRT3847_136817C.1.pep
MPFARCNSQIPAPLPSPIPTGRGTRSAANEIFSQFLEKTLQIPELTLPGPHLPPAPAEIDFRSLTLVSTDLMLRSAREFGAFRIRCHGISGSELGTMADEAERVFQKSRNVVVVERNGTGGEMIPCVRSSKGALEFAAQTMTGDQTSSELLGSLRVRSHALGFRRCACVSGASSRNF

SEQ ID NO: 183616 - protein, 50 aa, Glycine max
  Clone ID: PAT_MRT3847_136818C.1.pep
GNCMPRLSKCQKRGTWLQLIEALLETTFNLETLNQQQKYFLWVLQRTTFY

SEQ ID NO: 183617 - protein, 101 aa, Glycine max
  Clone ID: PAT_MRT3847_136819C.1.pep
FCEDNPMFPPFFFKKGGPSLKAPGGPPFWGLKGFFKISLKNPKKVNPGAGFFFYYTPRGPKTKKRGGFGFFLGRPPPKRESPFPLGFFWGPQKALSFGGFG

SEQ ID NO: 183618 - protein, 75 aa, Glycine max
  Clone ID: PAT_MRT3847_13681C.1.pep
DMQFLFLLAPIGSLRRAVLYNSSKNRPCKQPVSVMCFSVGVTGSRQACECRSSGSCVVACKSTCCVLAQFSFLSP

SEQ ID NO: 183619 - protein, 86 aa, Glycine max
  Clone ID: PAT_MRT3847_136820C.1.pep
GSHRVKFQGTLNDGNDYATKLHCWPHKGTWLSFLHHSQNDITCDVLKATRQSIDRNPLILYMLPGKNKAPFLERRDQEGLLSVQRA

SEQ ID NO: 183620 - protein, 104 aa, Glycine max
  unsure (1)..(104): unsure at all Xaa locations
  Clone ID: PAT_MRT3847_136821C.1.pep
QGGGQHAASIILYPFPRSEANFNQSLDGLILPLIELLTRTDFPMKXNLNHYYFLRGHKMVSLHNDLWKPPTPNKVMADPHTLLHYTNVLYALADAGYFSMKNLN

SEQ ID NO: 183621 - protein, 84 aa, Glycine max
  Clone ID: PAT_MRT3847_136822C.1.pep
CEKTTEGLTGPQDDPRRDQSLHSKQTSYQTSINPIEEAGYQSTRDNSKSQHKLEYTPVSTTLKRIIKKVTLFYIYVKLQSNPQI

SEQ ID NO: 183622 - protein, 76 aa, Glycine max
  unsure (1)..(76): unsure at all Xaa locations
  Clone ID: PAT_MRT3847_136823C.1.pep
MLNMRNLACLCIHSDRYSSRFFSAELPDAYPILGPHAGSMPVIPXLFLMLTVRCQAAVSCREICVICVMSEKRMKT

SEQ ID NO: 183623 - protein, 59 aa, Glycine max
  Clone ID: PAT_MRT3847_136824C.1.pep
LISNNLKNLRHLNGFKLIRKQSHQEIVSLTISNHVDVLIHSILISKKSNTNKLSQFSYM

SEQ ID NO: 183624 - protein, 283 aa, Glycine max
  Clone ID: PAT_MRT3847_136825C.1.pep
MTDDRVHPIPNLAMSPATAHWTSDAIHGGPLRRVDLDSGTNGWASPPGDLFLLRSPNYFTKRQKSPAGDYLLSPSGMDWLKSQSKLDNVLSRPDNRMAQALRQAQAQGKSLKSFIFAVNLQVPGKEHHSAVFYFSTDEPITSGSLLSRFIEGDDAFRNQRFKLVNRIVKGPWIVKKAVGNYSACLLGKALTCNYHRGPNYFEIDVDIGSSAIANAILRLALGYVTSVTIDMGFVVEAQSEEELPERLIGAVRVCQMEMSAATVVDAPNAPRGNKVNHLSGNDE

SEQ ID NO: 183625 - protein, 221 aa, Glycine max
  unsure (1)..(221): unsure at all Xaa locations
  Clone ID: PAT_MRT3847_136826C.1.pep
LLDSIEKLNLVPSEITYATVIYALCREGFLLDAEHVYRKMVLKGFQPKAQVYNSLLDGISKFGQLEKAFELLNDMETKYIEPDSLTISAVINCYCQKGNMHGALEFYYKFKRKDMSPDFFGFLYLIRGLCTKGRMEEARSVLREMLQSKNVVELINTVNKEVDTESISDFLATLCEQGRVQEAVTVLNQIACLLXPVQRLSTYYQGFHQQKIYEWKDFGSI

SEQ ID NO: 183626 - protein, 98 aa, Glycine max
  Clone ID: PAT_MRT3847_136827C.1.pep
MPHMELRSTFTTCFFLLILILALPRFSRGESEALHTEIYEIDYRGPETHSSGVPPPHHFHIGKQHSTSHPQKGSVRGTKALGLRDSTYDENKVKKVHE

SEQ ID NO: 183627 - protein, 307 aa, Glycine max
  Clone ID: PAT_MRT3847_136828C.1.pep
TTAIVSDFSQVVVGCYMGKIHFLDFLNGRICWIFQTSGEVKAQPVVDTCRQLIWCGSHDHNLYALDYKKHCCVYKLSCGGSIYGSPAIDEVRGLLYVASTGGRITAISISASPFTILWLHELEVPVFGSLAVAHNGTVICCLVDGHVLALDPNGSIVWKKTTDGPIFAGPCIPSVLPHEVLVCSRSGGVYSFKLEKGDLLWEYNVGDPITASAYVDEHLQLESDASHSSDRLVCICSSSGGIHLLRVNMNHSEDANQQRRDVQEFAKLNLPGDVFSSPLMIGGRIFVGCRDDYLHCIALEIPKQHES

SEQ ID NO: 183628 - protein, 116 aa, Glycine max
  unsure (1)..(116): unsure at all Xaa locations
  Clone ID: PAT_MRT3847_136829C.1.pep
SLISLPGDTTVNPAGADMIVPFTDLKFMAGLLTRETNNDITCIASKGDMSAMHAKCDHTSYTKQARYYLPTCTNLGDARLAXMIEYLIKIGMMPDLEFDSYHCFMYREHIMSPAYY

SEQ ID NO: 183629 - protein, 236 aa, Glycine max
  unsure (1)..(236): unsure at all Xaa locations
  Clone ID: PAT_MRT3847_13682C.1.pep
VSQLSLVKRAPNTKNKRILVAKREAEMSKGVKVLAELEKIRTAIEEDTKRVASLSTGAEASGVDEKVLQQLLHRGYYCRDELIQSTHSLVLYLARKYMGMGIALDDLLQAGYVGVLQGAGRFDSSRGYKFSTYVQYWIRKSILRVVARYARGIVIPXINQIQKARKAMKSTHKKCPDDYEIAKMTGLSLDKIKSASNCLRIVASIDQKVGDYLGVEYMRKVQSLVNVWEYEKDLCL

SEQ ID NO: 183630 - protein, 102 aa, Glycine max
  unsure (1)..(102): unsure at all Xaa locations
  Clone ID: PAT_MRT3847_136830C.1.pep
MMKSAMCASQPAALLVAEVPPMAAAAATCSPTQWTSCLTTLNSRTAPSSACCHKLLEHKPCFXATSPDPSLTQDGNSAHAIITARPCGIDPPTCELTSYICI

SEQ ID NO: 183631 - protein, 114 aa, Glycine max
  Clone ID: PAT_MRT3847_136831C.1.pep
EVERLKIATGEALNQSESFNLGMHQMPYAGPNFFSIPPHSGPSGHQNMQLPPFGHSQSTVPTHQLQQTNSHQMSDILQNDQLGRLQGLDISSKGTPMVKSEGPSISANESSTTF

SEQ ID NO: 183632 - protein, 195 aa, Glycine max
  Clone ID: PAT_MRT3847_136832C.1.pep
LCIPRLYYAADAADVSVAGLATRVTRYPDNFHWYCDCNYTGCWCSCLSTCCCCSSRLFMLPRNLHEKPPCVPFCNKHYSCASSTAPCASCQSRCCCIWLLRYPLSCLRLDPYKWPPTKERCLQYRPSSARPLDRCSRKCFRHLPPGYHSYWLTRSPSTKLPLLSYFRTGPTQFVPTSDNTKPRCTAPGTFLAIDR

SEQ ID NO: 183633 - protein, 66 aa, Glycine max
  Clone ID: PAT_MRT3847_136833C.1.pep
PPAVRPDSSSREPRFLDRTELAVVTSVVNWSRTLAQSDSVRTTGTKNVRLKSPFPLWRGFTVKIRL

SEQ ID NO: 183634 - protein, 72 aa, Glycine max
  Clone ID: PAT_MRT3847_136834C.1.pep
PIDQQNDTQCSNKILRCTNQSPPISLSPLKSRIVLVSSCQTILNDRDISNPHTAPHFHPSPLSIHAPGVAEH

SEQ ID NO: 183635 - protein, 72 aa, Glycine max
  Clone ID: PAT_MRT3847_136835C.1.pep
DCSIIRAEVHSRGKMVSSLSRTSSSALQIIMGRIIVARAIHRHGICWQFIQEFRKADFARSGKWTWVIKRHL

SEQ ID NO: 183636 - protein, 119 aa, Glycine max
  unsure (1)..(119): unsure at all Xaa locations
  Clone ID: PAT_MRT3847_136836C.1.pep
ITINNKHLITSIICTFEEGKMIGRLFCFLLALQIVSLVSAVRKPFLPAKEEALQSPPPHTIEPKKGLMGIEGTSETMKEAYEGGVSKIGSSPPSCEHKCYGCVPCEAIQVPSTSTXRSH

SEQ ID NO: 183637 - protein, 488 aa, Glycine max
  Clone ID: PAT_MRT3847_136837C.1.pep
MELMGGGKFSRCFVVVVVGVLFLVGSVSGIGVNWGTQASHPLSPSKVVKMLKDNGIQKVKLFDADAGILDALKKSGIQVMVGIPNDMLYTLANSVEAAEKWVSKNISKHVSSGGVDIRYVAVGNEPFLSTYNGSFEATTLPALQNIQAALTRSGLSNRVKVTVPLNADVYQSSSEKPSDGGFRPDINNVMLQIVKFLNDNGAPFTVNIYPFISLYADPNFPVDYAFFNGYQPTINDNGRAYDNVFDANHDTLVWALQKNGFGNLPIIVGEIGWPTDGDRNANLQYAQRFNQGFMSRYMSGKGTPMRPGPIDAYLFSLIDEDAKSIQPGNFERHWGMFYFDGQPKYQLNLGSARGNGLVGASGVDHLAKKWCVLKPSANLNDDQLAPSVAYACQNADCTSLGYGTSCGNLDVHGNISYAFNSYYQINDQMDSACKFPGLSMITDKDPSVGDCKFRIMIQTDSAEPHGKVGYLTTVLCFFVLLLFCNLWF

SEQ ID NO: 183638 - protein, 118 aa, Glycine max
  Clone ID: PAT_MRT3847_136838C.1.pep
MMGGGKFSSFFVVFVLLVGSGSGIGVNWGTQSTHPLSPSKVVKMLKDNGIQKVKLFDADAGILDALKKSGIQVMVGIPNDMLYTLANSVEAAEKWVSKNVSKRVSSGGVDIRYVAVGN

SEQ ID NO: 183639 - protein, 205 aa, Glycine max
  Clone ID: PAT_MRT3847_136839C.1.pep
MACNSISQAASMGTQICTQIASIFSKPTHPYPAPLDLLVTELTSVASQKGNVFLYGVGREGLMLKALCMRLFHLGLSAHFVFDMTTPPIDAADLLIASAGPGGFSTVDALCAVARSNGGRVLLLTAQPETGSCVKHANAVAYVAAQTMADDDADAERDAKSRPLLPMGSVYEAALFVLFEMVVYKLGEALGESPESVRSRHTNLE

SEQ ID NO: 183640 - protein, 93 aa, Glycine max
  unsure (1)..(93): unsure at all Xaa locations
  Clone ID: PAT_MRT3847_13683C.1.pep
EYXLRKGWIPWLEFGLEHGFVFRELFWSPGFYDGRFWFLWKLPLFGWPDAPPVLEGVXEVFFFFPHGFLRVVGFFPPRRGGGGGFFAFGPQGF

SEQ ID NO: 183641 - protein, 52 aa, Glycine max
  Clone ID: PAT_MRT3847_136840C.1.pep
LAVFLKRWDWENLGVTQFNGLAENPLFASWGNREEARTDRPSQKLSILNGKW

SEQ ID NO: 183642 - protein, 64 aa, Glycine max
  unsure (1)..(64): unsure at all Xaa locations
  Clone ID: PAT_MRT3847_136841C.1.pep
TGALNFFIFSQGRFLNASSPSLVSFQSLDDLSKPLKLFPIPVRGWVEKKKKKKKKKKXXLKKKK

SEQ ID NO: 183643 - protein, 126 aa, Glycine max
  Clone ID: PAT_MRT3847_136842C.1.pep
ARKKPLFFPFWGKGAQNKGCRGRKNSRRGGRLAPGPGKGPSPAPIFSPATAFPPGQALKKSQKWGCCPRFGGWGLFFFVGLFRFRAPVIFVPPPSVGFSLLGTPPMFVLFIATLEFFGYFFFFLPF

SEQ ID NO: 183644 - protein, 138 aa, Glycine max
  Clone ID: PAT_MRT3847_136843C.1.pep
LVNETSLLHLLGATIAQDEDIDKMSVLVTDWANGICIAENERFFSLLTHRDMPVQIAFRLLVQSGLPRLSYLCRIMPPSSINAAIHNFDSLILKTLWKLFKVSTNSLSADSLSTMSAQVHLKMKNGGLGITQYSTIAP

SEQ ID NO: 183645 - protein, 128 aa, Glycine max
  Clone ID: PAT_MRT3847_136844C.1.pep
MEEEEIECFECLQLRIKSDFSEQVFFNYAISTSAFPFGSSAIVNISGTADGESSGAQFILQYMPSRDKNCFINYVNEYILDSGEITTRSSDPGIGSSEDNNAVNVRITSSDDSDSGKAFSGSTSCSHS

SEQ ID NO: 183646 - protein, 46 aa, Glycine max
  Clone ID: PAT_MRT3847_136845C.1.pep
VPLITELRVYILVVSTHKFNPLRPLCDHFSLSPNHISKSTEWLKIH

SEQ ID NO: 183647 - protein, 190 aa, Glycine max
  Clone ID: PAT_MRT3847_136846C.1.pep
MVRQSVVMMLITISIMCAMAVTESLKVKAGNWGASFEGENKETVTNLEFYFHDTLSGQNPSAVRVAEPLDKKKTSMTLFGAIMMADDPLTETSDPKSKIVGRAQGLYGSSCQQEIGLLMAMSYSFTDGPYNGSSFALLGKNSAMNPVREMPVVGGTGLFRMARGYALAKTHWFDPTTGDAIVAYNVTLLH

SEQ ID NO: 183648 - protein, 48 aa, Glycine max
  Clone ID: PAT_MRT3847_136847C.1.pep
KTKFPSLGNPTCYLPMKLLPKTFTLQTQLWSHSKNTLNLPTILPILQP

SEQ ID NO: 183649 - protein, 140 aa, Glycine max
  Clone ID: PAT_MRT3847_136848C.1.pep
MSILEILKQSNSYLPHVLIASILLALIYPPSLTWFTSRYYAPALGFLMFAVGVNSNENDFLEAFKRPAEIVTGYFGQFAVKPLLGYLFCMIAVTVLSLPTTVGAGIVLVACVSGAQLSSYATFLTDPQMAPLSIVMTSLS

SEQ ID NO: 183650 - protein, 79 aa, Glycine max
  Clone ID: PAT_MRT3847_136849C.1.pep
IEGVYYEKKLSFVQWIIRVKQIFQTKVGKPLNMPFTKSNKSSLTKGRMGSRVIKEPEVDANIFYKRFCLIIKAPRKLHP

SEQ ID NO: 183651 - protein, 212 aa, Glycine max
  Clone ID: PAT_MRT3847_13684C.1.pep
MGRGGTAAAAVEIAEPGSRPVFFKEPRYRGVRKRPWGRFAAEIRDPLKKARVWLGTFDTAEEAARAYDTAARTLRGPKAKTNFPLSPPFYHPDPFSDHRYFDGAGAGEDFQDHRRPTSSGMSSTVESFSGPRAAVPAKAPVIVNRRYPRTPPVVPEDCRSDCDSSSSVVDDGDGDNVASSFRREPLPFDLNVLPLDDADVATDDLFCTVLCL

SEQ ID NO: 183652 - protein, 43 aa, Glycine max
  Clone ID: PAT_MRT3847_136850C.1.pep
SLVLLPAVLILSLEGHAHYHNSLPDKHSTEKPPAYTPIADKPP

SEQ ID NO: 183653 - protein, 54 aa, Glycine max
  Clone ID: PAT_MRT3847_136851C.1.pep
YGLNRHWGPQDNGPHEFVKQNNDPFLLKKGNQEGKNSGVPNLIPGKIFLNKIIA

SEQ ID NO: 183654 - protein, 125 aa, Glycine max
  Clone ID: PAT_MRT3847_136852C.1.pep
MIKLECLLLVLVLMTSVVARKEPLLGRWSPIKNINDPKVIEIANYAIATFDKRFGTKKKLEKMIEGETRTVEGLKYKTRIVAGMDYFLIFRANDEYGEFQNYGATVRVIESLHFRNLTGFVPANS

SEQ ID NO: 183655 - protein, 66 aa, Glycine max
  Clone ID: PAT_MRT3847_136853C.1.pep
RWIQIQQMRICITFFLFQIELNFKSCYFQKFHALFNLFLKFYMICKSLIPNIFLGFYNIDYIFIPS

SEQ ID NO: 183656 - protein, 38 aa, Glycine max
  Clone ID: PAT_MRT3847_136854C.1.pep
LIDALDLRLPGTPTTFFKPCTIIDGSTRKLTMWLQLSH

SEQ ID NO: 183657 - protein, 351 aa, Glycine max
  Clone ID: PAT_MRT3847_136855C.1.pep
MSQPNHPLNLNDDNRERCKNTIKQHEDNLKFLNSQSNQLAESIFDLQVSLARYHSTNVITLENGNGAFHTEEETMEQVMKKENSAASIFSWLKVNAQTSNLTLTKDVVGVVATLAKVESDDLSRILSEFLGLETMLAIVCSSYEGINALEKYDPEGLINCNGGLHGIGSSIGKRINGRFVVISLEDIRPFVGGFVANDPQKKLALPKPRLPNGECPPGFLDYAVNMIHLDSKYLSFLTDSGYGLRETLFYGLFSRLQIYKTRNEMLLALPCIHDGALSLDGGMIRGRGMFALGSRKDVEVKFPLISGGSDVPPNYIETEEAVRKLNWETSKLAADKHREQQLLDYRKGKLH

SEQ ID NO: 183658 - protein, 113 aa, Glycine max
  Clone ID: PAT_MRT3847_136856C.1.pep
GFKGPIGILGLGPREKKPVRELASHCGGPNFDKGGGFAPFPIAPDGGGKTAEAFYLAGGKISRDPGPNPVLKPKVPPGVGPEGGKPVFVKNVAFGGGGGGFFWGGSPGPFWGG

SEQ ID NO: 183659 - protein, 37 aa, Glycine max
  Clone ID: PAT_MRT3847_136857C.1.pep
HTSGKNLYLVLMHHDLVQHHSKLFSPRIRLRQTHLLH

SEQ ID NO: 183660 - protein, 102 aa, Glycine max
  Clone ID: PAT_MRT3847_136858C.1.pep
IRVVNHTGFLSHGLPMMHKQMCGVLTWQQIAAAIVLCGCYSRLSITACQLPCLVLVCVMCCAIPISQSSVFTAPCTPLFCLKKEHHCFALCCPTAIDLLIMP

SEQ ID NO: 183661 - protein, 60 aa, Glycine max
  Clone ID: PAT_MRT3847_136859C.1.pep
SAFYVTESCFLTRPRKMMFCIQLWLCLAIELRTNENAKPLYGRLAHSRYGKKRTVSHIWT

SEQ ID NO: 183662 - protein, 109 aa, Glycine max
  Clone ID: PAT_MRT3847_13685C.1.pep
MSSFRALFFFFLINVSLLLTLSSAADPFVSYEFEVSYITASPLGVPQQVPLFLSLHLGVCSCKISSFTCRSASWDTIRYQCDTFFQHLKLVKGLLCDCGCHYEVFCFFD

SEQ ID NO: 183663 - protein, 105 aa, Glycine max
  Clone ID: PAT_MRT3847_136860C.1.pep
KFKILWSPVRSKFWNLRKPPKTPPHFMPVELPLLLDMDKPKAFLNQRIWYFDPKPFEAPSFFFLKAWGWETPPQKKPPGGPNSLKICKIIGSACFTKKKKVNSFF

SEQ ID NO: 183664 - protein, 41 aa, Glycine max
  Clone ID: PAT_MRT3847_136861C.1.pep
MCLTPPQYDLQTFKLQPINESIVSREMTRRYMTDMITYADT

SEQ ID NO: 183665 - protein, 111 aa, Glycine max
  unsure (1)..(111): unsure at all Xaa locations
  Clone ID: PAT_MRT3847_136862C.1.pep
ARAQVNGRFVHTRPASNRMELTPMTELLGPGLKVDSKDHRDTTALHMATAELHVDRVNSLVRNGANDCVEHGHELRSCTXKEMLQKREIGHLMNATEDMLKEDAIKGRQKE

SEQ ID NO: 183666 - protein, 116 aa, Glycine max
  Clone ID: PAT_MRT3847_136863C.1.pep
GSTNCSKIQPIWWNTLTWLHIKGAFPLSPKQHFLQHLGVQLDGVRMKRWQYWWLALTWSIWKLKNSIVFSNATFNANALFEEATFLLWSWLRGFEKGFTVHFNQWASSFTQSFLYQ

SEQ ID NO: 183667 - protein, 185 aa, Glycine max
  Clone ID: PAT_MRT3847_136864C.1.pep
MEVTWTSQDSDCDVYGICGSFAICNAQSSPICSCLKGFEARNKEEWNRQNWTGGCVRRTQLQCERVKDHNTSTDTKEDGFLKLQMVKVPYFAEGSPVEPDICRSQCLENCSCVAYSHDDGIGCMSWTGNLLDIQQFSDAGLDLYVRIAHTELDKGKNTKIIIIITVIIGAVVIITCSCAYVMRRT

SEQ ID NO: 183668 - protein, 75 aa, Glycine max
  Clone ID: PAT_MRT3847_136865C.1.pep
VFAGDRPVLSKHMIGKLHCVAYLVIDTWRPACQVLKGGIDENALVINYVQCQTGAIPFPIPVIYVLCESLKKLKS

SEQ ID NO: 183669 - protein, 163 aa, Glycine max
  Clone ID: PAT_MRT3847_136866C.1.pep
MAEEEEERRILVAVDEGEESMYALSWCLKNLSFQNSKDTLILLYVKPPRVTYSAFDGTGYFFASDITATMERYSQQVADCVLEKAKKLCKNIENVETRVENGDTRDVICQMVQKLGADVLVMGSHGYGLIKRAFLGSVSNHCAQNVKCPVLIVKKPKPTAGET

SEQ ID NO: 183670 - protein, 162 aa, Glycine max
  Clone ID: PAT_MRT3847_136867C.1.pep
MAEEQQRRILVAVDEGEESMYALSWCLKNLAFQNSKDTLLLLYVKPPRVTYSAFDGTGYLFSSDITATMERYSQQVADCVLEKAKKLCNNIENVETRVENGDPRDVICQMVQKLGADVLVMGSHGYGLIKRAFLGSVSNHCAQNVKCPVLIVKKPKPTTGET

SEQ ID NO: 183671 - protein, 47 aa, Glycine max
  Clone ID: PAT_MRT3847_136868C.1.pep
SFFQHHNWGVLMLHAKGLSLAWSAPAPRLCSTSMEFHIPNGQFYFVP

SEQ ID NO: 183672 - protein, 110 aa, Glycine max
  unsure (1)..(110): unsure at all Xaa locations
  Clone ID: PAT_MRT3847_136869C.1.pep
QQPTKAHNDNGDQCDSCQRCVTLCVRELYTLKKGPAWGHMQRCFELTVHMNGMAIFGDERQWLNVSSDGKTTGSLSHKGRAAAWFTAKXXIKGEHRMTQNLXASVKXXXQ

SEQ ID NO: 183673 - protein, 150 aa, Glycine max
  unsure (1)..(150): unsure at all Xaa locations
  Clone ID: PAT_MRT3847_13686C.1.pep
QLLLLFSLLSYSLGARAFFFTLKYLFQRSLYVRYLPPGXSFSIIGNLNLEEQPIHRYFNRMSQKYGIIISLWFGSRLVVVVLLPTVYQECLTNHDVTLANRARSRSGKYISYDISTDGFCFHGESWLNSXRLTFFDVLSTLCVHLFSGIR

SEQ ID NO: 183674 - protein, 134 aa, Glycine max
  Clone ID: PAT_MRT3847_136870C.1.pep
MNWVHSQICHSTDAINNPTSICSSSSESLPYSSAYKKQLAPPPPLDSSSGTRISPAVVFIFVILAIVFFISGLLHLLVRFLIRHRPSSSSSISQSNRYPNDMSESNDPYQRQLQQLFNLHDSALDQAFMDALPV

SEQ ID NO: 183675 - protein, 87 aa, Glycine max
  Clone ID: PAT_MRT3847_136871C.1.pep
QNTIFPQNKFQRYHIGLATLKKTSLQVTYCCSSRRNHEGRIGGFVLYRILEMSFEDSTLIKIFFSMWWSNDKQRQLVAITGGKWWWR

SEQ ID NO: 183676 - protein, 53 aa, Glycine max
  Clone ID: PAT_MRT3847_136872C.1.pep
SSSGCSTFTIHRVESALSTDSVPHVKGLQSTVPSMSVECVSRLPTRYRIAESQ

SEQ ID NO: 183677 - protein, 39 aa, Glycine max
  Clone ID: PAT_MRT3847_136873C.1.pep
HCISSLCPRMCKYAINPNFFLIRDHFLVRSESRVIYLLA

SEQ ID NO: 183678 - protein, 49 aa, Glycine max
  Clone ID: PAT_MRT3847_136874C.1.pep
SSRLWVDFLKHIVCHINLPKITPNLNITYLTPFNLYHPIYYLTLKTIYT

SEQ ID NO: 183679 - protein, 131 aa, Glycine max
  unsure (1)..(131): unsure at all Xaa locations
  Clone ID: PAT_MRT3847_136875C.1.pep
SSEAEVQDRGDYDFLGLNKDEEDVPYPLEEGIATDFQKVTVWNQSEIKHRLLEMLHRSDRRCSSSREEEGXMDXKRKKMTHDXMRLKENIEDNIDGDHDHHKDEDTNVPVEKVEVVETAHAEEKIGFLGSI

SEQ ID NO: 183680 - protein, 54 aa, Glycine max
  Clone ID: PAT_MRT3847_136876C.1.pep
TRVGGLKIHHNWRHLVSPKHIMGSLSGDTRDFRYANTFKWIQKLLIQNDSHTHI

SEQ ID NO: 183681 - protein, 111 aa, Glycine max
  unsure (1)..(111): unsure at all Xaa locations
  Clone ID: PAT_MRT3847_136877C.1.pep
MGSSVTASVALKPVPNTVEKSLVTGLTYLSRNSSSFTAEASVKKIKTDXTXGTKRGMALNDGTDASGTNXKGKGVYHIVDXYWANVYGYSPIYDTKDWAATDDAYAGTTTG

SEQ ID NO: 183682 - protein, 140 aa, Glycine max
  Clone ID: PAT_MRT3847_136878C.1.pep
DSHGSDDVSSNPADETNDECSDASQELNNQVLVDGIICSKSHSEEMMSDPISDKCDSPSRTSNSELEMKNKVAAAPPVDRLDSSTKCQSISPIDTSGSSHPVDILKVQALVQETWADAWVILIHVQKKKTLTRSVTHPLL

SEQ ID NO: 183683 - protein, 49 aa, Glycine max
  Clone ID: PAT_MRT3847_136879C.1.pep
KLTCLQGNEALKKKLESITSSTGLSHSVRPEHSRNYHQKHLCHFHQNTF

SEQ ID NO: 183684 - protein, 137 aa, Glycine max
  unsure (1)..(137): unsure at all Xaa locations
  Clone ID: PAT_MRT3847_13687C.1.pep
PKPTSTVVRYQLHYDDQGRKVXSMVTFRGKLTNXGNPVHATSVTYVSTKRLEGYIEDTDXCYETTGVYPEKDTGWHHVRXGTEGDTIXQLHYAIGGYAXIHIGREHETTEDNGLNTCSTYRTTGVYPGTDTRNQLHA

SEQ ID NO: 183685 - protein, 81 aa, Glycine max
  unsure (1)..(81): unsure at all Xaa locations
  Clone ID: PAT_MRT3847_136880C.1.pep
CXXKWXFPXQCPEQGSXQAXLRVLPALLTXXXXLSSXASXTTXLXRGHAKQPLXPPNVXRAXLWTLGXXDVHHESGSXPSC

SEQ ID NO: 183686 - protein, 84 aa, Glycine max
  Clone ID: PAT_MRT3847_136881C.1.pep
IVNSTTPPPLFATIISSYIIIRSPSRPPVFPALARALNLSLTYTCANVLAFPHNTLPHPSISDVSKIVAPSIGGGLCDVPPRDE

SEQ ID NO: 183687 - protein, 74 aa, Glycine max
  unsure (1)..(74): unsure at all Xaa locations
  Clone ID: PAT_MRT3847_136882C.1.pep
KSQLGAXSGSSQESSSSSSSSAATTTTTSSSSYKKNESKFNKTCDRPRRRNPEDQESHSHPHQFHMQFQPPSPQ

SEQ ID NO: 183688 - protein, 56 aa, Glycine max
  Clone ID: PAT_MRT3847_136883C.1.pep
ILYTDMLTYFNLFFYRSKLGLDLAGWVVLHNLGNRVSNLRQCCNSRISTLFANLHL

SEQ ID NO: 183689 - protein, 55 aa, Glycine max
  Clone ID: PAT_MRT3847_136884C.1.pep
VQICNACKSVKEGSPYHSAGEFTKGRVVHPTIGSVRCQQPAACHVCVYQLLTELP

SEQ ID NO: 183690 - protein, 72 aa, Glycine max
  Clone ID: PAT_MRT3847_136885C.1.pep
RADSMPLWKVIAYLKAPWLFVVISRVLTPRSLRWRVIVNHSAHCLCAFNQRKIPRSPVGVLGAKNNFYKLTT

SEQ ID NO: 183691 - protein, 304 aa, Glycine max
  unsure (1)..(304): unsure at all Xaa locations
  Clone ID: PAT_MRT3847_136886C.1.pep
HYHRPSASLSFISFLLSLSDLGFTGRDLLNEGWRKKLIVMPITYLMGSYTHPFDVPHGYIWSPHFVTKIADWGPXIDVKTFLFLVCDSNYVPPKXLVTSLDAGEKPIYVGLVSLPLQEPDKMTRIIIHALEETGQRGVINKGWGGLGSLAEQNKSVYLLDNCPHDWLFPRCTAVVHHGGAGTTAAGLRAECPTTIVPFFGDQPFWGDRVRARGVGPAPIPVDEFSFDRLVDAIHFMLKPEVKKRAVELANAMKNENGVLGAVKAFYKHYPAEFKRLASTAEPKSVHKYFSIRGCFGCSKSSGYK

SEQ ID NO: 183692 - protein, 57 aa, Glycine max
  Clone ID: PAT_MRT3847_136887C.1.pep
LQPNLRPSLRNGAKRPQKGNQLRIPKGKMGTTMLPIDNLIEEMLPKRYDNLETQGNN

SEQ ID NO: 183693 - protein, 92 aa, Glycine max
  Clone ID: PAT_MRT3847_136888C.1.pep
VTSPLGSTHNKTPNSPPTTYAHTHHTTPHHQQPPHPHPNAQTTKHNSDLSFKPSSQVKGITSWSALHSELLHNQKSKTLGAPQRSFFPTTQQ

SEQ ID NO: 183694 - protein, 127 aa, Glycine max
  unsure (1)..(127): unsure at all Xaa locations
  Clone ID: PAT_MRT3847_136889C.1.pep
MESVDANSEVENDAEMKLLRDKFRLSAISIIESQAKQNGMEVSKVVVTCVADLAFKYTERLARDLHLFAXHANRTSVNMEDVIRLWTXENEHVSGMLRSFSNDLKAMDPQSERKRKKEPKKNDKGTA

SEQ ID NO: 183695 - protein, 53 aa, Glycine max
  Clone ID: PAT_MRT3847_13688C.1.pep
TLRLAEAEAEAVGFVPLVPDPRPLEEKKTTLLPFRWMMILDFLQTQITMSMED

SEQ ID NO: 183696 - protein, 60 aa, Glycine max
  Clone ID: PAT_MRT3847_136890C.1.pep
ERLREDDRRGGCWGSFLFFSQQQVIREMFGQVIRWHQGQNEAVQPGQSGCHDLPAYKGPG

SEQ ID NO: 183697 - protein, 55 aa, Glycine max
  Clone ID: PAT_MRT3847_136891C.1.pep
PPRITHGGPLQVQCCATSPYESIAQCIILRASFKVHDTATQLTQAHNTAQTICLC

SEQ ID NO: 183698 - protein, 60 aa, Glycine max
  Clone ID: PAT_MRT3847_136892C.1.pep
VSRNNSFSGSLFSTYNSTFRSTASINSTSRQCLQLNECTLCPCVMMNCNPIYLSKFHQIY

SEQ ID NO: 183699 - protein, 92 aa, Glycine max
  Clone ID: PAT_MRT3847_136893C.1.pep
RWWFPHQQWCKQTRTRPKNSHKPIAGIHLNKTHRFLRKSNPHSPLSNLPFSPLFSNSTQPLQLRRISRPSLRGVFCEHEIRIWITTRMKVTA

SEQ ID NO: 183700 - protein, 61 aa, Glycine max
  Clone ID: PAT_MRT3847_136894C.1.pep
KVSQNFLKWTVFPKNFEVQGPLKLNLGPFPLKKKKKKKKKKKKPKKKKKKKKKKKKKKKKK

SEQ ID NO: 183701 - protein, 84 aa, Glycine max
  unsure (1)..(84): unsure at all Xaa locations
  Clone ID: PAT_MRT3847_136895C.1.pep
AATFFFFFCHGXATTTMAXFHDDEGGDKKSPXKHRRGMSNCTRTPPLXKGKCLMLKSPGGTPFYRHTHIGCIFVEPKALGVPQD

SEQ ID NO: 183702 - protein, 65 aa, Glycine max
  Clone ID: PAT_MRT3847_136896C.1.pep
FIAFNAGPRSCLGKDVTLIEMKMVAVAFLWRFHMQVVEGHPITPRLSMILAMEHGLKVKVTERCT

SEQ ID NO: 183703 - protein, 82 aa, Glycine max
  Clone ID: PAT_MRT3847_136897C.1.pep
MKKFLRDIDILVPPRKLLTRRSAGVHDVFGDMFYDDTLSDKYLKHNGFTDSCDDDFGDPYASDQFRMFEFKVRGCTRRRSHD

SEQ ID NO: 183704 - protein, 130 aa, Glycine max
  Clone ID: PAT_MRT3847_136898C.1.pep
MDNMKKDEPQNRKQDELAESLDGLFSSVSTMIKSELQGTNNHLELLEKMNVRVAEEYKGFGDLASGLRVFVEQLKCKSGSFNEYVEQIDSIEKQVTEFEAVVSMLDKYIVLLESRVQSVYQTKIHLPSQQ

SEQ ID NO: 183705 - protein, 130 aa, Glycine max
  Clone ID: PAT_MRT3847_136899C.1.pep
MDNMKKDETQDRKQDELAESLDGLFSSVSTMIKSELQGTNNHLELLEKMNVRVAEEYKGFGDLASGLRVFVEQLKCKSGSFNEYVEQIDNIEKQVTEFEAVVSMLDKYVVLLESRVQSVYQNKIHLPIPQ

SEQ ID NO: 183706 - protein, 133 aa, Glycine max
  Clone ID: PAT_MRT3847_13689C.1.pep
LVPGVCVRVLWDGPPFVCGCRAGRRWAPLALSLCCFVGPPPVLGFWNCVLPLLFRCVCFPSFLPPSGLCVVCPGLLRLGSGAFLFPWFLPCGRLLCVLVVGSSALPPPLRSAPCAGCNKRARGSGRAFRSGPG

SEQ ID NO: 183707 - protein, 156 aa, Glycine max
  unsure (1)..(156): unsure at all Xaa locations
  Clone ID: PAT_MRT3847_1368C.1.pep
KPEDLRGADFDQYLKLXGALSPTSAIDHGLDIGRGMSYLLDHSNDIIHLDLXPRNVLXVNSSSDHLRVGGSDLSQLIKVHRAHQVYTMWGXHVSYRDMAHGVLAPRIYDHQADVLACAMILYEMMEGDPPHPKVYPYDGAXSYVAEGHTPSIRAKG

SEQ ID NO: 183708 - protein, 72 aa, Glycine max
  unsure (1)..(72): unsure at all Xaa locations
  Clone ID: PAT_MRT3847_136900C.1.pep
RGNGFLFKGKLGNGFFVAKKIFGXSKGNGPIFFSEVAPLGRPFPPKIGPLIGFWVHGAKRAFVYEFKPKGFF

SEQ ID NO: 183709 - protein, 62 aa, Glycine max
  Clone ID: PAT_MRT3847_136901C.1.pep
AQSQMLSTCRWKEFTATSQTLIPMEKSMGINHLKMLCYKTKKCTSITLFNGQCRVFPLNCFV

SEQ ID NO: 183710 - protein, 37 aa, Glycine max
  Clone ID: PAT_MRT3847_136902C.1.pep
DYTSCIYMEGHFNRRHNLDNTYKEMRLPHQINPYGSY

SEQ ID NO: 183711 - protein, 49 aa, Glycine max
  Clone ID: PAT_MRT3847_136903C.1.pep
CSGTFISSKGPIKLINFRPYFLFFCEVYAPPEFEINPMVWIYPSLVYLE

SEQ ID NO: 183712 - protein, 124 aa, Glycine max
  Clone ID: PAT_MRT3847_136904C.1.pep
HASGWSLIAGRLPGRTDNEVKNYWNSHIRRKLISKGIDPNNHRLKHAIPSSLQNSLMSDDSAEAFRMKDTNKNETSKLPRVYNHVEVSDAASGEAESPCAWPDLNLDLSITNPAASQSMGNNVK

SEQ ID NO: 183713 - protein, 99 aa, Glycine max
  unsure (1)..(99): unsure at all Xaa locations
  Clone ID: PAT_MRT3847_136905C.1.pep
GGVSSAMEACLKLERVEEGTXYRKVSRAREKATGNTLALINTPAHEDXKEVPATTMTKVSILXMLSRDPHVVWLMDVKQGLNNAGHTVLYLVSEFIGPL

SEQ ID NO: 183714 - protein, 196 aa, Glycine max
  Clone ID: PAT_MRT3847_136908C.1.pep
MMHAEKSPATLRSSDQERKKGVPWTEEEHRRFLMGLLKYGKGDWRNISRNFVVTKTPTQVASHAQKYYIRQKLSGGKDNKRRPSIHDITIVNLTSDQEKPLLFNDESHMTSEQQKLTSMPKVQLEWRINHHNNGGSNYDMFVSPNSSGISSKTLKLQGQDFYECAFHETYAKLKNTGFRTASRDFNKEAIFGIHAL

SEQ ID NO: 183715 - protein, 97 aa, Glycine max
  Clone ID: PAT_MRT3847_136909C.1.pep
MDINAGNYVAKPDVLVQYDACPVTDDWGSSHEDKVADHTQKVRSEAAGSNGRLAYASAMPHDEPVAPAQSDEVNCDYLPAIDDRQEEGVHTGESRSG

SEQ ID NO: 183716 - protein, 73 aa, Glycine max
  Clone ID: PAT_MRT3847_13690C.1.pep
EALEFCMSLSVHTGVACPYKTTLIRSFAVPLVKMILAECVISSCGRSREPSIFTRSWHVTTGFYATGLLLSSS

SEQ ID NO: 183717 - protein, 159 aa, Glycine max
  Clone ID: PAT_MRT3847_136910C.1.pep
PSVRTHTLGRCIRKDPSHCFFDGTRQRQPRVRFGKVHLYNNYTRNWGIYAVCASVESQIYSQCNVYEAGTKKKTFEFYTEKAADKEEQKSGFIISEGDMFLNGAEPSLLTENREESMFHPSEYYPTWTMEAAGHSLREVLLLCTGWQSICRPVDNMVLQ

SEQ ID NO: 183718 - protein, 86 aa, Glycine max
  Clone ID: PAT_MRT3847_136911C.1.pep
TKKMLQLHRGTLKKGGGLLKRGGGPLPFFWGFPGRGGQKAGPSGFSSPPRGPLWGPPGAPLLNGGVGFHWEVFWGRIFRTGAVFLF

SEQ ID NO: 183719 - protein, 175 aa, Glycine max
  unsure (1)..(175): unsure at all Xaa locations
  Clone ID: PAT_MRT3847_136912C.1.pep
FGSIVHGLLRKGRLXEALAKVDVMKQNGITPTIHVFTSLIVHFFKEKQVEKAIETFEEMLHSGYEPTIVTYSALIRGYMNVGRPIDAWDIFYRMKLKGPFPDFKTYSMFLTCLCKVGKSEEGMRLISEMLDSGIVPSTINFRTVVYGLNREGKHDLARVVLQQKSELRRKRKLIT

SEQ ID NO: 183720 - protein, 115 aa, Glycine max
  unsure (1)..(115): unsure at all Xaa locations
  Clone ID: PAT_MRT3847_136913C.1.pep
AXSSPPVHTLNEEDGVTLVLLSXPSLPHLTXXRYPPSHTHYSQPHTXKHAPLPWXGSDAXHPVPLFPIDTXKAPLQTPKKGLGLMGLLALLRPPSPHTFXEGELIRESLLPFPPL

SEQ ID NO: 183721 - protein, 150 aa, Glycine max
  unsure (1)..(150): unsure at all Xaa locations
  Clone ID: PAT_MRT3847_136914C.1.pep
SRRENLXNLHFCIFTCIASSSLISAVPAKLQLSFSFWNKGRSKPESVPPPCTDRLSNMKTVDSVNFRPVTSQNGSLKAVGKTHGKVKTRSSLGGKFLGVHSQTRSHMLASANSRSNLKEPRVSSDMWLHAAPERDLDSILSLHSSLYYFE

SEQ ID NO: 183722 - protein, 529 aa, Glycine max
  unsure (1)..(529): unsure at all Xaa locations
  Clone ID: PAT_MRT3847_136915C.1.pep
RMHGCGVYEVNERILYXYFGEYVDEVSIRLEDISAMHAGIAEVAAAKARMFVNKPDGMVREKRGPYSDPQHPYFYEEEDVWMAPGFINQFYEVPDYWKVYVHEVDQEREMWLNSFYKAPLRLPMPAELEHWWSKEENHKIPEFVLINKEPEPDPEDPSKLIYTEDPLILHTPTGNIINYVEDEKYGIRLFWQPPLGKGEDVDPEKAVFLPLGYDDFFGIEDEKKKESIWMRIILAIENACKPWFDKLDKWTEEQKKINEEEKKAIEEDLELIEAEIGLEEAIEDMEELLRIREKEEEKKAKMGLLDEEDDDNEGDGDDMTSVTKQDEKAPAKVVEVPAEVEEEDDDDWDDEEDDNSAQSSFGSVEQGQTTDQLKGKPGKSPFSASSLAFASSSLISAIPSKLQLSFSFWNKGRSKPKPVPPPCIDSLSNMKTVDSVNFRPVTSQNGSLKAVGKTHGKVKTRSSFGGKFLGVHSQTRSHLLASANSSINLKEPRVSSDMWLHAAPERDLDSILSLHSSLYYFEQHREIIW

SEQ ID NO: 183723 - protein, 54 aa, Glycine max
  Clone ID: PAT_MRT3847_136916C.1.pep
MMLNAKSICKPLIRDPARLTIWKRQTKLMYIIKTERKVLFDLMLSLITSPSGFC

SEQ ID NO: 183724 - protein, 65 aa, Glycine max
  Clone ID: PAT_MRT3847_136917C.1.pep
VPLRKQKSEFFYVPETMGERNVNENGMSRVKRQHFQCKAAAPRSKKKGFPLHFNGKSHPRIDGKF

SEQ ID NO: 183725 - protein, 88 aa, Glycine max
  Clone ID: PAT_MRT3847_136918C.1.pep
AAPNAIMPTMNVMGLTMVDLTSHLAKYRLGKQSWKDAVEGCKDGMMANPMCGSNMFSSLTPEYTLRPMRSAVAFTTPLTTERGVHLEL

SEQ ID NO: 183726 - protein, 151 aa, Glycine max
  Clone ID: PAT_MRT3847_136919C.1.pep
CCSVSSHRENHKLAAIRSSTAVVARPNTQPPQLVRHVWLVHPRQLPRRHNNMPTPTQRLQVNNRHPAIVTPMRLWKKLTTYSIIVNNLPVGAQPLPNPWCLRVQVTVMPAGKLVTYGVIAVQQVVVTGVPARVMPRWPVITALRHNHYVGT

SEQ ID NO: 183727 - protein, 54 aa, Glycine max
  Clone ID: PAT_MRT3847_13691C.1.pep
LIHLGTPENKILKKKNPFQIKWRTKLKCGFSIILQSKLKFHLNNLYLHLMRILY

SEQ ID NO: 183728 - protein, 63 aa, Glycine max
  Clone ID: PAT_MRT3847_136920C.1.pep
SDNPWHLLSSDPVLCAIARTGFRYGYSMLMLQMNLNSVVGLFTIVGYRWCVHVRYSIVFIVNV

SEQ ID NO: 183729 - protein, 294 aa, Glycine max
  Clone ID: PAT_MRT3847_136921C.1.pep
FVNIAIQLVYLWKNSFSLILVAKETRYEPPPNPSGCARSEPYDYFGRRGRKEPEALAAASLKRLFVENQPYLVGGYSRHGSLNNLEPSGRGVCSKFFCSQQRLRTSRIDTSNSILSISEKYTYMRETFRKRLAFGKSRIHGFGIFAKHPYKGGDMVIEYTGELVRPPIADRREHFIYNSLVGAGTYMFRIDDERVIDATRAGSIAHLINHSCAPNCYSRVISVNGDEHIIIFAKRDIKQWEELTYDYRFFSIDERLACYCGFPKCRGIVNDTEAEERAATLYAPRSELIDWRGE

SEQ ID NO: 183730 - protein, 94 aa, Glycine max
  Clone ID: PAT_MRT3847_136922C.1.pep
FYRSASAFMNLLLPALKIVAEYYPGRLCKAFVIDPPSLFAYLWKGVRPFVELSSWTTVVSSLDFEESLDFNDFAAYPRASSLRFEGASVKSTAK

SEQ ID NO: 183731 - protein, 64 aa, Glycine max
  unsure (1)..(64): unsure at all Xaa locations
  Clone ID: PAT_MRT3847_136923C.1.pep
SQFIILFIYYSFFIYYTNSFHKLFLQTFINLSTNFYNIFYYNXNNLFXSIFSNSNIYNSIQNQY

SEQ ID NO: 183732 - protein, 61 aa, Glycine max
  unsure (1)..(61): unsure at all Xaa locations
  Clone ID: PAT_MRT3847_136924C.1.pep
DPRXRPRVRARXXPFXXXTNFHTRGPSGTQGEPLTIHAPNTPSHRLKTLAKPQNGIPPGKK

SEQ ID NO: 183733 - protein, 282 aa, Glycine max
  Clone ID: PAT_MRT3847_136925C.1.pep
QILQWLFRRAHEQERKSSNNFNNLPPKREDISGKEVNLVKRDRSYKRTRNKWSNPGCKNFKIFTFLYRKDIPKAFFYSTLNLKRLGSFNRKQFLHFMKMKREEPSSRDVGSVNKADSGGQHVGNKVLPITEAPLSSSAERNDQCDSTETKDQTKGDKKKPMSRMKELLRWAASAKTEKGGKFNGRKVLMFRRRGTLKAVPDDDQGCTDSPKISFRWDVESCSTTSSVYSAISIASSSKNGQNQIATSTISIPPEHTTGHHNNTSRKKGNWITTDSEFVVLEL

SEQ ID NO: 183734 - protein, 60 aa, Glycine max
  Clone ID: PAT_MRT3847_136926C.1.pep
RIKFFIHTHAKHIQKTNVQYGGNVSGSKSALRKERLGEALSSPLKPTKVFGVLIEREPFF

SEQ ID NO: 183735 - protein, 70 aa, Glycine max
  Clone ID: PAT_MRT3847_136927C.1.pep
GKREAPLGSKPQDHKSHNRLKCDEGGSRWKGHLNSWSSTYLNLWVIFGGGVFNLLMGFFFHLAVILSEEG

SEQ ID NO: 183736 - protein, 142 aa, Glycine max
  unsure (1)..(142): unsure at all Xaa locations
  Clone ID: PAT_MRT3847_136928C.1.pep
MFGFRKTPAPTESDKKTTLTAEKRTASEPVLPVPKSKGNYFDYDDDDWGRKPSSSTASKDKDRYKNGFSNSGGLENQSVQELENYAVYKSEETTKSVNNCLRIAEDIRGDATWTLDMLHQHGEQITRTHXMVCDTEKDLSRV

SEQ ID NO: 183737 - protein, 92 aa, Glycine max
  unsure (1)..(92): unsure at all Xaa locations
  Clone ID: PAT_MRT3847_136929C.1.pep
RYIXTVTQHIGTPEXSIFCPHYXTILLSQCLSVXDSDIGHSTLLXEVREXXYXALLERXSXQYXAXNTXXXXXXXGXXXXGCXXAXXXXXWG

SEQ ID NO: 183738 - protein, 438 aa, Glycine max
  unsure (1)..(438): unsure at all Xaa locations
  Clone ID: PAT_MRT3847_13692C.1.pep
YPLPSHMQARGCEEVFQVKENSDGSINKNKAQLVAKGFHQHGFDYKNTFSPVVKPVTIRDIILXLTNKXPIQQLDIKNALCGPXSQLEAVDKALLCKVHKALYGIKHALLEMFSNXDSSLFILTTFSRFIYILVYLDDILITREILILIQQLITNLNSIFPLKQLGNINIDYFLGIEFKYFCSGSILLCQRKYIYDLLAESNKSTEKGISTPHDXEVPNSPMFGSDYVQDPSIYILIVGALQYATNVRQEISHSLXCQLLSQPLYNHWNIVRRILGYFQSMINYGLPFQPASDLKXLAIHPFCDADXSSDPDGGRSTSGACIYLDQNLISWXXKKQTLIACSIAEAEYHSLAITTTEVXMIQSLLQELQIPIVTPVVYCDNYLSTXLAYNPLINXLYELMELDLCFVRERVKSLSVCHIPAHDQIVVILTKLRQRQIL

SEQ ID NO: 183739 - protein, 49 aa, Glycine max
  Clone ID: PAT_MRT3847_136930C.1.pep
GCIIHAIWTSVRWQLSFVSISCETESQAQLYYCGVRYSQFGPHALGFTI

SEQ ID NO: 183740 - protein, 52 aa, Glycine max
  Clone ID: PAT_MRT3847_136931C.1.pep
VTKKKKKKKKKKKKKKKKKKKKKKKKKKKKKKIKKKKKKKKKKGPPKRIKPN

SEQ ID NO: 183741 - protein, 107 aa, Glycine max
  unsure (1)..(107): unsure at all Xaa locations
  Clone ID: PAT_MRT3847_136932C.1.pep
LEYIPYXLYCYIGRKNSSRVVVYYTCSHXSPLXWTPPIPIKMQMECIMTNIPIESIKEHTQFTLVPTILLMAETIILSMTQLVTILTMLIHTLFMINPTLIINIYTP

SEQ ID NO: 183742 - protein, 36 aa, Glycine max
  Clone ID: PAT_MRT3847_136933C.1.pep
ALLLYHILTPTTSNLHFLTLEPECLDTVFTLFNSKT

SEQ ID NO: 183743 - protein, 40 aa, Glycine max
  Clone ID: PAT_MRT3847_136934C.1.pep
KKKLPLIRLAVKSAYLFHVIILNLSRRFIFSIYLSAKLFF

SEQ ID NO: 183744 - protein, 49 aa, Glycine max
  Clone ID: PAT_MRT3847_136935C.1.pep
GLSLPSTDVDEPRVQCHSRWSYPHQSLLTVLPLIIGARKFPKFLSSVKL

SEQ ID NO: 183745 - protein, 109 aa, Glycine max
  Clone ID: PAT_MRT3847_136936C.1.pep
ETEAIEITVTKLLLRSYYGIVRKNGEDLIPKAIMHFLVNNTKRELHNVFIKKLYRDNLFEEMLQEPDEIAVKRKRCRELLRAYQQAFKDLEELPLEAETVERGYSLPET

SEQ ID NO: 183746 - protein, 823 aa, Glycine max
  unsure (1)..(823): unsure at all Xaa locations
  Clone ID: PAT_MRT3847_136937C.1.pep
MADEVPSPSAASTATTSLGSSVISLVNRLQDIFARVGSQSTIDLPQVAVVGSQSSGKSSVLEALVGRDFLPRGNDICTRRPLVLQLVQTKRKPDNDEYGEFLHLPGRKFHDFSEIRREIQAETDREAGGNKGVSDKQIRLKIFSPNVLDITLVDLPGITKVPVGDQPSDIEARIRTMIMSYIKTPTCLILAVTPANSDLANSDALQMAGIADPDGNRTIGFGMXLDIMDRGTDARNLLLGKVIPLRLGYVGVVNRSQEDIQINRSIKDALVAEENFFRNRPVYNGLADSCGVPQLAKKLNQILAQHIKAVLPGLRARISTSLVAVAKEHASYGEITESKAGQGALLLNILSKYCEAFSSMLEGKNEMSTSELSGGARIHYIFQSIFVKSLEEVDPCEDLTDDDIRTAIQNATGPKSAWLEPEVPFEVLVRRQISRLLDPSLQCARFIYDELIKISHRCMVTELQRFPFLRKRMDEVIGNFLREGLEPSENMIAHLIEMEMDYINTSHPNFIGGSKALEIAAQQTKSSRVAIPVSRQKDALESDKGSASERSVKSRAILARQANGVVPDPGVRAASDVEKIVPSGNTGGSSWGISSIFGGGDSRMSVKENISSKPHAEPVHSIEQSVSMIHLREPPPILRPSESNSETEAIEITVTKLLLRSYYGIVRKNVEDLIPKAIMHFLVNNTKRELHNVFIKKLYRDNLFEEMLQEPDEIAVKRKRCRELLRAYQQAFKDLEELPLEAATVERGYSLPETSGLPKIHGLPTSSMYSTSSSGDYYAASPKHSRSKRSSHSGELQSPLHANADSNGSGRPFMSGFYPMVDA

SEQ ID NO: 183747 - protein, 85 aa, Glycine max
  Clone ID: PAT_MRT3847_136938C.1.pep
SVISGFFTWSLHRDKSIRCLLPSSLPNTGLVWILWSLCWTVADEAESINHTLPDEATEIVPSLASNTLAEAAASSMMTENGSDGK

SEQ ID NO: 183748 - protein, 67 aa, Glycine max
  Clone ID: PAT_MRT3847_136939C.1.pep
RGLESFLFLYRFYFPSLPFSVIMEDAAASANGKILHKLLPFASTFVSLMLNNRPSSILVVSVFNYVV

SEQ ID NO: 183749 - protein, 109 aa, Glycine max
  unsure (1)..(109): unsure at all Xaa locations
  Clone ID: PAT_MRT3847_13693C.1.pep
RTWGRLSSKIRELHVVRTYNGAKHIAYXCVLEEEDIIRIGGDFSSXDLMTIARDAIRFILTTICPFVTAAFEEWVSLLSLIGRNSYNPLFKPYICESEQAFEHFCMQAV

SEQ ID NO: 183750 - protein, 254 aa, Glycine max
  Clone ID: PAT_MRT3847_136940C.1.pep
MASLRIRNLLRFSIHGTLLSSSPLRPGFSGSSRSYSVVESSKHFLLKSDDEEIFALRRKFEAAKQSFLSIPDALREMPKMNPKGIYVNKNVRLDQLQVYGFDYDYTLAHYSSDLQTLIYDLAKEYLVNELRYPEVCTSFKYDPTFPIRGLYYDKSKGCLMKLDFFGSIEPDGCFFGRRRLSHTEIRDIYGTRHIGRDHARSLVGLMDFFCFSEACLLADIVQYFVDAKLEFDASYIYEDVIRAIDHVHRSGLVH

SEQ ID NO: 183751 - protein, 52 aa, Glycine max
  Clone ID: PAT_MRT3847_136941C.1.pep
LLIIMSILALLTPTQYEEVENSVPTKTDNFLQRENSRFPQVLSFTAREMVDA

SEQ ID NO: 183752 - protein, 95 aa, Glycine max
  Clone ID: PAT_MRT3847_136942C.1.pep
QNHGDSQTRIVHKHGSTRHRVRRERRGNSGHSSAENRGASRNVESRKYTSSFLWLPPLNVEEHRLINYFLAFFSSMKFRNFYRPCVFFPFGCIKR

SEQ ID NO: 183753 - protein, 63 aa, Glycine max
  unsure (1)..(63): unsure at all Xaa locations
  Clone ID: PAT_MRT3847_136943C.1.pep
SGPHVNISGCWCFFSLVRVSRSWLLRFSTAIAVGDGDGXRHWMGFCFXHLSVHSLFCAVCFLX

SEQ ID NO: 183754 - protein, 215 aa, Glycine max
  Clone ID: PAT_MRT3847_136944C.1.pep
EDKICDLYDLFVDGLDENAGPQIRKLYAELAELWPNGYMDNHGIKRAICRSKERRRALYNRHKDQEKIKRKKLLAPRQEEDVQFDPSPITSQQPMRERLATDSSSHTHTSVNKTVSNTITAARVHNPSENGPKQERAKGSSSGSLDDVKGADGVLIKKKVKRKPDQGLEGTHFRPEKSAASLQGEEKPRSLKQSAGVPPKSNLQPTSLPGLEQSS

SEQ ID NO: 183755 - protein, 166 aa, Glycine max
  Clone ID: PAT_MRT3847_136945C.1.pep
FGSRRAIVPVFPPSESNRVREGFLRGEQVPGELQCEPSQFFMLFDTNNDGLISFAEYIFFVTLLSIPESSVSVAFKMFDIDNNGEIDIQEFKKVMALMRSQNRQGANHRNGRRLGVTASIENGGLVEYFFGKDGNTCLQHERFVQFLRQLHDEILRLEISHYDYNK

SEQ ID NO: 183756 - protein, 71 aa, Glycine max
  Clone ID: PAT_MRT3847_136946C.1.pep
WVELEEPLIILWLVHRPLCLYRSVQISEHFRSNYHFTEQNQTLTLSFCMTPDSPPEALLLSRFVNAFGSLG

SEQ ID NO: 183757 - protein, 71 aa, Glycine max
  unsure (1)..(71): unsure at all Xaa locations
  Clone ID: PAT_MRT3847_136947C.1.pep
NFLSLIIYFVARLLYVILTVLSFTPSLRDIYHSYVSNSQSLHLISMQCXGATLEKLIIWVIRQIQGIIKNH

SEQ ID NO: 183758 - protein, 114 aa, Glycine max
  Clone ID: PAT_MRT3847_136949C.1.pep
GSSEIAQADYMKFILHSLKHPASDVNGVWIGRICASNDVVKIGDAVPLFHSNIPLLPQMEISTIMIEEYRSAQGMNIQGYLHANERYDDSELGGVAKNIGDHICRYFTEAGVLL

SEQ ID NO: 183759 - protein, 50 aa, Glycine max
  Clone ID: PAT_MRT3847_13694C.1.pep
LFHWLDRVVIELIKRGSRIDFFSWLVKKTFYRLLSGSFKDFRMFFSWVNR

SEQ ID NO: 183760 - protein, 51 aa, Glycine max
  Clone ID: PAT_MRT3847_136950C.1.pep
LPRDLHQQELALDFLVFVMIQPCIRDPHSMEASTRNKELPLFHKVCCVISK

SEQ ID NO: 183761 - protein, 85 aa, Glycine max
  Clone ID: PAT_MRT3847_136951C.1.pep
SLKFHREGERWLSADGTCPTTALQNDCMMLFPLSSSLEWLYFGFFVLRFTLFKLLLGINYPWGYLNQNYYLPLYVVGILSIWTFK

SEQ ID NO: 183762 - protein, 78 aa, Glycine max
  Clone ID: PAT_MRT3847_136952C.1.pep
KKTMASLETINTYQPYITLPNNRVPFWVSQTPNYNIIPKVFFLWTRGWHHFSIKTVNTNQPPPTPQEIRHHADMSLHE

SEQ ID NO: 183763 - protein, 56 aa, Glycine max
  Clone ID: PAT_MRT3847_136953C.1.pep
FWKNFFEKLNPGIYQPLLGIQVNFKTRRKKRVLEVQKKKRDFKKFIIKIVFFKKVF

SEQ ID NO: 183764 - protein, 44 aa, Glycine max
  Clone ID: PAT_MRT3847_136954C.1.pep
ITKMSNLPQSLVRGHRLSGRVAAPTPSYTGFPRANCSIASPNLN

SEQ ID NO: 183765 - protein, 95 aa, Glycine max
  Clone ID: PAT_MRT3847_136955C.1.pep
IACSAAGDVGGAFNLRDEMVERGLIPNITTYNALINGLCKVGNMDRAQRLFHKLPQKGLVPNVVTYNILITGYCRIGDLNEASKLREKMIEGGIS

SEQ ID NO: 183766 - protein, 163 aa, Glycine max
  Clone ID: PAT_MRT3847_136956C.1.pep
PSRPGFFYFSFNDGSLKACQASQKLAIKVITSVAAAATPHASAMPPAPFSGEVSPSPLYPWHYNNPLHAASPGPSPSASVTAPMVPYKSSSMPFISSNPAVPLPTDEVDSASSIHPLPTSSGHELQVLLAPSRLLLVLPSLTLPPLYVVRVRVRIGCGTRDSD

SEQ ID NO: 183767 - protein, 269 aa, Glycine max
  unsure (1)..(269): unsure at all Xaa locations
  Clone ID: PAT_MRT3847_136957C.1.pep
MTPSRVAGGLTQSSSNSGIFYQGDGQSQNVVDSHLSSSFVNSSSTVPGAGRSNLGPVSGDINNAVXNTVANSAPSVGASSLVTDANSSLSGGPHLQSRTSVNTDSYLRLPASPMSFTSNNISISGSSVMDGSSVVQQSSHQDQNVQQLQQNKQQPQGASSATSLPASQTGPSTLQMGAQVPGSFIQDPNNMSHLSKKNRLDTKQEDMTQQQVIQQLLQRQDSMQFQGRNPXQLQAFLQQQQQQQQRLRQQQMFQQMPQLHRAHLQQQQQ

SEQ ID NO: 183768 - protein, 72 aa, Glycine max
  Clone ID: PAT_MRT3847_136958C.1.pep
MDLLKQELLKKRQSLAQDTGGKKFFKRSEIQQKEIQKLRQQEKRELEAKSLKRLATSSDTAATAPSSSSTAS

SEQ ID NO: 183769 - protein, 291 aa, Glycine max
  Clone ID: PAT_MRT3847_136959C.1.pep
MASVASSSSFSTRLLLHSHTPLVCRRRCRPNFLRMVTRSCLDDSSALLRAAQHTVDTYVKSGMVVGLGSGHASGMAIQHLGSQLRTGNLKDLVGLPRSVPGASVAPRAGLPGDSFLRSSQIDFAFDDADVIEEGTLVAIIGRRKLQGGESIIQEKSIINSANKCVFIIEENQYKGGLEGSIPVLIQSLNWMTIAEEIDDMFLGDAEVWRRPSIGQAGPLGGDFPVVTKEGHNILDVIFTSPIENLAEVAKSLDKVDGVVDHGVVSKIPCTVVIASQTGLNILDKLTADIVG

SEQ ID NO: 183770 - protein, 84 aa, Glycine max
  Clone ID: PAT_MRT3847_13695C.1.pep
VALTALTPTSRARRVVRLVARSTSLPSTTASSRTVPPTRGSRLSMASVDLMDQTLTLRARRADPSKRVYNSLFDGPDFVYSINK

SEQ ID NO: 183771 - protein, 85 aa, Glycine max
  Clone ID: PAT_MRT3847_136960C.1.pep
SDTITTEYSRRRREEPQVPCEVTDPDCFECVATGPRCLVGEEPHPVYLNEPRSPKGGAGRGRLARGPGMILNEPPIRWVPCAARA

SEQ ID NO: 183772 - protein, 233 aa, Glycine max
  Clone ID: PAT_MRT3847_136961C.1.pep
NSARAVLVFVLGVVLTFIRRPRVMHEIKFGPSSIEVVKMSRHAWKQGFIKGTIPQLPLSILNSVIAVCKLSSDLFPGKDFSVTSLSVTVGLMNLVGGWFGAMPCCHGAGGLAGQYKFGGRSGGCVALLGAAKLILGFVLGSSLAHFFNQFPVGILGVLLLFAGVELAMASRDINTKEDSFVMLLCTAVSLVGSSAALGFLCGMIVFVLLKLRDWTNGKPINAIWKHEGPEEQV

SEQ ID NO: 183773 - protein, 58 aa, Glycine max
  Clone ID: PAT_MRT3847_136962C.1.pep
NLAAKKLGVLLVYKLPIFRHPLCLLAVICSSPRFCCPFYFPQVLTRGSLSLNPRLRNI

SEQ ID NO: 183774 - protein, 58 aa, Glycine max
  Clone ID: PAT_MRT3847_136963C.1.pep
MQHIFLATLLSYKTKANKNTQKCYNLDMKSFKLLSSKCITCTNMQNQKKNSKLINVKL

SEQ ID NO: 183775 - protein, 77 aa, Glycine max
  unsure (1)..(77): unsure at all Xaa locations
  Clone ID: PAT_MRT3847_136964C.1.pep
TGISVGDCFIXNNSSLRLSXRVGREVTTMFHFDRHMXLLAYLANESRVYLGDKEFNVMGYTLLLSLIGYKTLVVRGD

SEQ ID NO: 183776 - protein, 78 aa, Glycine max
  Clone ID: PAT_MRT3847_136965C.1.pep
LYTAYVGTDSVLEGQTYSKIGLKLYDKYGHYIYIKNLYAWRSLMSMGYDYFQRGNLDIFSRKRPCIDGPICAVKVTSS

SEQ ID NO: 183777 - protein, 71 aa, Glycine max
  Clone ID: PAT_MRT3847_136966C.1.pep
MMASVEEKIKTGGVGGGMVVGGQTLVAEMKLLKEMQEHSGVRKTLNSELWHACAGPLVSLPQVGSLVVYFP

SEQ ID NO: 183778 - protein, 348 aa, Glycine max
  Clone ID: PAT_MRT3847_136967C.1.pep
MGRAPCCDKANVKKGPWSPEEDAKLKSYIEQHGTGGNWIALPQKIGLKRCGKSCRLRWLNYLRPNIKHGGFSEEEDNIICSLYVSIGSRWSIIAAQLPGRTDNDIKNYWNTRLKKKLLGKQRKEQQAQARRVSNNQQKQDVKRETENLIVASEVMINQVPYWSSSEFSSVPMPVTNASSFQHYGLNNQTSLRSMMVNKLEGITFSNDHHQQQQQPYTNACEIPSLQDQVFPTMVNQVTVVSNENNSGTYQPSNIFQGFENFPSDFCELVCVNPQQMEAFNYGMESMDMTMSNGGSTNTTSTESTSWGDMSSLVYSPLVSDYERCRQGIIPQDHVVAFEECKYFGMQMQ

SEQ ID NO: 183779 - protein, 90 aa, Glycine max
  unsure (1)..(90): unsure at all Xaa locations
  Clone ID: PAT_MRT3847_136968C.1.pep
MGRAPCCDKANVXKKGPWSPEEDAKLKSYIEQHGTGGNWIALPQKIGLKRCGKSCRLRWLNYLRPNIKHGGFSEEEDNIICSLYVSIGSR

SEQ ID NO: 183780 - protein, 73 aa, Glycine max
  Clone ID: PAT_MRT3847_136969C.1.pep
RRAGYSVSARIKSGGEAVVAAEPAADIPGEPMDIMTALQLVLRKSMAYGGLARGLHEWAKVIEKHAAQLCVLT

SEQ ID NO: 183781 - protein, 130 aa, Glycine max
  unsure (1)..(130): unsure at all Xaa locations
  Clone ID: PAT_MRT3847_13696C.1.pep
SALGRGPAPLSEIVPWGDDLLCVDYLFGHQLSLAFPNSTGSGLIASGWSKDPIFVGDLCALSVSGTTTVAAQGDTSSNXSTCVTVTDFSLGAKAALSFNIPAPWLRMLGVHCPNPHAAADSSLGLSSSPL

SEQ ID NO: 183782 - protein, 93 aa, Glycine max
  Clone ID: PAT_MRT3847_136970C.1.pep
AFPQFIFTPKFFEGPKKEIKWGLKKFTNNGFLFKKTLKKKLENFFKCPKKMGPLYFFFFLKVARGSFQIWGPFTNGTLFFSNSPPPIKNISGF

SEQ ID NO: 183783 - protein, 61 aa, Glycine max
  Clone ID: PAT_MRT3847_136971C.1.pep
RDHFTLVMSTEICYTHNTNIFCPNLNLLPHNISPLICHSFGCSLQLDIQTIGLISVEQQTH

SEQ ID NO: 183784 - protein, 83 aa, Glycine max
  unsure (1)..(83): unsure at all Xaa locations
  Clone ID: PAT_MRT3847_136972C.1.pep
XXXTXXXXPXXLXXXPXXAXSKLXXXQGTXXXNQXKIXPTSIXKXHXNXXKARTXQGXXSXXTXYGGXXSCKIPYKLSVXYSQ

SEQ ID NO: 183785 - protein, 161 aa, Glycine max
  Clone ID: PAT_MRT3847_136973C.1.pep
PEGWVKKKFLHFFVPPPNGWKSLPPLPGFKKEFPFTKIFKNVKKKFFFNGTVVQGPKLGRVFSLQGVQRKNVFSFLVPAGFFKKGLFKILGFLAGGVLRVKFFPPAFVLGKKKNFIRGEGIGGFLKGFYVFPCDGGLWVSNPCVFFSFKTFIKTVLWAPVF

SEQ ID NO: 183786 - protein, 119 aa, Glycine max
  Clone ID: PAT_MRT3847_136974C.1.pep
PKGCSQSSLPFEFRASFVFWGFPRGETHGPMNFSCPPRGPSPFFEPGGGFGIKFKMFCPPSPGEIKVFFGKKPPGLPGVSRGPFPTHASLKKFLLPFWFVIITCGFSPPSQTPFSTHSK

SEQ ID NO: 183787 - protein, 123 aa, Glycine max
  unsure (1)..(123): unsure at all Xaa locations
  Clone ID: PAT_MRT3847_136975C.1.pep
IEVFDLLFSDYLTFYVLFCSLFLSFKFLFNVDCFYFFYFFYLIFSSYFFLFFNFFFFSFFLFIYLFILSYFFYSFDFYFCFYFIFXFILFLLFLFFSIYIYLFISFFFLLFIFFILFYYLFFF

SEQ ID NO: 183788 - protein, 55 aa, Glycine max
  Clone ID: PAT_MRT3847_136976C.1.pep
KELIPLDRKVAQSARSGHLQALQVPHRQLTGFSVWRYRPSLLGSLKPAHRMMRVA

SEQ ID NO: 183789 - protein, 40 aa, Glycine max
  Clone ID: PAT_MRT3847_136977C.1.pep
SKEDRSQTKRGLLRFVDDLTTIPYRVERLYIFLSTSDYCM

SEQ ID NO: 183790 - protein, 70 aa, Glycine max
  Clone ID: PAT_MRT3847_136978C.1.pep
KPSASIVSQLLLSSSENLKLSMHEDNTSTKYDDPELSAMCRICIDIIPNIANMTIFKCQNQLGATTKKSV

SEQ ID NO: 183791 - protein, 123 aa, Glycine max
  Clone ID: PAT_MRT3847_136979C.1.pep
KPKRTLPTEHSFYHCNNTFGRLNGGGGGPYIPTEKGDLRANCVMEGFKRAIIHPGPPERPASRTEQDGIKPQKQTQQAQDENQFLEKMLLMVHQEVARNSEAEKGRKACKQDKQTILGKRPRA

SEQ ID NO: 183792 - protein, 65 aa, Glycine max
  Clone ID: PAT_MRT3847_13697C.1.pep
TYISPTHKFFLTLTHTQINYLSFTIKFYSHSHQFNIPKLPLFNPPTIQSPNKPSIKTLTTFHNNP

SEQ ID NO: 183793 - protein, 82 aa, Glycine max
  unsure (1)..(82): unsure at all Xaa locations
  Clone ID: PAT_MRT3847_136980C.1.pep
YGLNSGATTRPTAEYLTLVASKPDEYEKLGSXPSSGSPATKPHVSTNPARSXTQYAIVIRGGEFGXWGSSREHARVALGASG

SEQ ID NO: 183794 - protein, 50 aa, Glycine max
  Clone ID: PAT_MRT3847_136981C.1.pep
LANTTFPCISGLLLQLKVSYLIPLIALIWPHHICPMVIKEYHLNAEYGLQ

SEQ ID NO: 183795 - protein, 114 aa, Glycine max
  unsure (1)..(114): unsure at all Xaa locations
  Clone ID: PAT_MRT3847_136982C.1.pep
MQIFGKTLTGKTITPVGGNSETIEKVXKGKFQDKGGIPPXYQSLNFAGKQLHDGRSLADYNIHKEXTLHHVVRPRGGMQIFVKTLTGKTINLQVESSDTNDNVNGKIHDKEGIP

SEQ ID NO: 183796 - protein, 196 aa, Glycine max
  Clone ID: PAT_MRT3847_136983C.1.pep
VVLFWDRGAQDLYRKEHPDATSIPVELNDVIFSIHAVTLTIITIIQCFVYERAKQTVSWLARILIGLALLAIAVVNILALCKVVSWLFVLNFLGFVKMGCSFVKYCPQVYMNYKRKMTVGWSIGNILLDFSGGVLSILQMVLNAINKGNWSEFYNFTKVGLGLLSIVFDLIFVLQHYVIYRKSNQEYWRKFREEKQ

SEQ ID NO: 183797 - protein, 124 aa, Glycine max
  unsure (1)..(124): unsure at all Xaa locations
  Clone ID: PAT_MRT3847_136984C.1.pep
RRWRERMAATYIIAGQCIASAPPLLTPXRGTTFPYEXERPAPVPXEEIVSMLRKEFRKRLERDCDYIDPPPIALATIAQVHGARLRGSREDVFXKGPRPGIEDILVAGPNHVHGGAKLSEFWST

SEQ ID NO: 183798 - protein, 66 aa, Glycine max
  Clone ID: PAT_MRT3847_136985C.1.pep
FSSTLFCSGFFSSSPIGVDSYRGKVVAVNFWFFLFVQVCVGSFSYICLNWFRTIKFEEATHSIIIK

SEQ ID NO: 183799 - protein, 55 aa, Glycine max
  Clone ID: PAT_MRT3847_136986C.1.pep
NLKVQSSFSDLLHLVVQRFNMMGEGGFSNYCGLFVLYPVVVFAISISNKPANSIS

SEQ ID NO: 183800 - protein, 214 aa, Glycine max
  Clone ID: PAT_MRT3847_136987C.1.pep
KYPSVESLIEKDLSVDKLEISRRLTHPHPHPHEDGNRRKILERLDSDSQKLTNLEITVQDLMSKIEITESTKGKDSEYDTVKGQLEATQEAITKLFDANQKLKKNVEEGTSSFAGKSTAEPDETGSASRRRVSEQARRGSEKIGRLQLEVQRLQFLLLKLNDEKEGKGKAMMDERNSKVLLRDYLYAGGTRRNYQKRKKKTHFCACMQPPTKGD

SEQ ID NO: 183801 - protein, 84 aa, Glycine max
  Clone ID: PAT_MRT3847_136988C.1.pep
GGPPFLGPQWIVVKSHVRTGKYECVSYVMHWIWCLVSPRLKDEWINFFSNGTAVSKKFLPTLQLFWVTDFLFMKKSALTKFYIS

SEQ ID NO: 183802 - protein, 110 aa, Glycine max
  Clone ID: PAT_MRT3847_136989C.1.pep
KVVKIPSEAFLNASIYRFELHFISGKLSQSSHLSMPVVIGASLIRHRSLIFIAQFSPSPLGNFFMLESSKAQFPVSRPVQYSPRALVLAMMSAISASYRALPRARSDVTV

SEQ ID NO: 183803 - protein, 49 aa, Glycine max
  Clone ID: PAT_MRT3847_13698C.1.pep
SLSEISINFNVLQSLHHPANFLVFGLGRNSLMSASLNPHGPKLFLEEDP

SEQ ID NO: 183804 - protein, 119 aa, Glycine max
  Clone ID: PAT_MRT3847_136990C.1.pep
MACSMIFSGAVTTVIRAGAGMVATFTGLKFMAGFPTRKTNNDITCIASNGGRVHCMQVWPPIGNKKLETLSYLPDLDDAQLANESLYLLMKGWITCLEFELEHGFLFREHNKSTGYYDG

SEQ ID NO: 183805 - protein, 43 aa, Glycine max
  Clone ID: PAT_MRT3847_136991C.1.pep
VLSSPVSPLLACAASSFSCSPPSCSPSVLVSQPVLSLGPGSGL

SEQ ID NO: 183806 - protein, 172 aa, Glycine max
  unsure (1)..(172): unsure at all Xaa locations
  Clone ID: PAT_MRT3847_136992C.1.pep
AYSMISSPTVTNVNPACAGMVAPFTGLKSIAGFPTRKTNNDITSIATNGGRVXCMHVWPPVGKKKFETLSYLPDLDDAQLAKEVEYLLKNGWIPCLKFELEHGFVYREHNRSPGYYDXRYWTMWNLPMTCCTDAYDVFKELQXANTAIANSFIQIIRFDNLLSVQCMSFDRY

SEQ ID NO: 183807 - protein, 148 aa, Glycine max
  unsure (1)..(148): unsure at all Xaa locations
  Clone ID: PAT_MRT3847_136993C.1.pep
MACSMISYAAVTTVNRACAGMVAPFTGLKTMAGWLPRMRAFDITSIASNGGRAQCVQVWPPXWIKKFETLIYLPDXLEDAQLRKEVEYLLRKGWMPSLQFELDHGFVYREHNRSPGYYNGRYWTMVKLPMFGCTEATQVVNELQEAKT

SEQ ID NO: 183808 - protein, 58 aa, Glycine max
  Clone ID: PAT_MRT3847_136994C.1.pep
RSFQKTFTEHHPKIQNEEGHITDLYIPRKCYATNTLINLKDHASCQINIIHNHDNIFY

SEQ ID NO: 183809 - protein, 72 aa, Glycine max
  Clone ID: PAT_MRT3847_136995C.1.pep
TITPQEINGKWDHVRQLVPRRDQALTEEHARQQHNERLRKQFGAQANVIGPWIQTKMEEIGRISIEMHGTLE

SEQ ID NO: 183810 - protein, 178 aa, Glycine max
  unsure (1)..(178): unsure at all Xaa locations
  Clone ID: PAT_MRT3847_136996C.1.pep
MAYSMISSPSVTTVNRACAGMAAPYTGLKFMAGFPTRMTNNDITCIASLCGILQCMQVWSPICKTNSETLSYLPDLDDSHSPEELXYLLRKGWIPCLQFELEHGFVYREHNRSPGYYDGRYWTMWKLPMFGCTDASQVLKELQEAKTAYPNGFIRIIGFDNVRQVQCISFIAYQLPGF

SEQ ID NO: 183811 - protein, 115 aa, Glycine max
  unsure (1)..(115): unsure at all Xaa locations
  Clone ID: PAT_MRT3847_136997C.1.pep
MKPMKKQAGAGMDAPFTGLKSMAGFPTRKTINDFXSLLGFGGRVLCMQVWPPVDKKKFVTLSYLPDLDDAQLAKEAEYLLRKGWIPCLEFQLEHGFLYREHIGSPXYYYGRYWSL

SEQ ID NO: 183812 - protein, 83 aa, Glycine max
  Clone ID: PAT_MRT3847_136998C.1.pep
TINGGRLKFRHINTPLRLMAGLPSQIACGSWQKTRHAIPPWLLFNNTGLDSTLLIYYQMLEKKLSLRNYCNYPLIHIIRSIIS

SEQ ID NO: 183813 - protein, 116 aa, Glycine max
  unsure (1)..(116): unsure at all Xaa locations
  Clone ID: PAT_MRT3847_136999C.1.pep
KITFPAVSRVDLTSAGVVAPCTGLKSMAGFPTRKTNSVITFIASNGGRVQCMQVWPPIGKKKFETLFYLPDLDDAQLAKEGVYLLRKGWIPCLEFELEHGFXVFREHNRSPGYFDG

SEQ ID NO: 183814 - protein, 36 aa, Glycine max
  Clone ID: PAT_MRT3847_13699C.1.pep
AARPSIQQFSDGVGYGWIDGLKAHAEKHVTVSSIEH

SEQ ID NO: 183815 - protein, 51 aa, Glycine max
  Clone ID: PAT_MRT3847_1369C.1.pep
KYKSIVRHKNQSQANIQQLKLVIWSMRWYQNFYYQVVKSSILVGPILSNKN

SEQ ID NO: 183816 - protein, 102 aa, Glycine max
  unsure (1)..(102): unsure at all Xaa locations
  Clone ID: PAT_MRT3847_136C.1.pep
QHXXXXXXVXXRXVXVGIIGXIXRHXXXVRRSRHXXXAXGXATXXXDRVXLXTXXXNKRSXSSCXPXXXXXXXXPXXGXXXXXQXGVTQXXXNXXTGMAXRX

SEQ ID NO: 183817 - protein, 143 aa, Glycine max
  unsure (1)..(143): unsure at all Xaa locations
  Clone ID: PAT_MRT3847_137000C.1.pep
MASSMISSPAVTTVNRAGAGMVAPFTGLKSMAGFPTRKTNNDITSIASNSGRVQCMHVWPPVDKKKFETLSYLPYLDNTQLAKEXEYLLKKEXIPYLEFECKHDFIYHKHNRSPGYYNKHYXTIVKLAIYNYTNTSQILRDLQ

SEQ ID NO: 183818 - protein, 183 aa, Glycine max
  Clone ID: PAT_MRT3847_137001C.1.pep
ENFEKCFVQQYSMIHRLETNKLRNVAKFFAHLLGTDALPWHVLSYIRLTEEDTTSSSRIFIKILFQELSEHLGIRLLNERLNDLTMQESFESIFPKDNPKNTRFCINFFTSIGLGGLTENLREYLKNMPRLIMQQQKQVSESESDDESGSSDSSDSGTASSESESDSAGYPQSLSIRRKRRRK

SEQ ID NO: 183819 - protein, 137 aa, Glycine max
  unsure (1)..(137): unsure at all Xaa locations
  Clone ID: PAT_MRT3847_137002C.1.pep
KNKLLRTNNEKLTAGSMISCAAVTTVNRAGGDMVATFTGLMSMAGLPTTKTNDDISSIASNGGRVQCMQAXPPVGKKKFETLCYLPDLDDAQLAKEVEYLLRKGWIACWXFELDHRFWYREHNTSAEYYYXRYWTMW

SEQ ID NO: 183820 - protein, 116 aa, Glycine max
  Clone ID: PAT_MRT3847_137003C.1.pep
QELSEHLGIRLLNERLNDPTMQESFESIFPKDNPKNTRFCINFFTSIGLGGLTENLREYLKNMPRLIMQQQKQVSEFESDDESGSFDSSDFGTASSDSDSASFDESARRRRKRRRK

SEQ ID NO: 183821 - protein, 178 aa, Glycine max
  unsure (1)..(178): unsure at all Xaa locations
  Clone ID: PAT_MRT3847_137004C.1.pep
MASSMISSPAVTTVNRAGPGMVAPFTGLKSMAGFPTRKTNNDITSIASDGGRVQCMQVWPPVGKKKFETLSYLPDLDDAQLAKEVEYLLKXGWIPYLEFXLKHNFVYHKHNKSPIYYNKRYXTICKRAIFICTNTSHILNKRARTNTTXGNNCIRMITCGRHRQLQYISCISYERPSY

SEQ ID NO: 183822 - protein, 559 aa, Glycine max
  Clone ID: PAT_MRT3847_137005C.1.pep
KEVQDKSSQEYQRFTWDALRKSSHGLVHKVNATNIKNIIPELFAENLIRGRGLFCRSCMKSQMASPGFTDVFAALVAVVNTKFPEVGDLLLRRIVLQLKRAYKRNDKPQLLAAVKFIAHLVNQQVAHEIIALELLTVLLEKPTDDSVEVAVGFVTECGSILQDLSPKGLHGIFERFRGILHEGEIDKRVQFLIEGLFAIRKAKFQGYPAVRPELDLVEQEDQITHEVSLDEEIDPEISLDIFKPDPNFLENEKRYEELKKSMLGEESEDDEEGLDSESDDDDDEDDESDEEEEEQMQIKDETETNLVNLRRTIYLTIMSSVDFEEAGHKLLKIKLEPGQEMELCIMLLECCSQERTYLRYYGLLGQRFCMINKVHQENFEKCFVQQYSMIHRLETNKLRNVAKFFAHLLGTDALPWHVLSYIRLTEEDTTSSSRIFIKILFQELSEHLGIQLLNERLNDTTMRESFESIFPKDNPKNTPRLIMLQQKQVSESESDDESEYLKNMPRLIMQQQKQVSESESDDESGSSDSSDSGTASSESESDSASSDESDRRRRKRRRK

SEQ ID NO: 183823 - protein, 178 aa, Glycine max
  unsure (1)..(178): unsure at all Xaa locations
  Clone ID: PAT_MRT3847_137006C.1.pep
MASSMISSPAVTTVNRAGAGMVAPFTGLKSMAGFPTKKTNNDITSIASNGGRVQCMQVWPPIGKKKFNTLSYLPDLNNTQLAKEVEYLLKKRXIPYLQFDLNHNFIYHNHNESPRYYNKLYXTIXNLPIFNYTNTSHVCKDLQXTKTTYPSNCIPIIRFYNSHQXQYINFISYXPAXF

SEQ ID NO: 183824 - protein, 89 aa, Glycine max
  unsure (1)..(89): unsure at all Xaa locations
  Clone ID: PAT_MRT3847_137007C.1.pep
QVXAINXIFEXXXTXIKNYGXWXRYQSRTGYXXMYKXXRGXTLNGSLXQCSXEMDSHHRVRSPCIXIXKXAXIPAKXXKRESTXHSTLR

SEQ ID NO: 183825 - protein, 170 aa, Glycine max
  Clone ID: PAT_MRT3847_137008C.1.pep
EELVVSNGHGSLDLEDRDGCLKQLLEHVSSNPMELLGIHPGCEFSRFCEHKYERLIHPSMESSIFVNLEEKEAVLNSWRSLSMFYEAFVGMASAVWTLHKLSYTFDPTVEIFQVERGVEFSMIYMEDVTKRLTWPNKGRAKVGFSVLPGFKIGRVVIQSQVYISNFRCTE

SEQ ID NO: 183826 - protein, 56 aa, Glycine max
  Clone ID: PAT_MRT3847_137009C.1.pep
SAMWQNICTFRQCYIMIMFSTSLPSMTHFVCPFSLLVFMNCGINCYFMGRERLSII

SEQ ID NO: 183827 - protein, 81 aa, Glycine max
  Clone ID: PAT_MRT3847_13700C.1.pep
KKFWAGLQGLTIYFYNSNRDFQHVEKLNLGAFEKLTDEIPWGSSRDPGTHFSLILRDQEIKFKVETLECREMWLPLVGQSS

SEQ ID NO: 183828 - protein, 35 aa, Glycine max
  Clone ID: PAT_MRT3847_137010C.1.pep
LNNLYLFRTIYSSIIYRRIVYIRWRVSITPFMYFE

SEQ ID NO: 183829 - protein, 70 aa, Glycine max
  Clone ID: PAT_MRT3847_137011C.1.pep
FSLLCIVCSCQIFTSCSELQSGTRQYVSRYFRTAVEVLSGDQVSCSYLGGCTIPAECIKLSHYRGWNRDS

SEQ ID NO: 183830 - protein, 67 aa, Glycine max
  Clone ID: PAT_MRT3847_137012C.1.pep
ICDCFVPLYYFAKQFFSQKERLIILCELGMKHTTISEALEFIRKFCQCGLFDVLGARELNCCRSIEI

SEQ ID NO: 183831 - protein, 98 aa, Glycine max
  Clone ID: PAT_MRT3847_137013C.1.pep
GIDKTSATLQFRKLADCDFLKRNFKQMSNVLGVASGDKARLWAQLHYVSCNNLEMQEAYLGNLVNGLPGLDLHHPKEACPLGKEALFWIGWLEKGDGP

SEQ ID NO: 183832 - protein, 253 aa, Glycine max
  Clone ID: PAT_MRT3847_137014C.1.pep
AQISGIIAAKECVNPFDYCDIVTSTTHKSLRGPRGGIIFYRKGTKPRNRGILLSQGHESDQYDFEEKINFAVFPSMQGGPHNNHIAALAIALKQVATPEYKAYMQQVKKNAQALACALLRRKCRLVTGGTDNHLILWDLRPLGLTGKFYEKVCETCHITLNKIAIFGDNGTIIPGGVRVGTPAMTSRGCLEAHFETMAEFLIRAAQIASILQREHGKWQKTTLKGLESNRDVVELRARVEAFATQFAMPGFDI

SEQ ID NO: 183833 - protein, 37 aa, Glycine max
  Clone ID: PAT_MRT3847_137015C.1.pep
VSQYALLVSSRLFNVRLQVSRRRINQNWKVAFKRRKV

SEQ ID NO: 183834 - protein, 98 aa, Glycine max
  unsure (1)..(98): unsure at all Xaa locations
  Clone ID: PAT_MRT3847_137016C.1.pep
MAKKFHDNLIAKKDFVVGQKVLLYNSRLGLMSGKLRSKWIGPFVVTNVFPYGTVEIESESXKSFMVNGHRLKPFLINPSLVDVVVEETSLLHPTSLLP

SEQ ID NO: 183835 - protein, 86 aa, Glycine max
  Clone ID: PAT_MRT3847_137017C.1.pep
EGLVGQKVLLYNSRLGLMSGKLRSKWIDPFVVTNVFPYGTIEIKSESTDKSFKVNGQWLKPFLINPSLVDVVMEETSLLHPTSLPP

SEQ ID NO: 183836 - protein, 61 aa, Glycine max
  Clone ID: PAT_MRT3847_137018C.1.pep
NTSLAFASFLGRVVFASVIILAAYQLFNEFGIDVGPATRALRSKFDAITHLVHSLMGFQIP

SEQ ID NO: 183837 - protein, 97 aa, Glycine max
  Clone ID: PAT_MRT3847_137019C.1.pep
KFHDSLIAMKDFVVGQKVLLYNSRLGLMSGKLRSKWIGPFVVTNVFPYGTVEIKSESTDKGFKVNGHWLKPFLTNPSLVDVVVEEETSLLHPTSLPP

SEQ ID NO: 183838 - protein, 59 aa, Glycine max
  Clone ID: PAT_MRT3847_13701C.1.pep
GGGPKFFFFFPPPFLLGRIPFGPPSPRGGEAPFQRKKKPFNLEILLGSNFSQQKEPPYR

SEQ ID NO: 183839 - protein, 40 aa, Glycine max
  Clone ID: PAT_MRT3847_137020C.1.pep
NSYNMSSKSRLLSGRSIGSLLAYASMSCPHSSTQSPPFNS

SEQ ID NO: 183840 - protein, 374 aa, Glycine max
  Clone ID: PAT_MRT3847_137021C.1.pep
MGTSANAVAGGRGGAPVPKDVDYANYFCTYAFLYHQKEMLSDRVRMDAYFDAIFQNKRHFAGKTVLDVGTGSGILAIWSAQAGARKVYAVEATKMSEHARALVKANNLQDVVEVIEGSMEEITLPEKVDVIISEWMGYFLLRESMFDSVINARDRWLKPTGVMYPSHARMWMAPIRTGIVDHKLGDYESTMDDWHHFVDETKTYYGVDMSTLTRPFSEEQRKYYLQTSLWNNLHPHQVVGTAGIIKEIDCLTATVADIEKVRSDFSMSITVDNTKLCGFGGWFDVHFRGRSEDPAEQEIELTTAPSVNYGTHWGQQVFLLHPPMHLSEGDDLRVSFLMSRSKENHRLMEVELGCEIHQHSGKLLAPFKNKYYIE

SEQ ID NO: 183841 - protein, 56 aa, Glycine max
  unsure (1)..(56): unsure at all Xaa locations
  Clone ID: PAT_MRT3847_137022C.1.pep
LASFFFILIIXLSSLSXYIHXPRFERATRGXXTKXPXPLDQLKQILDEFAKERDWE

SEQ ID NO: 183842 - protein, 37 aa, Glycine max
  unsure (1)..(37): unsure at all Xaa locations
  Clone ID: PAT_MRT3847_137023C.1.pep
ANXXYLLLYICNHLIRVLKIKKCLHKTIILFVSFHNV

SEQ ID NO: 183843 - protein, 45 aa, Glycine max
  Clone ID: PAT_MRT3847_137024C.1.pep
DLTWVISLSITKWWESQTWVRSLGVSPINTRQHFLQHVHGMPGST

SEQ ID NO: 183844 - protein, 51 aa, Glycine max
  unsure (1)..(51): unsure at all Xaa locations
  Clone ID: PAT_MRT3847_137025C.1.pep
LIADGTCCPIYSQKNYICSHCKYVFFFIIFVYFLFVRVLVLTLXDSFFNPH

SEQ ID NO: 183845 - protein, 157 aa, Glycine max
  unsure (1)..(157): unsure at all Xaa locations
  Clone ID: PAT_MRT3847_137026C.1.pep
ASSMISYPADTTVNRAGAGMVAPFTGLKSMAGFPTRKTNNDITSIASDGGRVQCMHVWPPIDKKKFETLSYLPDLDDAQWAKEVEYLLRKGWIPCLXFELEHGFVYREHIRSPGYYDGRYXTMXMLTMFGCTDASXVLEELQYAKTAYANRFIRIIG

SEQ ID NO: 183846 - protein, 156 aa, Glycine max
  unsure (1)..(156): unsure at all Xaa locations
  Clone ID: PAT_MRT3847_137027C.1.pep
ASSMIYSPTVTTVNRAGAGMVATFTGLKSMAGFPTKNTNNDITSIASNGGRVQCMHVWPPVGKNKDETHCYLPDLDDAQLAKEVEYLFRKGWIPRLEFXVXHGFMYGEHTRSPGYYDGHYWTMWKLPMVCCTDASKVLNDLXDAKTAYPNGFIRII

SEQ ID NO: 183847 - protein, 151 aa, Glycine max
  unsure (1)..(151): unsure at all Xaa locations
  Clone ID: PAT_MRT3847_137028C.1.pep
MRTKKKEVAYSMISCPVVTTRQRAHGDRYWTVPFTGLKSMAGFPTRKTNNDITXIASNGGRVQCMQVWPPIGKKKFETLSYLPHLADAQLAKEVEYLIRKGWIPCLEFELEHRFEYREHNGSPGYYQGLYWTXWKLPMSGCTDASQVLKEL

SEQ ID NO: 183848 - protein, 136 aa, Glycine max
  Clone ID: PAT_MRT3847_137029C.1.pep
HASDHAYGCELRRRSKWLPSMISSPAVTTVNRAGAGMVAPFTGLKSMAGFPTTKTNNDITSIASNSGRVPCMQVWPPACTKNFETLSYLPYLDDAQLAKAVVYLPKKAWISCWAFELEHVYLYREHIMSPGYYYGR

SEQ ID NO: 183849 - protein, 59 aa, Glycine max
  Clone ID: PAT_MRT3847_13702C.1.pep
MDKEKAQINIVVVGNVDTEEASTINKIKKPVVEKKAIGHEILGDGRRAWEGNQGIMLTK

SEQ ID NO: 183850 - protein, 161 aa, Glycine max
  unsure (1)..(161): unsure at all Xaa locations
  Clone ID: PAT_MRT3847_137030C.1.pep
MGTTFIKEEGLSMILCSSVTAAYRACACMGAPFTGLKCMAELPTRTTNFDITCIASTGGRAQCMQVWPPIGKKKFETLSYLPDLDDAQLAQEVEYLVRKGWIPCLEFALEHGFVYREHNRSPVYYDGRYWTMWKLPMFGCTDAYQVLKELQXAKTAYPNGF

SEQ ID NO: 183851 - protein, 111 aa, Glycine max
  unsure (1)..(111): unsure at all Xaa locations
  Clone ID: PAT_MRT3847_137031C.1.pep
MASSMISSPTVTTANRPGAGLVVQLIGLNSLVXFPTLKTHHDITFIASNGGRVQCMPVWPPVGKKKFETLSYLPDLDDAQLAKEVEYLLMKGWIPCLEFELEHSFLYREHN

SEQ ID NO: 183852 - protein, 108 aa, Glycine max
  unsure (1)..(108): unsure at all Xaa locations
  Clone ID: PAT_MRT3847_137032C.1.pep
LLALIPFPRRLRSEYDNRQSDAGTVGDLDILPPFPPRPPEDPDIMPFARAPNIVPFSPRGRRSKXDNHQKDAGTLGRVIXLPPNRPGPPXKIIPFPGTNIVPFQNLPS

SEQ ID NO: 183853 - protein, 178 aa, Glycine max
  unsure (1)..(178): unsure at all Xaa locations
  Clone ID: PAT_MRT3847_137033C.1.pep
MASSMISSPAVTTVNRAGADMVAPFTDLKSMAGFPDQKTNNDITSIASNGGRVQCMQVWPPXGKKKFETLSYLPXLNNTQLAKEVEYLLRKGWIPCLKFKLKHGFIYQEHNKSPKYYNGHYXTMXKLPMFDCTDASQVLKELQEAKTAYPNNFIHIIKFHNIHQMQYISFITYEPPSF

SEQ ID NO: 183854 - protein, 164 aa, Glycine max
  unsure (1)..(164): unsure at all Xaa locations
  Clone ID: PAT_MRT3847_137034C.1.pep
ASSMISSPAVTTVNRAGAGMVAPFTGLKSMAGFPTRKTNDGITSIASNGGTVHCVQVWPPFGKKKFXTLSYLPDLNDAQLANDVXYLLRKGWIPCLESDLDHGFMYREHNRSPSYYDGRYWTMWNLPMFGCADASHVSNELQDVYTAYPLGSIPFTLVDDARQI

SEQ ID NO: 183855 - protein, 61 aa, Glycine max
  unsure (1)..(61): unsure at all Xaa locations
  Clone ID: PAT_MRT3847_137035C.1.pep
INFLFGKPXLLSKVSSQAIXSTKILFQLMSCLSLLNKTMRNVNNIFFNTLFLLDKIHVNFI

SEQ ID NO: 183856 - protein, 168 aa, Glycine max
  Clone ID: PAT_MRT3847_137036C.1.pep
MIFSPSVTTVNRAGAGVVALFTGLMSMAGFPTENTNSDITYIASNCGRVQCVRVWPPFGKKKFETLFYLPDLDDAQLAREVIYLLRKGWIPCLEFELEHGFVYREHNRSPVLYYGLYWTMWKLSMCGCSDASHVLRDLLDAKSAYPCGFMRIIICHNVTQVHRISFIV

SEQ ID NO: 183857 - protein, 175 aa, Glycine max
  unsure (1)..(175): unsure at all Xaa locations
  Clone ID: PAT_MRT3847_137037C.1.pep
MASSMISSPAVTTVNRAGAGMVAPFTGLKSMAGFPTRKTNNDITSIASNGGRVQCMQVWPPVGKKKFETLSYLPDLDDAQLAKEVEYLLKKGWIPCLKFELKHSFVYQEHNXSPKYYDRHYXTIXXLAMFRYTNTSQVWKELQETKTTYANNFMHIIKFYNIRQIHYINFIGYEP

SEQ ID NO: 183858 - protein, 40 aa, Glycine max
  Clone ID: PAT_MRT3847_137038C.1.pep
IDSYFNPYCIYSKRGTCAPKLIINKEKALTLKPKKNSQIP

SEQ ID NO: 183859 - protein, 51 aa, Glycine max
  Clone ID: PAT_MRT3847_137039C.1.pep
SYMGRASYGVSTMCYEDCDLCNPAWTLSVTMALNPNPGSVTWRRHTLKRPE

SEQ ID NO: 183860 - protein, 27 aa, Glycine max
  Clone ID: PAT_MRT3847_13703C.1.pep
LYLPTKCYGSYSQLGVQHYLTTITFGG

SEQ ID NO: 183861 - protein, 77 aa, Glycine max
  Clone ID: PAT_MRT3847_137040C.1.pep
GSKSVFLKIPMGPGISFILSLLKIIDKAPNRYQLPLYEIELQVFMNKGNWEQTLWKATQINTIKHYTPPSFARGPKL

SEQ ID NO: 183862 - protein, 142 aa, Glycine max
  Clone ID: PAT_MRT3847_137041C.1.pep
LVFLRSLTMTFNLMLLFCLVAVINNVVVPTSARQLMSTTTTSPDEKEVMMNIGTANRGHDEKHDHQVQVDDPTSKNYNVEKKEERFDKNQIIPPILPFPFGFPFPRPSFPFPRAAFPFPRFPLPTPFVPGLPWPISPDAVSS

SEQ ID NO: 183863 - protein, 141 aa, Glycine max
  Clone ID: PAT_MRT3847_137042C.1.pep
MDFHTLSRKQLQALCKKNKIPANITNVAMADALAALNQVEGLDDFFNPSEGDVGTPSVNHRTVVRTSTQRKAAIEEAEGLKVKTSTRRVRVAEEVVEQENKDANAPPITPAASRRRATAVSTRRKKEVEMVEEDAGVQGNP

SEQ ID NO: 183864 - protein, 138 aa, Glycine max
  Clone ID: PAT_MRT3847_137043C.1.pep
PICTPTRPGTRGWANAFGQIEPDMNSRQQLLSTTTNGDVVQGKDLASAKVNVACAADGLTLSDTPTPLLESGLQKDRGLIVEYLGRMCNDVHNANQPQEKDLWGGNFSLENKPRSRLEKVSFTKAQIVRGKTLKYDTI

SEQ ID NO: 183865 - protein, 45 aa, Glycine max
  Clone ID: PAT_MRT3847_137044C.1.pep
QDTHTTLSFILFEISLSNISSNNYSIYIQIFAIFQAINSSLSYTL

SEQ ID NO: 183866 - protein, 68 aa, Glycine max
  Clone ID: PAT_MRT3847_137045C.1.pep
YIIAMPQYYEFSMYIFNIFSPQPFMATYLSSYNSPPLHYSRNERGTFMEGDMGNHLSITRSMLPSLFK

SEQ ID NO: 183867 - protein, 94 aa, Glycine max
  unsure (1)..(94): unsure at all Xaa locations
  Clone ID: PAT_MRT3847_137046C.1.pep
ARNSARXLSLSLSLXRXDGXXAXGNPEXXHXXLHWLLSFXLXHGAGASXCRVLVXTXLFGSXDDHHHXXRXVXXEDEMPXLRXPXQLGEITAXD

SEQ ID NO: 183868 - protein, 240 aa, Glycine max
  unsure (1)..(240): unsure at all Xaa locations
  Clone ID: PAT_MRT3847_137047C.1.pep
LEASHKKVKGCFAARLDNLDDDLMEDDVITHEEFFPTKSNSTLQFDHGSSNPSLASSSKRKSKVHECSICHRSFSSGQALGGHKRCHWITSNAPDTSTLTRFQQFQEHLDQIPKFDTSSEPLDLKLDLNLPAPSNDLARRNVNTEFYLQPWVASKDAKDDTNNSHCQSLHNPNXNVDVDNDEDKNNNNNNSMQNMDNEADSKIKLAKLSELKDMKAGGSSSPWLQVGISSTATDEETDNC

SEQ ID NO: 183869 - protein, 171 aa, Glycine max
  Clone ID: PAT_MRT3847_137048C.1.pep
MAPTRNHLLHIAMFPWFATGHMTPFLHLSNELAKRGHKITFLLPKKAKLQLQHLNNHPHLITFHTLTIPHVKGLPHGTETASEIPISLNHLLVIAMDKTRDQVEHTLSATNPDFVLYDNAYWVPQIAKKLGIKTICYNVVCAASLAIVLVPARNVPKDRPITVEELSQPPE

SEQ ID NO: 183870 - protein, 429 aa, Glycine max
  unsure (1)..(429): unsure at all Xaa locations
  Clone ID: PAT_MRT3847_137049C.1.pep
DVLEIETGLREDDRRGKSYKMNSSCADILLFAAHRWPMSKPSLVGESKDVFDQKASNKYWIDVQLRWGDYDSHDIERYTRAKFMDYTTDNMSIYPSPTGVMIGLDLAYNLHSAFGNWFPGSKPLLQQAMNKIMKSNPALYVLRERIRKGLQLYSSEPTEPYLSSQNYGEIFSNQIIWFVDDTNVYRVTIHKTFEGNLTTKPINGAIFIFNPVTGQLFLKVIHTSVWAGQKRLGQLAKWKTAEEVAALVRSLPVEEQPKQIIVTRKGMLDPLEVHLLDFPNIVIKGSELQLPFQACLKIEKFGDLILKATEPQMVLFNIYDDWLKSISSYTAFSRLILILRALHVNNEKAKMLLKPDKTIITEPHHIWPSLSDDQWMKVEVALRDLILSDYAKKNNVNTSALTQSEIRDIILGAEITXPSQTAAQIAEIE

SEQ ID NO: 183871 - protein, 48 aa, Glycine max
  Clone ID: PAT_MRT3847_13704C.1.pep
KGCKKIPIGYTLQSSKKPKLLTPSLYRNVEWLFTIGKITKFYPYQTLQ

SEQ ID NO: 183872 - protein, 56 aa, Glycine max
  Clone ID: PAT_MRT3847_137050C.1.pep
FFFSKICFTKIGTLSTTSLFFFGPFVKFSRVTLSISFIWFGQTIQGFRIVQFISGP

SEQ ID NO: 183873 - protein, 321 aa, Glycine max
  Clone ID: PAT_MRT3847_137051C.1.pep
MFTASKLAFTLTPPRPCTAPLTPISSASGVHLIQFNGRHLCLRQRLFLLSPMATADQQGKVEEFEDDSNTVDSKILPYCSIDKKEKKSIGELEQEFLQALQAFYYEGKAIMSNEEFDNLKEELMWEGSSVVMLSSDEQKFLEASMAYVSGKPIMSDKEFDELKLRLKIEGSEIVAEGPRCSLRSRKVYSDLSVDYLKMLLLNVPATVIALGLFFFLDDLTGFEITYLLELPEPFSFIFTWFAAVPLIVWIALSLTNAIVKDFVILKGPCPNCGTENTSFFGTILSISNGGSTNTVKCSNCGTAMEYDSTTRLITLPEGSNA

SEQ ID NO: 183874 - protein, 220 aa, Glycine max
  Clone ID: PAT_MRT3847_137052C.1.pep
MFTASKLAFTLTPPRPCTAPLTPISSLSSSSSSSSASASGINFIQFNGRHLCLRRRLFLLSPKATADQQGKVEEFEDDSNVVDSKILPYCSIDKKEKKSIGELEQEFLQALQAFYYEGKAIMSNEEFDNLKEELMWEGSSVVMLSSDEQKFLEASMAYVSGNPIMSDKEFDELKLRLKKEGSEIVAEGPRCSLRSKKVYSDLSVDYLKMFLLNVPATGIA

SEQ ID NO: 183875 - protein, 181 aa, Glycine max
  unsure (1)..(181): unsure at all Xaa locations
  Clone ID: PAT_MRT3847_137053C.1.pep
MASSMISSPAVTTVNRAGAGMVAPFTGLKSMAXGFPTRKTNNDITXSIASNGGXRVQCMQVWPPVGKKKFETLSYLPDLDDAQLAKEVEYLLRKGWIPCLEFELEHGFVYREHNRSPGYYDGRYWTMWKLPMFGCTDASQVLKELQEAKTAYPNGFIRIIGFDNVRQVQCISFIAYKPPGF

SEQ ID NO: 183876 - protein, 31 aa, Glycine max
  Clone ID: PAT_MRT3847_137054C.1.pep
STNTVKCSNCGTAMEYDSTTRLITLPEGSNA

SEQ ID NO: 183877 - protein, 182 aa, Glycine max
  unsure (1)..(182): unsure at all Xaa locations
  Clone ID: PAT_MRT3847_137055C.1.pep
KEKQIASSMISSPAVTTVNRAGAGMVAPFTGLKSMAGFPTRKTNNDITSIASNGGRVQCMQVWPPVGKKKFETLSYLPDLDDAQLAKEVQYLLKKGWIPCLEFKLEHSFMYHEHNKSPXYYYGHYXTMWKLPMFGCTDASQVLKELQXANTTYPNSFIHIIRFDNIHQIXYISFITYKLPSF

SEQ ID NO: 183878 - protein, 97 aa, Glycine max
  unsure (1)..(97): unsure at all Xaa locations
  Clone ID: PAT_MRT3847_137056C.1.pep
VVFGLALDYFGMHINKVLYSXSYTCVTAAPAGILFVGIYLMVDVCGCRRMTLVLEWMGMHALMIYILAACNVFPIFLQGFYWGSPHNNILKLIGVGT

SEQ ID NO: 183879 - protein, 178 aa, Glycine max
  Clone ID: PAT_MRT3847_137057C.1.pep
MASSMISSPAVTTVNRAGAGMVAPFTGLKSMAGFPTRKTNNDITSIASNGGRVQCMQVWPPVGKKKFETLSYLPDLDDAQLAKEVEYLLRKGWIPCLEFELEHGFVYREHNRSPGYYDGRYWTMWKLPMFGCTDASQVLKELQEAKTAYPNGFIRIIGFDNVRQVQCISFIAYKPPGF

SEQ ID NO: 183880 - protein, 514 aa, Glycine max
  Clone ID: PAT_MRT3847_137058C.1.pep
LVRFVDRKPLHNLRRLVLSHSKNLIELPDLGEALNLEWLDLKGCIKLKKINPSIGLLRKLAYLNLKDCTSLVELPHFKEDLNLQHLTLEGCTHLKHINPSVGLLRKLEYLILEDCKSLVSLPNSILCLNSLKYLSLYGCSGLYNSGLLKEPRDAELLKQLCIGEASTDSKSISSIVKRWFMWSPRLWYSRAHNDSVGCLLPSAPTIPPSMIQLDLSYCNLVQIPDAIGNLHCLEILNLEGNSFAALPDLKGLSKLRYLKLDHCKHLKDFPKLPARTDFSYTFLLPILGRAVELPVWGFSVPKAPNVELPRALGLSMFNCPELVEREGCSSMVLSWMIQIVQAHYQSNFAWWPIGMPGFSNPYICSVIPGSEIEGWFTTQHVSKDNLITIDPPPLMQHDKCIGVAYCVVFAAHSTDLEMVPPETERGYPVMGIVWIPVDVHEDVVTDKSDHLCLFYSPTYIGIGDWKLKVKIMDRKGFPVEVKKYGYRRVHEEDLDLEPSLNTAGIRKRKRGTDE

SEQ ID NO: 183881 - protein, 176 aa, Glycine max
  unsure (1)..(176): unsure at all Xaa locations
  Clone ID: PAT_MRT3847_137059C.1.pep
MASSMISSPAVTTVNRAGAGMVAPFTGLKSMAGFPTRKTNNDITSIASNGGRVQCMQVWPPVGKKKFETLSYLPDLDDAQLAKEVEYLLRKGWIPCLEFELEHGFLYHEHNRSPXYYDGRYWTMWKLPMFGCADASHVLKDLXDAKTGYPDGXVRIMGCDTFGSADRELICYNLPR

SEQ ID NO: 183882 - protein, 56 aa, Glycine max
  Clone ID: PAT_MRT3847_13705C.1.pep
ARDKRNLSASLRSIHSLPLKTCVRGQMLPIRWEWECCKEDSASGSFKRKDCAKSHG

SEQ ID NO: 183883 - protein, 72 aa, Glycine max
  Clone ID: PAT_MRT3847_137060C.1.pep
HFWLQGADPEGYSTRGLGKYLARRKKLQIMLTLGKPSARGWTNLIEKNLNQKQAKGVQFLEPHQVSQDIAGT

SEQ ID NO: 183884 - protein, 179 aa, Glycine max
  unsure (1)..(179): unsure at all Xaa locations
  Clone ID: PAT_MRT3847_137061C.1.pep
MASSMISSPAVTTVNRAGAGMVAPFTGLKSMAGFPTRKTNNDITSIASNGGRVQCMQVWPPVGKKKFETLSYLPDLDDAQLAKEVEYLLKKGWIPCLEFELNHSFIYHKHNKSPKYYDRRYXNHXKLPIFNYTNTSQVLKELQQAKTTYPNNFIHIIIFNNXVRQVHYIIFITYKPPSF

SEQ ID NO: 183885 - protein, 26 aa, Glycine max
  Clone ID: PAT_MRT3847_137062C.1.pep
FICSIGIQRATLYSYVWNRSRGTTQK

SEQ ID NO: 183886 - protein, 178 aa, Glycine max
  unsure (1)..(178): unsure at all Xaa locations
  Clone ID: PAT_MRT3847_137063C.1.pep
MASSMISAPAGTTVNRAGAGMVATFTGLKFMAGFRTRKTNSVITCIASNGGRVQCMQAWPPVGTKKTETLSYLPDLDDAQLAXKYXYLLRKGWIPCLXFELEHGLVFRDHNRXPRYYDGLYWTMSNLSIYSFADAFXVLNELHDAKTAYPNSFIHIIGFYNIHQLHYISFISYIPAVF

SEQ ID NO: 183887 - protein, 111 aa, Glycine max
  unsure (1)..(111): unsure at all Xaa locations
  Clone ID: PAT_MRT3847_137064C.1.pep
MASSMISYPADTTVNRAVAGMVAPFTGLKSMAGFPTMKTNNDITSIASNSXRVQCMQVWPPIVKKKFETLSYLPDLDDAQLANEVEYLLKKXWIPCLEFELEVNFLQPLLV

SEQ ID NO: 183888 - protein, 180 aa, Glycine max
  unsure (1)..(180): unsure at all Xaa locations
  Clone ID: PAT_MRT3847_137065C.1.pep
MNELAYSLISSPADTTVNRAGAGMAAAFTGLTSVAGFPSRKTNNDLASIASIGGRLQCMPVWPPIGKMMMKTLFYLPNLDXAQLANEVEYLLRKGWIPCLEFELEHGFVYREHNTSPGYYDGRYWTMWKLPMFGCTDASQVLKELQEAXTAYPNGFIRIIGFDNVRQVQCISFIAYQXPG

SEQ ID NO: 183889 - protein, 178 aa, Glycine max
  unsure (1)..(178): unsure at all Xaa locations
  Clone ID: PAT_MRT3847_137066C.1.pep
MASSMISSPAVTICQPCTVHGXVAPFTGLKXMAGFPTRKTNNDITSIASNGGRVQCMQVWPPVGKKKFETLSYLPDLDDAQLAKEVEYLLRKGWIPCLEFELEXGFVYREHNRSPGYYDGRYWTMWKLPMFGCTDASHVLKELQEAKNXYPNGSSRYIGFYNVRQVRALPSLPPTPCL

SEQ ID NO: 183890 - protein, 178 aa, Glycine max
  Clone ID: PAT_MRT3847_137067C.1.pep
MASSMISSPAVTTVNRAGAGMVAPFTGLKSMAGFPTRKTNNDITSIASNGGRVQCMQVWPPIGKKKFETLSYLPDLDDAQLAKEVEYLLRKGWIPCLEFELEHGFVYREHNRSPGYYDGRYWTMWKLPMFGCTDASQVLKELQEAKTAYPNGFIRIIGFDNVRQVQCISFIAYKPPGF

SEQ ID NO: 183891 - protein, 45 aa, Glycine max
  Clone ID: PAT_MRT3847_137068C.1.pep
LESICNPIIAKMFQGVGGNPGGTMNKDGPAAGSGRGVGPKIGEVD

SEQ ID NO: 183892 - protein, 44 aa, Glycine max
  Clone ID: PAT_MRT3847_137069C.1.pep
IVLFRQTCYVSLDTTQTIICNVPMCVFDFDKFATLTDAISNKLS

SEQ ID NO: 183893 - protein, 137 aa, Glycine max
  Clone ID: PAT_MRT3847_13706C.1.pep
PFLFRKKTTSGSILALKEAKVISAPKTWLDMRICASQLCQNFRRRCKIRSQGLFSYPVVGTGTMFSYPVAPRCNWPVLLGASAVLVGMDRLLLLPRHRPDFVICNLENTHSNPSRVTCLLVRKKSFEVSATSSQAVE

SEQ ID NO: 183894 - protein, 81 aa, Glycine max
  Clone ID: PAT_MRT3847_137070C.1.pep
SASKFHIPKAERHRATCLPPPIPNTPPARHTRTRRKLPPPPEPLGQNLQMGNRKKLRKEANWKKKNQWQLRVELCCGGCGS

SEQ ID NO: 183895 - protein, 107 aa, Glycine max
  Clone ID: PAT_MRT3847_137071C.1.pep
RIWGPQLGWLSDCGPKIPPPGKGCPPTHCPRCGVGFTRKEVDGYSANNVDPLYLRRRARTSNCHIIYIYIYIYIYIYRYIISFFRKLYYVINVFGKMLRGKKRPFRL

SEQ ID NO: 183896 - protein, 59 aa, Glycine max
  Clone ID: PAT_MRT3847_137072C.1.pep
FFRLANQHLKCRNSIFLEPHPQTQAFLTKTKIYVPVCSPFANQVADGPVPLFINLVVVH

SEQ ID NO: 183897 - protein, 68 aa, Glycine max
  Clone ID: PAT_MRT3847_137073C.1.pep
MLLRTGSFFSLLKATADHILPLSNSSSSGIIRYSPSLEANSVPYATTDPNKRPLTDDDYEPFDRRQEV

SEQ ID NO: 183898 - protein, 139 aa, Glycine max
  unsure (1)..(139): unsure at all Xaa locations
  Clone ID: PAT_MRT3847_137074C.1.pep
VVAFCTLLFVCFLHSVRGILDPNDFLALQSIRKSLHDVPGSNXFFSSWDFTDDPCNFAGVVCADDKVIGLNLGDPRAGLPGVTGKLDPSICKLYALADFXVLHDXIYRPIPQSLCQMKNLRFLGVSRNCIFSEIPAWVA

SEQ ID NO: 183899 - protein, 71 aa, Glycine max
  Clone ID: PAT_MRT3847_137075C.1.pep
ADESVVESPVKRQRDDGEENGVSVSMDAEGGKDPLSNGLSSVIPGWFSEISAMWPAHHGAEPTLLDVLALF

SEQ ID NO: 183900 - protein, 178 aa, Glycine max; identical to SEQ ID NO: 183879
  Clone ID: PAT_MRT3847_137076C.1.pep

SEQ ID NO: 183901 - protein, 67 aa, Glycine max
  Clone ID: PAT_MRT3847_137077C.1.pep
TKAVKHSQGKNLRAGLVLRANPSSSMETKSILVLNPVLLPTREHCSAPTHGQRLSLRNLLSLATYLW

SEQ ID NO: 183902 - protein, 75 aa, Glycine max
  Clone ID: PAT_MRT3847_137078C.1.pep
QHADAIYYCDNLLGARMSMTCDKHRQLQKPRLLGAYGTLAKTLTMSTHVDDTYHENTLNYLIPRPNIQRIQGPPH

SEQ ID NO: 183903 - protein, 56 aa, Glycine max
  unsure (1)..(56): unsure at all Xaa locations
  Clone ID: PAT_MRT3847_137079C.1.pep
HNTFXHISVYQWCSFFARNNMVCSSAITALQLMNLATTFVSQMKVTMTIMIMSSLM

SEQ ID NO: 183904 - protein, 109 aa, Glycine max
  Clone ID: PAT_MRT3847_13707C.1.pep
TKQGSPDHSKKMGVQNNLQQKPPPGPTINTPIMATIMRTLKRKRKTPPKKNKESNWLPQHLTEIALHLTKDPFYAPTGLFFDPWAPGPTNWGNLEANLTQLISLPNGSA

SEQ ID NO: 183905 - protein, 139 aa, Glycine max
  unsure (1)..(139): unsure at all Xaa locations
  Clone ID: PAT_MRT3847_137080C.1.pep
HASAHASADAWEECSVCTHSSVRHFCWWNKYVATPIQSYGNGDAGKRAMILLKHKVLKNIVLRRTKIGRAADLALPPRIVSLRRDCLDIKEQDYYESLYNESQAQFNTYIEANTLMNNYAXHIFDLLTRLRQAVDHPYL

SEQ ID NO: 183906 - protein, 152 aa, Glycine max
  Clone ID: PAT_MRT3847_137081C.1.pep
AVPLFIESDKLSSSSKAFIGKPAPNFMADAVVNGDFKTISLEQFKGQYVVLFFYPLDFTFVCPTEIIAFSDKAGEFKKIGVQLIACSTDSKFCHLEWINKPRKQGGLGEMNIPVLADTSHKISRDSRVLMEEAGIAYRGLFIIDDQGVLRQI

SEQ ID NO: 183907 - protein, 46 aa, Glycine max
  Clone ID: PAT_MRT3847_137082C.1.pep
YNLYSSMPCSTPMNVLLSDQYRLGQSSLLLHQPMKRIRINMFSRYG

SEQ ID NO: 183908 - protein, 120 aa, Glycine max
  unsure (1)..(120): unsure at all Xaa locations
  Clone ID: PAT_MRT3847_137083C.1.pep
MRAYPEAERAESDVLLGIFQGSELSRDIDANVVIYELELTCGEECTIQTTTWTDLPIMCPGHYANGADMPATADAPDLAVVVNDELTSREPADMAAKXHDEERLEWPTIERLPERATSMN

SEQ ID NO: 183909 - protein, 68 aa, Glycine max
  Clone ID: PAT_MRT3847_137084C.1.pep
TYYRRVVPSKLSTSVSHLQLFGSWHISKHFSLLISMYSYQTSHEWFIMLANITLCRSSNNHHYDMLMT

SEQ ID NO: 183910 - protein, 66 aa, Glycine max
  Clone ID: PAT_MRT3847_137085C.1.pep
SSSPSPALICTPSNAAGPERDGNRQRVNWVASPYNVCSPNILIEEIRLGSITCNVNHKIKSNRPCE

SEQ ID NO: 183911 - protein, 114 aa, Glycine max
  Clone ID: PAT_MRT3847_137086C.1.pep
MSAMKFCRECNNILYPKEDRDQKVLLFACRNCDHQEVADNFCVYRNEIHHSVGERTQVLQDVAADPTLPRTKSVRCSQCNHGEAVFFQATARGEEGMTLFFVCCNPNCGHRWRD

SEQ ID NO: 183912 - protein, 35 aa, Glycine max
  Clone ID: PAT_MRT3847_137087C.1.pep
IQVMICRSRHQSHSLILFRSLSSFLSLALRNGQTK

SEQ ID NO: 183913 - protein, 268 aa, Glycine max
  Clone ID: PAT_MRT3847_137088C.1.pep
VRQRSFMYNNDALITKIFSCLYGFVGSCAHLAMVNSSWTKSHIENLWRFPDRIKRVYPPCDTSGLQVLSLERSAKIPVLISVAQFRPEKAHTLQLEAFSAAIKRLDPSLPKPLLLILKWFKTKDMAAGVNPIAHEPAGTKLVEFHKDVAYRTGVVAFGVDASAIHSMRIEHFGISVVEYMAAGAIPIAHNSAGPKMDIVLDEEGQQTGFLACSVEEYADAMVRIVSMPEMERLKMAAAARRRAGRFSEQRFYDDFKAAVHPILCHISR

SEQ ID NO: 183914 - protein, 175 aa, Glycine max
  Clone ID: PAT_MRT3847_137089C.1.pep
MARTKQTARKSTGGIAKSFLQFNHHCTTQFPSSFSIKRAMARTKQTARKSTGGKAPRKQLATKAARKSAPATGGVKKPHRFRPGTVALREIRKYQKSTELLIRKLPFQRLVREIAQDFKTDLRFQSSAVSALQEAAEAYLVGLFEDTNLCAIHAKRVTIMPKDIQLARRIRGERA

SEQ ID NO: 183915 - protein, 81 aa, Glycine max
  Clone ID: PAT_MRT3847_13708C.1.pep
GGVPPRSIGAISPGGNGGLGHPGFRERFKKPAVWGPHNGEWLGRRCPFEKGEILGFFLKKTEKPKKKKKKKKKKKKKKKKR

SEQ ID NO: 183916 - protein, 77 aa, Glycine max
  Clone ID: PAT_MRT3847_137090C.1.pep
KKTVRENPNESSAEKIGGGSHSLTEKENNQVEASPTQKPQVSEDLQENNTSKDERRSTPEVNSVTDLSKKGATADVG

SEQ ID NO: 183917 - protein, 78 aa, Glycine max
  unsure (1)..(78): unsure at all Xaa locations
  Clone ID: PAT_MRT3847_137091C.1.pep
XXWALGNXXWXMGNFGXGERELXQTXTRGFXEXIIXFAMVTAFVIRMFXRLRTIXXIXMEREEEDLRXRLSKFVCHTN

SEQ ID NO: 183918 - protein, 53 aa, Glycine max
  unsure (1)..(53): unsure at all Xaa locations
  Clone ID: PAT_MRT3847_137092C.1.pep
TAVASKPSIPPLXXYXRLSXNGDYVNXGLPXFYXAKQKNXYKYXPXLQXXPQP

SEQ ID NO: 183919 - protein, 47 aa, Glycine max
  Clone ID: PAT_MRT3847_137093C.1.pep
SMYVFTIHVEILCLPSSRCLSYMCLFLYMYTLALLFRFLHYFLLFQY

SEQ ID NO: 183920 - protein, 57 aa, Glycine max
  unsure (1)..(57): unsure at all Xaa locations
  Clone ID: PAT_MRT3847_137094C.1.pep
AFHINFRCSEMNEARPEFASKILIXLYGTARKLYKSQRLTNNKAYLYIALYCYMKLT

SEQ ID NO: 183921 - protein, 42 aa, Glycine max
  Clone ID: PAT_MRT3847_137095C.1.pep
LGTYWVRTSNLPLGSLEVFAWCLSLPQCKALRYQSLSSVMTL

SEQ ID NO: 183922 - protein, 85 aa, Glycine max
  Clone ID: PAT_MRT3847_137096C.1.pep
SAFILVLYSHVVLFRIVPLPTHSWGLFARVSRPHRLAAVTPHGCLQPLGCLGCAQAAGVACVCCATNVTCGVASPASSAGALPPY

SEQ ID NO: 183923 - protein, 39 aa, Glycine max
  unsure (1)..(39): unsure at all Xaa locations
  Clone ID: PAT_MRT3847_137097C.1.pep
CRSIRVFHSSGVVFLVRPPRCVLVSVIPCGHNPXHYRFT

SEQ ID NO: 183924 - protein, 88 aa, Glycine max
  unsure (1)..(88): unsure at all Xaa locations
  Clone ID: PAT_MRT3847_137098C.1.pep
MGPFSHKGQMIKGTMVVMQKNVLDINSITSVYRIHGSVLNFLGIALDSVTFLAYFICIQLITATKADGAKGKVXNASNLRGKITLPTI

SEQ ID NO: 183925 - protein, 94 aa, Glycine max
  Clone ID: PAT_MRT3847_137099C.1.pep
RTKSTLPLTQSTTLLHNHHHRSLGLTHTSLLLLHHMHYYYKSPPLPLPLLDSALVSHHMDLSRKFENIKSHERNEALHKYRIRGNFSYISSVFN

SEQ ID NO: 183926 - protein, 205 aa, Glycine max
  Clone ID: PAT_MRT3847_13709C.1.pep
VGDVRVECSPREFGDASSEVSEAAKARGDNGANESPRVKDPAVVQRQSSVSAQQPLPQPMIQLKSILKKSTGDELGQGTGNGGSSKGTPRVKFMLGGEESSRGEQLMVGNRNSFNSVSFADGGAPSSVAMDFNTPPPTQFTKIPQQNLHNSEMAPRNTPNFINATASATAPTVDISQQMISLLTRCNDIVNNLTSLLGYVPYHPL

SEQ ID NO: 183927 - protein, 73 aa, Glycine max
  unsure (1)..(73): unsure at all Xaa locations
  Clone ID: PAT_MRT3847_1370C.1.pep
PNXKYPXRESEGTPGLRSAYYNQKLSANMWLGWLYIYIIFFSCAYPITYILRPTLKLFCYHREASVCSPNVXN

SEQ ID NO: 183928 - protein, 166 aa, Glycine max
  unsure (1)..(166): unsure at all Xaa locations
  Clone ID: PAT_MRT3847_137100C.1.pep
PCDYRWDTAGLSADPETFAXNRELEVIHSRWAMLGSLGCVFPELLSRNGVKFRKTRWFKAGSHIFSEGGLDYLGNPSLIHAQSILAIWATQIILKGAVEGYRIAGGPLCEDTDPIYPGGSLHPLGLADDPDAIAEQKVNELQTGRLAMFSMSGFFVHALVTGKGTL

SEQ ID NO: 183929 - protein, 53 aa, Glycine max
  Clone ID: PAT_MRT3847_137101C.1.pep
NFGCSNWIFGGIRCSPLAGNACQITRLKNTYCLAIPCKERASIPWKLFYKPRV

SEQ ID NO: 183930 - protein, 93 aa, Glycine max
  unsure (1)..(93): unsure at all Xaa locations
  Clone ID: PAT_MRT3847_137102C.1.pep
WDTAGLSADPETFAKNRELEVIHSKWAMLRALGCVFPELLSRNRVKFRKSMLFQAKFHIFIKNNLYYLINPNLIHTQIILAIXATQXILIGTI

SEQ ID NO: 183931 - protein, 145 aa, Glycine max
  unsure (1)..(145): unsure at all Xaa locations
  Clone ID: PAT_MRT3847_137103C.1.pep
RVSMRKTVTKQAFFGSPWYGPDQSKYLGPFSGKPPVETTCXFPGDYGWDTAGLSDDPDAFARNRELEVIHSRWAMLGALGCVFPELLFRNGVXIGEAVWFKAGSQIFSEGGLDYSGNPGLXHAQSILAIWATQXILMGAVEGYRF

SEQ ID NO: 183932 - protein, 162 aa, Glycine max
  Clone ID: PAT_MRT3847_137104C.1.pep
AAASSMALSSPSLAGKAVKLGPSAPELRRVSMRNTVTKQASSGSPWHRPDRVKNLGLFSGEPPSYLTGEFPGDYGWDTAGLTDDPETFPRNRELEVIHSRWAMLGALGCFFPELLSPNGGKFGETVWFKDGSQICSEGGLDFFEKPSPVHPQKILAIWATPI

SEQ ID NO: 183933 - protein, 80 aa, Glycine max
  Clone ID: PAT_MRT3847_137105C.1.pep
DPIYPGGSFDPLGLVDAPKAFAELKVKELKNGRLAMFSRFGFFVQAIVPGKGPLENLADPLADPVNNNAWANAPNLVPGK

SEQ ID NO: 183934 - protein, 166 aa, Glycine max
  Clone ID: PAT_MRT3847_137106C.1.pep
SCGSPWCGPNRVKYLGPFSGDPASYLTGEFPGDYGWDTGGLTVDQQTFARNRELKVIHSRWAMLGALGCVLPELLSRNGVKLGEAVWFKAGSHIFSEGGLDYLSNPSLVHAQSILSIWATQVMLMGAVDGYRIAGGRVWEVTVAIYHCCSYDPFGLADDPRAFAES

SEQ ID NO: 183935 - protein, 64 aa, Glycine max
  Clone ID: PAT_MRT3847_137107C.1.pep
NISSKISEPLDVECRILQSNSHCRESWSLGSYVLMTLVVLVIYIYIYIYIYIKNAISSDISQMF

SEQ ID NO: 183936 - protein, 101 aa, Glycine max
  unsure (1)..(101): unsure at all Xaa locations
  Clone ID: PAT_MRT3847_137108C.1.pep
VILMGALXGYRIAGGPLGKVIDPIYPGGSFDPLGLVNAPKAFVELKVKELKNGRLAMFSMFGFFVQAIVPGKGPLETLAGPLGDPVNNNAWAYAPNLVPGK

SEQ ID NO: 183937 - protein, 252 aa, Glycine max
  Clone ID: PAT_MRT3847_137109C.1.pep
MEVGLKKENMGFEETELRLGLPGNGGTEEVLIRKRGFSETETGHEDESATTVDLMLNLSSKEAATTAAAAADPTDKHKTLPKEKTLLPADPAKPPAKTQVVGWPPVRSFRKNMLAVQKSVGEESEKNSSPNASFVKVSMDGAPYLRKVDLKMYKSYRELSDSLGKMFSSFTIGNCESQGMKDFMNESKLNDLLNSSDYVPTYEDKDGDWMLVGDVPWEMFVESCKRLRIMKGKEAIGLGLAPRAMAKSKNRS

SEQ ID NO: 183938 - protein, 115 aa, Glycine max
  Clone ID: PAT_MRT3847_13710C.1.pep
MVGNRNSFTSVSFADGGAPSSVAMDFNSKNVQKAISQPPLPNTPPPPTQFTKILQHNLHNSEMAPRNTPNFINATTSATAPTVDISQQMISLLTRCNDIVNNLTSLLGYVPYHPL

SEQ ID NO: 183939 - protein, 75 aa, Glycine max
  Clone ID: PAT_MRT3847_137110C.1.pep
MTKKKKKKKKKKKKKKKKKKKKKKKKKKKKKKKKKKKNLGGGPGPNFPFLGVYFPPSLGPFFTTVGREKPWVSPI

SEQ ID NO: 183940 - protein, 177 aa, Glycine max
  unsure (1)..(177): unsure at all Xaa locations
  Clone ID: PAT_MRT3847_137111C.1.pep
CPSLAGKAVKLGPSSPXVGRVSMKKTVTKQVSSRSPWYGPYQFKYLGPFSGKPPSYLTGEFPSNYSWDTAGLSADPETFTKNRELEVIHSRWAMLRALGCIFPELLSHNGVXFXEXVWFKAXSQIFNKGGLNYLSNPNLIHTQXILAIXTTQVILIDTIKKYHITSNPCMNHCPIYP

SEQ ID NO: 183941 - protein, 220 aa, Glycine max
  Clone ID: PAT_MRT3847_137112C.1.pep
MEVGLNKKENMGFEETELRLGLPGNVGGTGTEEVLIRKRGFSETETETEEDESATTVDLMLNLSSKEAAAAADPTDKHKTLPKEKTLLPADPAKPPAKAQVVGWPPVRSFRKNMLAVQKSVGEENEKNSSSPNASFVKVSMDGAPYLRKVDLKMYKSYPELSDALGKMFSSFTIGNCESQGFKDFMNESKLMDLLNSSDYVPTYEDRDGDWMLVGDVPWE

SEQ ID NO: 183942 - protein, 197 aa, Glycine max
  unsure (1)..(197): unsure at all Xaa locations
  Clone ID: PAT_MRT3847_137113C.1.pep
ASPSSMALSSPYLAGKAVKLGPSYPXLRRVSMRNTVTKQASSGSPWYGPYRVKYXGPFSGEPPSYLTGEFPGDYRWDTAGLSADPETFAKNRELEVIHSMWAMLGALGCVLPELLFRNGVKFGESEWFMAGSHIFSDGGLDYLGYPSLVHSQSMLDISATHVILSGAVDDNLIAGVLLRQDTDTIYTAGHYHPSVLS

SEQ ID NO: 183943 - protein, 127 aa, Glycine max
  Clone ID: PAT_MRT3847_137114C.1.pep
AIYEEMINNGLTPNWPTYAALLQAYCRARFNRDALNVYKEMKEKGKDLDILLYNMLFDMCANVGCEGEAVKIFEDMKSSGTCRPDSFTYASLINMYSSIGKISEMEAMFNEMMESGFEPNIIVLTSL

SEQ ID NO: 183944 - protein, 129 aa, Glycine max
  unsure (1)..(129): unsure at all Xaa locations
  Clone ID: PAT_MRT3847_137115C.1.pep
AAASSMALSSPSLAGKAEKLGPSAPEVXRVSMRKTVTMQVSSXRPWYGPYLVXYLGPFSGEPPSYLTGELPGDYCWDTAGLSANPETFDKNQELXGIHSRWAMLEGLRCVFPELLSRNGGKVRKPAWVK

SEQ ID NO: 183945 - protein, 78 aa, Glycine max
  unsure (1)..(78): unsure at all Xaa locations
  Clone ID: PAT_MRT3847_137116C.1.pep
SMRRHMLNRSANLYPVVXDMRNSSVTXARRSSCSPAASCSARRPNRLSLRELVRSQRHILLLPLHLNFSLLFASDSLS

SEQ ID NO: 183946 - protein, 53 aa, Glycine max
  unsure (1)..(53): unsure at all Xaa locations
  Clone ID: PAT_MRT3847_137117C.1.pep
XRGRGFSFLFFFFCGSHDLKTFLYLLMFFLKGSLPWNGLGALSKKLIYDMVKC

SEQ ID NO: 183947 - protein, 670 aa, Glycine max
  unsure (1)..(670): unsure at all Xaa locations
  Clone ID: PAT_MRT3847_137118C.1.pep
SGSRKMQPQQPGYNSSRVYLELISDLPWQKASEEIELDLRAAQKRLDSDHYGLVKVKQRIIEYLAVRKLKPDARGPVLCFVGPPGVGKTSLASSIAAALGRKFVRISLGGVKDEADIRGHRRTYVGSMPGRLIDXLKRVAVYDPVMELDEVNEPGXDIRVDPGTAMIKVLDTELFTSFNDLHXDVSFDLSEVVCVATANRLQPIPPPLRDRMVIIELPGYTPEEKLHIAMRHLIPRVLDQHGLSSEFLQIPEAMVKLVIQRYTREAGVRNLERNLAALARAAAVIVLEQHYVNAPFDLSKVVFVATANRLQPIPPPLRDRMEVIELPGYTPEEKLQIAMRHLIPRVLDQHGLSSEFLQIPEAMVKLVIQRYTREAGVRNLERNLAALARAAAVRVLEQEQVVPLNKGMQGLATPLVENRLADGTEVEMEVIPMGVNSRDISNTFRIASPFVADETMLEKVLGPPRFDGREAAERVATPGVTVGLVWTAFGGEVQFVEATAMVGKGELHLRELFCLKRTXRLSLSTIVNAIQFRIPACLTNRDFXILEGRDVHIHFPAXAVPKDGPSAGVTLVTALVSLFSQQRVRSDTAMTGEMTLRGLVLPVGGVKDKILAAHRYGIKRVILPERNLKDLVEVPSSVLSNLEILLAKRVEDVLEHAFDGGCPWRQHSKL

SEQ ID NO: 183948 - protein, 74 aa, Glycine max
  Clone ID: PAT_MRT3847_137119C.1.pep
EPHKQASITWLQSHPNKSLNTWEEVEEKFIARFFPPSRFINAKSTITTFSQGSDKPLCADVGEIQSFVAEVPKP

SEQ ID NO: 183949 - protein, 163 aa, Glycine max
  Clone ID: PAT_MRT3847_13711C.1.pep
PALRPLAAASSAPPTPRPLTTTIWAHQTTRTCNTVSPTSPNRLKCLQTFAQIHVKEGTVSNLKCPEAKCAIMIPSGLLKQLLDDTDYERWESMMLEKTLASMSDVVYCPRCETPCIEDEDQHAQCPKCYFSFCTLCRERRHVGIACMSLDMKLQILQVWYLNP

SEQ ID NO: 183950 - protein, 68 aa, Glycine max
  Clone ID: PAT_MRT3847_137120C.1.pep
VLISLRKSLSIYICISCFLFLIKIIVFKKDNISGLAIETEMSEPGSCQMLVTADYRKTLRHFNILTLR

SEQ ID NO: 183951 - protein, 61 aa, Glycine max
  Clone ID: PAT_MRT3847_137121C.1.pep
NKFIKINQCLYTKSCTDFKLYILFIKSGYSSNPEESINYNAKSVYLHYYLQKLTSATSQTT

SEQ ID NO: 183952 - protein, 390 aa, Glycine max
  Clone ID: PAT_MRT3847_137122C.1.pep
MASIFPISRMSFTDFSAPLPISISSSSSTFPLSQTPCKPTKHSKPKRHHVSKVSCHSNQNNSAPNPEEGKPSHNIVAGKNRRDVLIGFGGLYGASTLTNNNNNNPLAIAAPILPPDLKTCGPPDLATGAKPVNCCPPISSTIIDFKLPSSGAPLRVRPAAHLVNDVYIAKYREALKRMKALSPNDPRNFTQQANVHCAYCDGAYHQVGFPNLDLQVHNCWLFFPYHRWYLYFYERILGNLIGDPTFALPFWNWDNPKGGMTIPSFYVDKNSPLYDPLRNLNHQPPVLIDLDYNRRDDDDPSASESVDPNEQIASNLSIMYRNVISNGKLPRLFLGSPYRAGDEPEPGAGSLENVPHGPVHSWTGDKREPNRENMGIFYSAARDPIFFSHH

SEQ ID NO: 183953 - protein, 99 aa, Glycine max
  Clone ID: PAT_MRT3847_137123C.1.pep
PKGQTNKIFSGKTLGLVVWKIFINPCPKGFLSQIWNSGGPFFSKPRVFHFWIKKRVREELFIFFFQKFFSPRFFFLWEETRSKKPFFFKRNPFFFFLFS

SEQ ID NO: 183954 - protein, 167 aa, Glycine max
  unsure (1)..(167): unsure at all Xaa locations
  Clone ID: PAT_MRT3847_137124C.1.pep
MAAAKPQRTPQEVEDIIIRKIFLVSITEIANSNTTTNSKIVYLELTAAEILSEGKELRLSRDCMERVLIDRLSGEFAGAGDESPFQYLVGCYHRAHEEGKKISNMKDKNLRSEMETVVRQAKNLCVNYCRIHLANPELFPSRXSASTGANSPLLLLIFAEVGGGNVF

SEQ ID NO: 183955 - protein, 141 aa, Glycine max
  Clone ID: PAT_MRT3847_137125C.1.pep
NLPLTCHNYDLSDIKVSVRCDGVKKLALATTENDGSFKVDLPLDHTKPSSVKNCLAKLLGGPVQLYVSRENQVSQIIKGKEQNSYTISTPLSFRTSCPLNTKCKAGKKVGSSKTVDLPLPPEWGLAPSSYYVPFFPIIGIP

SEQ ID NO: 183956 - protein, 173 aa, Glycine max
  Clone ID: PAT_MRT3847_137126C.1.pep
MACVQVITVFLFALALAKIYPSTCQVVQGKVSCVDCTHNYDLSDIKVSVRCDGVKKLALATTENDGSFKVDLPLDHTKPSSSVNNCLAKLLGGPVQLYVSRENQVSQIIKGKDQNSYTISTSLSFRTSCPLTTKCKGGKQVGSSKTVDLPLPPEWGLAPSSYYVPFFPIIGIP

SEQ ID NO: 183957 - protein, 85 aa, Glycine max
  Clone ID: PAT_MRT3847_137127C.1.pep
RTSFRLFPVISAICRVKFQARSSVAGGLASPFFSWNRSLLSSLSSSEPVTHAEVDSIISHSSNPKRMRVPCSWTDIRYVLKPAAQ

SEQ ID NO: 183958 - protein, 60 aa, Glycine max
  Clone ID: PAT_MRT3847_137128C.1.pep
LYIFIYKNYYSNQLLPNCLRKKIPGAFPPLSKKNQPGIGGKKPNPSPPGIPITSIWPPIG

SEQ ID NO: 183959 - protein, 202 aa, Glycine max
  Clone ID: PAT_MRT3847_137129C.1.pep
MAETLSPNPAMGRKQRLRIQSPTSPFVLGSNNDQLERARARDARAAANRRKSLALNQPLQANSHPGLNKQQILDLFQNCIKLASENKINQKNTWELNLIDHLTDIIKAEEEHDAETNFQKASCTLEAGVKIYSLRVDSVHSEAYKVLGGMNRAGQEAEEDTTLDGGNIESRQEESRKETSKKVAPFGNIGNHLLEALNGKEM

SEQ ID NO: 183960 - protein, 67 aa, Glycine max
  Clone ID: PAT_MRT3847_13712C.1.pep
NRYDGPIPSLFNLTALKLLVLSHNKFSGKFTDTDTAFPHLYQLDLVYNNLSGQIPAALNNLTPRRRR

SEQ ID NO: 183961 - protein, 89 aa, Glycine max
  unsure (1)..(89): unsure at all Xaa locations
  Clone ID: PAT_MRT3847_137130C.1.pep
RXHXYXSSEFGSSXCXXXAXXXQXXSXXGFLGRIKXYMLXRCSHXCLCXSIXGSGMISSXQDSRGXSWFXTLXGSSCTWPXXXNHWSRX

SEQ ID NO: 183962 - protein, 186 aa, Glycine max
  unsure (1)..(186): unsure at all Xaa locations
  Clone ID: PAT_MRT3847_137131C.1.pep
ASASSMALSSPSLAGKAVNLGPSAPEVGRVSMKNTVTKQVSSRIPWYCPYRVKYLGPFSGEPPSYLTCEFPSDYRWDTAGLCANPETFSKNRELXVIHSRWAMLGALCCVLPEXLSLIRVKYGEAMRLKAGSHILSKGGLDYLVCPSLIHTHIILAIWATQVILRLAXEGXSLAGCIIYEVIVPIY

SEQ ID NO: 183963 - protein, 48 aa, Glycine max
  Clone ID: PAT_MRT3847_137132C.1.pep
YQYRLIISCKNLNLVLFMAIVKVDIKDSYSGSLIYQFDWLICRIVIRI

SEQ ID NO: 183964 - protein, 112 aa, Glycine max
  Clone ID: PAT_MRT3847_137133C.1.pep
AQSILAIWATQVILMGAVQGTRIAGGPVGQVTDTIYSGGSLDPLGLADDPEAFAELKVKALKNVRLAMFSMYGFFVQAIVTGKGPLENLADHHADPVNINAWAYATNFVPGK

SEQ ID NO: 183965 - protein, 165 aa, Glycine max
  unsure (1)..(165): unsure at all Xaa locations
  Clone ID: PAT_MRT3847_137134C.1.pep
ALSSPSLAGKAVKLGPSAPEVGRVIMRKTVTKQAXSGSPWYGPDLRQVLGAHFYGEPLSYLTGELPGDYSWDTAGLSADPXTFARNRELEVIHSRWAMLGALSCEFHELLICNGVKFGQAVWFXAGSHIFYHGGLDYLGHPSLVHTQSIRNIWATTIILMGAADG

SEQ ID NO: 183966 - protein, 50 aa, Glycine max
  Clone ID: PAT_MRT3847_137135C.1.pep
TKPLFYSNPSIGQGPLRHYSSAIACYLKPCLPLCLRLDMGRCSASRLYRL

SEQ ID NO: 183967 - protein, 180 aa, Glycine max
  unsure (1)..(180): unsure at all Xaa locations
  Clone ID: PAT_MRT3847_137136C.1.pep
KTVTKQVCLGSPWYGPYRVKYLGPFSGXPPSYLTGEFPCDYGWDTAGLSADPETFAKNRELEVIHSRWAMLWALGWVLPELLSRNGVKFGEAVWFKAWSQIFSEGGLDYXGNPSLIHAQSILAMWATQVILLGGRESYQIAGGHAGDVTDPIYPGGQYDPYGRGDDTRACAELKENDLEN

SEQ ID NO: 183968 - protein, 189 aa, Glycine max
  unsure (1)..(189): unsure at all Xaa locations
  Clone ID: PAT_MRT3847_137137C.1.pep
AAASSMALSSPSLAGKAVKLGPSAPELGRVSMMKTVTKQVSSGSPWYRPYRVKYLGSFSGEPPSYLTGEFPGDYRXDTAGLSADPETFAKNRELEEIHSTWVMLGALGCVFPELLSRNGVKVGEAVWFKDGFQIFCEGGLHYLGNPSLIHAQSILAIWATQVILMGAXEXYRIAGGPLSGVTDPIYPGG

SEQ ID NO: 183969 - protein, 118 aa, Glycine max
  Clone ID: PAT_MRT3847_137138C.1.pep
LYSHIHYLDCLLSQKYFTSDKQGPRGTTVPSAWPSTSYHHQHHAKPIASSLLQIQSSPPNMIAMGKDASQFSCVEKKGFSPSCVNPAVSTRTSSGPALGWPPIRSFRKNIASGSTSKL

SEQ ID NO: 183970 - protein, 200 aa, Glycine max
  unsure (1)..(200): unsure at all Xaa locations
  Clone ID: PAT_MRT3847_137139C.1.pep
MAAASSMALSSPSLAGKAVKLGPSAPEVGRVSMRKTVTKQVSSGSPWYGPNRVKYLGPFSGEPPSYLTGEFPGDYGWDTAGLSXDPETFAKNRELEVIHSRWAMLGALGCVFPELLSRNGVKFGEAVWFKAGSQIFSEGGLDYLGNPSLIHAQNILPICATXQVYLMGAVNVAVLLVGXFGKSLDPFYPVGAYDPFGPCL

SEQ ID NO: 183971 - protein, 53 aa, Glycine max
  Clone ID: PAT_MRT3847_13713C.1.pep
WPFSVCNLLFELAATTLLHVLCKTGLEVIQFQTAMYHVVIKYCSNKITLVNLS

SEQ ID NO: 183972 - protein, 187 aa, Glycine max
  Clone ID: PAT_MRT3847_137140C.1.pep
AAASYMALSSPSLAGTAAKLGPSAPEVWRVSMRKTDTKQAYSGSPLDGPDRVKYLGPFSGEPPSYLTGEFPGDYCWDTAGLSVDPETFARNRELEVIHSRWAMLGALGCFFPELLSRNGVKFGESVWFKARSQIFSEGGLDYLCNPILVHAQSILANLATQVILMGAVDGIVLLVGRVDEVTDPLYP

SEQ ID NO: 183973 - protein, 180 aa, Glycine max
  unsure (1)..(180): unsure at all Xaa locations
  Clone ID: PAT_MRT3847_137141C.1.pep
LSSPSLAGKAWKLGPSPPEMGRVIMMNTVTKQVSSXSPWYGPYRVKHLGPFSGEPPSYLTGEFPSDYDWDTAGLSADPETFANNRELEVIHSMRAMLGALGCIFPELLSRNYMKIGKAGMFMAGSQIFIEGGLDYLSNPSLIHAQSILAIWVTQVILMGDVECYRIGGGPLRDVTEPIYS

SEQ ID NO: 183974 - protein, 169 aa, Glycine max
  unsure (1)..(169): unsure at all Xaa locations
  Clone ID: PAT_MRT3847_137142C.1.pep
VKKCASSCLPWALCIRILGWEAVKLRPSAPELGRVSMRKTAPAGLLRSHGAATPSQDLCPFSGEPPSXYLTGEFPGDYGWYTAGLSADPETFDKNRELXVIHSRWSMLGALGCVFPELLSRIGVKFGAAVWFKAASHIFSEGXLDYLRIPSLIHAHSILSIWATPVILW

SEQ ID NO: 183975 - protein, 166 aa, Glycine max
  unsure (1)..(166): unsure at all Xaa locations
  Clone ID: PAT_MRT3847_137143C.1.pep
TSDYGWDTAGLSADPETFAKNRELEVIHSRWAMLGALGCVFPELLSRNGVKFGEAVWFKAGSQIFSEGGLDYLGNPSLIHAQSILTIWATQVILMGAVEGYRIAGGPLSEVTDPIYPSGNFNPLSLADDPEAFADLKVKELKNRRFAXFSIFSFFIQAIITQRRSI

SEQ ID NO: 183976 - protein, 110 aa, Glycine max
  unsure (1)..(110): unsure at all Xaa locations
  Clone ID: PAT_MRT3847_137144C.1.pep
ITVSPFGKVALFSRVGKYQPMRSPWMXPCQEPLRACQMLAKKIPRLNVEVFQPTEQKYCTLENGQKVQKMSLFRALPGERXEAPEYVWSHQWAFFRSFNLLVNPKFALSF

SEQ ID NO: 183977 - protein, 315 aa, Glycine max
  Clone ID: PAT_MRT3847_137145C.1.pep
MAKDIRFFDLNTGAKIPSVGLGTWQSDPGLVAEAVAAAIKVGYRHIDCAQIYGNEKEIGSLLKNLFEEGVVKREDLWITSKLWNTDHAPEDVPLALDRTLKDLQLDYVDLYLIHWPAPMKKGSAGFKPENLVQPNIPNTWKAMEALYDSGKARTIGVSNFSTKKLSDLLLIARVPPAVNQVECHPSWQQDKLQAFCNSKGVHLSGYSPLGSPGTTWLKSDVLKHQVINMIAEKLGKTPAQVALRWGLQMGHSVLPKSTNETRIKENFDVFGWSIPEDLLAKFSEIQQARLLRGTTFAHETYGAYRSLEELWDGEI

SEQ ID NO: 183978 - protein, 55 aa, Glycine max
  Clone ID: PAT_MRT3847_137146C.1.pep
MASLKVAFLAAVLCMVVVSAPMAHAAITCGQVTNSLIKCIGYLQKRRNAPSGCCN

SEQ ID NO: 183979 - protein, 83 aa, Glycine max
  Clone ID: PAT_MRT3847_137147C.1.pep
QNTPNQFGRDFLIQIQQDFVSPPVFLGIKNSFPMLFFGQNVQTFKKFCWSPKKGAFPPRLVKGIKKTLPFGSFLGGWVFSKNF

SEQ ID NO: 183980 - protein, 83 aa, Glycine max
  Clone ID: PAT_MRT3847_137148C.1.pep
TRPRTRGFDNLYNNEISGVIVEALRVGLEPQVAAQKIAALARQRATDKNRQSPFASAAQEAGYRYYGGKLDDITDGVSYVKSA

SEQ ID NO: 183981 - protein, 142 aa, Glycine max
  unsure (1)..(142): unsure at all Xaa locations
  Clone ID: PAT_MRT3847_137149C.1.pep
NHAIISCFFCVLKESLIPYLFILCAEALSFLITKAVQNQSLHGVKICPVAPSISHLLFADDNIIFTRSTHEEACQIDHLLQVYEQAFGQSINLDKSELXLNRNVPSIRTNQLAMLLGVKLAVAHGKYLGLPSLIGRSKTQVF

SEQ ID NO: 183982 - protein, 104 aa, Glycine max
  Clone ID: PAT_MRT3847_13714C.1.pep
LIVFFLLFFFFLLKFNIKYHHSIVLGRPKTGTNNWGEENYYSRTKGEFSLNSTNRGGGYRTLNNFSLIKTWGPYPQKSYPPELVNGTKSNSSEGNPWGNHKPTF

SEQ ID NO: 183983 - protein, 54 aa, Glycine max
  Clone ID: PAT_MRT3847_137150C.1.pep
NSARARAESARAARASTLLTILFPRKIRSYIHISTITYLLLLKKIHNTSGQCYF

SEQ ID NO: 183984 - protein, 101 aa, Glycine max
  unsure (1)..(101): unsure at all Xaa locations
  Clone ID: PAT_MRT3847_137151C.1.pep
TPEFRGRPTLTYGCKKTTDGYSYFNNAGYGGGLDGDAVLNKLFRDIYYXAEDDTRXALKQSFVDSXGTVLSTNWKEAGTNIAEGSPSDGMDINKCGYKDIY

SEQ ID NO: 183985 - protein, 261 aa, Glycine max
  Clone ID: PAT_MRT3847_137152C.1.pep
PRVRKTSRNNNSSRFGKLIEVHFSSMGKICGAKIKTLMLEKSRVVQLANGERSYHIFYQLCTGSSSGLKERLNLRAVSEYKYLVQSDCTLIDGVNDANNFHQLMKALDTVQICKEDQEMIFKMLAAILWLGNISFQVDSENHIEVVDDEAVTSTAQLMGCSSQELMTALCTLKTQFDEDTIAKNLTLRQATERRDAIAKFIYASLFDWLVEQVNKSLEVGKPHTGKSISILDIYGFQTVQKNSFEQFYINLCHERIQQHFN

SEQ ID NO: 183986 - protein, 93 aa, Glycine max
  Clone ID: PAT_MRT3847_137153C.1.pep
GAASPAGVAVFFFVCLVYVRGACVLYVGVLVRVFKNGFDEGGRNEDRRRGGGRRDLKARFPRPAIARFRAYACMYQSPSIIFSRPCKHINQPK

SEQ ID NO: 183987 - protein, 180 aa, Glycine max
  unsure (1)..(180): unsure at all Xaa locations
  Clone ID: PAT_MRT3847_137154C.1.pep
AAASSMALSSPSLAGKAVKLGPSAPEVWRVSMRNTVTNHASSGIPWYVPYRVKYLGPFSGEPPSYLTGEFPGDYGWDTAGLSADPXTFSRNRELEVIHSRWAMLGALGCVFPELLSRNGVKFGESVWFKAGSQIFIEGVLDYLGNASLVHAQNILGIWATQVILMGAVEGYRIAGGPLGE

SEQ ID NO: 183988 - protein, 63 aa, Glycine max
  Clone ID: PAT_MRT3847_137155C.1.pep
AFVQAWKALCGASNGTSTLVVPAGHTFFVRQTRFRGPCQSQKLDIQVQTLQIYLQILYLTCIC

SEQ ID NO: 183989 - protein, 178 aa, Glycine max
  unsure (1)..(178): unsure at all Xaa locations
  Clone ID: PAT_MRT3847_137156C.1.pep
AAASSMALSSPSLAGKAVKLGPSAPEVGRVSMRKTATKQVSSGSPWYGPHRVKYLGPFSGEPPSYLTGEFPGDYRWNTAGLSADPETFAKNRELEVIHSRWAMLXALGCVLPELLTRNGVNVREAAWFKAPSQIFSEGGLDYLGNPSLIHAQSILAMWTTQVILMSAGERYRIAFGPL

SEQ ID NO: 183990 - protein, 223 aa, Glycine max
  unsure (1)..(223): unsure at all Xaa locations
  Clone ID: PAT_MRT3847_137157C.1.pep
MDLVEGVGESSSPPRAFSGYSNYDVRNDVYNRLLQTGHDQAVSNPDFREHLEAHFNRLPPSYGLDVNIDRAEDVLLHQSLLALAKDPHKRPVYHIRFLENISTRTDSEDNXILSTHYSPGSSSHATNGGAVSPGKSKMRDIANEFEPCSKLEDLNLDVRKNSKETEEKFLSDNFFQRLEHSSVPVHEIIFSTVDKPKLLSQLSALLSDIGLNIREAHVFSHTD

SEQ ID NO: 183991 - protein, 102 aa, Glycine max
  Clone ID: PAT_MRT3847_137158C.1.pep
LFLQKLYLTLAWGYLHLRGVHKRFGIMHNWATEIKPLMSENAYIHPTFDDNAMEEDVPWESDGPRFLSLSDWPQIAYDVRDQEIYVHITCTNAFMLTQMAVK

SEQ ID NO: 183992 - protein, 204 aa, Glycine max
  Clone ID: PAT_MRT3847_137159C.1.pep
SSPSLAGKAVKLGPSAPEVGRVSMRKTVTNQVSSRSPWYGPHRVKYLGPFSGEPPSYLTCELPGDYGWDTAGLSADPETMPKNRELEVIHSMWAMLGALGCIFPELLSHNGVKFGEAVWFKARSHIFSEGGLDYLCNPCLIHAQSILVICATQVILMGAVEGYRIAGGPLGEVTDPIYPCGSIRPLGLADDPDAFAELNVTELK

SEQ ID NO: 183993 - protein, 79 aa, Glycine max
  unsure (1)..(79): unsure at all Xaa locations
  Clone ID: PAT_MRT3847_13715C.1.pep
FXLSTTXHXNPSXVLXLPHQCLLTXYTYSXXAXFXQSTXANEKRRYFSLAXVVLXVFVGALYVMXCLXSIYVTKALNVI

SEQ ID NO: 183994 - protein, 184 aa, Glycine max
  unsure (1)..(184): unsure at all Xaa locations
  Clone ID: PAT_MRT3847_137160C.1.pep
AAACSMALSSPSLAGKAVKLGPSAPEVGRVTMRKTVTNQASSGSPWYGPYRVKYLGPFSGEPPSYLTGEFPGDYSWDTAGLSADPETFTRNRELXVIHYRWAMLRALGCVFPELLSRNGVKFGEAVWFKAGYQIFSEGGLDYLSNPSLVHAQSILAVXATQNMLNGADEVNRWIVGAIGMTRRP

SEQ ID NO: 183995 - protein, 39 aa, Glycine max
  Clone ID: PAT_MRT3847_137161C.1.pep
WICKELFVIWVSLGYLILPLLYAVEGLYISRIWGCSSVV

SEQ ID NO: 183996 - protein, 248 aa, Glycine max
  unsure (1)..(248): unsure at all Xaa locations
  Clone ID: PAT_MRT3847_137162C.1.pep
YPSMTGKAMNLGPSPPEXPWTAVKKTVSKQACSRGPWDRPHRGKYLGPFYGEPSSYLTSESPSDYRXDTDGLCAYPETYAKNRELEVIHSRWAMLXALGCVFPELLSRNGVKFGEAVWYKARSHIFNEGGLYYLGNPSLIHAQSILAIWATQVILMGAVEGHRIAGGPLGEVTDPIYPGGNYDPLGLADDPEAFAELTVKELNSGRLAMFSMSGFFVQAIDTGQGPLENLDDHLADHVNNNACAYASD

SEQ ID NO: 183997 - protein, 245 aa, Glycine max
  unsure (1)..(245): unsure at all Xaa locations
  Clone ID: PAT_MRT3847_137163C.1.pep
AVRLCPSSPVFVWVGLWNTVSISASSGSPWFGPDRVKFLGPFSGEPPSYLTGQFPCDYGWDTAGLSAGPETFSRNRELYVIHSRWAMLGALGCVFPELLSCNGVEFGEAVSFIARSQIFRAGWLHYLGNPSLVHAQSILAIWATQVILMGAVEGYRIAGGPLGEVTDPIYPGGNFNPLGLADDPXAFAXLKVNELKNRKLTMFSIFKFCIQAIITSKGPLKNLANHLRNPVNNSTXSYTTNFVPA

SEQ ID NO: 183998 - protein, 170 aa, Glycine max
  unsure (1)..(170): unsure at all Xaa locations
  Clone ID: PAT_MRT3847_137164C.1.pep
MGLSCPYLAGKADKLGPSAPEVRRVSLRKTVTKQAFCGSPWYGPYRVKYLGPFSGEPPSYLTGEFPGDYGWDTAGLSVDPETFCRNRELEVIHSKWAMLGALGCVFPELLSRNGVNFGEAVWFNAGAHIFTEGGLDYLVNPSLDRAXSILAVWATXVFLMGADDGSLTRS

SEQ ID NO: 183999 - protein, 205 aa, Glycine max
  unsure (1)..(205): unsure at all Xaa locations
  Clone ID: PAT_MRT3847_137165C.1.pep
AAASSMALSFPSLAGKAVKLGPSTPKVGRVSMRKTATNQASYGSPWYSPDRVKYLGSFSGEPSYYLTGEFPGDYGWDTAGLSADPETFARNRELEVIHSMWAMLGALSCVLPELLSRNGVKFGEAVWIKVXVQIYSEGGLDYSGYPSLGHAQTIXGIWGTQVSLWVPVEGILLVVGPLXEVTDPIFPGGPFEPLGLLRTPSFCCP

SEQ ID NO: 184000 - protein, 219 aa, Glycine max
  unsure (1)..(219): unsure at all Xaa locations
  Clone ID: PAT_MRT3847_137167C.1.pep
TVTKHVSSGSPWYGPYRVKYLGPFSGEPPSYLTGEFPGDYGWDTAGLSADPETFAKNRDLXVIHSRWAMLGALGCVFPELLSRIGVKFXEAVWFKAGSQIFSEGGLDYLGNPSLIHAQSILAIWATQVILMGAVQRYRIAGGLLGDVTDPIYPRGSFNPLGLAADPHAFADLQANELKNARSPHAPIVGLFAQDIATRRVHCETLPIPLGCLVNTKARA

SEQ ID NO: 184001 - protein, 201 aa, Glycine max
  unsure (1)..(201): unsure at all Xaa locations
  Clone ID: PAT_MRT3847_137168C.1.pep
MATTSFMAFLFPILGWQGREPGPITPKRGKXTLRKTAPNQVSSGSPWYGPDRVKYLGPFSGEPPSYLTGEFPGDYGWDTAGLSADPETFAKNRELEVIHSRWAMLGALGCVFPELLSRNGVKFGEAGWFKAGSQIFNEGGLDYLSKPNLIHAQIILAILGPQVILNGAGEGYPYCGGPLRDVTDPILTKCQLDPFGLADDP

SEQ ID NO: 184002 - protein, 319 aa, Glycine max
  Clone ID: PAT_MRT3847_137169C.1.pep
MMEHNIIVNNNVIAPFVIKTYNMVNDPTTDKLITWGPANNSFIVLDPLDFSHSLLPTFFKHNNFSSFVRQLNTYGFRKVDPDRWEFANEWFLRGQKHLLRNIVRKKHGGAGRTNSNSHYSHPLKLEELDDEAMVMEIARLKEEQKALEEELHEMNKRLETTEKRPQQMMAFLCKVVEDPQILSRILREREKKHLGEKKRRLIPPPPPTAATSSSSSSGIKTEFEEDEGNYNIKSSSPETGLEIDNNSNNICSPPPLGCWGEQGCYGYNCASVPAPLTVVAPAFPTMGGGYLRRGGFWGEMAAEGNAVPPYPFSLLEGGF

SEQ ID NO: 184003 - protein, 114 aa, Glycine max
  unsure (1)..(114): unsure at all Xaa locations
  Clone ID: PAT_MRT3847_13716C.1.pep
ARXRLETAARRRQKGRRSQPDKQATLCYRFSSIMSNELKNYDVFLNFHGLFSGYTFTGTLYNALRTRESRPFSQNMNMVVNYTLMTATFHPLLLKQLRNQGFRWFVWKQTNLCS

SEQ ID NO: 184004 - protein, 74 aa, Glycine max
  Clone ID: PAT_MRT3847_137170C.1.pep
LATVQIQTTAIKKCVEEYLTYVVEFRWTCHPSLMTILMWSNILHLRLWIKMIIQSLNTLVTHLYSVGIPSRIVG

SEQ ID NO: 184005 - protein, 293 aa, Glycine max
  unsure (1)..(293): unsure at all Xaa locations
  Clone ID: PAT_MRT3847_137171C.1.pep
MRSIASCYNEHAIRVSDSYCSRPSTQAYLGPKLHPSTRDSVTCMYKLTLIETQKQLFITLTWSKKLLGQGFTITIANSEHSLQLRKNKGNETFQSQNFQVQVLWDLSXAKYEEGPEPVGGFYVNVLVDSELGLRRGGQGGSGEEGSPVVRARGPAVSMVSRSETFSGTAVYATKAKCSQTGSSHDILIRCGAEAERGEPKGHVLSVCVDKKTMFQVKRLRWNFRGNQTIFVDGLVVDMMWDVHDWLFNSNSASSCSVHGQDWHRPRLFAFVGVVFARAHGSGLVWVPCPVVPL

SEQ ID NO: 184006 - protein, 204 aa, Glycine max
  unsure (1)..(204): unsure at all Xaa locations
  Clone ID: PAT_MRT3847_137172C.1.pep
MAQRSHVPKFGNWDSGENVPYTAYFDKARKGRTGTRIINPNDPEENADLSFDNPSSDNLPPTRPRTNSEDQSGKGSLHLEDDPKNFIESPARHDNVSSRSGSRSHGVGSADNRRRHSTQSTGSEYSIERSPLHRQARAPGRDSPQWEPKNSYDSSQGTPGRSRLRPANRGXMKHQIKVQLFQSLVTGMXITLHQQMALLTFSTK

SEQ ID NO: 184007 - protein, 80 aa, Glycine max
  Clone ID: PAT_MRT3847_137173C.1.pep
PPPLSNSFPSKNKSGKEGSFILKQIGGFLFPGVPPNQRGSMSTQGRGFMPKEGRVSLAGLSLGKCESPAPAIIGSYQKVR

SEQ ID NO: 184008 - protein, 61 aa, Glycine max
  Clone ID: PAT_MRT3847_137174C.1.pep
PPPKKNLFGVPDQKKIFLPRPPFFVNSKRDLSHTKSWPSARGIVIFKEKPRFFSLVVGLKC

SEQ ID NO: 184009 - protein, 141 aa, Glycine max
  unsure (1)..(141): unsure at all Xaa locations
  Clone ID: PAT_MRT3847_137175C.1.pep
MSIPSEKDEGKQGQGEDGGDDHDGSDDLHDDYDDDEGVSAIEERLNVIQEKIMRWEEDQSMIWDLGPMEASEYLNAANEARRLIEKLESLHLKKEDQEYKCMQRAYSVLQTAMARLEEKFKNLLIQNRQRXEPEYVSFRSN

SEQ ID NO: 184010 - protein, 112 aa, Glycine max
  Clone ID: PAT_MRT3847_137176C.1.pep
WSKLMECLYGFASSISRDLVCGAINQLRYPCYFNNLIEELEKEEGNLIVTRNDVQKFVAHANNQTRTTAEVVNHWLQDAENDIDNVNQLLKEAEQKKVVVLGTLQIGFGDTV

SEQ ID NO: 184011 - protein, 249 aa, Glycine max
  unsure (1)..(249): unsure at all Xaa locations
  Clone ID: PAT_MRT3847_137177C.1.pep
LSHPSMYSIRKMIETVLLWPCLNADSVSKAQHGCRDCLALMICAELQAXESINNSIPDTVRALGKKGNSVVTYVINQFFNNKNEQTSTPEFGDENSEFVAAVSLSFCLCMGNVLISTCQKISESCKKPFAAQVIPFLLHSLEFETKSEIRAACTQVLFSAVYHLRSAVLPYASDLLRMALKALRKESDKERMAGAKLIASLMASEDMILENISVGLLQARSVLSTISSSDPSPELQQLCCKLLACISSP

SEQ ID NO: 184012 - protein, 59 aa, Glycine max
  Clone ID: PAT_MRT3847_137178C.1.pep
PPLDINDGSLINHIGMLDPITASISYFLVFIIQNVQLLYPSDPIFLAHDKKCPKIPSIQ

SEQ ID NO: 184013 - protein, 71 aa, Glycine max
  unsure (1)..(71): unsure at all Xaa locations
  Clone ID: PAT_MRT3847_137179C.1.pep
KSLLRPDFHVSAQNCWVRKGGANMGEVSAEMLVNLGILLGIIGHXERRQFLNEXNEFVGDKLLCTSTGLKL

SEQ ID NO: 184014 - protein, 368 aa, Glycine max
  Clone ID: PAT_MRT3847_13717C.1.pep
GNLRRIHLRLLFWGLLLQGGFSHAPDNLTYGVDMKHIRWCGILQRIALAYLVVALVEIFSRSTQARDPEPTHLSIFNLYYWHWLVGACILVVYLALLYGIHVPDWGFTVHNPDSIYNGTTLTVTCGVRGKLDPPCNAVGYIDREVLGINHMYKRPAWRRSEACTENSPYEGPFKKNAPSWCYAPFEPEGILSSISAILSTIIGLHFGHVLIHLQDHPSRLKHWLLLGLALLTSGLILHFTHAIPLNKQLYTLSYVCVTSGAAALLFSAFYIMVDIWGLTFLFLPLKWIGMNAMLVYVMAAEGIFAGFINGWYYGDPHNTLIYWIQKHVFIKVWHSTRVGILLYVILAEILFWAVVAGILHRLGIYWKL

SEQ ID NO: 184015 - protein, 206 aa, Glycine max
  unsure (1)..(206): unsure at all Xaa locations
  Clone ID: PAT_MRT3847_137180C.1.pep
MEQPSSMVPSSQSLAGKALNLGPSPQKLERVSMRKTVTKQVSSGSPWYGPDRVKYLGPFSGEPPSYLTGEFPGDYGWDTAGLSADPETFAKNRELEVIHSTWAMLGALGCVFPELLSRNGVKFGEAVWFKAGSQIFSEGELDYLGNPSLSHAQSILAILATQVILMGALGGYRIAVAPXECTDLIYSGGXLGTIGLGCDAEALAEL

SEQ ID NO: 184016 - protein, 130 aa, Glycine max
  unsure (1)..(130): unsure at all Xaa locations
  Clone ID: PAT_MRT3847_137181C.1.pep
VGFGLVPNXASHPHLREYDFPQTRGAFATYNAWVTPCNKTDKWAGGLYGAHSHGYKAVAVXSNHNRGIESRDTVLWSLVGIQHVSSQEDFPIMPLLSSGLXLRPTNFFERXPVLKALSPSLVKWAGCGKP

SEQ ID NO: 184017 - protein, 204 aa, Glycine max
  unsure (1)..(204): unsure at all Xaa locations
  Clone ID: PAT_MRT3847_137182C.1.pep
MAAASSMALSSPSLAGKAVKLGPSAPEVGRVSMRKTVTKQVSSGSPWYGPNRVKYLGPFSGEPPSYLTGEFPGDYGWDTAGLSADPETFTKNRELEVIHSRWAMLGALGCVFPELLSRNGVKFRETVWFKARSQIFSKGGLNYLDNPILIHTHIILTIXATQIILINTSKSYRITSIPLDKVTNPIYPNDNCDPLDATNDPXAF

SEQ ID NO: 184018 - protein, 258 aa, Glycine max
  unsure (1)..(258): unsure at all Xaa locations
  Clone ID: PAT_MRT3847_137183C.1.pep
LISHTLAGKAVKLGPSAPEVGRVSVTKTVTKQVSSGKPMVPAQNRVKYLGPFSGEPPSYLTGEFPGDYGWDTAGLSADPETFAKNREXLEVIHSQXWPMLGALGCVFPELLSRNGVKFGEAVWFKAGSQIFSEGGLDYLGNPSLIHAQSILAIWATQVILMGAVEGYRIAGGPLGEVTDPIYPGGSFDPLGLADDPEAFAELKVKELKNGRLAMFSMFGFFVQAIVTGKGPLENLADHLADPVNNNAWAYATNFVPGK

SEQ ID NO: 184019 - protein, 263 aa, Glycine max
  Clone ID: PAT_MRT3847_137184C.1.pep
MAAASSMALSSPSLAGKAVKLGPSAPEVGRVSMRKTVTKQASSGSPWYGPDRVKYLGPFSGEPPSYLTGEFPGDYGWDTAGLSADPETFARNRELEVIHSRWAMLGALGCVFPELLSRNGVKFGEAVWFKAGSQIFSEGGLDYLGNPSLVHAQSILAIWATQVILMGAVEGYRIAGGPLGEVTDPIYPGGSFDPLGLADDPEAFAELKVKELKNGRLAMFSMFGFFVQAIVTGKGPLENLADHLADPVNNNAWAYATNFVPGK

SEQ ID NO: 184020 - protein, 381 aa, Glycine max
  Clone ID: PAT_MRT3847_137185C.1.pep
MTMALSSLFFSTRFIPTPFVTSTRNIPSSPRTCASCIPHKRDFPLPAVASVPYQPINFDYLQEEFSGHGVTFEGVEDSCIAKMELKNGSIVTMMLPSGLITSYKAPMWHGGKLELLHTNVSEGEYGDAIIQGGVSLNFNFQTDDGEFSWSPTNWVLHKIQGNANESIQVELTNRTSDDKIGLKYIVTLEKDALNSEVEISNKKSLPVQMTGSILSHLTVSSPEATYALGLERSNYCSKPLFESEFMLSPPDGQEEGFGKIVEQLFPQWGTKDQNNGSEGSQSEEMDEEIDNYKQLSEKLSHVYTDVPRNFTVIDRGRRNSVSVGRTGFDEMYLFSPGSRVEIYSKYSYICVGQAAILKPIILSPEDVWRGGQYIHNPNLDA

SEQ ID NO: 184021 - protein, 285 aa, Glycine max
  unsure (1)..(285): unsure at all Xaa locations
  Clone ID: PAT_MRT3847_137186C.1.pep
MAAASSMALSSPSLAGKAVKLGPSAPEVGRVSMRKTVTKQVSSRSPWYGPDRVKYLGPFSGEPPSYLTGEFPGDYGWDTAGLSADPETFAKNRELEVIHSRWAMLGALGCVFPELLSRIGVKFGEAVWFKXAGSQIFSEGGLDYLGNPSLIHAQSILAXIWATQVIXLMGAVEGYRICWWPPSGEVTDPNLRQVAASTPLGLADDRXAFAELKVKELKNGRLAMFSMXFGFFGSRHCHPEKGPXGRTFADHLADSVNNRPWGLLPTKLWFPEKVEPSKETENGLF

SEQ ID NO: 184022 - protein, 84 aa, Glycine max
  unsure (1)..(84): unsure at all Xaa locations
  Clone ID: PAT_MRT3847_137187C.1.pep
RYFIXCKXLPVVLXAFIHGDXNLFKDYPXLQEALVWVYFHSNISKFXKVECWGPLKVCAYSSGCHEEGKQGDIPVSDSTHINMS

SEQ ID NO: 184023 - protein, 165 aa, Glycine max
  Clone ID: PAT_MRT3847_137188C.1.pep
KKGKILTPPNGRGASPPGKKGGKNYQFFYLGPFWKKPKKKKKEVFRGLQKKKGEREKNKKIRGVFFWGERGGPKILQGPELQPNGLKKALERGQVFEKNLWELERNKLFKKRKVDNLGKLPRGATKNPLKEANPFKKKGGSGQKLGLGNWGGKARPQIHLILGPG

SEQ ID NO: 184024 - protein, 57 aa, Glycine max
  Clone ID: PAT_MRT3847_137189C.1.pep
SAGGGGATRRETDTLDRAIAPAPYAFSRPFRDTCAGYPRQSINRGPPRGPRLSAKRP

SEQ ID NO: 184025 - protein, 451 aa, Glycine max
  unsure (1)..(451): unsure at all Xaa locations
  Clone ID: PAT_MRT3847_13718C.1.pep
ELPLSDKNLPKTKRVASLDIFRGLTVALMILVDDAGGQWPMIGHAPWNGCNLADFVMPFFLFIVGMAIPLALKRIPNRLLAVKKVIVRTLKLLFWGLLLQGGFSHAPDNLTYGVDMKHIRWCGILQRIALAYLVVALVEIFSRSAQARDPEPTHLSIFKLYYWHWLGSACILAVYLALLYGIHVPDWGFTVHNPDSIYNGTTLTVTCGVRGKLDPPCNAVGYIDREVLGINHMYKRPAWRRSEASTENSPYEGPFKKNAPSWCYAPLXEQKGILSSISAILSTIIGLHFXHVLIHLQDHPSRLKHWLLLGLALLTSGLILHFTHAIPLNKQLYTLSYVCVTSGAAALLFSAFYIMVDIWGLTFLFLPLKWIGMNAMLVYVMAAEGIFAGFINGWYYGDPHNTLVYWIQKHVFIKVWHSTRVGILLYVIFAEILFWAVVAGILHRLGIYWKL

SEQ ID NO: 184026 - protein, 60 aa, Glycine max
  Clone ID: PAT_MRT3847_137190C.1.pep
LRPCKFKFTIKQHTTPQSLKVIKLFCHFMMCIICANSRISDRFIKKRCDPNDHLLLSCVL

SEQ ID NO: 184027 - protein, 80 aa, Glycine max
  unsure (1)..(80): unsure at all Xaa locations
  Clone ID: PAT_MRT3847_137191C.1.pep
PKPSSLSSRLFLFPLSHAIPPSTXXAGIXCRVNXSGXSSYXXLNSASXSXSSFSXXPPSXMAPLFPGCYYNHXLIVMDHP

SEQ ID NO: 184028 - protein, 76 aa, Glycine max
  Clone ID: PAT_MRT3847_137192C.1.pep
PTRPEEIDLNTDFIFEQRFKRAYSAGDITFEQLVTYSRKLDYTEITRNDLRCAVSVTLLSEYIDQNQNHILCLQGR

SEQ ID NO: 184029 - protein, 328 aa, Glycine max
  Clone ID: PAT_MRT3847_137193C.1.pep
MSNNNAGKVVCVTGASGFIASWIVKFLLQRGYTVRATVRYPSNLKKVDHLVKLEGAKERLQLFKADLLEEGSFDSVVEGCHGVFHTASPVRFVVNDPQAELLDPAVKGTLNVLKSCAKSPSVKRVVLTSSISAVAFNRRPKTPQVVVDETWFSDPDVCRELELWYTLSKTLAEDAAWKFVNENSIDMISINPTMVAGPLLQPEINESVEPILNLINGKPFPNKSFGWVDVKDVANAHILAYEIASASGRYCLVERVIHYSELATILRGLYPTLQIPDKCEVDEPYIPTYQISTEKAKKDLGIEFTPLEVSLRETVESFREKKIVNFNP

SEQ ID NO: 184030 - protein, 37 aa, Glycine max
  Clone ID: PAT_MRT3847_137194C.1.pep
SGVTPESKPFHKIETAPHINNCQLEKIVQLPYAENNH

SEQ ID NO: 184031 - protein, 120 aa, Glycine max
  unsure (1)..(120): unsure at all Xaa locations
  Clone ID: PAT_MRT3847_137195C.1.pep
NMNLFVICVAEGGLVAWSCQDSGYQRSPLPRKTGYGDRASQVKCSSLRLAVEAHSIRAYNTIXESAINXTKDYIIGEHIISDYQTDDQQAFFYASEREVHHNDIFIFGLNNIVLCNITYY

SEQ ID NO: 184032 - protein, 70 aa, Glycine max
  unsure (1)..(70): unsure at all Xaa locations
  Clone ID: PAT_MRT3847_137196C.1.pep
HLLDRYVGVGESEDVQAFYYFIESENNPKKDPLMLWLTGGPGCSALSGLVFEIRPLTFKYXEYNXSLPNL

SEQ ID NO: 184033 - protein, 174 aa, Glycine max
  Clone ID: PAT_MRT3847_137197C.1.pep
RLAVEMGRLVSEGYVLTVLAPNDEAMAKLTTEQLSEPGAPEQIMYYHIIPEYQTEESMYNAVRRFGKVRYDTLRLPHKVVAQEADGSVKFGHGDGSAYLFDPDIYTDGRISVQGIDGVLFPTVEVEGAERVRPVTRTGQNGAKVVVKHRRGKLLETACWMLGTFGQHSRFASCQ

SEQ ID NO: 184034 - protein, 38 aa, Glycine max
  Clone ID: PAT_MRT3847_137198C.1.pep
EGSDEEYCSIDPKLTSCATNASICGDEARCVRTEKAAY

SEQ ID NO: 184035 - protein, 75 aa, Glycine max
  Clone ID: PAT_MRT3847_137199C.1.pep
VSVGSPRGEDLQEDEGRSELRPTWPVFIFIMMPYEHPSHDAWHVILISLERTKQKLPKREGKTKQQARSTYTDIV

SEQ ID NO: 184036 - protein, 156 aa, Glycine max
  Clone ID: PAT_MRT3847_13719C.1.pep
MVKSLILAVLFALSLRVDSDVSKEIQLSNGRKMPIIGLGTCCGISSSTMYRMVKDAIEIGYRHIDTAYIYHIEMEVGQAVNEFITNGTLKREDIFITTKVWNTFHSRGKAVEAVKTSLKKLNLKYIDLILIHWPMGYAEGTDDNPRNTNGDAIDSG

SEQ ID NO: 184037 - protein, 125 aa, Glycine max
  Clone ID: PAT_MRT3847_1371C.1.pep
EYPPSTTLHRSSGSHVANSSECRANSMHYEAQKKKEKNLPQIKKTTCKKEKARILMLDSTGKSKGESAHFSLQQNLRRNKFNLEEPRTWKNLRKPKQRESLRGKQRKIRNPMKRTRGRPGIRTGP

SEQ ID NO: 184038 - protein, 38 aa, Glycine max
  Clone ID: PAT_MRT3847_137200C.1.pep
RESTGSNPRLLPQSFSLNHTTYAYTLGFLIGNDRNGTR

SEQ ID NO: 184039 - protein, 92 aa, Glycine max
  unsure (1)..(92): unsure at all Xaa locations
  Clone ID: PAT_MRT3847_137201C.1.pep
MAPTKKPRTTTNKRFSSLSEVSPKKDEVGSSKNKQRKKNMFDKLGPKWIGEELEQFYEAYRKHWKDXTKVAENVSSRSVEMVKALHSISQVH

SEQ ID NO: 184040 - protein, 189 aa, Glycine max
  unsure (1)..(189): unsure at all Xaa locations
  Clone ID: PAT_MRT3847_137202C.1.pep
RLLEPPRHNWRDPRGRPCFRRRVRLEGDWSFDPKAGCRWEKGLSTKAQXVSGKTLKCDIIXGAGSHSSEDFXEKEDHEKPKPIDARLRHRIDPEYNEDQAQMETNSXKWSLDDAETPKGSMLDLKISESKIALTKNTVGGTILRSDLLAHLLTEGNSRASVDLQRTHRIKGMIKTVATVGIPEHTGVAL

SEQ ID NO: 184041 - protein, 56 aa, Glycine max
  unsure (1)..(56): unsure at all Xaa locations
  Clone ID: PAT_MRT3847_137203C.1.pep
LLXAFSFSHTTSHRSGDPHKQQNPIFSISTLALSDSLHQRHFDFLQNYTSLTGPLF

SEQ ID NO: 184042 - protein, 50 aa, Glycine max
  Clone ID: PAT_MRT3847_137204C.1.pep
MMKLRSILCWDCNCITLLFGMAYCEKHIPQHNKCLLTSNSDKDSYRNQAC

SEQ ID NO: 184043 - protein, 71 aa, Glycine max
  Clone ID: PAT_MRT3847_137205C.1.pep
IRANVHTTKKAHVHAHGYPRFRTHGILERESCTVQFNSAFRILLLLKVQGFSVINQEALEIHIYTLYRWWH

SEQ ID NO: 184044 - protein, 58 aa, Glycine max
  Clone ID: PAT_MRT3847_137206C.1.pep
LSPNIPSSPDINNVNFPSNTVHHGSPITQFKAPLEQTQITCFISHSSAHDSDRKKMQQ

SEQ ID NO: 184045 - protein, 216 aa, Glycine max
  Clone ID: PAT_MRT3847_137207C.1.pep
MSSMGISSKKMCLDDKLERKIAEMRRYKFGQSKLKSVDSVVMLFPMFKERLKTLRGMFEQYDEDSNGSIEPNELKKFLEHLELHLKEQEIEHLFQYCDLDGSKGIQFNEFIVLLCLIHLLAEPSSSDISSKAELAQVGEIFNTIVEVFVFFDQNGDGKLNQKDMVRTLNETNPRERSPARISKHRFQEMDWDKNGQVTFREFLFGFINWIGIGDDE

SEQ ID NO: 184046 - protein, 86 aa, Glycine max
  Clone ID: PAT_MRT3847_137208C.1.pep
LSACDDSSQSQATDRLSLLITAIAILSFRSRHKQSRKRLSFIHRPEHTSRGMLRAELIGIGSSSQLFRGVSICYSRRSVGNINRSR

SEQ ID NO: 184047 - protein, 144 aa, Glycine max
  unsure (1)..(144): unsure at all Xaa locations
  Clone ID: PAT_MRT3847_137209C.1.pep
KLLSIAFEQTLVEPNMLVVDVEKFVSPQQESWFKVDEKEPVAYAKVEVIEASDMKPSALNGLADPYVKGQMGVYRFRTKIQRKTLTPKWHEEFKIPIITWESDNVLVIAVRDKDHFYDDXLGTSVNINEFRDGQRHDMWLSLRT

SEQ ID NO: 184048 - protein, 102 aa, Glycine max
  Clone ID: PAT_MRT3847_13720C.1.pep
PPLSEPAATATSRHCPHSALKPTNRRTQSRSNLPWEMTTVRHQEGRVFFFFHLNTQPTASPLLHMLASLLSLAVSYAPSWLANTYLHPHPTHSSSACCFTII

SEQ ID NO: 184049 - protein, 356 aa, Glycine max
  unsure (1)..(356): unsure at all Xaa locations
  Clone ID: PAT_MRT3847_137210C.1.pep
MDIDLSPQLPKKVYGANGGSYYAWSPSDLPMLHQGNIGAAKLALNKNAFALPRYSDSSKVAYVLQGSGVAGIVLPESEEKVVAIKKGDALALPFGVVTWWYNKEETELVVLFLGDTSKAHKAGEFTDFXLTGSNGIFTGFSTEFVGRAWDLEESHVKTLVGKQPAKGIVQLEGNISLPDPKPEHRNGMALNCEEAPLDVDIKGGGRVVVLNTKNLPLVGEVGLGADLVRLDGRAMCSPGFSCDSALQVTYIVRGSGRVQVVGVDGRRVLETTVKAGNLFIVPRFFVVSKIADPDGLEWFSIITTPNPIFTHLAGSSSVWKALSPSVLQAAFNVDPEVEQLFRSKRTADAIFFPPPN

SEQ ID NO: 184050 - protein, 94 aa, Glycine max
  Clone ID: PAT_MRT3847_137211C.1.pep
PLVGADRSCEVKNWHPERATLLIGSVQQKSGGLNTVSSYRFTWFLRNFSRWEVSPGKPEAGCRWTFGRALGKRKRFTASPQGELIWNGRWVICP

SEQ ID NO: 184051 - protein, 78 aa, Glycine max
  Clone ID: PAT_MRT3847_137212C.1.pep
DFTISVLFAFLGDIISGVGVLSKHWILTLFGLNNFSYVQIETRNNNMEMQSVNYKSLIEEFDKLLERSRVPSVVFSQP

SEQ ID NO: 184052 - protein, 77 aa, Glycine max
  Clone ID: PAT_MRT3847_137213C.1.pep
SRIINNLFLKLFFSCILEHHKFLFTFGRGSYLRWGLPMARHLTIYERVNYKEYYKGAAYGTSFWLMVATCKYGGTCL

SEQ ID NO: 184053 - protein, 46 aa, Glycine max
  Clone ID: PAT_MRT3847_137214C.1.pep
ESVILFPGVAVGLKNWVRVSLAVDLSDLKDGLSRIREFSLRHAKMS

SEQ ID NO: 184054 - protein, 66 aa, Glycine max
  Clone ID: PAT_MRT3847_137215C.1.pep
MVLNIDLCRVICANIYPKMDIRFVLRDSHVDLYANLECNTYCHSHLNTSLLTWTVMCTALHRKDIA

SEQ ID NO: 184055 - protein, 61 aa, Glycine max
  Clone ID: PAT_MRT3847_137216C.1.pep
MLVMQSFRWDYIELGGKYYPDMDRLAALERGMKTWANWVDNNIDKSKIRVFFQAISPTHYK

SEQ ID NO: 184056 - protein, 88 aa, Glycine max
  unsure (1)..(88): unsure at all Xaa locations
  Clone ID: PAT_MRT3847_137217C.1.pep
SSPFLSRSLWCYQNPTRLTVGACGFGXFGATVNGGDVSAASSLYRNGVGCGACYQVRCTNSVYCSENGVTAVITDQGSSDNTDFILSK

SEQ ID NO: 184057 - protein, 53 aa, Glycine max
  Clone ID: PAT_MRT3847_137218C.1.pep
SETASAADVRRAYKKLGLQWHPDKNVDKREEAEAKFREIGAAYEVYYDYLMVT

SEQ ID NO: 184058 - protein, 56 aa, Glycine max
  Clone ID: PAT_MRT3847_137219C.1.pep
ILILYLTFNIQDHSFFYYKHILHSLFFLLSFSSIHNFNSIYSLNLFIPYLIHITHH

SEQ ID NO: 184059 - protein, 88 aa, Glycine max
  unsure (1)..(88): unsure at all Xaa locations
  Clone ID: PAT_MRT3847_13721C.1.pep
GTFDADVKPVGSNVISVDGKEIXXVSDRNPANLPWKXFGIDXVXEXTXVFVDRKSAXXXXSRQXXKXVLITXLGKGDIPAYXLXSMNY

SEQ ID NO: 184060 - protein, 80 aa, Glycine max
  Clone ID: PAT_MRT3847_137220C.1.pep
ALSPYVQSQLTKTTLAGTIPLYQRSKCDMSRTRSACKGITAYDSSIAGSTLTPTCRTIFHRARKIARQAGRGQLLDMEDS

SEQ ID NO: 184061 - protein, 165 aa, Glycine max
  Clone ID: PAT_MRT3847_137221C.1.pep
MFVQKEGCLILAYITFNTGKKNENADHCMVDSHELFTIEQKFLENCARNYLDRKDTRSMMKFVKAFHSMDLKREFLRSLSLLDELLVLEEESGNFMEAANIAKMMGDVLHEVDLLGKASKFMEACELMLLYVLGNSLWSAGSKGWPIKPFAQKVELLNRSISFAK

SEQ ID NO: 184062 - protein, 84 aa, Glycine max
  Clone ID: PAT_MRT3847_137222C.1.pep
NTPRPLPHLYSGGGRDQPGNLNKKSYIKGGGAVGTKKKSERIHRKQDRTGTKLQTICKKKIKTWEMSCDHKKEDGRDSHKKKPL

SEQ ID NO: 184063 - protein, 323 aa, Glycine max
  unsure (1)..(323): unsure at all Xaa locations
  Clone ID: PAT_MRT3847_137223C.1.pep
MADRASATTRLHISAAPPFPISKDFHGPDNPIPLSPQWLLPKPGESKPAIGTVENHVISTPPNGNRSETVKTSGDGEDANDGHKRKDVFRPSMLDSESGRRDRWRDEERDTKSSIHKDRWRNGDKNLSDTQRMDRWTENVSMRHFGEARRATSDRWNGSSNRDTNFEQRRESKWNTRWGPDDKAPEGLCEKWNDPGKDSDLHVDKGLSNISNLVKDEKEGDHYRPWRPNSSQSRGRVEPTHHQNVMPNKQVSALSYRRGRGEDTTPGIAFGRARLSSXGSSINSTYMXSNYPGTLLDKFERNRREAXSFRNSRAKLLDVYRVA

SEQ ID NO: 184064 - protein, 158 aa, Glycine max
  unsure (1)..(158): unsure at all Xaa locations
  Clone ID: PAT_MRT3847_137224C.1.pep
ALSMIASITDTTVNLAGAGLDATSTGLKPMVGCPTMKTNNDITYIANNGGRAQCMQVWTPFGSKKYETLSYLPDLDEAQSAKEVEYLIKKGWITCLEYKLDHSFLYRELKMPPXYFEGLSWSLWKVPMFGSTDTSHVLNELQYAXTAYPDSQIRIIGF

SEQ ID NO: 184065 - protein, 130 aa, Glycine max
  Clone ID: PAT_MRT3847_137225C.1.pep
PFLPPSNTPPDAHKSVPSFYPRPFLSCSPKGFKGAGSQAWGDGGFFFSTKKPGGGFGALVTLLSFFLFNNHFVQPVSFGSFPWVLPAGPPLVGPPRGSQSALRPFFPPQFFRFFSGFSGLKEGGVGFQEK

SEQ ID NO: 184066 - protein, 76 aa, Glycine max
  Clone ID: PAT_MRT3847_137226C.1.pep
ALQVSNEGGGIARSGLPKIFTYLYSTGRNPLDEFPVFFFFFFLTMAGYGYGLPISRLYARYFGGDLQIISMEGYGE

SEQ ID NO: 184067 - protein, 129 aa, Glycine max
  unsure (1)..(129): unsure at all Xaa locations
  Clone ID: PAT_MRT3847_137227C.1.pep
PDRNPRDDPRRRLHSAXXAEGXRASNSETPGRPTXXXKDRGXTAEHPGRRAHAAQNEKQPQEKDRREGKHPQDTKTRPRKEKETPTKAQGAGEKPPNRRXKGAGPHAAEEAPEKEXQDKPKKTEARPRQ

SEQ ID NO: 184068 - protein, 168 aa, Glycine max
  unsure (1)..(168): unsure at all Xaa locations
  Clone ID: PAT_MRT3847_137228C.1.pep
ACTPLXFVWEKAIGMHECKSLCKRALVRLPVVIPIWFLAIIFPFFGPINSTVGXSLLVSFTVYIIPALAHIFTFKSPSARQNAVEQPPKFVGRWVGTFIINTFVVVWVLVVGFGFGGWASMVNFIRQIDTFGLFTKCYQCPPPILPPVPPHQLNATAPSPLHHPHHGH

SEQ ID NO: 184069 - protein, 137 aa, Glycine max
  unsure (1)..(137): unsure at all Xaa locations
  Clone ID: PAT_MRT3847_13722C.1.pep
YDIDTEAGEKRKEEEMIELEGPLGKSDAVNHELVSLERELSTLRKNGKVDAFGLYLYGLVLKQKGSENLARTVLVESVNSYPWXNWNAWTELQSLCKTVDILNSLNLNSHWNEDFFLASVYQELRMHNDSLSKYEYL

SEQ ID NO: 184070 - protein, 52 aa, Glycine max
  unsure (1)..(52): unsure at all Xaa locations
  Clone ID: PAT_MRT3847_137230C.1.pep
KXHXRXRXXGIRLEDTXXVRYIXCSAXMXXSKCSXXXXXRXTXAXNNXQSRA

SEQ ID NO: 184071 - protein, 105 aa, Glycine max
  Clone ID: PAT_MRT3847_137231C.1.pep
PYCVLRIYYTFMPTLSAHCHPYLARASSFVPQRNLAVPPVTPTSWALSRLLLTNRHRLLNHCFVNVAAVSVVSRSCTPSAPPVASATGLQPALGDRTLDSSIEIA

SEQ ID NO: 184072 - protein, 49 aa, Glycine max
  Clone ID: PAT_MRT3847_137232C.1.pep
MRERDTLRIAVMSATLQPRDSTHPNIRYYSSFAVSVYRDPACRRQRSNA

SEQ ID NO: 184073 - protein, 118 aa, Glycine max
  Clone ID: PAT_MRT3847_137233C.1.pep
PPMTQVAHDFFTQQLPADGKLSEVLLLIIGIVGTTVALWQLFFQQSYVIDKRITPCFIKYERADLWLGIALVVIGAVAMIAFTAQVFVGNPEFGNFTDAGAIAAGIAKYHGRLPGVLF

SEQ ID NO: 184074 - protein, 77 aa, Glycine max
  Clone ID: PAT_MRT3847_137234C.1.pep
FTSAEFLVCPLGFSPLLLARNSGRSAKDAFFAFQSSFPFVFVEQPFFIGSPFFWFLYCKHSAIYMGKNVFCNVLKRI

SEQ ID NO: 184075 - protein, 212 aa, Glycine max
  Clone ID: PAT_MRT3847_137235C.1.pep
MMMISTSTMALASLLPKTAPHVLSLTNPSASTPFILPFSFHCLPHPPLLSALKASSSGGDDLRGKPLLSQGIGKGILEEHAFEDDDDDKWVDWEDQILEDTVPLVGFVRMILHSGQYDNGDRLSAEHEKTIIEKLLPFHPEFEKKIGSGVDYITIGYHPDFERSRCLFIVREDGELVDFSYWKCIKGLIRKNYPLYADSFILRHFRKKSRNL

SEQ ID NO: 184076 - protein, 70 aa, Glycine max
  Clone ID: PAT_MRT3847_137236C.1.pep
GSSHSNPPRKSQAEITHGRIAQCGTIITRGHYICPGEYSFITDVWGMTFNFDQPTNMGQWGDIHNTKKHP

SEQ ID NO: 184077 - protein, 121 aa, Glycine max
  unsure (1)..(121): unsure at all Xaa locations
  Clone ID: PAT_MRT3847_137237C.1.pep
DPKAKFFKFLEKYXSGGVVSEACQGIRDLGKPFFTHKVVKKAFFMAMEKKNVGRLDLLQEGFSEGLFPFNQMIKGFPRKKEGLYDLVLAIPNPKEKFGFYVEHAQSKGGFFPSFDSPAPKA

SEQ ID NO: 184078 - protein, 126 aa, Glycine max
  unsure (1)..(126): unsure at all Xaa locations
  Clone ID: PAT_MRT3847_137238C.1.pep
MASAPALKRTDSVVDNMPDALRQSRFHLKRCFAKSLXGWRILKLYHFDGRNGPSIDDKSERSQVLEGILGLILSSTQKAGXPPMMPFAIRPYPGVWEFVKVSSEDLSSEAITPTDYLKFKERVHHE

SEQ ID NO: 184079 - protein, 78 aa, Glycine max
  Clone ID: PAT_MRT3847_137239C.1.pep
WIKKQGPPSVKLNPGLQKFALPKNFFDLFTPPKTKRGTPGVFIFGFRKKKPPPWATPGGNPWGAPWFSPEILTRPLKG

SEQ ID NO: 184080 - protein, 119 aa, Glycine max
  unsure (1)..(119): unsure at all Xaa locations
  Clone ID: PAT_MRT3847_13723C.1.pep
RVENKNKESVVLPSPIPWRSRSGRLEPKQEEFDDAFNMMLSPSKEESRPVKSQPSRASSRASSVSPSPSFSSESLAKNSEDSVRKKAFYKSCPPPPPAPXPMDVSQISVHEAKVWWFIQ

SEQ ID NO: 184081 - protein, 78 aa, Glycine max
  Clone ID: PAT_MRT3847_137240C.1.pep
FSALSRKFKDCNSLCAHVIIKKKKKKKKKKKKKKKKKKKKKKKKKKKKKKKKKKKKKKKGAPLKESKLTNPCIQRKTF

SEQ ID NO: 184082 - protein, 275 aa, Glycine max
  Clone ID: PAT_MRT3847_137241C.1.pep
MREEDSNWFSRWEEEFPSPEELMPLSQTLITPDLAMAFDIRNPHTTNTAQQQHHHHQQQPQQQQQPSNPSSLPNPLQQQQQQQQPTSAEFADSGELGSGTAGEEPARTLKRPRLVWTPQLHKRFVDAVAHLGIKNAVPKTIMQLMSVDGLTRENVASHLQKYRLYLKRMQGISAAGPGGPGGGASGAVADPATDHLFASSPVPAHFLHPAARPNSDHFLPFVPALHPHQQQQQMAAAAQYHRQVRHFGSPPNGHFENPFMSRPHLQRLGGGGGGG

SEQ ID NO: 184083 - protein, 127 aa, Glycine max
  Clone ID: PAT_MRT3847_137242C.1.pep
MVDGTLLLLLSEALALTQTWAGSHSLKYFHTSVSRPGRGEPRFISVGYVDDTQFVRFDNDAASPRMVPRAPWMEQEGSEYWDRETRSARDTAQIFRVNLRTLRGYYNQSEAGSHTLQWMHGCELGPD

SEQ ID NO: 184084 - protein, 144 aa, Glycine max
  Clone ID: PAT_MRT3847_137243C.1.pep
IEALGGDGIISTEDLIHDIITLRPHFKGAINFVGAFNPKAPYCGLTKLIDHDKAGSDTRNRETTSTCLPRKQKRAYLTDKADVYSFKVVALETVSGKSLSNYMPNEDYDYLLDWAYILQERRNLLQLVDPNLGSQYLTEDAMGC

SEQ ID NO: 184085 - protein, 50 aa, Glycine max
  Clone ID: PAT_MRT3847_137244C.1.pep
CYRNLTPIGLLKLGWEYNTLYTKPFNHSFVSSITPIQKLPFLNYHIASDQ

SEQ ID NO: 184086 - protein, 109 aa, Glycine max
  Clone ID: PAT_MRT3847_137245C.1.pep
KKEGQTGLFFQFLEAQGKARGISLPRGAPKTSDSPIFFFQGPPPLPILGGATPSPRAKSGTKWVTPNLEENKTVNSPFARGVNQFNLFLSPRGRERRFRGGKPSPGTNF

SEQ ID NO: 184087 - protein, 82 aa, Glycine max
  Clone ID: PAT_MRT3847_137246C.1.pep
ELYEFVGCQITDDVHASSDDVNACAKPTISTVEDVYIKRILSHNSLVSQYLRKICSSWFSIHVSNRNISMLGIYNLFNVCSV

SEQ ID NO: 184088 - protein, 54 aa, Glycine max
  Clone ID: PAT_MRT3847_137247C.1.pep
YMDSILIHMIRDTLHLCWPEPEAERNVSPPASQFLSRLPCTYTVHCTGTLSGTL

SEQ ID NO: 184089 - protein, 30 aa, Glycine max
  Clone ID: PAT_MRT3847_137248C.1.pep
GPILLALRERSAMPLALVFFDRSKDHSKLT

SEQ ID NO: 184090 - protein, 97 aa, Glycine max
  unsure (1)..(97): unsure at all Xaa locations
  Clone ID: PAT_MRT3847_137249C.1.pep
HLQESFLVLIKTSATTKTSVTDFTKRISWQISVQFAIPQSYMCSPKIVGAKFSKVQITKFMHTACTCIDELNYLRNSVIXTNRKAQTHFRKTXXYKN

SEQ ID NO: 184091 - protein, 176 aa, Glycine max
  Clone ID: PAT_MRT3847_13724C.1.pep
LNLTSNIFFFIFTLTIFFVAYTFPRLQPKQTNLVFYVHDHFTGELSTAATVAGKSGPASNIMHFGTVAVVDDPVTVGPSDDSKLIGRAQGIYVNSQLDGKGLYMVFSVIFTNGKFKGSSLEIQGSDIFTMTEREFGVVSGTGYFRFVKGYGIMETVFMDIASLMATLKLNVTVKHY

SEQ ID NO: 184092 - protein, 110 aa, Glycine max
  Clone ID: PAT_MRT3847_137250C.1.pep
MMSQHPRRKLPRGNPRKGKHAEVDKPAAPKATEPPSSNRLLAGYLAHEFLTKGTLLGQKFEFDLTRSGVAEPKREQDNYKEVANLLRTKGTHVKGIVNPTQLFNWINKVL

SEQ ID NO: 184093 - protein, 64 aa, Glycine max
  unsure (1)..(64): unsure at all Xaa locations
  Clone ID: PAT_MRT3847_137251C.1.pep
THAPGLSTTPWTELQPCTYTEXALLDRLLWPETAYVLLDGGSLPDYCTTTPFEDTAHVTGQITT

SEQ ID NO: 184094 - protein, 70 aa, Glycine max
  Clone ID: PAT_MRT3847_137252C.1.pep
GGNLKQVKIIFNGNAQGIPFRKISTTFMPRPTFFIPPKHIRMIRTTFSNNITHRRRTRPLIILEIRFCPH

SEQ ID NO: 184095 - protein, 325 aa, Glycine max
  unsure (1)..(325): unsure at all Xaa locations
  Clone ID: PAT_MRT3847_137253C.1.pep
MDENLLDDIIRRLVAAKNGRTTKQVQLTEAEIRQLCVSSKEIFLSQPNLLELEAPIKICGDVHGQYSDLLRLFEYGGYPPEANYLFLGDYVDRGKQSIETICLLLAYKIKYKENFFLLRGNHECASINRIYGFYDECKRRFNVRLWKTFTDCFNCLPVAALIDEKILCMHGGLSPDLKHLDQIRSIARPIDVPDHGLLCDLLWADPDKDLDGWGENDRGVSFTFGADTVVEFLEHHDLDLICRAHQVVEDGYEFFAKRQLVTIFSAPNYCGEFDNAGAMMSVDDTLTCSFQILKSSEKKGKGGVWHXLATDPSSPGTPPHKGGKN

SEQ ID NO: 184096 - protein, 42 aa, Glycine max
  Clone ID: PAT_MRT3847_137254C.1.pep
FVVLYIIRFPWCNVLFLCVLPLWPFSLLLPLGTISYLNTYLN

SEQ ID NO: 184097 - protein, 317 aa, Glycine max
  Clone ID: PAT_MRT3847_137255C.1.pep
MAMEKTTLFVLLLNVLLVFSASLVSSEQQSHVSAVGDPGMQRDGLRVAFEAWNFCNEVGQEAPHMGSPRAADCFDLSGSLTHKVTEADNRLGVGDSFPGIKPENINNTDLYAIEKELYLGSLCEVADTPSPWQFWMVMLKNGNYDTRSGLCPQDGKKVPPFSPGRFPCFGQGCMNQPILCHQWTQLKDGTMQGGFSGTYDLDSGCGGEHDGVSYYEVVWEKKVNVGSWVFKHKLRTSKKYPWLMLYLRADATKGFSGGYHYDTRGMLKTLSKSPNFKVRLSLDIKKGGGAKSQFYLLDIGSCWKNNGAPCDGDVLTD

SEQ ID NO: 184098 - protein, 54 aa, Glycine max
  Clone ID: PAT_MRT3847_137256C.1.pep
MPSVKLRSDPHWKTLRPVEPRPFRVDHIFAHIPKMKSFAYTGQRDFVRWVHQQN

SEQ ID NO: 184099 - protein, 143 aa, Glycine max
  unsure (1)..(143): unsure at all Xaa locations
  Clone ID: PAT_MRT3847_137257C.1.pep
MGMKKVASGVTMDHVLLASQETKEAREARIRSLFDFFDRENLGFLDYSHIEAGLSALQIPAEYKYAKDLLNACDANKDGRVDFQEFRKYMDDKELELYRIFQAIDVAHNGCILPEXLWEALGRAGIKIDDEELARFVERVDKD

SEQ ID NO: 184100 - protein, 80 aa, Glycine max
  Clone ID: PAT_MRT3847_137258C.1.pep
RTRGRMRVRTRGKQRENKLLYIRHWKFIHFLRALLCLAFASYVAFSALCFAPLLLLQACRRIEIVMEFYALKKGKVSSKN

SEQ ID NO: 184101 - protein, 89 aa, Glycine max
  unsure (1)..(89): unsure at all Xaa locations
  Clone ID: PAT_MRT3847_137259C.1.pep
RKVLLHFFSSFSLAHXFXXCLSFRMTKKVLCMNPGPIEFEPRVLKSFAMEGISHVDKTVIEIXGQCLEKTRKVFLAPDGQPLVVAGSGT

SEQ ID NO: 184102 - protein, 58 aa, Glycine max
  Clone ID: PAT_MRT3847_13725C.1.pep
KISRLAHHHVHLLATQEGSIHENGEKKKKLGLLFTSEKVFQEGATIYDFVMSIEYQAE

SEQ ID NO: 184103 - protein, 84 aa, Glycine max
  Clone ID: PAT_MRT3847_137260C.1.pep
AKKILLIFIPNKTEIPDGYVLIDSKRGLSYSNFIFLIGPHLLAQITTQHSPFKRDSLGGEAYALNLHICLGMLQTKIEWYGDVS

SEQ ID NO: 184104 - protein, 99 aa, Glycine max
  unsure (1)..(99): unsure at all Xaa locations
  Clone ID: PAT_MRT3847_137261C.1.pep
SGPTPWSTPXPKESPKGCLFYWTPPPPGQSPQWEDWGLPCXVPSFLPIVILGVGLNAKPDFPIETWAPQKAPQPPKIENSLAAAPTNNNREWSSSPESG

SEQ ID NO: 184105 - protein, 40 aa, Glycine max
  Clone ID: PAT_MRT3847_137262C.1.pep
MRMRPIQLIVQLNNLQYLLSMKVSLTWIRSNILPTMLVKW

SEQ ID NO: 184106 - protein, 76 aa, Glycine max
  Clone ID: PAT_MRT3847_137263C.1.pep
LLLRSNTVQPYQCWRLGFHKLHIISVDFADLYFNWKICLSETEDLYCRYIMRNLFSKLVLLLEGEHGFMPVSVRVC

SEQ ID NO: 184107 - protein, 63 aa, Glycine max
  Clone ID: PAT_MRT3847_137264C.1.pep
DKNNTINIFKGSNYTLTQKGVQLMDILALKNYTTQYKSKWPLLKRCIIMVTDGLRLIHIMPFF

SEQ ID NO: 184108 - protein, 67 aa, Glycine max
  Clone ID: PAT_MRT3847_137265C.1.pep
NIITTYGKKNINAFETQIPTSPKCLFYSLNLTDSKKSSMPINDNYFKLSGMLMNSYLFWPSRKLNHY

SEQ ID NO: 184109 - protein, 144 aa, Glycine max
  Clone ID: PAT_MRT3847_137266C.1.pep
RLEPPIPENYFGNCVWGNSVDADPLVFIKEEAFGIVAKSIHSKIKEMLDKGIFHGADSSFSKYESMAKEKVEVFAIAGSNRFGVYGTDFGWGKPAKVEITSVGGGLTIGLAESKDGNGGVEVGLVLKKNVMDLFANTVSSRSVR

SEQ ID NO: 184110 - protein, 63 aa, Glycine max
  Clone ID: PAT_MRT3847_137267C.1.pep
MLAPPFYMFKVEWETFHVSVWRERKGSYAVVYISLTATCSYRCFRISSPKLADIVGILPPPVR

SEQ ID NO: 184111 - protein, 135 aa, Glycine max
  Clone ID: PAT_MRT3847_137268C.1.pep
MGSTDTHGGETHPRQKKTDTTTATDPTRAKTPGTKKKKKKKNGREKQKKKGPGHKKPLPGSKQKPNHSPQKKKEGTKKKGPQPRGASPEPQPSGRKKKKKRGPYKRPPPKKKGRGGTPNEKKKKTNPRGQKKGKN

SEQ ID NO: 184112 - protein, 61 aa, Glycine max
  unsure (1)..(61): unsure at all Xaa locations
  Clone ID: PAT_MRT3847_137269C.1.pep
YSRFSILIYDSIVKTHGMGAAFILKSQCMKQRXADKSYKKSHLANYWTKPFAGSSHAIGIV

SEQ ID NO: 184113 - protein, 58 aa, Glycine max
  unsure (1)..(58): unsure at all Xaa locations
  Clone ID: PAT_MRT3847_13726C.1.pep
RGKFAYITLTLSYLARNYVIIKICKMTCFAVKXKKXKKKXPXXKKRKXXXLLGRELNK

SEQ ID NO: 184114 - protein, 52 aa, Glycine max
  Clone ID: PAT_MRT3847_137270C.1.pep
QIYHFFNILVFLFFLFCDLKHGIHTPSNKLKLYQHQQQVSSPLMPCSFGVSV

SEQ ID NO: 184115 - protein, 336 aa, Glycine max
  Clone ID: PAT_MRT3847_137271C.1.pep
LEGEEKFKQEIQSLLDGNFGSHARHRTFVSWRRFIHHDRGSAGVTAAKLPATIRSPLFYRSWLDFRKVLHDWFRKRRFQPGIMSGLTRSIKLPIDSHNNNNKLQTNNKNKNKYSSCAVVGNSGILLNRNYGSEIDSHEVVIRLNNARVDHFETKVGKKTSISFMNSNILHLCARRGGCFCHPYGDNVPIVMYICQALHFLDYTVCNASHKAPLLVTDPRFDVLCARIVKYYSLKRFVEESGKGLEKWGEAHDGSLFHYSSGMQAVILALGICDRVSIFGFGKSTSAKHHYHTNQKAELHLHDYEAEYAFYRDLVDGKRAIPFLEDRFKVPPVVMYQ

SEQ ID NO: 184116 - protein, 92 aa, Glycine max
  Clone ID: PAT_MRT3847_137272C.1.pep
VDPRVRGENLGRGTKITLFLKEDQLEYLEERRLKDLIKKHSEFISYPISLWIEKTTEKEISDDEDEEEKKEISVFHSGRGRVYRDGCSNSKV

SEQ ID NO: 184117 - protein, 69 aa, Glycine max
  Clone ID: PAT_MRT3847_137273C.1.pep
TLNAFAFSKLKHHSPPFFFRPHNPLVYKNGPKGFFSFKVLSTLWFQDDGQFSKCFFLYMSAFNTSTQIP

SEQ ID NO: 184118 - protein, 91 aa, Glycine max
  Clone ID: PAT_MRT3847_137274C.1.pep
MGLFSGIFLGMVLGIALMAAWQRMMTYRSAKRIAKAVDIKLLGSLNRDDLKKICGDNFPEWISFPIYEQVKWLNKQLSKLWPFVADAATLV

SEQ ID NO: 184119 - protein, 68 aa, Glycine max
  Clone ID: PAT_MRT3847_137275C.1.pep
NSRTKNTAGGGKFKGNTDIVLFVLAKRAPLYRTTGTEVPYRPEGNRTESRRHTLCLLKGQGPSVEVWH

SEQ ID NO: 184120 - protein, 60 aa, Glycine max
  Clone ID: PAT_MRT3847_137276C.1.pep
NNIIHHAQSIYGDGCEQVKLASMCPTNEKSEVNISPATALQYATFALANRLWNIAHYLLH

SEQ ID NO: 184121 - protein, 500 aa, Glycine max
  Clone ID: PAT_MRT3847_137277C.1.pep
MYFPCYVTDSFVLDEAQQITNHSQGAAKLYKKLTHLKQKNDAPERQRRDGCLGLFGRKVDTLDHYERSLGDIEDNVRMEQSSLEAKELQAAFVSFKTRFGAAIALHIQESVNPTEWITEKAPEPHDVYWPFFTVSFIKRWISKLVVYVACAFITVLFLIPVAIVQGLTHLDQLEMWFPFLKGILRLSIVSQVITGYLPSLILQLFLSFVPPTMIMLSSLQGYISWSQIQKSACTKVLWFTIWNIFFANVLSGSALYRVNVFLEPKEIPRILAEAVPSQASFFIAYVVTSGWTAIASELFRLTTLLSNFISRTFCRNNDDDFEPPLIPYHSEIPRIRLFGVLGVTYFILAPLILPFLLIYFCLGYIIFRNQLLKVYVPKYETGGEFWPTVHSSTIFSLILMHIIAIGLFGLKKLPLASILILPLPILTLLFNEYCQKRFFPIFKNYSAECLIKKDRADQNEHNMSEFYDKLANAYNDPALMRVKYSERSDSHRSPLLHSSE

SEQ ID NO: 184122 - protein, 100 aa, Glycine max
  Clone ID: PAT_MRT3847_137278C.1.pep
DAVFVFLYTTISYMFYQDTKIYISSATSAVSLGSPCCSLSLRSLTLRLCTHLPSSRSRSRRHLLRHINKIAPSSSSFSIVSSSPIIHMILIITISRGLRP

SEQ ID NO: 184123 - protein, 87 aa, Glycine max
  unsure (1)..(87): unsure at all Xaa locations
  Clone ID: PAT_MRT3847_137279C.1.pep
VNDFVCLSYIAYVTEQVMMMEKTILKRLEXYSTVATSYVLLGWYIKGSTSPAKDMEHTASILAEVALIHNPTVIFYXPYLIAAYAVL

SEQ ID NO: 184124 - protein, 76 aa, Glycine max
  Clone ID: PAT_MRT3847_13727C.1.pep
AFSVFASLLIFILFFLAQLHFSLYFSRRVGCLFPPFFLFLPSFLSSSIFFFSLPIRTQPAARKSFSLCCACCIFCF

SEQ ID NO: 184125 - protein, 89 aa, Glycine max
  unsure (1)..(89): unsure at all Xaa locations
  Clone ID: PAT_MRT3847_137280C.1.pep
TKVAVGDKIAVVLSANTCSEQWPLHQHLCSSLHLSLTSXIGXXENXXTFSXIXXXXPQPLXXXIKXSQRIXRXTGKNXFPXGGFCXXXX

SEQ ID NO: 184126 - protein, 48 aa, Glycine max
  Clone ID: PAT_MRT3847_137281C.1.pep
YKNLSHPIHVFFILFLNDRNQRPVGPLGSFNKSNPASPFIQVFDTDGL

SEQ ID NO: 184127 - protein, 73 aa, Glycine max
  Clone ID: PAT_MRT3847_137282C.1.pep
KGDKLIPFISKEDCKKGNKQETENAQKDMRVNAPPKSDKILWTPISITKFLHIPHNHYPSILIPEPSQQFFVL

SEQ ID NO: 184128 - protein, 73 aa, Glycine max
  Clone ID: PAT_MRT3847_137283C.1.pep
VKIWKPGKPGGNGPGLPGGPPRVFPGPPKSPNLGQARRPPCFFVPAVNRFFLSPLPPKEECKGFLRWFKVLKP

SEQ ID NO: 184129 - protein, 121 aa, Glycine max
  Clone ID: PAT_MRT3847_137284C.1.pep
PFNKANTREGRPYYTTTNRLRYTATPSTAHNRKRRRFHDPIKHRKQNNNKKQQQEREGTREREQPREAEEESSSKKVLEQEHTTTPTTPMPKELEQELGSTTIQRFYDARDTRHARETVGE

SEQ ID NO: 184130 - protein, 74 aa, Glycine max
  Clone ID: PAT_MRT3847_137285C.1.pep
MADIDRSFDNNVSAVSTEKSSQVSDVEFSEAEEILIAMVYNLVGERWSLIAGRIPGRTAEEIEKYWTSRFSTSQ

SEQ ID NO: 184131 - protein, 107 aa, Glycine max
  Clone ID: PAT_MRT3847_137286C.1.pep
FLSRIQSIDLQQVTQNQSMQSGRTLPCLLSRACSFWELSHSFHLLFFSNPIFDNRSSSASALLLFSCTKVLFCLSCFYFGPYHSSYFDIGCIHIGYAMQIVNCVIIK

SEQ ID NO: 184132 - protein, 49 aa, Glycine max
  Clone ID: PAT_MRT3847_137287C.1.pep
TKIARRKIRSPCTRTTTTLRNRDLDRNIYLLIIMAIHGGEFIGNIIEPT

SEQ ID NO: 184133 - protein, 156 aa, Glycine max
  Clone ID: PAT_MRT3847_137288C.1.pep
MLFANMCLLTATDLKRIFEKVDVNGDGLVSLEELNRLLQMTGNSQYSIEELESLVEKKSLGFSDFLFFYNSISEQNKGESKGSELESDLAKTFEVFDLDGDGFITSQDLESVLKRLGFWDQTHAKDCRTMIRFYDTNFDGRLDFQEFKTMMLLTKA

SEQ ID NO: 184134 - protein, 52 aa, Glycine max
  Clone ID: PAT_MRT3847_137289C.1.pep
EEKKSFKEIFCPMGHETYSFLDIGIQHLWGLILNYQRAMGEPPWFTGGAPPP

SEQ ID NO: 184135 - protein, 107 aa, Glycine max
  Clone ID: PAT_MRT3847_13728C.1.pep
HACSVYSLGGTRSISSSVASIHHCRRNASTGDWMQIVMATVEQNPLPLSLSHSHQGSTNSHRALKSVSSTEHLDMVLDGLPDEYESTISWLVADLSISPLTKLKLSF

SEQ ID NO: 184136 - protein, 100 aa, Glycine max
  unsure (1)..(100): unsure at all Xaa locations
  Clone ID: PAT_MRT3847_137290C.1.pep
FDGNFPVDSWLPIFVNCLYPVSQLPSEAVVVNVTCGSGRCGSLTTAWICIAFYRCSLLLNQMIISVLWKGXKICVLTGLDTFSQTKLVVLIGFGKVTHKN

SEQ ID NO: 184137 - protein, 102 aa, Glycine max
  Clone ID: PAT_MRT3847_137291C.1.pep
TASARIIPSVSLSTSSRSFFSLSSSSKLKCLRSSPRISHLFLNQQKAEVRVSSGRYGTVSAPKYVAYDPDQLKSARQDIKELLHSKSCDPMPHLIDRHNGST

SEQ ID NO: 184138 - protein, 56 aa, Glycine max
  Clone ID: PAT_MRT3847_137292C.1.pep
CIVISSRHLQSCNSAVSQLQFQPWITIYRRSRDMNVNKLSFNRSYLCKWYKKLLIF

SEQ ID NO: 184139 - protein, 51 aa, Glycine max
  Clone ID: PAT_MRT3847_137293C.1.pep
FTGGELSRVEGKAMKLFPLLSMASLTFLINSFIYLHIFLVWLCNWIYPFGG

SEQ ID NO: 184140 - protein, 200 aa, Glycine max
  unsure (1)..(200): unsure at all Xaa locations
  Clone ID: PAT_MRT3847_137294C.1.pep
MGIITRSSAGRKPSEIMKFFVTTFISIVLGFFIGVSVPTLSITKSRAALXGVSFPALTTKLNLPSSLLPSFDISYIQKKYAGGNAPSFVKNNNSISSKHQLINDTLKIWVPSNPRGAERLPPEIIEAETDLYLRRLWGQPSEDLTSKPKYLVTFTVGYSQRYNIDANVKKFSENFTIVLFHYDGKTTEWGEVEWSKRAIH

SEQ ID NO: 184141 - protein, 58 aa, Glycine max
  Clone ID: PAT_MRT3847_137295C.1.pep
TLFIVVSFLDREFAVRYILETTFIAYRLVQLFLYLLVLPLIAVYLVNTLIVNTVKLCS

SEQ ID NO: 184142 - protein, 84 aa, Glycine max
  Clone ID: PAT_MRT3847_137296C.1.pep
QLTAIADIVNYHDWKDVIAFFFYDEHGRNGIGVLCYNLAETPCRISYKAPLSPDTSMENISNVLVPVALAESLSIVVYANTLFG

SEQ ID NO: 184143 - protein, 201 aa, Glycine max
  Clone ID: PAT_MRT3847_137297C.1.pep
MRFSKASFYTLLLRKPHNHHHQNYVVLSRRRVVTLAVGVLILLSALYIFWPSGPDLKIVGLKLRRIKVHPVPPITIDISMLLTLRVHNVDVYFMDFGAVNVAVAYRGKMLGHVTSRRMHVRARGSSYVDADVEFAGISVLPELVLLLEDVARGIVPFDTISHAKGQLGLLFFHFPIKAKLSCEVVVSIINQTIVRQHCLHE

SEQ ID NO: 184144 - protein, 56 aa, Glycine max
  Clone ID: PAT_MRT3847_137298C.1.pep
ALRGWSCRWRPISSGGGQSCAEPATSPEPEPEPERGPVRWPLREHEAMSLGLSSFR

SEQ ID NO: 184145 - protein, 62 aa, Glycine max
  unsure (1)..(62): unsure at all Xaa locations
  Clone ID: PAT_MRT3847_137299C.1.pep
NLRIXQKKVCKFKHIQFRELVLYEIVGLQTFNNHSISHDHQGYADLXCYTHDHDQALDGHAY

SEQ ID NO: 184146 - protein, 59 aa, Glycine max
  Clone ID: PAT_MRT3847_13729C.1.pep
AQVPPTWELHSRYHHITIDAPIRSLTVKNQSICSSIWCGQLWRVLKVSQLKLKLTWKKE

SEQ ID NO: 184147 - protein, 49 aa, Glycine max
  Clone ID: PAT_MRT3847_1372C.1.pep
RIVYSVKLGFFFKKKKKKKKKKKKKKKKKKKKKKKKKKKKKKKKKKKKK

SEQ ID NO: 184148 - protein, 56 aa, Glycine max
  Clone ID: PAT_MRT3847_137300C.1.pep
PQSALPPNLILSTLHLHINPELLPAPPLMILLFLEQVVSPSTLWCIYRSYRIRISP

SEQ ID NO: 184149 - protein, 48 aa, Glycine max
  Clone ID: PAT_MRT3847_137301C.1.pep
RFRASKYQASTFFHTHYLRQNPKFLKDACIQQLVYIKILTVLFLPFDI

SEQ ID NO: 184150 - protein, 78 aa, Glycine max
  unsure (1)..(78): unsure at all Xaa locations
  Clone ID: PAT_MRT3847_137302C.1.pep
GFAGYTAQMQVNEWDTMTGGSGXGRSNMRPTVDSDPHIIWIRACRAKYLGSFLHQIPAYLTALFPGDYRWDTVGLSDR

SEQ ID NO: 184151 - protein, 51 aa, Glycine max
  Clone ID: PAT_MRT3847_137303C.1.pep
HHLLAWRLMQSLWCKLKLPSNAYSLYCIVYLSHMNCRLMIYLDVTSSRIKI

SEQ ID NO: 184152 - protein, 225 aa, Glycine max
  unsure (1)..(225): unsure at all Xaa locations
  Clone ID: PAT_MRT3847_137304C.1.pep
MVGALSVVGSSVMDSHTGPCLCVDALPTTTSVNLKSGGDVVLCKNLMGRKHNLVKHGGGGGTTMKLSSSFVDPGREWRLFVSKSCKRQRKDRRVTIVNELGGQYEDTFEDVKTQMLNYFTYKADTTVTHQLYTLMFPVFLFTGSFVASNNPADGXRFPRVRPRVRQALVERVMVTRLHLYGKWVKKCNHAEIYQEISDENLELMRERLMETVIWPTDDTNTEKIG

SEQ ID NO: 184153 - protein, 226 aa, Glycine max
  unsure (1)..(226): unsure at all Xaa locations
  Clone ID: PAT_MRT3847_137305C.1.pep
MVGALSVVGSSVMDSHTGPCLCVDALPTTSVNLKSGGDVLYKNLMGRKHNLVKHGGGTMKLSSSFVDPGREWRLFVSKSCKRQRKDRRVTIVNELGGQYEDTFEDVKAQMLNYFTYKAVRTVLHQLYEMNPPKYTWFYNFVASNKPADGKHFIRSLGKEQHQLAERVMVLIKVMITRLHLYGKWIKXCNHAEIYQEISDENLELMRERLMETVIWPSDDTNTEKIG

SEQ ID NO: 184154 - protein, 211 aa, Glycine max
  unsure (1)..(211): unsure at all Xaa locations
  Clone ID: PAT_MRT3847_137306C.1.pep
MVGALSVVGSSVMDSHTGPCLCVDALPTTTSVNLKSGGDVVLCKNLMGRKHNLXSMVVVGGTTMKLSEFIARSCKRVEALXIVNEVGGQYEDTFEDVKAQMLNYFTYKAVRTVLHQLYEMNPPKYTWFYNFVASNKPADGKRFIRSLGKEQQELAERVMVTRLHLYGKWVKKCNHAEIYQEISDENLELMRERLMETVIWPTDDTNTEKIG

SEQ ID NO: 184155 - protein, 96 aa, Glycine max
  unsure (1)..(96): unsure at all Xaa locations
  Clone ID: PAT_MRT3847_137307C.1.pep
TRTPLNLDSSKQSXXQFSIDQEGGGILVDKTGQWITAMQNTPSSNLRRVAAWKKGCXMVKRALSEKAEDKRRDXNSLGQVPRTNSNSTEQLVACKR

SEQ ID NO: 184156 - protein, 74 aa, Glycine max
  Clone ID: PAT_MRT3847_137308C.1.pep
GCLRAIPSEQFSGNQCSYSTFNLINRVELMTTRYWFLPFIQKHHDLITALWTCMERDRYCVNVRNSIFNNKILI

SEQ ID NO: 184157 - protein, 103 aa, Glycine max
  unsure (1)..(103): unsure at all Xaa locations
  Clone ID: PAT_MRT3847_137309C.1.pep
SXXGQXGXSHDPPXXIAXLHXXKWXXXNLVTXXXSXXXXXXRXPXXXCIXXPXXXQRXXXXXXXXHXXXXXXRRXXXXAXXGXXXXXXDXXXXXXXXXXXXES

SEQ ID NO: 184158 - protein, 77 aa, Glycine max
  Clone ID: PAT_MRT3847_13730C.1.pep
WTPLPHDAVEKPRPLGPARCSWGYCTRGERAELNKNLKRTKEGDRHPAQIQRSKRVVSPASSKAVSIRIIFSQRVHR

SEQ ID NO: 184159 - protein, 231 aa, Glycine max
  Clone ID: PAT_MRT3847_137310C.1.pep
LIDVMLDLQHTEPEFYTRESVKGVILAMLVAGSETSATTMEWAFSLLLNHPKKMNKVKEEIYTYVGQDQMLNGLDTTKLKYLQNVITETLRLYPVAPLLLPHESSNDCKVCGFDIPRGTMLLVNLWPLHRDVNLWVDPAMFVPERFEGEEADEVSNMIPFGIGRRACPGAVLAKRVMGHALGTLIQCFEWERIGHQEIDMTEGIGLTMPKLEPLVALCRPRQSMIKVLSNI

SEQ ID NO: 184160 - protein, 69 aa, Glycine max
  unsure (1)..(69): unsure at all Xaa locations
  Clone ID: PAT_MRT3847_137311C.1.pep
AWPLGLGGGXVAPVRLPGGVFAGPAGVSAGVVFXXXFCGGLVRFLSVCRPPPSLFCGSNKRWVAGLGSG

SEQ ID NO: 184161 - protein, 152 aa, Glycine max
  unsure (1)..(152): unsure at all Xaa locations
  Clone ID: PAT_MRT3847_137312C.1.pep
GAFAFLSPDSFAYDAVCRRFCRRIPAVVVWGGYRLAPEHRYPSQYDDGEDILRFLDEXPLVSMARTDWLWKAFLPEGSDRDHGAANVSGPNSEDLSGLYYPDTLLFVGGFDPLQDWQKKYYEWLKKSGKNAQLIEYPSSIHAFYIFPELPES

SEQ ID NO: 184162 - protein, 98 aa, Glycine max
  unsure (1)..(98): unsure at all Xaa locations
  Clone ID: PAT_MRT3847_137313C.1.pep
EFTNGSDAASNLARPNRLFPRVIEQILADMCLRATALNXNTAQLMEQNGYWVSTIICQHXVXATVEKVYLLKDVSKEIVQNLVAESNSCIHTPQERLL

SEQ ID NO: 184163 - protein, 338 aa, Glycine max
  unsure (1)..(338): unsure at all Xaa locations
  Clone ID: PAT_MRT3847_137314C.1.pep
MASETPKPKAVLPWTTRVSISFLSTLTDFSRRSNGTVNRRLMNFLDRKTQANAKPVKGVSTKDVTVDAKRNLWFRIYNPAAADADGGLPVFIFFHGGAFAFLSPDSFAYDAVCRRFCRRIPAVVVSVNYRLAPEHRYPSQYDDGEDILRFLDENRAVLPDNADLSKCFLAGDSAGANLAHNVAVRIGKSGLQLTRVVGVVSIQPXFGGEERTAAEVKFDGAPLVSTARTDWLWKAFLPDGSDRDHGASNVSGPNSEDLSGLNYPDTLVFVGGFDPLQDWQKKYCEWLKKSGKKAQLIEYPTLIHAFYIFPELPESSQLISQVKDFVTKKISDFQSNIY

SEQ ID NO: 184164 - protein, 158 aa, Glycine max
  unsure (1)..(158): unsure at all Xaa locations
  Clone ID: PAT_MRT3847_137315C.1.pep
MQSAASSSPSPEAILEWLHKEMGYRPLGTYAAGKSHLPSVDSIRRICRGNMIPVLNFLVTRAKSEKTVRNIRRNITVHGGADGAGEAKEEVRGKGARKKERSLAAVVDGSETATTREAALAERDLAXXRXVKRLRNRCEEGRRRNLERGCLEVSREGG

SEQ ID NO: 184165 - protein, 90 aa, Glycine max
  Clone ID: PAT_MRT3847_137316C.1.pep
EIPHRILPHSHSCSHHHLLCIYGSLPVTVDGILVPYIPIMCSTHGIEYSLKCGELVSLISDTMPLKCLCSLSEHLDQLCNLYECGKALQY

SEQ ID NO: 184166 - protein, 60 aa, Glycine max
  unsure (1)..(60): unsure at all Xaa locations
  Clone ID: PAT_MRT3847_137317C.1.pep
QLYWVKHYKGIKEGHTRIHVATELDXRGIDIKRCNILINYDMPDPRVAYLTMVGRAGRSR

SEQ ID NO: 184167 - protein, 36 aa, Glycine max
  Clone ID: PAT_MRT3847_137318C.1.pep
KRILVAPGLVRRFSYFLNSPSLRHFKSSPVWKYFIC

SEQ ID NO: 184168 - protein, 81 aa, Glycine max
  Clone ID: PAT_MRT3847_137319C.1.pep
TQKKQPKTIGGLRKKKKKPFMDPPTQSWGCWTLGMSQKLTNQLERAPVKGLGRANQGSKHIKRIRSQENGPSLGANFGIKL

SEQ ID NO: 184169 - protein, 89 aa, Glycine max
  unsure (1)..(89): unsure at all Xaa locations
  Clone ID: PAT_MRT3847_13731C.1.pep
IRTIXFXXAASTXPMXFLHDNVXYXRSTXXPXSXSMTLWXSQXHWRPLLHSLXXSSXFXXTNEXDLRKXMSKXGXVKNLXXXRDIXIXL

SEQ ID NO: 184170 - protein, 80 aa, Glycine max
  Clone ID: PAT_MRT3847_137320C.1.pep
GDWVYKERNIISFKTLSVLGGETQFFFFFKNQNCTPLNNRGNKITPPLGGFSFLNPPKKSLVFYSHKGDLSPLQKNPLIC

SEQ ID NO: 184171 - protein, 64 aa, Glycine max
  Clone ID: PAT_MRT3847_137322C.1.pep
AVHSWNYINRHAKLTFLDSYGGLHEYRNRHTIDMRAFLHGVLFLIQYGKHRFQFTLAVLFFFFN

SEQ ID NO: 184172 - protein, 83 aa, Glycine max
  Clone ID: PAT_MRT3847_137323C.1.pep
GVKNGGVESDRKPSLPPQKGKGAGRPPPKKGRGPKTPGQGYQRGGGPKRMGPKKGRTTNYAQRGKPNPLKTLRWEKHPHPRRP

SEQ ID NO: 184173 - protein, 120 aa, Glycine max
  unsure (1)..(120): unsure at all Xaa locations
  Clone ID: PAT_MRT3847_137324C.1.pep
HRQRAGLRAQPRLTRPRQQSADTEAQRTDXEDSSHIQIAAPNTEALSIFFRPRTRAAEGEEALAEVLSSFSFSHHAILSMSWRPLTMRGMAWQRSDWWVNLALGEEGRPCLLMLGTDTDT

SEQ ID NO: 184174 - protein, 94 aa, Glycine max
  unsure (1)..(94): unsure at all Xaa locations
  Clone ID: PAT_MRT3847_137325C.1.pep
FVNNGRREQQWRFHRKENDKELLLFLDEHRGNSFGFYKKNTKEIYTHNIIMTFITQILITHLYVLTFLILIWTTSMVSTLKKKKKKKKXKXXXX

SEQ ID NO: 184175 - protein, 54 aa, Glycine max
  Clone ID: PAT_MRT3847_137326C.1.pep
SDIVMLFIFVTRATYYFTCARGHSSTRYCETLTVLKNSWQHRISGVRAQNSILN

SEQ ID NO: 184176 - protein, 80 aa, Glycine max
  Clone ID: PAT_MRT3847_137327C.1.pep
FSKPYWANSQILELNWSDEGFITCLKTQNLLLLVQRGRVFLFFLKPIPRPQKRFTFSRFFYFGKRAKNQRILWPVGYFNF

SEQ ID NO: 184177 - protein, 171 aa, Glycine max
  Clone ID: PAT_MRT3847_137328C.1.pep
HPDNKYPSSDEIDQIISAEIPSQQDDPELYSLVKNHMVHGPCGTLNPGSPCMKEGKCSRFYPKMFQPHTVLDVDGFPIYRRRNNGHSIEKNGVIIDNRYIVPYHPRLLRKYQAHINIEWCNQSTSIKYLFKYINKGYDRVTTVLIHEDNDQTQNGGIHNDEIKEYLDCRYY

SEQ ID NO: 184178 - protein, 60 aa, Glycine max
  unsure (1)..(60): unsure at all Xaa locations
  Clone ID: PAT_MRT3847_137329C.1.pep
MVSAVHIAFAHMAAGVVIILAIGTAYPPHRAEQSMYPEYXCSIIISDHMTVLDVSFDRMC

SEQ ID NO: 184179 - protein, 90 aa, Glycine max
  Clone ID: PAT_MRT3847_13732C.1.pep
VLAGGKWGFKNGGTPPFWGWKGIQNGWNWGRFKSRHLWGSWGPKKKKKKNLFLVLKKKKEIFPPLGVPFTKGIWWGIYPPKGGLNPKLKS

SEQ ID NO: 184180 - protein, 109 aa, Glycine max
  Clone ID: PAT_MRT3847_137330C.1.pep
VNLISGTLELDCDLDLNGSVSMPQTPAAPPTRPTRSRRRVRIEEESSDEDSPSAVPTTHHSVISRSQRASKTAAMNKMSSATRSLKIDEMEELEEEESDVTSEASDAFD

SEQ ID NO: 184181 - protein, 41 aa, Glycine max
  unsure (1)..(41): unsure at all Xaa locations
  Clone ID: PAT_MRT3847_137331C.1.pep
EEGVXRGXRXKRNRTRXKARXKRKMVIRELDRGLFFPAILN

SEQ ID NO: 184182 - protein, 184 aa, Glycine max
  Clone ID: PAT_MRT3847_137332C.1.pep
EKPVSNPHFISFPFFSTMDYQFKNQNIATNMTHNLKAHYYLVKLTQLLVSVSVCSFIFSPSSLLVFLHYFKFYFSTFPFQLYTHNIDKNSMFLLCNGILVFVGITKSLSGSSCCDDNKPSTYVKDDGSQSRFSVIEANELMLEIVETEEQTSDPDEQNTVVEQVIEIENCAEEEVQENIEKIIL

SEQ ID NO: 184183 - protein, 81 aa, Glycine max
  Clone ID: PAT_MRT3847_137333C.1.pep
QNLKLFSLPFSLSTTFVELLNFGQHDISQKLLSSLCPLCYEVFLNIHYFVLCKFMKWIQFERSSFCSSWSPDLKRVSSILS

SEQ ID NO: 184184 - protein, 122 aa, Glycine max
  Clone ID: PAT_MRT3847_137334C.1.pep
VEEYIGKIGSVLKAGGWGESDINEMVEVSASGFFEGEMVVLNNQALLDALLLKADKFSDSLRKAGWSSEEVSEALGFDFRPEKERKPAKKLSPQLAERIEKLPQSVSRSRHDNLGKGNWMNE

SEQ ID NO: 184185 - protein, 67 aa, Glycine max
  Clone ID: PAT_MRT3847_137335C.1.pep
FAPKTFYYDLLKRVGELFPGPSKATRAYLHSEADVERALQKIGWTIRKRGLTTTQFYFARLIEAVPM

SEQ ID NO: 184186 - protein, 84 aa, Glycine max
  Clone ID: PAT_MRT3847_137336C.1.pep
GKLEASITATQTLNCPARKTTRPECLKLKSIQLHQSRRTPQIHHGEFRETHSRKNYRHANVSFEKYTTRKNHLRNTSELLMKLF

SEQ ID NO: 184187 - protein, 324 aa, Glycine max
  Clone ID: PAT_MRT3847_137337C.1.pep
MAFSSSLWSSLFVANPNRTAISTRFSHKPPKLPLSPAFAIPPLSTATAADVSGAIDGTTIAVVSGGFVAALAAVLSLTDPERRRQLQAEEVGGGDKEVVREYFNNSGFQRWKKIYGDTDEVNRVQRDIRLGHAKTVENTLSMLKDEGSLQGVTVCDAGCGTGSLSIPLAKECAVVFASDISAAMVAEAEKQAKEQLATSEDGSVPVMPKFVVKDLESLDGKYDTVVCLDVLIHYPQHKADGMIAHLASLANNRLILSFAPKTFYYDLLKRVGELFPGPSKATRAYLHSEADVERALQKVGWTIRKRGLTTTQFYFARLIEAVPM

SEQ ID NO: 184188 - protein, 90 aa, Glycine max
  Clone ID: PAT_MRT3847_137338C.1.pep
TKISNPAKRENKAAMFFFLFLFLMFFSFFFFSGIREEEIERRRRDQRKKRGTQMGNSPSKDEWLVIETKETNNNKNNNERSCENLNGREN

SEQ ID NO: 184189 - protein, 72 aa, Glycine max
  unsure (1)..(72): unsure at all Xaa locations
  Clone ID: PAT_MRT3847_137339C.1.pep
EILESEEKGDPNKPSGFRSVKAPVTKVAASIGNAQKLPMCDKCGTGXVGVFVKLRDRHRHPECYVCTDCGTN

SEQ ID NO: 184190 - protein, 69 aa, Glycine max
  Clone ID: PAT_MRT3847_13733C.1.pep
CGDDSSGVNMRLHLSLIVDIAKGDGDSELEFVCSAWPDCLNVEKVYMLRRGRMAARPYVGPDFRFGKWH

SEQ ID NO: 184191 - protein, 202 aa, Glycine max
  Clone ID: PAT_MRT3847_137340C.1.pep
FGSRANKNIVLATVKHGGHLAFFEGITASGLWWVRAVNEFLGELRASHFMHVQKKITKPTIPLDSSIDQGPYVNVKEDGMVAALNNEPKTDNVEEIQVIQDTDNDGLEMIPEEKVVKQDELETNAKIRGSPGIAQACVHDAAVHVITPFKRDLGQLSRQNRWSIWLLVYIAITTSWPLVGSALYIVFGKKIRDILPNGLVRK

SEQ ID NO: 184192 - protein, 70 aa, Glycine max
  unsure (1)..(70): unsure at all Xaa locations
  Clone ID: PAT_MRT3847_137341C.1.pep
IESNYDVPEGVDIRXXYDAEFXAKMPHKXWLEIRXXXQREFRNHIRYXLXCRRXANKXXNEGALXEFXPA

SEQ ID NO: 184193 - protein, 94 aa, Glycine max
  unsure (1)..(94): unsure at all Xaa locations
  Clone ID: PAT_MRT3847_137342C.1.pep
AHYILKPSSISGKFFEMRIVHWTLENKKKNRVFXFFFIQPFIHFFLFIFFPSHHLLHLKFLFLSFSCKKNISLLIYILNFSDINIMEPLLVSCH

SEQ ID NO: 184194 - protein, 310 aa, Glycine max
  Clone ID: PAT_MRT3847_137343C.1.pep
WYSTYQMLVAASELQEVFSCLDTSDPDYKGAPSMQDWKLVETLCTYLKPLFDAANILTTATHPTVITFFHEVWKLQLDLSRAVVSEDPFISNLTKPMQQKIDKYWKDCSLVLAIAVVMDPRFKMKLVEFSFTKIYGEDAHEYVKIVDDGIHELFHEYVALPLPLTPAYAEEGNAGSHPRAGESPGGTLMPDNGLTDFDVYIMETSSHQMKSELDQYLEESLLPRVPDFDVLGWWKLNKLKYPTLSKMARDILSVPVSSVPPESVFDTKVKEMDQYRSSLRPETVEAIVCAKDWMQYGAAEASNAIVKMEF

SEQ ID NO: 184195 - protein, 62 aa, Glycine max
  unsure (1)..(62): unsure at all Xaa locations
  Clone ID: PAT_MRT3847_137344C.1.pep
XLXRRXFWDXXFXLLXLXLLTXASDNFLERFFLSEEEDFPIGAXCKTKPSKKEXXNQKKKEK

SEQ ID NO: 184196 - protein, 763 aa, Glycine max
  Clone ID: PAT_MRT3847_137345C.1.pep
MQDIHLTDIKPLPHNHLAQYDTLPSNHHMDHSEAVSNHQLTDSETLSHEQLANSHLLPHYGLQTSETLHDHPIVNSRPHYEIVNASNIPSYEIINAETPLNSEEPTPETQPSKRRKKKSIVWEHFTIETVSPGCRRACCKQCKQSFAYSTGSKVAGTSHLKRHIAKGTCPALLRGQDQNQFSPYTPRSRGSDAAGNASSAPKRRYRSPNTPYIIFDQDRCRHEIARMIIMHDYPLHMVEHPGFVAFVQNLQPQFNMVTFNTIQGDCVATYLMEKQCVMKYFDGLPGRVCLTLDVWTSSQSVGYVFITGHFVDSDWKLQRRILNVVMEPYPNSDSALSHAVAVCLSDWGLEGRLFSITCNQALSNVALEHLRPLLSVKNPLILNGQLLIGNCIARTLSNVADDLLSSVHLTVKKIRDSVKYVKTSESHEEKFLDLKLQLQVPSERKLLIDDQTKWNTTYQMLVAASELQEVFSCLDTSDPDYKGAPSMQDWKLVETLCTYLKPLFDAANILTTTTHPTVITFFHEVWKLQLDLSRAIVNEDPFISNLTKPMQQKIDKYWKDCSVVLAIAVVMDPRFKMKLVEFSFTKIYGEDAHEYVKIVDDGIHELFHEYVTLPLPLTPAYAEEGNPGNHPKTGGSPGGTLMSDNGLTDFDVYIMETSNHQMKSELDQYLEESLLPRVPDFDVLGWWKLNKLKYPTLSKMARDILSVPVSSLPPESVFDTKVKEMDQYRSSLRPETVEALVCAKDWMQYGAAEASNALVKMEF

SEQ ID NO: 184197 - protein, 63 aa, Glycine max
  Clone ID: PAT_MRT3847_137346C.1.pep
YLFNKKNTNLADQFRSRTGEVRSNLDLLSWPWCPCHHCLNLPHFPWTLGHIVATSGSNKLNTS

SEQ ID NO: 184198 - protein, 496 aa, Glycine max
  Clone ID: PAT_MRT3847_137347C.1.pep
YYFGLFLYDVFREEHPKLWMELHVKNREKLLTSLRQHLSDSSRSLHGFVLLQGGEEQTRYDTDHLELFRQESYFAYLFGVIEPGFYAAIDVATGNSILFAPRLPSEYAVWLGEIKPLSYFKEHYMVTTCCFSDEIESVLQQHYQCSGKPLLFLLHGLNTDSDNYSKPAQFQGIDKFDKDLTTLHPILTECRVIKSELEIALIQYANDISSEAHVEVMRKTKVGMKEYQLESIFLHHTYMYGGCRHCSYTCICATGDNSAVLHYGHAAAPNDKILEDGDMALFDMGAEYHFYGSDITCSFPVNGKFTSDQSLIYSAVLDAHNAVISAMKPGINWVDMHILAEKVILESLKRGHVILGDVDDMMASRLGAAFMPHGLGHFLGIDTHDPGGYLKGLERRKEPGLKSLRTIRDLREGMVITVEPGCYFIDALLLPAMNSPETSKFLNQEAINRFKGFGGVRIESDVLVTATGCYNMTKCPREMREIEAVMAGAPWPAQKI

SEQ ID NO: 184199 - protein, 62 aa, Glycine max
  Clone ID: PAT_MRT3847_137348C.1.pep
CVLLGLVGLVCQPKLVDVLPTAVPTVSVQVYVCCLVRLLTFTDVVRLSSFGMCYLLNLVLHC

SEQ ID NO: 184200 - protein, 91 aa, Glycine max
  Clone ID: PAT_MRT3847_137349C.1.pep
TKRKNLFMDFRSKTKYGFYSMGDGTHLPNGGREKRKFLNTKPVTSTEYTGVRTLEPFGWKTPFWEESKNCPNLRWKKKRGATVLIQNSLGW

SEQ ID NO: 184201 - protein, 78 aa, Glycine max
  Clone ID: PAT_MRT3847_13734C.1.pep
LHTFTVGTVGTAVSAFPPTGFSPVLSVVLSDPNEVESTNVSSLQVKKLKPRNLLTCTQIKKQAVVLFYTSVYTLVTFI

SEQ ID NO: 184202 - protein, 83 aa, Glycine max
  Clone ID: PAT_MRT3847_137350C.1.pep
KMFFEKITPRGGPNRGVLYKNQTSHGPWGKKPRLKFLFWTGGDTIVFFPTQAPLKRVLINKTSPLKPFFFSKPPRGGAKGFNW

SEQ ID NO: 184203 - protein, 43 aa, Glycine max
  Clone ID: PAT_MRT3847_137351C.1.pep
QLGVHPLLLVRITRVIERFTIVSVERNVYHGCFMHASQPIKCS

SEQ ID NO: 184204 - protein, 91 aa, Glycine max
  Clone ID: PAT_MRT3847_137352C.1.pep
CLFFYLFFLLFSSLHSLTEERVLTTSNGRRETPQSTRLFQPTHGTRIQKPLDSNTGYDSTSYSKPSDDYDSGVNTPSQVTSSIMTMKGTTH

SEQ ID NO: 184205 - protein, 55 aa, Glycine max
  Clone ID: PAT_MRT3847_137353C.1.pep
DLGSRVSQWFSGIDFRTLEDRTCITSTGLHVSKDVTVRHIWLRHPNIPNTEVLLR

SEQ ID NO: 184206 - protein, 76 aa, Glycine max
  unsure (1)..(76): unsure at all Xaa locations
  Clone ID: PAT_MRT3847_137354C.1.pep
MLQVTYPYRQDLKPISKKIEISKPNTIYRTPNSSSLITAVLPAVWWRVTSTSHLDMXIFDAYVGALSVPVVIAITD

SEQ ID NO: 184207 - protein, 89 aa, Glycine max
  Clone ID: PAT_MRT3847_137355C.1.pep
TAREDDRRESKNKKIIKFDNFNQTFCSSCTKWIINAIFIIDTLEDVVYLIYCFKLHVAISNIMGNCLRIWPQCFVETSKYCGRNCDCGL

SEQ ID NO: 184208 - protein, 63 aa, Glycine max
  Clone ID: PAT_MRT3847_137356C.1.pep
DSRVSTVVQILISLYAYFFQDYYCKRVTYCHVFTSFPVIRIIIIVLHFHEYFGCFQVVVMGKH

SEQ ID NO: 184209 - protein, 142 aa, Glycine max
  Clone ID: PAT_MRT3847_137357C.1.pep
PVIVRLQRQSDARHSDDYYLNKTLRAQLRSQKKRVTEEENASKKRGLGIRLLPATEQDSATAKSVKFSAKFDKNRKDKRALISSESIFSGVSSYSMSDKRKRELESKRRKICATSASSLLAGRVKPSSWSQPSSKQKGTVRC

SEQ ID NO: 184210 - protein, 279 aa, Glycine max
  Clone ID: PAT_MRT3847_137358C.1.pep
MINLLTTLLIPSLRSLLRFPGGLHVSAGRVPAVLPQNPFLLSGPFCPRNLLPVGAEGSWDPRGRFSETKDGLDAAKDPSKSEALGCSPKVGKSSPTSSTMNSKSLGHDCRSEDTEIPNSFTKHGVMADSNIHTKNENCPSDAARDENQKKSVKERPKSSLNSNSKGLQSSRSMQNSVPKQVNSDARDSVHVSSSKPLIHQTASILGSSESNASLHHQKVLQVQNKISSSAPQKVEKLNQTNIHTSSKLNQSHVSSVNPSPISNSSMLSDEELALLLDQE

SEQ ID NO: 184211 - protein, 73 aa, Glycine max
  Clone ID: PAT_MRT3847_137359C.1.pep
KKMRGLFFIGESEFLKGYVFGVFLSRVICFCKIKSPLLLFFKNHGFLNTWLSLKEEGDSLLIWSNINLCAFVA

SEQ ID NO: 184212 - protein, 74 aa, Glycine max
  Clone ID: PAT_MRT3847_13735C.1.pep
IVLKFKFPESRYRRYACPNRSRLSLNSAIPGTVFVSTAWLIQLLLFKFGHHFTLPWFLALLSVPPSLASRAFAP

SEQ ID NO: 184213 - protein, 108 aa, Glycine max
  Clone ID: PAT_MRT3847_137360C.1.pep
SLLGSSEEKLQCTVCLEDVEVGSEAKEMPCKHKFHGDCIVSWLKLHGSCPVCRFQMPSEDSTLEANVGVGNGDNQNSELVRAGEERPRNGRRNWFPVLQSFNNFLPYP

SEQ ID NO: 184214 - protein, 108 aa, Glycine max
  unsure (1)..(108): unsure at all Xaa locations
  Clone ID: PAT_MRT3847_137361C.1.pep
LRREPLTAPDEAAILTVTSSLPPVGGLYIVPSEDKHHSYLVGSGQCSSLVSQSVQAPPDAVWSVFRRLHKPQTYKHLMKSCAAKKPFHMARRITREXEVISGLPAATR

SEQ ID NO: 184215 - protein, 247 aa, Glycine max
  Clone ID: PAT_MRT3847_137362C.1.pep
TRPERVAGLMKKQKKLQAMGIIGRQDDWKTWGQEAQVKVGSRLMQLLIETAYIQPPTNQIGDGPPDIHPAFRHTLRTLSNESQRETRRYGVIECDPLVQNGLEKSARHMVIPYMPMLVPPINWTGYDKGAYLFLPSYVMRVHGAKQQREAVKRAPKSQLDPVFEALNTLGNTKWRVNKRVLCVIDQIWANGGRLADLVDRENVPSPKEPDTIDEAEIRKWKWKVKAVKKENSERHSQRCDIELKLAV

SEQ ID NO: 184216 - protein, 86 aa, Glycine max
  Clone ID: PAT_MRT3847_137363C.1.pep
SILLLHRLASGRICFILGQKCSAVRDLTFQFLSRKQQKDSLFLLVRQCPRLFVLGAQLEFFSVLSWLVFSGLYVPSANSVRKKNSR

SEQ ID NO: 184217 - protein, 36 aa, Glycine max
  Clone ID: PAT_MRT3847_137364C.1.pep
GKKPQGARARALPTVGVALCRNHNSRRGLCACKGGV

SEQ ID NO: 184218 - protein, 171 aa, Glycine max
  Clone ID: PAT_MRT3847_137365C.1.pep
VLHLHDEDFSVRLACRNTLKRVCPLMEIEGMLAVLNTHSFLSDHRSDYEDFLRDIAKQFTQHLRPRVDSYMASTVQAFDAPWPIIQANAIYFCSSMLSLSDNQHILAVYHSQVFGMLVGKLSRSPDAVVRATSSAALGLLLKSSHLCSWRAVELDRLESTSRNHDVESTKN

SEQ ID NO: 184219 - protein, 222 aa, Glycine max
  Clone ID: PAT_MRT3847_137366C.1.pep
MVDTDGFGTGGDVGGTPKTGDLRQLGNVPTVFDASQYAFFGSDTAVQEVELGGLDDDDGLLESNEEEFILNREEADNLKSLSDIDDLSTTFWKLNKVVSEPKGAGFIGEQGSRENSAAEWAHKDDVLNWYDQNAYDNEGSLDGRRMPSQPHSSLSQLHEAKALYRTSSYPEQQRQQQHHQLQPSESAPNWFDQHLYGTETNQDGKRWSSQPHSTIAHLQESR

SEQ ID NO: 184220 - protein, 43 aa, Glycine max
  Clone ID: PAT_MRT3847_137367C.1.pep
IISISNVALIDRFQHLFLIPTSVWVLFDFKGYYLNFIYANIII

SEQ ID NO: 184221 - protein, 134 aa, Glycine max
  Clone ID: PAT_MRT3847_137368C.1.pep
GRTEEAEKFMSKLSETGQAVKTHDTSQELDASSDIMYSQQISDLCTQGKYKEAMKLFQESELTGGGLVRVSLFLLFLRWAPWREGVSPGVLPLCTPAWPRHPAGHVAPASPACAATSSTPRCALRLCVLVSPAK

SEQ ID NO: 184222 - protein, 64 aa, Glycine max
  Clone ID: PAT_MRT3847_137369C.1.pep
SQLLTCTILQGDIINICMKFPATNRAISHLQVIKTEHPMRGCWTIRWSLVPQINGQADSLTLLW

SEQ ID NO: 184223 - protein, 342 aa, Glycine max
  Clone ID: PAT_MRT3847_13736C.1.pep
MGSLPVPAFPSKHCLDESSHIDEATLSALFKSQQSHLNFFFDHIDHSQTLAFTRALLNAAGTVFFTGVGKSGFVAHKISQTLVSLGVRSAFLSPVDALHGDIGILTNRDVLILLSKSGATEELLRLVPCARAKGALLIALTSVEGNALAAACDMSVHLPLQRELCPFNLAPVTSTAIQMVFGDTVAIALMEARNLTKEEYAANHPAGKIGKSLIFKVKDVMKKQDELPICRESDLIMDQLVELTTKGCGCLLVIGDGYRLIGTFTDGDLRRTLRASGEAIFKLTVGQMCNRNPRTIGPEAMAVDAMKKMEAPPSPVQFLPVINDESILIGIVTLHGLVSAGL

SEQ ID NO: 184224 - protein, 75 aa, Glycine max
  Clone ID: PAT_MRT3847_137370C.1.pep
RVLHTVLYGKTIGYSMFNEPVNKVQSRSKILPLLRKRTVMGGLNLIPSNNGLFQTLMSIVRSELLRTGLSQYYIF

SEQ ID NO: 184225 - protein, 316 aa, Glycine max
  Clone ID: PAT_MRT3847_137371C.1.pep
MERKNRILVFGGTGYIGKYLVKASVSLGHPTLVYTRPLNAQTPPSKAQVCKEFTNFGVTLVHGELEHDQILAVIKQVDIVICTLASPQVMEQLKIIDAIKVAGNIKRFIPSGFGAEEDSVKPLPPFQAVLDKKRKIRREIEAAGIPYTSISANCFGAYFVNYLLHPYENVKDITVYGNGEAKAVLNYEEDIAMYTVKAANDPRTCNRVVIYRPQKNIISQNELTSLWEQKCGQTFRKDFVSEEEIVKLSQSLPSPHNIPVSILHSVFVRGDLVRFEIGEDDLEASQLYPDYNYTSIDELLDIFLVDPPAPASAAFE

SEQ ID NO: 184226 - protein, 326 aa, Glycine max
  Clone ID: PAT_MRT3847_137372C.1.pep
MLSICNLAMEAIRKSRILIFGGTGYIGKYMVKASVTLGHPTFVYTRPLDAQTPSSKAQLCKEFNSMGVTLVHGELEHDQILAVIKQVDIVICSLPYPQVMEQLKIIDAIKVAGNIKRFLPSGFGAEEDSVKPLPPFQAVLDKKRKIRREIEAAGIPYTSISANCFGAYFVNYLLHPYENVKDITVYGNGEAKAVLNYEEDIAMYTVKAANDPRTCNRVVIYRPQKNIISQNELTSLWEQKCGQTFHKAFISEEEIVKLSQSLPSPHNIPVSILHSIFVKGDLVRFEIEEDDLEASQLYPDYNYTSIDQLLDIFLVDPPPPASAAFE

SEQ ID NO: 184227 - protein, 529 aa, Glycine max
  unsure (1)..(529): unsure at all Xaa locations
  Clone ID: PAT_MRT3847_137373C.1.pep
NPRPNCERGAKPCPSTASALSSLRSLSASAAAVAPSASSPPAPLPPTAMIYDRAAEAVKSKLRQLENPDPRFLKHGSPRPTLSDHTRILSSPETRVTTLPNGLRIATESTLSARTATVXGVWIDAGSRFETEETNGTAHFLEHMIFKGTERRNARELEEEIENMGGHLNAYTSREQTTYYAKVTDKDVPQALDILADILQNSRFEETRINRERDVILREMEEVEGQTEEVIFDHLHATAFQYTPLGRTILGPAQNIKTITKAHLQSYIQTHYTAPRMVIAASGAVKHEDIFEQGKKVIYKLXTDPTTTSQLVSREPAIFTVSGGILLGDDINPSHFAATFFGVLWKDSKRWKIHGLRAILGSWNKAAGGGKHMGSELAQRIGIYEVAESIMAFNTNYKDTGLFGVYAVAKPDCLDDLSYAIMYETTKLAYRVSEDDVTRARNQLKSSLLLHIDGTSPVAEDIGRQLLTYGRRIPFAELFARIDAVDASTIKRVANRFIYDKDVVIAATGPIQRLPDYNWFRRRTYWNRY

SEQ ID NO: 184228 - protein, 128 aa, Glycine max
  unsure (1)..(128): unsure at all Xaa locations
  Clone ID: PAT_MRT3847_137374C.1.pep
FGVYAVAKPDSLDDLSYAIMYETTXKLAYRVSEDDVTRARNQLKSSLLLHIDGTSPVAEDIGRQLLTYGRRIPFAELFARIDAVDASTIKRVANRFIYDKDVVIAAMGPIQRLPDYNWFRRRTYWNRY

SEQ ID NO: 184229 - protein, 64 aa, Glycine max
  unsure (1)..(64): unsure at all Xaa locations
  Clone ID: PAT_MRT3847_137375C.1.pep
ARDSLTPCSGEDFMKSRSQYARHSVMLFDAXRXVPKNKNMDYGFLLLLLFFHIFLPHSCWKPKW

SEQ ID NO: 184230 - protein, 227 aa, Glycine max
  Clone ID: PAT_MRT3847_137376C.1.pep
MASTTLSPTTPSQLCSGKSGIFSPSQALLVKPVKRQMMGKSKGMRIACQATSIPADRVPDMGKRQLMNLLLLGAISLPSAGMLIPYTYFFVPPGSGSSAGGTVAKDAVGNDVIAENWLKAHGPGDRTLAQGLKGDPTYLVVEKDRTLATYAINAVCTHLGCVVPWNQAENKFICPCHGSQYNDQGRVVRGPAPLSLALAHCDIDDGKVVFVPWVETDFRTGDAPWWA

SEQ ID NO: 184231 - protein, 111 aa, Glycine max
  unsure (1)..(111): unsure at all Xaa locations
  Clone ID: PAT_MRT3847_137377C.1.pep
MAIVESVGKIPLQDPPEEEFCAADLTWTKFGNSEHHDEVPFIPYDRVDAFIIGECSNVECTTRFHIERGKKPTIRSLKDYKDDXYLEYRLYWCSFGPXIMGGGLLPNRGID

SEQ ID NO: 184232 - protein, 67 aa, Glycine max
  Clone ID: PAT_MRT3847_137378C.1.pep
FLLGHFKKVNANTIVDNASESCRRLRHRRPPFFVGPAHQASPILTSPSLRTRFSSPRKRKDVRVRKL

SEQ ID NO: 184233 - protein, 72 aa, Glycine max
  Clone ID: PAT_MRT3847_137379C.1.pep
GGGFFFHNCFVFGVVWDNSESITSSYGSFFFLYGLFQPSGVGPFKFCWGPPPPPVGYVGFILDIWGPPPPNI

SEQ ID NO: 184234 - protein, 139 aa, Glycine max
  unsure (1)..(139): unsure at all Xaa locations
  Clone ID: PAT_MRT3847_13737C.1.pep
LIXQAPDKFVXAAAINPVXXXXLMIXXXDIPDWCYVEARGTIAKNCFTEPPSADDLTLFQSKSPISHVSKVKAPTLFLLGAQDIRVPIFDGLQYARALKEKGVEVKIIMFQNDVHALKRPQSDLECFLHIGVWFNKYCK

SEQ ID NO: 184235 - protein, 86 aa, Glycine max
  Clone ID: PAT_MRT3847_137380C.1.pep
PIRSAPATKWPYHFQTWVSYITIFQPRRHLLGQFNIIFGCPRTHWVLFFEQGPKSLSNFLVPVTKPIFLGPKGPRSETSNFCFIPF

SEQ ID NO: 184236 - protein, 104 aa, Glycine max
  Clone ID: PAT_MRT3847_137381C.1.pep
TVFVFVSALSDSVAVKVLEGVSVSVVGFFAVEVSLLLEPVNGEGVNSAAISRVSGSEQVTKRVIPIEHCVVAVFSSHSFWVLLGNSQRSGPALDYGSVSRGSIG

SEQ ID NO: 184237 - protein, 175 aa, Glycine max
  unsure (1)..(175): unsure at all Xaa locations
  Clone ID: PAT_MRT3847_137382C.1.pep
MDSEDDMHDANDVESLDDDFYSGETEDAPMDYYSDYDDEADDYFDDADDSDRVESRRPEQNFTILRELDIRQRQEDDIARVAAVLSIPRVSASILLRHYNWSVSKVHDAWFADEDQVRKTVGLLEKPVFQILILRELTCGICFEMIPRARVESXACGHPXCYSCWAGYIGTSIND

SEQ ID NO: 184238 - protein, 66 aa, Glycine max
  Clone ID: PAT_MRT3847_137383C.1.pep
VSSFKGASVKVEPDTLSFTRKYQKLSYKVTFTTQSRQTEPEFGGLVWKDGVQKVRSAIVITYLPPI

SEQ ID NO: 184239 - protein, 59 aa, Glycine max
  Clone ID: PAT_MRT3847_137384C.1.pep
RLQKTSLNWVGMPEENNGFNPWVKENYPKKNTKFETHNAPVVPEHHFALSAWVSKNVKE

SEQ ID NO: 184240 - protein, 44 aa, Glycine max
  Clone ID: PAT_MRT3847_137385C.1.pep
NYLFQVNSLNKHIRKKIKFLFYLKKCLLEKNKNKQTNPIFKSKN

SEQ ID NO: 184241 - protein, 139 aa, Glycine max
  Clone ID: PAT_MRT3847_137386C.1.pep
APPRDKVVILGDGNVKAVYVKEEDIGTYTIKAVDDPRTLNKTLYVRPPANVLTFNELVSLWENKIKSTLEKVYIPEDQLLKYIQESPFPANLMLALGHSMHVKGDCTNYEIDPSFGVEASNLYPEVKYTTVDNYLNAFV

SEQ ID NO: 184242 - protein, 72 aa, Glycine max
  Clone ID: PAT_MRT3847_137387C.1.pep
HVNDDPANSDYVDMDRELSEVIALTDELLATANQNEIAAPPNNAAASPVLAIHNENQLRDTTSDHHEKLPVG

SEQ ID NO: 184243 - protein, 88 aa, Glycine max
  Clone ID: PAT_MRT3847_137388C.1.pep
GKGVKMVGFRVLFLIKILINRLFYGGGFGGIKAPSLGDQYGPPAFPLGLDRGAFALGSFGGGGAPNWDLRGFSEAPTPLGGFRGLPGL

SEQ ID NO: 184244 - protein, 53 aa, Glycine max
  Clone ID: PAT_MRT3847_137389C.1.pep
RLERRRLRCRTIVYPIPTPTALLRTRALAERGTGMASRAGITLANRTRLRSSG

SEQ ID NO: 184245 - protein, 142 aa, Glycine max
  unsure (1)..(142): unsure at all Xaa locations
  Clone ID: PAT_MRT3847_13738C.1.pep
AVNPRVRFDDNGRNFNKDGDLVDWWTQQSASNFKEQSQCMVYQYGNFSWDLAGGQHLNGINTLXENIADNGGLGQAYRAYQNYIKKNGEEKLLPGLDLNHKQLFFLNFAQVWCGTYRPEYAVNSIKTDVHSPGNFRIIGTLQ

SEQ ID NO: 184246 - protein, 48 aa, Glycine max
  Clone ID: PAT_MRT3847_137390C.1.pep
LAQEHSLCLKFHNGQLLKGHMTNNLIWCGTFTSRQRSMRVDFINSLSS

SEQ ID NO: 184247 - protein, 320 aa, Glycine max
  unsure (1)..(320): unsure at all Xaa locations
  Clone ID: PAT_MRT3847_137391C.1.pep
MAVDLANIRMEENMAIQEAASAGLKSMEHLIRVLSSQIPSASSSSSNAHHHRLNLNHLDCAEITDFTVSKFKQVINLLNRTGHARFRRAPSHPSPSISPSQPQPQPQPQPQTLTLDFAKPVMVKSNPNPNPSSTDLSVSQYSKTKDTTTFSISPPMSTTTSSFLSSITADGSVSDGKIGPXILAGXKXPLXSSHRKKWYDATLSXGESSSSAHCHCSKRRKSRVKRMIRVPAISSKIADIPADEYSWRKYGQKPIKGSPYPRGYYKCSSVRGCPARKHVERAQDDPNMLIVTYEGEHRHPQPRLPETSAGAAADFVSQPV

SEQ ID NO: 184248 - protein, 96 aa, Glycine max
  unsure (1)..(96): unsure at all Xaa locations
  Clone ID: PAT_MRT3847_137392C.1.pep
DVRTHLSSLYSRLQKVTGRAIIHLEMVTLIIVHFFLILLAFIASTADATLFXPPSFITQQLPNIHYAHINSSLTACPNPCLISKSNPHHSPNAYTI

SEQ ID NO: 184249 - protein, 41 aa, Glycine max
  Clone ID: PAT_MRT3847_137393C.1.pep
MPQLGLIALRLKVIQVLVFPWAFRTHGNGTSLIFITLKHGC

SEQ ID NO: 184250 - protein, 84 aa, Glycine max
  Clone ID: PAT_MRT3847_137394C.1.pep
FTKGGKWLVWKFEGGRSLADYMADQSFPSNLESIMFGRVLQGVDSSKRNALIIKQIMRPIITSLRKIQDIGIVHRDVEPPNWWF

SEQ ID NO: 184251 - protein, 50 aa, Glycine max
  Clone ID: PAT_MRT3847_137395C.1.pep
MIILYAGSRAKDRPWYGSYELNIPPPSVKTSILGMTCTVIRKTRSSKRTR

SEQ ID NO: 184252 - protein, 146 aa, Glycine max
  unsure (1)..(146): unsure at all Xaa locations
  Clone ID: PAT_MRT3847_137396C.1.pep
TLTYEDLPSHLVLEILCSGRLSAMDLVCLELTSKTFGGSHGLHPFKFKSLVAFAAFQLCASHVTYARMGLNSQRELYDRCGGNWKRVLRFLQSVEQSSQMVETSSGNVXFIISNYYFCLLLVKKKKVFSCVNYELPLLLSSLGMQC

SEQ ID NO: 184253 - protein, 301 aa, Glycine max
  Clone ID: PAT_MRT3847_137397C.1.pep
MRLGKPTGTLSMEHRTLELNLASAKDLKDLNIFSKMDVYAVLSLSGDQKTKTPVHRNGGTNPTWNFPVKFTFDESVARQNRLALEIKIRSERALATDKDIGQVHVPLMELLKQPGDGKSFQHVSYQVRKPSGKPKGALNFSYKFGDEFAAPAKVSAPAPTSPSHKVDPVTAYPAPAVGSTSSAAYPAMYPPPPPPQYAYPPPPQPAHGYGYAPQHGYGYAPQAAYGYAPQAAYGYAPQPGYGYAPPPPAAAAVQRPGKNNLGMGLGAGLLGGALGGLLIGDMISDAGSYDAGFGDFGGFDF

SEQ ID NO: 184254 - protein, 104 aa, Glycine max
  unsure (1)..(104): unsure at all Xaa locations
  Clone ID: PAT_MRT3847_137398C.1.pep
MNLKNMKVPNVRGGGGISALLKLGIVGGIGLYAAANSLYNVEGGHRAIVFNXGVKDKVYPEGTHFIIPWFEKPVIYDVRAXPHLVLVESTSGSRDLQMVNNTCS

SEQ ID NO: 184255 - protein, 289 aa, Glycine max
  Clone ID: PAT_MRT3847_137399C.1.pep
MNLKNMKIPNVPGGGASSALLKLGLLGGIGLYAAANSLYNVEGGHRAIVFNRLVGVKDKVYPEGTHFMIPWFERPVIYDVRARPHLVESTSGSRDLQMVKIGLRVLTRPLPNQLPTVYRTLGENYNERVLPSIIHETLKAVVAQYNASQLITQREAVSREIRKILTERAANFNIALDDVSITSLTFGKEFTAAIEAKQVAAQEAERAKFVVEKAEQDKRSAVIRAQGEAKSAQLIGQAIANNPAFITLRKIEAAREIAHTISNAANKVYLNSDDLLLNLQEMKLEPGRK

SEQ ID NO: 184256 - protein, 114 aa, Glycine max
  unsure (1)..(114): unsure at all Xaa locations
  Clone ID: PAT_MRT3847_13739C.1.pep
RVRTRLKTPLKRLQKYLVEVELESRADIRTIVKTHHTNLLHLLFFYTNRPKSLLTYXYIPNASLXTLSSELXSHKPPLLYDRVRISLDISPWILHLHXEFDAPILYCDIKPHNI

SEQ ID NO: 184257 - protein, 158 aa, Glycine max
  Clone ID: PAT_MRT3847_1373C.1.pep
TRPKHQNDDVFLDALPHCPFHHCSGAADKSPESSSSSSILSDPNPPSPPPATTIRRRSTRRNSPVRETTNTGSSHNSTTGNVTNLRSDRNLGTSNGNENFPEKCDSNREKVRPFQSPSVGTEEGNEESTLTTAENEDGVTDSADSAVEFSNSPLNSLD

SEQ ID NO: 184258 - protein, 79 aa, Glycine max
  Clone ID: PAT_MRT3847_137400C.1.pep
FVKPQFKIRYDTPFKRLGLEGHSSRAKKKKNKALVPYIIQAIYFGVLFILHKVNGLLLLGFNCDNLAFFDLTQTTIYCY

SEQ ID NO: 184259 - protein, 113 aa, Glycine max
  unsure (1)..(113): unsure at all Xaa locations
  Clone ID: PAT_MRT3847_137401C.1.pep
FVAPKQIFPPRTKXAPCHGTSAASGKAGAIVGAFGFLYAAQSRHPDKVDHGYPTGIGVKNSLIVLGVINFFGMVFTLLVPESKGKSLEELSGENEDDGAEAIEMAGSARTVPV

SEQ ID NO: 184260 - protein, 387 aa, Glycine max
  unsure (1)..(387): unsure at all Xaa locations
  Clone ID: PAT_MRT3847_137402C.1.pep
MAGGQLGVLNALDVAKTQWYHFTAIVIAGMGFFTDAYDLFCISLVTKLLGRLYYTDITNPKPGALPPNVQAAVTGVALCGTLAGQLFFGWLGDKMGRKRVYGLTLMLMXVCSLASSLGTHTWDKVKXLTDENNKYGLFXEFAKRHGLHLVGTTVTWFLLDIAFYSQNLFQKDIFTAIGWIPPAQDMNAIHEVYRIARAQTLIALCSTVPGYWFTVAFIDIIGRFAIQLMGFFFMTVFMFALAIPYNHWKNHNNIGFVVMYSFTFFFSNFGPNATTFVVPAEIFPARLRSTCHGISAAAGKAGAIVGAFGFLYAAQSTNPNKVDHGYPTGIGVKNSLIVLGVINFFGMVFTLLVPESKGKSLEELSGENEDDGAEAIEMAGSARTVPV

SEQ ID NO: 184261 - protein, 107 aa, Glycine max
  Clone ID: PAT_MRT3847_137403C.1.pep
VSTKKNHHHCGSRKGWEGFKKRKKKRAFEGSPPPIPGNPQAPFLEPGKKGGAKKKSLFFLKKSRGGGKIFFKKIFFETPYGPGAPLEKTQAGQGFCFPPQRGRKALF

SEQ ID NO: 184262 - protein, 215 aa, Glycine max
  unsure (1)..(215): unsure at all Xaa locations
  Clone ID: PAT_MRT3847_137404C.1.pep
RIARAQTLLALCSTVPWYWFTVALIDIMGRFTIQLMGFFFMTVFMFALAIPYNHWKNHNNIGFVVMYSFTFFFSNFGPNATTFVVPAEIFPARLRSTCHGISAAAGKAXAIVGAFGFLYAAHSTNPDTYMAEKAGAVGAFLYASXEPRKVDHGYPXGIGVKNSLIVLGVITFFGMVFTLLVPESKGKSLEELSGENEDDGAEAIEMAGSARTVPV

SEQ ID NO: 184263 - protein, 116 aa, Glycine max
  unsure (1)..(116): unsure at all Xaa locations
  Clone ID: PAT_MRT3847_137405C.1.pep
FPTPAKSVVGTLMSTLTTMKFSGSRTMYEHVIEMTNIAARLKTLGIXMVVNENFLVQFILNSLPSEFGPFXMNYNTMKDTWNVHELHSMLVQKETRLKNQGSHLVHYVSHQGNQGA

SEQ ID NO: 184264 - protein, 413 aa, Glycine max
  unsure (1)..(413): unsure at all Xaa locations
  Clone ID: PAT_MRT3847_137406C.1.pep
MAGGQLGVLNALDVAKTQWYHFTAIVIAGMGFFTDAYDLFCISLVTKLLGRLCYTDITNPKPGVLPPNVQAAVTGVALCGTLAGQLFFGWLGDKLGRKRVYGLTLMLMVLCSIASGLSFGDTPKGVMATLCFFRFWLGFGIGGDYPLSATIMSEYANKKTRGSFIAAVFAMQGFGIMAGGIVALIVSSAYDHKYDLPSYKDNPAGSKVDSLDYVWRIILMFGAVPAALTYYWRMKMPETARYTALVAKNAKQAASDMSKVLQVEVEAEEDKLQHMVESENQXMGLFSKEFAKRHGLHLVGTTVTWFLLDIAFYSQNLFQKDIFTAIGWIPPAQDMNAIHEVYRIARAQTLIALCSTVPGYWFTVAFIDIIGRFAIQLMGFFFMTVFMFALAIPYNHWEDHNXLGFVVMNSFTF

SEQ ID NO: 184265 - protein, 54 aa, Glycine max
  Clone ID: PAT_MRT3847_137407C.1.pep
FLFLDGKNREFPSIDETNSSQPPNTIIMEVRHLLGAGGCKSTYFFPPEHPTEAP

SEQ ID NO: 184266 - protein, 47 aa, Glycine max
  Clone ID: PAT_MRT3847_137408C.1.pep
SSRHALGPSMRSHQVPPNPSPITLMPGTNLHRTPVDSIRWSVRTHAW

SEQ ID NO: 184267 - protein, 65 aa, Glycine max
  Clone ID: PAT_MRT3847_137409C.1.pep
VVTVFICLINNFKTRNENPESISIFLIIQQNSVLRTVTDAKSECRNKKRNLRIIALNFEDPIRWW

SEQ ID NO: 184268 - protein, 58 aa, Glycine max
  Clone ID: PAT_MRT3847_13740C.1.pep
VAEANMLYLETPIGVGFSYSTDTSSYEGVNDKITGKFLMFTRLYLTSPTFYFFSRPLK

SEQ ID NO: 184269 - protein, 161 aa, Glycine max
  unsure (1)..(161): unsure at all Xaa locations
  Clone ID: PAT_MRT3847_137410C.1.pep
RPLWXXXXLXXPXXXXAXLXXPHXLPXXXPXRXXXPFXLPPXXXHXLXLXXXPPPSXRPPXLLPVLSXLPXXXXLSXXXXXXSPLSHXXHRXVSXXXYXLSLXXXXPXXPPLXRYXXXXXPXXXXXVFRXAXLXPXXXXXXXPXAXVXXXXXXXPXAXXXR

SEQ ID NO: 184270 - protein, 103 aa, Glycine max
  unsure (1)..(103): unsure at all Xaa locations
  Clone ID: PAT_MRT3847_137411C.1.pep
RAARADSARAPSSTSSVKRKSDDSSSSNTPFTAPKVRRVANIDTGLASRYHHNNPRASXGASSTSTTSPSMPSLSFRQTVELSQKFQKYYKRYEELYWKLTEA

SEQ ID NO: 184271 - protein, 122 aa, Glycine max
  Clone ID: PAT_MRT3847_137412C.1.pep
FDIYMDRYIMTLTLLYRSLSFDVCDPCWAGECSGLYAPPRKTKGPPQTKGTEKPPRSKNLLTPPPKNRTLGRTCSTPPPQEVKDAPITKTGKQDPRSKRLLTPSPREPRKIEMNSPAFYAGA

SEQ ID NO: 184272 - protein, 51 aa, Glycine max
  Clone ID: PAT_MRT3847_137413C.1.pep
LCALQRYALSLEQSFMSLKKPFSNNGWCQTFTMMDPRIIDHRVADPRSTSS

SEQ ID NO: 184273 - protein, 36 aa, Glycine max
  Clone ID: PAT_MRT3847_137414C.1.pep
FVESNGTVLSTNWKKVGSTKVKESPPYGRELKKWEY

SEQ ID NO: 184274 - protein, 90 aa, Glycine max
  Clone ID: PAT_MRT3847_137415C.1.pep
PPIKGGKVLIFFLGWWAPLLLQTPFPISLGARAFYGKPPPPFSLNIKKTGFPPSSMNFEHHGDETVCKIGYHVLCGVRAPPTLVPLLELP

SEQ ID NO: 184275 - protein, 34 aa, Glycine max
  Clone ID: PAT_MRT3847_137416C.1.pep
ARFIPHQACQIRCRLRALIFLASPGNAMSKNPSV

SEQ ID NO: 184276 - protein, 60 aa, Glycine max
  Clone ID: PAT_MRT3847_137417C.1.pep
SYIRVVIRPTASGISLLGRYSIGHRARLALPVPTMKLSSTSSGSANQAGSSIPKTNCRRV

SEQ ID NO: 184277 - protein, 254 aa, Glycine max
  Clone ID: PAT_MRT3847_137418C.1.pep
MNILGQSFNESNNGSYSCSSPETGSSSNIPNTFHSDEEVHTLASARPKKRAGRRIFKETRHPVYRGVRRRNNNKWVCEVRVPNDKSTRIWLGTYPVPEMAARAHDVAALALRGKSACLNFADSAWRLPLPASTNAKEIRRVAAAAAVAIAAEDSCGEQLQNSIVNDAVADDCEVSRSDVSFDEDSNSNKGLRVFCDLDEITMADAPVFEDMREWLQSMADEPLRSPTFVTYVNVRDVWNFVEDDAEVSLWSFTI

SEQ ID NO: 184278 - protein, 52 aa, Glycine max
  unsure (1)..(52): unsure at all Xaa locations
  Clone ID: PAT_MRT3847_137419C.1.pep
MAEIETTVPDSTQIEVXLFNRWSFEDVEVNDMSLADXIGVSTSKHANVSSSH

SEQ ID NO: 184279 - protein, 106 aa, Glycine max
  unsure (1)..(106): unsure at all Xaa locations
  Clone ID: PAT_MRT3847_13741C.1.pep
EENGRSRGVNREQYVYLRXVGAGGRYEEMVEFMQKVVVGGRXVGXHVXERNSLGGYKTDRSLVPLXICLHRTEEEGAERDQCPREHTVQXRRLSSCAXLNSXSTXX

SEQ ID NO: 184280 - protein, 236 aa, Glycine max
  Clone ID: PAT_MRT3847_137420C.1.pep
PTLGVEKKAAEDKLYQLQQEGATEDDIKMEMKDFGMKRATIYGWPNTYVFTKAMGEMLIETLKENVSVVIVRPTMVTSTYREPFPGWVEGVRTIDSLIVAYGKGKLTCFLADIKATFDVIPADMVVNAIISTMVAHANKPCDNIIYHVGSSLENPVRYHNLQDYGFRYFKAKPYVNKEGNYVMVRKVTVLDSMASFERYMFIRYFLALKGLELGNAGFCQYFQRTYLDIRRKIYTV

SEQ ID NO: 184281 - protein, 118 aa, Glycine max
  unsure (1)..(118): unsure at all Xaa locations
  Clone ID: PAT_MRT3847_137421C.1.pep
FGGCRLFVFVPCWSLLLRCVGSCCRPVLRFFCGLGWFSSLALRGSPSFGCLSAGLSVAVSSSPVLGRFLFLXXFLWLVGLLLFFFPPLSLVAGAVYLIGRVGRAGCSGPVPAGASPFP

SEQ ID NO: 184282 - protein, 135 aa, Glycine max
  unsure (1)..(135): unsure at all Xaa locations
  Clone ID: PAT_MRT3847_137422C.1.pep
ASIGEAPTSSSLTEYTGVDRMPDDMNDMRITDDNEMVATVVHGNRTXTVHIIDTTMVGINGQPKHTIIYMAERIAGHGSFGVVLQAKRLETAETVAIXIVLTDXRSEHRELLTMHLVEHTKCVCIKHCLFSTTLK

SEQ ID NO: 184283 - protein, 42 aa, Glycine max
  unsure (1)..(42): unsure at all Xaa locations
  Clone ID: PAT_MRT3847_137423C.1.pep
CKGWPFYCCNLTITDYFQTYHYEILLYKRKLPXVAHADLFWD

SEQ ID NO: 184284 - protein, 75 aa, Glycine max
  Clone ID: PAT_MRT3847_137424C.1.pep
HHCYTVYMLSCLIGMRVPFPRKRRLMYSADCLRLNNLGWSDTALLKRRTKASLERLFIVVVMGEDMLALTNCCRS

SEQ ID NO: 184285 - protein, 54 aa, Glycine max
  Clone ID: PAT_MRT3847_137425C.1.pep
YILSMFGQTFLDAFMAEYIHEMASSESKNHGSFVLQFKKKTWVWIKLSSSRPPC

SEQ ID NO: 184286 - protein, 108 aa, Glycine max
  Clone ID: PAT_MRT3847_137426C.1.pep
VFFFFFFFFFFFFFFFVFFFFFLGGGRDPLKKAFLPERKAPLKEIPQKIFPCLGVAKNLPQSLNPHPFFWGGKKGKISPLPLCPALGWKLLNSGGLKKIWGGGFGGKI

SEQ ID NO: 184287 - protein, 80 aa, Glycine max
  Clone ID: PAT_MRT3847_137427C.1.pep
MSVGCCSQIQFLTSGGGSKAWKGDMDKDKTDGIKFYYDGQGFMSAELEETNVKVVYYDILGKVLHVVNLPKGLGTSVSAI

SEQ ID NO: 184288 - protein, 361 aa, Glycine max
  Clone ID: PAT_MRT3847_137428C.1.pep
MGNICARLKSKPPPQSSAKKRSSSRRERRLDDAAIREQAIAAAILFKQHQQQQQFDRSTSLRYPNGVSKKNNSNTLPRSSSSRARSLTDPLLQPHQLLNQGVNVDDLETNHIVLVHGGGFGAWCWYKSIALLEESGYKVAAIDLTGSGVSSFDANSITSLSQYVKPLTNFLEKLLEGEKVILVGHDFGGVCISYAMEMFPLKISKAVFIAAAMLTNGQSTLDIISQQAGSNDLMRQAQTFVYANGNDHPPTSFDLDKSLSRDLLFNQSPTKDIALACVSMRSVPFAPVLEKVSLSDLKYGSVRRFYIETLEDNAIPISLQENMINASPPEKVFRLKGADHSPFFSKPQALHKLLVEVSKIL

SEQ ID NO: 184289 - protein, 72 aa, Glycine max
  Clone ID: PAT_MRT3847_137429C.1.pep
KYWGELPMTKRGSFEKSSSSRQSLGFSKMLQQPAVLMDLQKNVNTFDSHTSFFLAMGLYIMISDYGNAPSCC

SEQ ID NO: 184290 - protein, 152 aa, Glycine max
  unsure (1)..(152): unsure at all Xaa locations
  Clone ID: PAT_MRT3847_13742C.1.pep
VNFTEIAEHPENRKRVDLTKNEFDLTNERFLVPEMIFRPADLGMNQAGLAECIVRAVNACHPHLRPVLYESIILTGGSTLFPQFAERLEKELRPLVPDDYRVKITTQEDPXILGVWRGGSLLASSPDFEAMCVTKSEYEELGSARCRKRFFH

SEQ ID NO: 184291 - protein, 395 aa, Glycine max
  unsure (1)..(395): unsure at all Xaa locations
  Clone ID: PAT_MRT3847_137430C.1.pep
MRQTIINNSWADAWADAWADAWAAARHGNLDTNSKGNICARLKSKPPPQSSAKKRSSSRRERRLDDAAIREQAIAAAILFKQHQQQQQFDRSTSLRYPNGVSKKNNSNTLPRSSSSRARSLTDPLLQPHQLLNQGVNVDDLETNHIVLVHGGGFGAWCWYKSIALLEESGYKVAAIDLTGSGVSSXCKNIITSLSQYVKPLTDFLEKLPEGKKVILVGHDFGGACISYAMEMFPLKISKAVFVAAAMLTSGQSTLDIISQQAGSNDLMQQAQTFIYANGNDHPPTSFDMDKSLLRDLLFNQSPTKDIALASVSMRSVPFAPVLEKVSLSDLKYGSVRRFYIETLEDNAIPISLQENMINANPPEKVFRLKGADHSPFFSKPQALHKLLVEISKIL

SEQ ID NO: 184292 - protein, 225 aa, Glycine max
  Clone ID: PAT_MRT3847_137431C.1.pep
MGNICARLKLKPAPQPSTKKRSSSRRERRLDDDAAIREQAIAAAILFKQHQQQQQQQQQQFDRSASLRYPNGVSKKSNANALPRSSSSRARSLTDPLLQPHQLLNQGVNVDDLETNHVVLVHGGGFGAWCWYKSIALLEESGYKVTAIDLTGLGVSSFDANSITSLSQYVKPLTNFLEKLLEGEKVLGKLSIFITNGLIYSILNSLLYISIGSVPSLLHLRITFL

SEQ ID NO: 184293 - protein, 289 aa, Glycine max
  unsure (1)..(289): unsure at all Xaa locations
  Clone ID: PAT_MRT3847_137432C.1.pep
GISFERWCGAFLPDNFTIILFHYDANMDGWWDRNLTRGGMDITAQNQTKWWFAKRFLHPDIVSIYDYIFLWDEDLGVEHFSPSRYKENLTLASFSLTLYHSLFLPFSFRFLWIRGSTKKFHRXRVYERRGSTRCSDLSEGPPCTGFVEGMAPVFSRSAWYCTWHLIQNDLVHGWGVDMKLGYCAQGDRTKKVGVVDSEYVFHQGIQTLGGSGHRMTKVSKLQRTTMKQGGVGIDVRTEIRRQSTWEFEIFKERWNKAIAADKNWVDPFKSDQRRIRKRRDTQRLPKNNI

SEQ ID NO: 184294 - protein, 277 aa, Glycine max
  unsure (1)..(277): unsure at all Xaa locations
  Clone ID: PAT_MRT3847_137433C.1.pep
QKFLPDNFTIILFHYDANMDGWWDLNWTSKAIHITAQNQTKWWFAKRFLHPDIVSIYDYIFLWDEDLGVEHFSPSRYIEIVKEEGLEISQPALDPNSTEIHHRITVRARTKKVHRRVYELRGSTRCSEASKGPPCTGFVEGMAPVFSRSAWYCTWHLIQXNDLVHGWGVDIKIGYCAQGDRTQNVGVVDSEYVVHKAIQTLGGSDDPTKVSNRQRTTPKHGVAAFDQRVEIRRQSTWELEVFKERWNRAIAEDKNWVNPFKSDKKRTRQRRKTNQFS

SEQ ID NO: 184295 - protein, 66 aa, Glycine max
  Clone ID: PAT_MRT3847_137434C.1.pep
ILAYDILNAEALIGCYLQLCGGKASEGVFVGAFLSMSSTAVVLKFLMEKNTTNALHGQVTIATLMF

SEQ ID NO: 184296 - protein, 123 aa, Glycine max
  Clone ID: PAT_MRT3847_137435C.1.pep
RLNIRSQIPPSDSQNKGRASCVLLSIHINWKSRRVLFVFSGGASSTLLSFLFFCLPLSSTTTSASYVVRLCLLHFFLFLIIIHCYVHVLICGEKNKYGLGQAFVFSFICLYCIINILGRVSFC

SEQ ID NO: 184297 - protein, 150 aa, Glycine max
  unsure (1)..(150): unsure at all Xaa locations
  Clone ID: PAT_MRT3847_137436C.1.pep
STRCSDLSEGPPCPGFVEGMAPXFSRSAWYCTWHLIQNDLVHGWAVDIELGYCAQGDRTKKVGVVDSEYVFHQGIQTLGGSGHRMTKKQGGVGIDVRTEIRRQSTWEFEIFKERWNEAIAADKNWVDPFKSDQRRIRKRRDTQRLPKNNI

SEQ ID NO: 184298 - protein, 156 aa, Glycine max
  Clone ID: PAT_MRT3847_137437C.1.pep
MPRRQFAFQGTESKPCDAESPVPATLLIKHLPEAIPHVTLSRILANFGASSVRPCSTARLRNCAFADFKNEIVASQAQRQLNGLRFLGQVLSAERASNPTENGEKSSGDQLGKDPYTSMLMNANVTKPIDGDTISGGLPISRPIADRLCVSYPFPS

SEQ ID NO: 184299 - protein, 57 aa, Glycine max
  Clone ID: PAT_MRT3847_137438C.1.pep
NSECRGAHNQALLSWSSSQTSRICAHVMRFRPSRSCAHVIQFRTSRCSSVVVFDFEV

SEQ ID NO: 184300 - protein, 60 aa, Glycine max
  unsure (1)..(60): unsure at all Xaa locations
  Clone ID: PAT_MRT3847_137439C.1.pep
MXMIXPXXXXXXYRXXWYXCXYRXGNXSRXDXXTSRRXPFFFXFSSVHFLTKCTRFHSSL

SEQ ID NO: 184301 - protein, 207 aa, Glycine max
  Clone ID: PAT_MRT3847_13743C.1.pep
MLLLLFGARHSLVMLGRALQWQVMVSVSRLGIPKYEWWSEALHGVSNVGPGTRFSNVIPGATSFPMPILTAASFNTSLFEVIGRVVSTEARAMYNVGLAGLTYWSPNINIFRDPRWGRGLETPGEDPVLTSKYAAGYVKGLQQTDGGDPNKLKVAACCKHYTAYDVDNWKGIQRYTFNAVVTKQDMEDTFQPPFKSCVIDGNVASVM

SEQ ID NO: 184302 - protein, 150 aa, Glycine max
  Clone ID: PAT_MRT3847_137440C.1.pep
TQIPTILPPHILSLELSRSSNHHLPHVITSLSKTLTLKAIVLDFMNFCAKQVTNALNIPTFFYYTSGASSLATFLQLPVIHETTTKSIKDLNTHLSIPGLPKIDLLDLPKEVRDRASQSYKLFHDIATCMRDSDGVIVNTCDPIEGRVIK

SEQ ID NO: 184303 - protein, 92 aa, Glycine max
  unsure (1)..(92): unsure at all Xaa locations
  Clone ID: PAT_MRT3847_137441C.1.pep
EILIXXDHRLTHLKTGNKXNALLGFKNFSIXSYFXCVXFLKGKKIHSTVMAHRLREXFSFPXLXYXRTLSYXIQDFVSDLNFFCFXSQFXXN

SEQ ID NO: 184304 - protein, 200 aa, Glycine max
  Clone ID: PAT_MRT3847_137442C.1.pep
CAPENQIIVDQDQSNVSKKKVSSWHRMVDVMSPLLAELMSPPAIALFFGFLFGAVACLRNLIIGDLLFFCVIQDSLQLLGNGTIPCITLLLGRYLTQGLKSSSVKPFTLISIIIARLLLLPIIGLFIVRAAANFDLLPVDPLFQYVLVMQYAMPPAMNISTMAQLFEVGNEECSVILLWTYSAAAIALTAWSTFLLWLLS

SEQ ID NO: 184305 - protein, 79 aa, Glycine max
  Clone ID: PAT_MRT3847_137443C.1.pep
KVAEKEDMGGIARYLISEWSVLCCRGRESQSLQSPNFYVVWHGLYVTLTRTKVVKENCCTPPSVTQPLSVATILRRLHS

SEQ ID NO: 184306 - protein, 168 aa, Glycine max
  Clone ID: PAT_MRT3847_137444C.1.pep
PRVRPRVRPRVRPRVRPRVRFFGFLFGAVAWLRNIIIGDDAPLRVIQDSLQLLGNGTIPCITLLLGGNLAQGLKSSSVKPLTLISIIIARLLLLPIIGLFIVRAAANFDLLPVDPLFQYVLVMQYAMPPAMNISTMAQLFEVGNEECSVILLWTYSAAAIALTAWSTF

SEQ ID NO: 184307 - protein, 59 aa, Glycine max
  Clone ID: PAT_MRT3847_137445C.1.pep
RPKVWRSYPLSLSISISKSGRSRGSKAYGRSIGTKLTYSCVTHLRSLYGHLQRIDWPKL

SEQ ID NO: 184308 - protein, 50 aa, Glycine max
  Clone ID: PAT_MRT3847_137446C.1.pep
YTYKLNCCNLNFNLNKQPKHYPLLFNPPTPQLNQTYLNNSCCMRAFAEWL

SEQ ID NO: 184309 - protein, 42 aa, Glycine max
  Clone ID: PAT_MRT3847_137447C.1.pep
SESALPKNTVSGTILRCDLLDIFLTEGKVRASVEFTRVIIFK

SEQ ID NO: 184310 - protein, 63 aa, Glycine max
  unsure (1)..(63): unsure at all Xaa locations
  Clone ID: PAT_MRT3847_137448C.1.pep
MSLXSDLINLNLSDTTEKVIAEYIWIGGSGMDXRXKARTLPGPVXDPSELPKWXYDGSSTGQX

SEQ ID NO: 184311 - protein, 222 aa, Glycine max
  Clone ID: PAT_MRT3847_137449C.1.pep
SKLFAIALLASGQSSTITGTYAGQYVMQGFLDLRLKSWIRNLLTRCLAIVPSLIVALIGGSAGAGELIIIASMILSFELPFALIPLLKFTSSKIKMGEHVNSITISAITWIIGSLIMGINIYYLLTSFVKLLLHVHLKIVTKVFLGILGFSGVTLYMGGIAYLVFRKNKKTTHFLAFRTSEEQQVANEQGDISMYNLPREDIVSMQLPQNSRSPTDIDREIS

SEQ ID NO: 184312 - protein, 773 aa, Glycine max
  Clone ID: PAT_MRT3847_13744C.1.pep
MACAENRQPKVPVFLCFFSFTFVASVLLNCNRVWGQTFACDVGKSPAVAGYGFCDKSLGVEARVKDLVGRLTLQEKIGNLVNSAVDVSRLGIPKYEWWSEALHGVSNVGPGTRFSNVIPGATSFPMPILTAASFNTSLFEVIGRVVSTEARAMYNVGLAGLTYWSPNINIFRDPRWGRGLETPGEDPVLTSKYAAGYVKGLQQTDDGDPNKLKVAACCKHYTAYDVDNWKGIQRYTFNAVVTQQDMEDTFQPPFKSCVIDGNVASVMCSYNKVNGKPTCADPDLLKGVVRGEWKLNGYIVSDCDSVEVLYKDQHYTKTPEEAAAISILAGLDLNCGRFLGQYTEGAVKQGLIDEASINNAVANNFATLMRLGFFDGDPRKQPYGNLGPKDVCTQENQELAREAARQGIVLLKNSPASLPLNAKAIKSLAVIGPNANATRVMIGNYEGIPCKYISPLQGLTAFAPTSYAAGCLDVRCPNPVLDDAKKIAASADATVMVVGASLAIEAESLDRVNILLPGQQQLLVSEVANASKGPVILVIMSGGGMDVSFAKNNNKITSILWVGYPGEAGGAAIADVIFGFHNPSGRLPMTWYPQSYVDKVPMTNMNMRPDPATGYPGRTYRFYKGETVFAFGDGLSYSSIVHKLVKAPQLVSVQLAEDHVCRSSECKSIDVVGEHCQNLVFDIHLRIKNKGKMSSAHTVFLFSTPPAVHNAPQKHLLGFEKVHLIGKSEALVSFKVDVCKDLSIVDELGNRKVALGQHLLHVGDLKHPLSVMI

SEQ ID NO: 184313 - protein, 67 aa, Glycine max
  Clone ID: PAT_MRT3847_137450C.1.pep
ENILWLWVATFTKRVCGGHHFPCHLLATPSFVSQLFNSFTSPFLPKPSARTREETNLSFQILLRFIL

SEQ ID NO: 184314 - protein, 137 aa, Glycine max
  Clone ID: PAT_MRT3847_137451C.1.pep
NGGAYPPDLSLVTKARHNGQNYVFALLTGYRDPPAGVSIREGLHYNPYFPGGAIAMPKMLNDGAVEYEDGTPATESQMGKDIVSFLTWAAEPEMEERKLMGFKWIFVLSLALLQAAYYRRLRWSVLKSRKLVLDVVN

SEQ ID NO: 184315 - protein, 70 aa, Glycine max
  Clone ID: PAT_MRT3847_137452C.1.pep
SNLVFKNPTFHFNNFWELTIPAKVPNTISHPNVGNRPSCWYPDSPDCHKKFRRQARSISLCSRLVTLNQI

SEQ ID NO: 184316 - protein, 37 aa, Glycine max
  Clone ID: PAT_MRT3847_137453C.1.pep
DIKCCQDRPRPSPLFYEISRAPYRQIRVKVRVYSKKR

SEQ ID NO: 184317 - protein, 53 aa, Glycine max
  Clone ID: PAT_MRT3847_137454C.1.pep
KNIVINSYFNATSLCKMLSFFLGKGGWLYRNSSCLSTSHPHSKFTTSIGGTEL

SEQ ID NO: 184318 - protein, 83 aa, Glycine max
  Clone ID: PAT_MRT3847_137455C.1.pep
EINIYTTLIYFDVNLKDYFSFFATLHSLLRKKEDTTHRIQSVVHRMSHSLVSVILVKVILAAMIIVLFSHAVRSQQICLASCK

SEQ ID NO: 184319 - protein, 75 aa, Glycine max
  unsure (1)..(75): unsure at all Xaa locations
  Clone ID: PAT_MRT3847_137456C.1.pep
ITXXNQKSKTHREGILSFLTTVISDRIRIRTPSREKFEKDXFEFFTHCFVAHAIGYRISGSDFPPLREERWVHLH

SEQ ID NO: 184320 - protein, 126 aa, Glycine max
  Clone ID: PAT_MRT3847_137457C.1.pep
MEGQDLSPPRMDTSRPSLGFPLGTALLLIIIFSLSGIFSCCYHWDKLRSFRQSLSHPHPAPSHTQSQPYTEVKQSKGESLPVLMPGDEVPKFIAMPCPCQPSRLETIVVTVEKPPHKPPLVVAPLC

SEQ ID NO: 184321 - protein, 518 aa, Glycine max
  Clone ID: PAT_MRT3847_137458C.1.pep
MAQPPPRERTLREIVAPDFTYESLCIQYPDEGVPYVLKTGLIHLLPKFHGLVGEDPHKHLKEFHIVCSTMKHHDVCSTMKHHDVQEDHIFLKAFPHSLEGVVKDGLYYLAPRCFTSWDDLKKVFLEKFFPASRTIAIRKDISSIRQLSGESFNMERSMIDAANGGTLGDMTTAEARNLIEKMASNSQQFSARNDAIVLRGVNEVATNSSSSTENKKLEGKLDALVNLVTQLAMNQKSTPVARQSGVNEQPEAYAANIYNRPPQQQNQQQKNNYDLSSNRYNLVPPPVVAAAPEPVKLHSTPEKEVEIVAQKRKLANKNIHVGGPSSTNFDSQQPPIPLPFPPRAISNKKMEEAEKEILETFRKSRGKSVPHIPEKCKDPDVVIHLANRSVAYPACFIEDVLVRIVDDYMFDSVLHGRKHPFLSDMHTCHSLCIESESEFEFDPVSDFYAESEFEFESGSAFLGVVFLDVDFLESECTNHVAGSSYTSDLVYEVQAEEPSSSPTLVPPMFSLRTTVPSD

SEQ ID NO: 184322 - protein, 140 aa, Glycine max
  unsure (1)..(140): unsure at all Xaa locations
  Clone ID: PAT_MRT3847_137459C.1.pep
RSNGLDLHPIFLELGEYWMDFADYLTIPXQDEWVYSDGKSTTCVAFILSMYKEAEVFGPIANSIQVTEFTIRDAYMLRIFEDNQTRLPSWCNNENDRIPFCQILGEYKMELPGYNTLEPYANMNEYCPSLPPTYDRPSRC

SEQ ID NO: 184323 - protein, 46 aa, Glycine max
  Clone ID: PAT_MRT3847_13745C.1.pep
YHCALPFAAKGSGDDITIFGNVQQKTLEVVYDVEGGRIGFGAGGCK

SEQ ID NO: 184324 - protein, 83 aa, Glycine max
  unsure (1)..(83): unsure at all Xaa locations
  Clone ID: PAT_MRT3847_137460C.1.pep
RHAFYEVSLGQRANPHWTFDSKALQAFXKFGTKLKKIEENLARKTNDQSFSNRLGRVQLPYPLFPPNSEEGFPCRGIPKSISF

SEQ ID NO: 184325 - protein, 44 aa, Glycine max
  Clone ID: PAT_MRT3847_137461C.1.pep
HRGLIPFPSITRLPRWRRPPDLSLSEWCQCGLSLRYCLRGRPII

SEQ ID NO: 184326 - protein, 146 aa, Glycine max
  unsure (1)..(146): unsure at all Xaa locations
  Clone ID: PAT_MRT3847_137462C.1.pep
PRVLFVWGRNSGGQLVLCKGAGQVVTTPTKVDCLTDLILKTDALGSEHSIAVTEEGEVLSCXAAGSGRLGHCRESSILGFSLTSTEYTPRLIKNFDGIKIKKISAGMLHSACIDEKGIWMTERRFQTKYCLRDTIFRRSCLWRLPY

SEQ ID NO: 184327 - protein, 368 aa, Glycine max
  Clone ID: PAT_MRT3847_137463C.1.pep
MMSQEAISVPSNNLRDPSVQLHEPNSNSNSNPNNPNPNSLKRKRSLPGTPDPNAEVIALSPKSLMATNRFICEVCNKGFQRDQNLQLHRRGHNLPWKLRQRNKEEVVKKKVYVCPEKSCVHHDPCRALGDLTGIKKHSRRKHGEKKWKCEKCSKKYAVQSDWKAHNKICGTRQYKCDCGTIFSRKDSFVTHRAFCDAMAEQNARLPSVLSNLGSEILMNAAQAPRVMPQALQLHGFHSEFGGPGQEPYIGNFADVNHDEHKLRMPLWLDQTNNPLQLNHHHHHHPLSVSSNNSSSLFSPGTTLAEVNNMFGTSSSSQGQWLNYRYHPEASFTHANVSIPHGLKLEQEENKGNLSHSSPKSESADNNIV

SEQ ID NO: 184328 - protein, 187 aa, Glycine max
  Clone ID: PAT_MRT3847_137464C.1.pep
RSEGWRENSSSSSSCLNYLYRECLRNHAASLGSYATDGCGEFTLDVDSVSSPSLQCAACGCHRNFHRKVTCPAVEGGLQAVTGGSGDMMEYSGGGDVGRITEMGERSGGSKKRFRTKFSAEQKEKMLGFAEKLGWKLQRKEVDDEIERFCKSVGVTRQVFKVWMHNHKNNSNTSTNSSANLSSLTQS

SEQ ID NO: 184329 - protein, 183 aa, Glycine max
  Clone ID: PAT_MRT3847_137465C.1.pep
SDCQPLQPGIWYYGLPAHNSSIRLNYHIRTFPNTYYFSYATKRTTKIMGVKVPSSILGIHPLLFIRVLQMCQWRFPPDVPPPYKGYRDEDWQDNDGALNTISMTHPRLPIEHPNCLVEKESDCQPLQPGIWYYKYVEGDHILFIINRERAGVQFDVIYDSIFQRCRKHVFRKKLPTMPNEINH

SEQ ID NO: 184330 - protein, 443 aa, Glycine max
  unsure (1)..(443): unsure at all Xaa locations
  Clone ID: PAT_MRT3847_137466C.1.pep
MLRLWISYLQLLELFVSSLVHMLYGFYIFSSAVAGDLSQVLNEYFHKANNNVNVEIPXINDLPPWFKRDQIATPYNGAFGTSDKKKEXVLIIIYRDRARVQFELFYDSIYQSWRKQHSKACGHSQFGRIYEQGHYPEWDEDHPIHFVGHSAGAQVIRVLQQMLADKAFKGYENTSENWVLSVTSLSGAFNGTTRTYADGMLPEDGRTLKPICLLQLCRIGVIIYDWFDISWLKNYYNFGFDHYNMSWRKMGIWGLVDCLLGNAGPFASGDWILPDLTIQGSIRLNYHIRTFPNTYYFSYATKRTTKIMGVKVPSSILGIHPLLFIRVLQMCQWRFPPDVPPPYKGYRDEDWQDNDGALNTISMTHPRLPIEHPNCLVEKESDCQPLQPGIWYYKYVEGDHILFIINRERAGVQFDVIYDSIFQRCRKHVFRKKLPTMPNEINH

SEQ ID NO: 184331 - protein, 127 aa, Glycine max
  unsure (1)..(127): unsure at all Xaa locations
  Clone ID: PAT_MRT3847_137467C.1.pep
RTKQKGARAPKKTQKGKPKEGLKLKRKGTREKKNKKKIKKRKKGAPKKKKGERTPEAKKLKKDXKKHLWQRLLGKKKKKKGAKKSRTKNRDNLKYGERARGKDPDKKYPTSIGKNKNNGYQKSTANG

SEQ ID NO: 184332 - protein, 103 aa, Glycine max
  unsure (1)..(103): unsure at all Xaa locations
  Clone ID: PAT_MRT3847_137468C.1.pep
APLAKGVGFLLRKGWVPCLEFQLGPGFVFREPHRSPGFFYGPPWALWKPPLFGCPDAFPGFKGLPKGXTAFPQGFLRILGFGHVSPGQGLRFFAFQPPGFLVL

SEQ ID NO: 184333 - protein, 130 aa, Glycine max
  Clone ID: PAT_MRT3847_137469C.1.pep
PPPNPNPMWVPPPPFSVPSWRPPQSPWPGPRGIFMGAPPRGFSSPQGFFFWLPPPPLPVPGESPRPLPPQEGPPLSLFPLKKIGVADPNSPPRFRGAPINHCWCGFFGLFFPPPFFKKPPHPFPPKKFFL

SEQ ID NO: 184334 - protein, 140 aa, Glycine max
  Clone ID: PAT_MRT3847_13746C.1.pep
VGASGALFGLLGGMLSELLINWTIYANKFAALLTLIVIVVINLAIGVLPHVDNFAHIGGFVSGFFLGFIFLIRPQFKWVSSRHRNSHSTAAAPSVKYKHKPYQYALWVISFILLIAGLVTGLVLLLRGVNLNDRCHVSLL

SEQ ID NO: 184335 - protein, 49 aa, Glycine max
  Clone ID: PAT_MRT3847_137470C.1.pep
VFSHQKEGPVYLGPWLNHPREGVFLTIPIVEISCQRGPFLTSQMRVEKN

SEQ ID NO: 184336 - protein, 67 aa, Glycine max
  Clone ID: PAT_MRT3847_137471C.1.pep
LCGHSDHEAGSRVTDLAAYVCLLMWLLWSFGLWVSRDSGGISPHSSSTLNRKNPKIFLHSARAEFRA

SEQ ID NO: 184337 - protein, 47 aa, Glycine max
  Clone ID: PAT_MRT3847_137472C.1.pep
LNTTCFELLNTLSSHFGHRFQATRLQASMDHVMSRHAPSLMNDCTCE

SEQ ID NO: 184338 - protein, 127 aa, Glycine max
  unsure (1)..(127): unsure at all Xaa locations
  Clone ID: PAT_MRT3847_137473C.1.pep
PPNPFSHHAANAEEEKTEVNRTTCMPADVLAKRAHEXEKHVAHESPTAQNPDVDQNTTTNVNRQAKIINLRQKAEADLQLFTHGKLNDGKHMPVTNATAIKNQVVTRPLYXQEEIRTNNARYTKTAM

SEQ ID NO: 184339 - protein, 68 aa, Glycine max
  Clone ID: PAT_MRT3847_137474C.1.pep
LNKQLNFSSIQKPNAPKDNRRCKTKEFTELQPRKLCTHCLVQKSNKAQLKEGFLRNDLSIFKEEKYIA

SEQ ID NO: 184340 - protein, 93 aa, Glycine max
  Clone ID: PAT_MRT3847_137475C.1.pep
MSYLNRVWMAATVAVAQGHTDPGHKCKTALNSIHHNRSRLFSGGALSDLRPLSGVVGPDVSGAAAGSSDAKNRVSQADDSLRKVMYFSCWGQG

SEQ ID NO: 184341 - protein, 31 aa, Glycine max
  Clone ID: PAT_MRT3847_137476C.1.pep
FIFTPILSSNNNNNNIKTKLSITRLFRFQNV

SEQ ID NO: 184342 - protein, 109 aa, Glycine max
  unsure (1)..(109): unsure at all Xaa locations
  Clone ID: PAT_MRT3847_137477C.1.pep
ITVAPYHTNPDNAACSTFGAXLKGGRPKRLETFSNTIVQIEPDVISRLQILSTTTNGDFXQGNRTSTMVSSLTLVNRLLMALTTXYTSTSMMESGLQKDRGIIVPNYGR

SEQ ID NO: 184343 - protein, 171 aa, Glycine max
  unsure (1)..(171): unsure at all Xaa locations
  Clone ID: PAT_MRT3847_137478C.1.pep
TKNQGFELTKQRYGKANVKFLRVYREGGKHEVKEIRARVLLEGAFEISYTNGDNSTIVATDTQKNTLFALAKLHPIEPLEQWCLQVANDFLSRHKHISAVNLKVEEHPWDRIQVAGKEHPHSFQKGSGGIRIVKLRMPRNGTPSLSXGFRELEIMKTTQSGFEGFIRDDYT

SEQ ID NO: 184344 - protein, 38 aa, Glycine max
  Clone ID: PAT_MRT3847_137479C.1.pep
CLSQCQLNPSRYGSFGHAPNKCPLPFENPFQVHHTKRA

SEQ ID NO: 184345 - protein, 65 aa, Glycine max
  Clone ID: PAT_MRT3847_13747C.1.pep
FRWVVACFCLSRRCAPSSCALPLWFPCRAPFSSHARVRLLVSSGGSAGALPLMPPPLSSSRGCST

SEQ ID NO: 184346 - protein, 112 aa, Glycine max
  Clone ID: PAT_MRT3847_137480C.1.pep
MPVRGIGFFFFFFCVEGKSYLASAFLGDSILQRMVFSVKWVDRVLNLGFSVFKLFFRHLPCNCKKVQLSIRNFRGSCYACLMTFTYFFVDIKGSMSLQKKKTKKKKKKKKKK

SEQ ID NO: 184347 - protein, 132 aa, Glycine max
  unsure (1)..(132): unsure at all Xaa locations
  Clone ID: PAT_MRT3847_137481C.1.pep
GNGNIDGLTTALLIDYRSHASAAGMYGLAKWCARWMGSHGFXICIVDCQPIEILINKNDDTTSEGYRECYKHIQAANQEKLELLAGRDXAQTFETGITWGPTALPDTIRKEEMQTLHWXKRTQIMSQCGSNG

SEQ ID NO: 184348 - protein, 69 aa, Glycine max
  Clone ID: PAT_MRT3847_137482C.1.pep
IPVFSMYSVRSRSQRSRTGSISGSPHATSSNASSEVSVNQNGLCLDNSEIDDDIVSVRSGQSSASVRGR

SEQ ID NO: 184349 - protein, 111 aa, Glycine max
  Clone ID: PAT_MRT3847_137483C.1.pep
CSLSLKNTLRPDSFFSTPEFGLTLLQSHSSRSLSLLTQELCLFRGIIKLKIGVYILVTGPPLMETPIVTTIRKEASNNYYNKNCYIDNDNRTTMADHFKFYNADHANYARY

SEQ ID NO: 184350 - protein, 63 aa, Glycine max
  Clone ID: PAT_MRT3847_137484C.1.pep
SFHDLSHDMYFNLEYSEVGPETSRVQFGSLISFAEKFDFWFMNLIFQLELNSVQAHKQFNSAC

SEQ ID NO: 184351 - protein, 140 aa, Glycine max
  Clone ID: PAT_MRT3847_137485C.1.pep
ALAIPYHHWTMKGNQIGFVVLYSLTFFFANFGPNATTFVVPAEIFPARLRSTCHGISAAAGKAGAMVGAFGYLYTQNAIGLRNTLIVLGVVNFLGLLFTFLVPESKGKSLEEMSGEAEEETTAATRESAMEPGLGVRSSV

SEQ ID NO: 184352 - protein, 62 aa, Glycine max
  Clone ID: PAT_MRT3847_137486C.1.pep
LYYHMGTDNHLSTIIYLSPNIFPVLALSVVWHFRSYLGIPVFTLAPIPALNLHLHLLRIPWL

SEQ ID NO: 184353 - protein, 40 aa, Glycine max
  Clone ID: PAT_MRT3847_137487C.1.pep
VIRYSISSPLALVQPKLNSNALCSTTAHSKRISLMNHDLF

SEQ ID NO: 184354 - protein, 76 aa, Glycine max
  Clone ID: PAT_MRT3847_137488C.1.pep
FVPSPTWNRHYLEVCSVRIEVRRFKERFYFPESETFEGKVQRSPGLFCGVVRSSGSIKTLSQVDVRLVNGRVFLSH

SEQ ID NO: 184355 - protein, 86 aa, Glycine max
  unsure (1)..(86): unsure at all Xaa locations
  Clone ID: PAT_MRT3847_137489C.1.pep
TPKAKAKETAKATASKTNKKNKKAKEPTPEPESDSDEEMTSDSSASSESXSDSESSASDAESKPAPKTNGKAAAKKDDSDSSSEED

SEQ ID NO: 184356 - protein, 42 aa, Glycine max
  Clone ID: PAT_MRT3847_13748C.1.pep
MNPARIVGMSLSVNAEGGVPGAKTGPGDFRLDVAWIKAMIAL

SEQ ID NO: 184357 - protein, 36 aa, Glycine max
  Clone ID: PAT_MRT3847_137490C.1.pep
NKGMVLHKEHFKGFHCLLDGDHTHIPFTRDELYYFT

SEQ ID NO: 184358 - protein, 80 aa, Glycine max
  Clone ID: PAT_MRT3847_137491C.1.pep
RKENTSGQIELPQSICLRLTGQPFSPVIPLLLIHIYLFVFNLHVNEFTSNVFSSLSNYKYRCLVSKHTMVLNFDSLKLYA

SEQ ID NO: 184359 - protein, 101 aa, Glycine max
  Clone ID: PAT_MRT3847_137492C.1.pep
EELQNSFKFKHYIILTKIYVLKNVEQKRKQSNGSDEAIIYIKLEDEIFHKLSSWSFCFPLQTQQLAPHELRNYRSTGLIVAVEADKIPTFRQELASLINET

SEQ ID NO: 184360 - protein, 312 aa, Glycine max
  Clone ID: PAT_MRT3847_137493C.1.pep
HRFCSGPLSPRNNGSGPGCSRFFLSLEDNIFRIFGGDRIQGLMRAFRVEDLPIESKMLTKALDEAQRKVENYFFDIRKQLFEYDEVLNSQRDRVYTERRRALESDNLQSLLIEYAELTMDDILEANIGSDAPKDSWDLEKLTAKIQQYCYLLNTLSPDLLGNTCSDYEELRNYLRLRGREAYLQKRDIVEQQAAGLMKEAERFLILSNIDRLWKEHLQALKFVQQAVGLRGYAQRDPLIEYKLEGYNLFLDMMAQIRRNVIYSVYQFQPVLVEQDQDKTENRKSGKRNARTQVNPNPDPVGTVEPSTTSTTS

SEQ ID NO: 184361 - protein, 217 aa, Glycine max
  unsure (1)..(217): unsure at all Xaa locations
  Clone ID: PAT_MRT3847_137494C.1.pep
MAASSLCSSFTSKTWNPHRPHSCYHHKTPSPPYSTFLRGDVQLHPPSVSGTRRRRRRRSGAVASLGGLLGGIFKGADTGEAMKQQYAATVNIINGLEPEISALSDSELRDRTFALRERAQHGQSLDSLLPEAFAVVREASKRVLGLRPFDVQLIGGMVLHKGEIAEMRTGEGKTLVAVLPAYLNALSXKGVHVVTVNDYLARRDCEWVGQVPRFSGL

SEQ ID NO: 184362 - protein, 88 aa, Glycine max
  Clone ID: PAT_MRT3847_137495C.1.pep
VGLSSVPTSTPSPSLVHARGPSSVPTSTPSPSPAIANMPTDEDATNLAMEDHPLNDCPMIMLINGAFHPSKVPTKAVSLSIRQQFGQP

SEQ ID NO: 184363 - protein, 59 aa, Glycine max
  Clone ID: PAT_MRT3847_137496C.1.pep
LESDKTTDRCEKTTHRPAPLLVDLSSKNTKVFSHDSSAWSAWIQSNTSSTTLVLSSCMT

SEQ ID NO: 184364 - protein, 49 aa, Glycine max
  Clone ID: PAT_MRT3847_137497C.1.pep
TGLIHSKLVMTQDAPFERLSVFELGYSGLTVVFTLTSQFYLNITDTSLF

SEQ ID NO: 184365 - protein, 172 aa, Glycine max
  unsure (1)..(172): unsure at all Xaa locations
  Clone ID: PAT_MRT3847_137498C.1.pep
GFLGTRGMGKLTVPQGTSRRVKILPLPIGGGAGAKNAILMTLPNADLSMWRYVVGELVYXVYKMTSPYIKCTVSFLMAFGNLVDDTINLEAFTHKLVHFGEIHEKVVSKFTQQEFLTHWSAQGLSATTLMADGCPSMHAMVHDRSVFTIPGDSVIGVKLTPTNHMCAYGLNP

SEQ ID NO: 184366 - protein, 44 aa, Glycine max
  unsure (1)..(44): unsure at all Xaa locations
  Clone ID: PAT_MRT3847_137499C.1.pep
NKVNSVSGNTSHLRWIYGTNPDHFHLXRFYWLMSVLSALYFLHF

SEQ ID NO: 184367 - protein, 63 aa, Glycine max
  Clone ID: PAT_MRT3847_13749C.1.pep
FQFNRSNSKPNRKLLFHSAPLPKKLRDGKSKNWPLTSMSALLVWMNKFKTSCFLKEPPKRTAL

SEQ ID NO: 184368 - protein, 31 aa, Glycine max
  Clone ID: PAT_MRT3847_1374C.1.pep
SNRMYSSTQKHWPLTPYNTPIEQPQTHQRSA

SEQ ID NO: 184369 - protein, 128 aa, Glycine max
  Clone ID: PAT_MRT3847_137500C.1.pep
GGTKRNESELRLENNPILPLCVTDFMWELALPIGVDRDHEYCNPTAENGVEKLLDKMREHWWRVLVSGNGGDPLVDRGKELARLMEEKGLQVMKDFEEEGFHGIEIFDPLKAKQLIALVKDFIYMIGA

SEQ ID NO: 184370 - protein, 95 aa, Glycine max
  unsure (1)..(95): unsure at all Xaa locations
  Clone ID: PAT_MRT3847_137501C.1.pep
FLRPSSQRLSNQSSGADGAYSCHSXLLTHAYSPSQSWSYLITIIAAYASEPWWPSFTSTEIDHDTMQLTSCAVILLLLEHADGIHICCSMATPDA

SEQ ID NO: 184371 - protein, 91 aa, Glycine max
  Clone ID: PAT_MRT3847_137502C.1.pep
PTYAFHTRILYYSDGTILIIMYKILFQDTSTNINTSNSETFSFHPSFLISNIFTHYRDTDPYSKPFNIINLKPHALDLNTYNGTILPRLAI

SEQ ID NO: 184372 - protein, 133 aa, Glycine max
  Clone ID: PAT_MRT3847_137503C.1.pep
KSNVTEEEKAREVVHVRARRGQATDSHSLAERVRRGKINEKLRCLQNIVPGCYKTMGMAVMLDEIINYVQSLQHQVEFLSLKLTAASTFYDFNSETDALETMQRARASEAKELGKYKKEGYGGVSFFQPAWPL

SEQ ID NO: 184373 - protein, 68 aa, Glycine max
  Clone ID: PAT_MRT3847_137504C.1.pep
NAVTIPLSHWYCTRQPSVLKHEHKSYAWSREARAGSSSLDITQGLPILTPLTVTTPICVMANLLPRRE

SEQ ID NO: 184374 - protein, 84 aa, Glycine max
  unsure (1)..(84): unsure at all Xaa locations
  Clone ID: PAT_MRT3847_137505C.1.pep
MCLCLLLLHIFLRFVPIQSAPESAIVTQIPGFSGTLPSKHYAGYLTLDKSHGRTLYYYFLESEGIPSEEPVGLXANGGPGCSSF

SEQ ID NO: 184375 - protein, 95 aa, Glycine max
  Clone ID: PAT_MRT3847_137506C.1.pep
FYSQPATTCTLHPTPFGFNAGLMFVSQPCRHCILVLANHNDAALFPRLCPRVSLSTWHPCYSILLPYLTTLYPPKFALGPLFPPPPPPKKEDVIQ

SEQ ID NO: 184376 - protein, 82 aa, Glycine max
  Clone ID: PAT_MRT3847_137507C.1.pep
SLMCGLLKSRHNYIRWGFLFVLERLLMRCKFLLDEYEMQQSRSSDLGSGLKDWHLEKAHALIDIMSSAMLFQINEKDCTNKY

SEQ ID NO: 184377 - protein, 235 aa, Glycine max
  Clone ID: PAT_MRT3847_137508C.1.pep
MVVEGEKRRASFDGLGGLSLDLGKAELLKGNINANNHNKSSLAADLTASDTDSVSSGSTSGAHDSSGAAKGTKEPRGIVVSARFWQETNSRLRRLQDPGSPLSTSPASRIGVPNRNAQLKRYNSDGPMLSPRTMASPVRGNVNARPASPSKLWAGSSPSRGVSPARVRSTVASSINSGSSNTPSILSFSADVRRGKIGEDRIFDAHTLRLLYNRYVHGRLVNARADATFMVQKLN

SEQ ID NO: 184378 - protein, 69 aa, Glycine max
  Clone ID: PAT_MRT3847_137509C.1.pep
KHLGWVGLFWWLGCKINQFEIYDLMGVVLVQSCSTYVDALYIFHVSFLRVLFLCVICEGENVNCGVMGY

SEQ ID NO: 184379 - protein, 46 aa, Glycine max
  Clone ID: PAT_MRT3847_13750C.1.pep
TKKVRKYLIEIRKLVGSLTSDKCYYKTSERFKYLYTDSITLDLTEL

SEQ ID NO: 184380 - protein, 145 aa, Glycine max
  unsure (1)..(145): unsure at all Xaa locations
  Clone ID: PAT_MRT3847_137510C.1.pep
MTAALIVSGDNRLTEKTSTTCRDEDIQGDDYTMATEYRKCVSDDIRWHLTTSLMYILASFLTAGIKYXRNVRNIHIAGLFYDGRYKYWTKHEKNLALTEEEKMEVIRNRGTPADVLAKRAHEFEKHVAHESQKDQIPADDKLPST

SEQ ID NO: 184381 - protein, 33 aa, Glycine max
  Clone ID: PAT_MRT3847_137511C.1.pep
GVCTMSNGVKRLPIALRQYLKGGTPSMPYLKWD

SEQ ID NO: 184382 - protein, 192 aa, Glycine max
  unsure (1)..(192): unsure at all Xaa locations
  Clone ID: PAT_MRT3847_137512C.1.pep
ESNSIDVKLSKNTIETGDDCVSMIQGVNNITINKLKCGPGHGISIGSLGKYADEQEVKDIRVKNCTMVGTTNGLRIKTWPDKYPGSASAITFSDIVMENVKNPIIIDQEYDCEPANCQKKPSLVKIKDVVFSNIRGTTISPIAVDLRCSKQFPCQDVXLKNINLNLGPKPLGFRCTNIKPDYGGCQRPAVSL

SEQ ID NO: 184383 - protein, 167 aa, Glycine max
  Clone ID: PAT_MRT3847_137513C.1.pep
GPDSRVDPRVRPRVPINTAVSQSARQTNSKGNQCYLVSTSIGDIFPLVSLNFEGGASMVLKPEQYLMHNGYLDGAEMWCIGFQKFQEGASILGDLVLKDKIVVYDIAQQRIGWANYDCSLSVNVSVTTSKDEYINAGQLHVSSSEIHILSKLLPVSFVALSMYIMLV

SEQ ID NO: 184384 - protein, 49 aa, Glycine max
  Clone ID: PAT_MRT3847_137514C.1.pep
KFYSNCQVGGSPQQICTSLLCEAPVLVMKPCFYFLGIEPVYRLCHIRVS

SEQ ID NO: 184385 - protein, 234 aa, Glycine max
  Clone ID: PAT_MRT3847_137515C.1.pep
ESCEQLELSSNSNNIESLGKAIMDASAVNPSLEMWLKDSVLALYPDTKDCSPALANFFNAQQLFSGSKNSKGAQQMLPTICHRPLSSSGSLERRDVEESRSYMSSSPNLGFAVKQLTPTDLRSSLLSGRNETGSNPVESPVQVKRNLGSHRNSGIWHSYFPQGHIFERITYLTVLGCIAFASIKLSGIGLSRTLTGSHWATKANDNIAWTADSVDYPVVPAYIRSTMANKVKRI

SEQ ID NO: 184386 - protein, 70 aa, Glycine max
  unsure (1)..(70): unsure at all Xaa locations
  Clone ID: PAT_MRT3847_137516C.1.pep
GALLIALVCSTLHYXIFIFMVYLKRNFLFISYNSGIRVLIPSNALLVGFRLITSSAHSLGASYKTRPVSV

SEQ ID NO: 184387 - protein, 153 aa, Glycine max
  Clone ID: PAT_MRT3847_137517C.1.pep
NSFFLYQEAYTKRQCFDRLLGPHTPGEENCSPSPMFGRVHSSQGFSNRSLVLRDVFQAREKAPQQLLHLCVFRSTFKKSGMAFFYKKIEPRDFFSRCLSELPFPGKKIKLPKFFHLFVSMKKFLYWKTPGFLPDRVGAKIPYPGKGVEVTVYV

SEQ ID NO: 184388 - protein, 123 aa, Glycine max
  Clone ID: PAT_MRT3847_137518C.1.pep
MDNKKRGAREGEDEDEMKMEKFYALLRNFRDARDRRRRELVELEKHESNIWKKMMKGTAPTATKDNKAEVSFEFQDFTTEIQFRKPPLVFPNPVSSCDTSKDNNKGNKKKKQQDLALDLKLAL

SEQ ID NO: 184389 - protein, 129 aa, Glycine max
  Clone ID: PAT_MRT3847_137519C.1.pep
MIFQQPSKTEKKEENNLNKQTSMANTYSWLFLAICATLLLLLSSSPTADAGALGMEMTWIPSMPMEEEFQLDSEISRRILATTKYISYGALQRNTVPCSRRGASYYNCQPGAQANPYSRGCSAITRCRS

SEQ ID NO: 184390 - protein, 38 aa, Glycine max
  Clone ID: PAT_MRT3847_13751C.1.pep
MVYLLFFYILSCTLFIAQSVSCQYSHIYCLLTRHRLKF

SEQ ID NO: 184391 - protein, 116 aa, Glycine max
  Clone ID: PAT_MRT3847_137520C.1.pep
PSLTAYISPPQGSLSDAPFSTQALRRPLQTPGALETSNNRFRRLGSRPPSLFPSYHTTPNMAFAPPLPRLGAPLRLPKLLASLPNLGELSVVKPSNCRNPSRVFLITRSKIRYTAR

SEQ ID NO: 184392 - protein, 123 aa, Glycine max
  Clone ID: PAT_MRT3847_137521C.1.pep
MTTTHERVHPIPNLAMSPTTSSSTAHWTSDAIHGGSLRRVDLDSGTNGWASPPGDLFLLRSSNYFTKRQKSPAGDYLLSPAGMDWLKSQSKLENVLSRADNRVGQALRQAQAQGKSLESFIFA

SEQ ID NO: 184393 - protein, 99 aa, Glycine max
  unsure (1)..(99): unsure at all Xaa locations
  Clone ID: PAT_MRT3847_137522C.1.pep
KIIFSIMXXXESLVKSKKASHKQVMLTXMNERIMPSKRPNHTLKNLILSSSPTLYINSCIFLAFFSFLPFPSYCTLVFAINIYTNTTNNEYLQTEKYLQ

SEQ ID NO: 184394 - protein, 145 aa, Glycine max
  unsure (1)..(145): unsure at all Xaa locations
  Clone ID: PAT_MRT3847_137523C.1.pep
TAARRRQKGGGSLKFVDLSANNFSSGIEEIGGGQCGIQFLNLSHNLLKGRLPNSIGKQNSLKSLDLSFNELGSNLPEVLGNLTSLERLKLQQNHFTGKIPNEFLKLLKLKELNLSNNLLEGEIPERKPFDXFPESSYSGNKGLCG

SEQ ID NO: 184395 - protein, 55 aa, Glycine max
  Clone ID: PAT_MRT3847_137524C.1.pep
FAGTLFFTLSKNHANKRFILCLYFFIVRSQHILLPFNSQPTYSINNTTTYIYTLT

SEQ ID NO: 184396 - protein, 81 aa, Glycine max
  Clone ID: PAT_MRT3847_137525C.1.pep
CDRVKSKRRRFSSNSIAHPWMGLRFFIHSSISHKKNRFFNLSLSLSFSELRFSVPRHNTTLFNLADVSLLTGLSYFRADAW

SEQ ID NO: 184397 - protein, 161 aa, Glycine max
  Clone ID: PAT_MRT3847_137526C.1.pep
MASSEGFLTDGQRELLKIASQNAENLSSSPKSQSSLLSDHHVKAPAGGKAQTAGIAVRHVRRSHSGKYGKVKKDGAGGKGTWGKLLDTDIVSHIDRHDPNYDSGEEPYQLVGTTVTDPLDEFKKAVVSIIEEYFSNGDVELASSDLKELGSCEYYPYFIKR

SEQ ID NO: 184398 - protein, 67 aa, Glycine max
  Clone ID: PAT_MRT3847_137527C.1.pep
ALVRDPTPISVILLQLHLSVRGPQLNMLLLVFLPSSFATNTFHVFIFHLVFLSFLLRCFRSQHLKAK

SEQ ID NO: 184399 - protein, 150 aa, Glycine max
  Clone ID: PAT_MRT3847_137528C.1.pep
TRRTTRGFAGFGSKRKPTRKDLDKYDIVVVGGNLRSIFSRHLDDDAHGKYSMMVVLNEPVNQLWPLRTVYEQQRCSKTDYMMNAKHGINMYTAYEITTVDKFLSEENAIVLKNGRKIQYEQLVDSMGLNEDFDAIPGLEDAFADVDHPVV

SEQ ID NO: 184400 - protein, 90 aa, Glycine max
  unsure (1)..(90): unsure at all Xaa locations
  Clone ID: PAT_MRT3847_137529C.1.pep
PILVVTFPNTIVHIEAYMKGRVELLSTTTNGEFVQGKDLNMGHVNVPSAAXSLTSSYTSTPLVDIWFEKDRGIIEEYLGRISIVHYIVEY

SEQ ID NO: 184401 - protein, 203 aa, Glycine max
  unsure (1)..(203): unsure at all Xaa locations
  Clone ID: PAT_MRT3847_13752C.1.pep
VAKRLIDVYFALFKVLISGTSSNQKFDKSSKANRKEEKSRESSESHVELDSRLLSSLLTGVNRAFPFVSSNEADDIVDIQTPVLFQLVHSKNFNVGVQALMLLDKISSKNQIASDRFYRALYSKLLLPAAMYTSKAEMFIALLLRAMKRDVNLRRVAAFSKRLLQIALQQPPQYACAXLFLLSELLKARPPLWXLVLQTXSVD

SEQ ID NO: 184402 - protein, 84 aa, Glycine max
  Clone ID: PAT_MRT3847_137530C.1.pep
RLDYKAKKKWNKSEGTSKKEARADGRDHEKKDPRECRLNISGGGVKSETALDPGVTIEGSRRPDDQSAGPWKKIECAVECNRRA

SEQ ID NO: 184403 - protein, 67 aa, Glycine max
  unsure (1)..(67): unsure at all Xaa locations
  Clone ID: PAT_MRT3847_137531C.1.pep
QNRIMPNAXDLNNAKGRLGAMHILMGFTFVFRLEAFSHLKIFLFQKKFPHNPFPIPSALGMTYIWVH

SEQ ID NO: 184404 - protein, 79 aa, Glycine max
  Clone ID: PAT_MRT3847_137532C.1.pep
SVSQHHQSTSSSCLEAVHVYKQPVHMVVTSSTSAFPSTFSTTRSAVSSAHRKGCCLGIPLSNSTVTCQPLEHHGDTQQD

SEQ ID NO: 184405 - protein, 99 aa, Glycine max
  Clone ID: PAT_MRT3847_137533C.1.pep
RGGASFLLGVGPLDRKEKKNFTRGFTRYKPLSLYKQGNIGNFILTFGGLKAKKGGALAGNIQKNKPFTWENFKAFALGTRAKIGGFPKRLKGEGIPVLK

SEQ ID NO: 184406 - protein, 700 aa, Glycine max
  Clone ID: PAT_MRT3847_137534C.1.pep
MMLIGDGAGCRKVLVGVKLDPRSRELLTWALVKVAEPGDLVIALHVLDSITEGTASLLSLVKTFDSVLGVYEGFCNLKQVGLRLKVCRGGSVRKALVQEAKAFGVSTVILGTSKSYHTIRSSAWVAKYCAKKLPKCISVFSVDNGKIAFRREANGNCSDREKLCEGSSLSSKSLVVYTNKNMKSCGSCALQEGSGTEFEQGLCEDVEKENPLALVPFKKLEDAPCFSVVVDNSKPKPGWSLLRHVFHHKKHNHKSSSMKNTFVFQRALRQPNCHSSAVVHPDHKQISFKQIDDSPLDGVSGAIVPFESATTTLFTLPSICSGLSSLPEELLVLQEKYTSSCRLYSLQELLSATSNFVSDNLIGKGGCSYVYRGCLPDGEELAVKILKPSENVIKEFVQEIEIITTLRHKNIISISGFCLEGNHLLLVYDFLSRGSLEENLHGNKVDCSAFGWQERYKVAVGVAEALDYLHNGCAQAVIHRDVKSSNILLSDDFEPQLSDFGLASWGSSSSHITCTDVAGTFGYLAPEYFMHGRVTDKIDVYAFGVVLLELLSNRKPINNECPKGQGSLVMWAIPILEGGKFSQLLDPSLGSEYDDCQIRRMILAATLCIRRVPRLRPQISLILKLLHGDEEVIRWAEQEVNAPQELDGCDEEPVPTNIQSHLNLALLDLEDDTVSISSTEQSVSLEDYLQGRWSRSSSFD

SEQ ID NO: 184407 - protein, 151 aa, Glycine max
  Clone ID: PAT_MRT3847_137535C.1.pep
REHICRKEQLEKAQTADPLWNASQLEMVHYGKMHGFMRMYWAKKILEWTRGPEEALEISLYLNDKYELDGRDPNGYVGCMWSICGVHDQGWKERPIFGKIRYMNYAGCKRKFDVDKYIAYVNKLVRELKKRKAENLLSQKEKVVRSCDPED

SEQ ID NO: 184408 - protein, 105 aa, Glycine max
  unsure (1)..(105): unsure at all Xaa locations
  Clone ID: PAT_MRT3847_137536C.1.pep
TKAYVNIFEXPTTRRRKGRNLKARKRAHPQTQGGRQTTANHHEPEAAKRSQAPGRRRPHTNPARPKRATGAEHANPEKQKPRAHRENTTRERRRIHGHLNGIGGL

SEQ ID NO: 184409 - protein, 137 aa, Glycine max
  Clone ID: PAT_MRT3847_137537C.1.pep
MEHSTSFNDSNNSLSSQRSLVSVPSLNSHSQFLTPSTTYHTCLTTLKFLTSSSVYISSLTLAGKFLYAGSSDREIRSWNHTHFIQNQKPTTTTTTTTTNNNNNSVVIAGKGAVKSIVVHSDKLFTVHQDNKIRVWKV

SEQ ID NO: 184410 - protein, 90 aa, Glycine max
  Clone ID: PAT_MRT3847_137538C.1.pep
EKQQTGKKNLNNVHNSNKAIDLGPCPPKKVRIALKENLGGGDFSHITIIYSNCFGGSTSKQLGLITQIAELEQFCIKDVGHAGEGDTMAP

SEQ ID NO: 184411 - protein, 135 aa, Glycine max
  Clone ID: PAT_MRT3847_137539C.1.pep
AWYEVAASLAPGAPEPQEEPQHKQDESQVEKDPFAASDAINKPQELVEGFKKTKDPSSTDLTSALEGLDVTTLPPPEATQSTQINVEGFEGNYGGVEFGHEQASIGEAFEGFNDAWGGGLDPSEFVGPTKPNKPH

SEQ ID NO: 184412 - protein, 30 aa, Glycine max
  Clone ID: PAT_MRT3847_13753C.1.pep
KTNIKTVFATEAWLFDFLVLNIYISCFPVL

SEQ ID NO: 184413 - protein, 419 aa, Glycine max
  unsure (1)..(419): unsure at all Xaa locations
  Clone ID: PAT_MRT3847_137540C.1.pep
MLEKLNTYSRYTSSLESYGSFDKLQLVINLIGLTCLSSLPEYQSCIIESKGIKAIVLLVKRCLSNDIHVERRNFTPHLHTTFQERSCCCMDKEDWEGSNVLLFYSLLGLSEILRQCDLLQDNSQQYSREVTNIRAQLVSKLHEICSGNSFSPGVRWYVLYILTYFGFYGFPNELAKRIGKSLNKEEYSDMRLVVSSHVEYEALVLLLKYEYLGCLHAGEETVKKLKILAKRCKLQHLLQMLYRQRPKWGTPFPSFNLTPSLGSAGSCFSDAILEAKSNKLVGWTCNICSDTVPHMHVHKVILQSGCDYLQGLFRSGMRESHSQVIKVDISWEALIKLVQWFYSDELPNPPSGCMWDNMDDEEKLFNLHHMWSFVXLAEFWILENIQEACWNVIMSCLDNEQFFIQIHTINSGCYYRLEN

SEQ ID NO: 184414 - protein, 177 aa, Glycine max
  unsure (1)..(177): unsure at all Xaa locations
  Clone ID: PAT_MRT3847_137541C.1.pep
MEHSLNPSMGKAVSGSANEESGWTSYFEEFSKGMEQQSYCSSLGGSXLVSDAASCAAWKLSHHNHLVSYPSNNVVSKKLRFKKTRTQQISDDDPLDDTASSPVNSPKVGDLKVSGKNDDQLNGFTSRGKGFNSQHYPKLQADECDINFNGNNVECNTNLKKKGLCLVPLSMLVNYYG

SEQ ID NO: 184415 - protein, 96 aa, Glycine max
  unsure (1)..(96): unsure at all Xaa locations
  Clone ID: PAT_MRT3847_137542C.1.pep
SVLGVLRSGGGCLLLGARPQDIPYVYXLTHVIFVAVRWIYYRAKKWHYYLLDGCCYANTICLMELLFYSSNEKLSMRCLFLAEGPLAWAMIVRRCY

SEQ ID NO: 184416 - protein, 90 aa, Glycine max
  unsure (1)..(90): unsure at all Xaa locations
  Clone ID: PAT_MRT3847_137543C.1.pep
ADYDHHPESKAYAGAYKSXPKQARTMSENGYLVLIRQPXKAVEFSTSITAKHDHAECHFVGIDIVTAKKLEAIEPYSDNCDVPHENPTDY

SEQ ID NO: 184417 - protein, 130 aa, Glycine max
  Clone ID: PAT_MRT3847_137544C.1.pep
LLFRCILNGNFYAGTLHRQSSGIENSSNPPKLRRNASTACDTISTPQYGPSDPAPLKCTSGFCFDEKLFVQSLYKVLVSLSETSSVILYIKDVEKLFVRSTRLHNLFQKLIKKLSGSVLILGSQIFDSED

SEQ ID NO: 184418 - protein, 64 aa, Glycine max
  Clone ID: PAT_MRT3847_137545C.1.pep
LLHCFFRLLLLQVRSIFSGEDPPRFSRKKKRKKKMLNAGLNSLLNFPSMVSASHCHRSLVPIAA

SEQ ID NO: 184419 - protein, 112 aa, Glycine max
  Clone ID: PAT_MRT3847_137546C.1.pep
NICGCHFNPAVTFGAFVGGNITFLRGIIYVITQLLRSIVVFILLGFLTACTVPAFGLSAGVGVGNALMLEIAMTFGLVYTVYATAIDPKKGNTGIIAPIAIGFIVSANILAG

SEQ ID NO: 184420 - protein, 499 aa, Glycine max
  Clone ID: PAT_MRT3847_137547C.1.pep
MIGVAAMPSGCSIRAIWILNNLDGVVFSRRFPVVEKRWRAACNSNAHNDTHQIFSSLPTDSDLADAFLDRKHREGSARGFGIRKSNSTLGSDSWVDDPITRHIIGLYISREGEENKNLLWPLILHTKGLYSILILPLVEPIHLNAYARLCKRPDCGAALGMDDGLSSLLLDLPSVTGAFMIAHAIGDIITGDTVEPEVIVSAAPSVGGLFDSLTGSIGISSRAKPVAPPVASSSPSSAAVPGSVTADAPKMGSRLLDKDALRTFISSSMPFGTPLDLNYSNIITIKTNGFSATDLPPADQKQPAWKPYLYKGKQRMLFTIHEIIHAALNNRDEIPDTISVSGQINCRADLEGLPDVSFHLAGLNTANLEVLSYHPCAQVSDQGLDKQGVMFSPPLGNFVLMRYQAAYALGPPIKGFYQLSMVSEDKGAFLFKLHLMEGYKAPLTMEFCTVTMPFPRRRIVSLDGTPSVGTVSTSEHSVEWKIVTSGRGLTGKSIEVTLP

SEQ ID NO: 184421 - protein, 109 aa, Glycine max
  unsure (1)..(109): unsure at all Xaa locations
  Clone ID: PAT_MRT3847_137548C.1.pep
EVHPQLAPKLFKLHGADVGATRGPMSDXEVLQSKNALPMNSSRGAILRRALLAGFLTEGRFRASGAFVQSPGINGMTYGEATDDIPDNAGISXTLAQNGSIQGRALLEF

SEQ ID NO: 184422 - protein, 128 aa, Glycine max
  Clone ID: PAT_MRT3847_137549C.1.pep
MWYVSQPNHQLLRHVFLHAQPQTTTLHDSDNIYDYSSFTPSSFSSVDCNLSLGTPSTCVSEDEEKRSRHECHSVSNFCWDLLQSKHNNPQSHSKSSGTTNTTDPLLARRCANCDTTSTPLWRNAPVAL

SEQ ID NO: 184423 - protein, 105 aa, Glycine max
  Clone ID: PAT_MRT3847_13754C.1.pep
PSDTWPQKSPLAGRDPIPSLTESILPRTRRRRPNLEAKAKKTKEPKPNKALRPGHPPTQPIYEKIVKDANTSLKEKTGASQYTIAKFIQGKHMHDTPDLMKQKLY

SEQ ID NO: 184424 - protein, 56 aa, Glycine max
  Clone ID: PAT_MRT3847_137550C.1.pep
GLEVFGLFWRLEWEVREGQGASERTERSIYLKIISLVCDFVLELNSKFEYACVAVN

SEQ ID NO: 184425 - protein, 27 aa, Glycine max
  Clone ID: PAT_MRT3847_137551C.1.pep
FSFPFHLTPNSFVLMQFPSIQFKLQLL

SEQ ID NO: 184426 - protein, 74 aa, Glycine max
  Clone ID: PAT_MRT3847_137552C.1.pep
SMRQLENLGLVWEFHTRLAGFEKKSLSFLTNVVKTKGMNRGIFFWVNWVCKIALIKLKLLARNGTHAPTWESVL

SEQ ID NO: 184427 - protein, 68 aa, Glycine max
  Clone ID: PAT_MRT3847_137553C.1.pep
ACKWFFGAFFWVKISFSPPSGRGSWLSQELGAPGHQRLKWVQKKYIFSNFCPDTKGFPQGFLPERNFF

SEQ ID NO: 184428 - protein, 28 aa, Glycine max
  Clone ID: PAT_MRT3847_137554C.1.pep
LDFHLHSSFNGESDVGLGGSSTSKDAFN

SEQ ID NO: 184429 - protein, 56 aa, Glycine max
  Clone ID: PAT_MRT3847_137555C.1.pep
LTGIGVFWGPKFLINKNITVVRQRNVLHRCSDIRENGVKHTGTAKGNRRSHCKSAC

SEQ ID NO: 184430 - protein, 43 aa, Glycine max
  Clone ID: PAT_MRT3847_137556C.1.pep
HNTPLQKQTHSQQITIFKGLFNKRRGQPTTHIITNNQQLTPHP

SEQ ID NO: 184431 - protein, 62 aa, Glycine max
  Clone ID: PAT_MRT3847_137557C.1.pep
NYGVLLESVIVRFGFDSAGVKLLCVKLFFLFLLLSNFSITFNHSTFFFPYWKKGGDSLNKGG

SEQ ID NO: 184432 - protein, 159 aa, Glycine max
  unsure (1)..(159): unsure at all Xaa locations
  Clone ID: PAT_MRT3847_137558C.1.pep
MAHRVLLLLSLAAAAAVAAAVDAEDPLIRQVVPGGDDNDLELNAESHFLSFVQRFGKSYKDADEHAYRLSVFKANLRRARRHQLLDPSAEHGITKFSDLTPAEFRRTYLGLRKSRRALLRELGESAHEAPVLPTDGLPDDFDWRDHGAVGPVKXQGSCG

SEQ ID NO: 184433 - protein, 123 aa, Glycine max
  Clone ID: PAT_MRT3847_137559C.1.pep
PCACMCPQYQKKRLLGVRFCSFQFCINLFKFRNFRILLYSSKFKRFGPSFKSQSLVLLRWGRVAWEREGGADGRHGDLDLDGVEWVMRRNPKERLGWGGAGEKSEGKVCRDLGKRRISQGMVV

SEQ ID NO: 184434 - protein, 56 aa, Glycine max
  Clone ID: PAT_MRT3847_13755C.1.pep
YAGDLCLFIVTRKFSYSHIYEYDKYENEKYIVVFFNQNCNAVKCLNDMQEICVSLS

SEQ ID NO: 184435 - protein, 84 aa, Glycine max
  Clone ID: PAT_MRT3847_137560C.1.pep
KAECQKMVPVIGSGKFITTPLIDDEGQPIDPSMVGVQTSDKKVVQWMQLLHQIGMYMLLHKYWMLFPFCLIRKFCFLGFTEPKS

SEQ ID NO: 184436 - protein, 37 aa, Glycine max
  Clone ID: PAT_MRT3847_137561C.1.pep
LISPFSNIFFPFWISELWLHRFYIRFSYSVMYSLFSY

SEQ ID NO: 184437 - protein, 323 aa, Glycine max
  Clone ID: PAT_MRT3847_137562C.1.pep
MTTFMDMYNTTSSIMTPDFLDQCSDQELMKALEPFMKSDSSSTTSSSITTYPSFSSFSSSPNLSSTTWSTQFCSSSYHQKGPTPTQASSFKLNQLTPSQIFQIQAQIQVPRGQFLSPKPIPMKHVRASPSSKPTKLYRGVRQRHWGKWVAEIRLPKNRTRLWLGTFDTAEEAALAYDNAAFKLRGENARLNFPHLRHHGARAYGEFGNYKPLPSAVDAKLQAICQSLGTKLQKLKTQNPIVLDTHKAETETSEFQDFNKVENYQTSSSSALSDEYSSSSSSSSPESDITLLDFSDSCETIDNLGLDLEKYPSVEIDWAALSDS

SEQ ID NO: 184438 - protein, 61 aa, Glycine max
  Clone ID: PAT_MRT3847_137563C.1.pep
WLFSTYLILLLAIFSLGKTPNMKSINRDGSFGIMKMEYPTNSKHLKSLKKTDEMHLIAIMF

SEQ ID NO: 184439 - protein, 46 aa, Glycine max
  Clone ID: PAT_MRT3847_137564C.1.pep
TAARRRQKGPPCELTKHNPPVSNYNILFMVSFIPLPKGPMKLQRAN

SEQ ID NO: 184440 - protein, 94 aa, Glycine max
  Clone ID: PAT_MRT3847_137565C.1.pep
HASPEHRPSDHPSQHPSGNQQARALFLFDQNSAPVSHARDRRTHEHKQHYGETSSASHRRHYIPLNEPAPEPQSQLVHPLSRQAMLPYTACCSR

SEQ ID NO: 184441 - protein, 47 aa, Glycine max
  Clone ID: PAT_MRT3847_137566C.1.pep
FFFSYKYIIIIINIIISHDIVLSSLYLLEYERYNSDSWTEHSSCYRD

SEQ ID NO: 184442 - protein, 57 aa, Glycine max
  Clone ID: PAT_MRT3847_137567C.1.pep
EKQWSLKCCNKLINNLVPLPFFLAVTLSKLSFFRNVSFMLILYKSALTNYRVSPSVV

SEQ ID NO: 184443 - protein, 178 aa, Glycine max
  unsure (1)..(178): unsure at all Xaa locations
  Clone ID: PAT_MRT3847_137568C.1.pep
MLVRIKTSSLQSKQNFHHRIMYDSPCEACWKIFSFXQHGRKPAIERLYFHLEDEHPVYFKGQTXIDAVMSKKTVKESMFTTWMEANKIYPHDRKLTYPQYVSSFVYVARNRCWKPRKQGYTIGRLIWVPPSTGELFFVRMILFXAKGPTSYDEIRKIDGVRYPTFRAACFALDFLEMM

SEQ ID NO: 184444 - protein, 109 aa, Glycine max
  unsure (1)..(109): unsure at all Xaa locations
  Clone ID: PAT_MRT3847_137569C.1.pep
FNALFNSFSITSSTVILCICTQFLLCVGQEPLTKISETRNEDIRDDKFISPAIDAQDDVSPNRSSSETRDGKHAQARTDGVGNGYLDPKSSKGDKWQNGELGHXKGNEK

SEQ ID NO: 184445 - protein, 106 aa, Glycine max
  unsure (1)..(106): unsure at all Xaa locations
  Clone ID: PAT_MRT3847_13756C.1.pep
HWNPLRKRLHIMAALQRDDVELVVPXDSFITTDYMTYMFKYDSVHGHWKHHDVTVKDEKTLLFGDKPVTVFGHRNLKRXPWKSTGADIIVESTGVSXDKDKAAAHL

SEQ ID NO: 184446 - protein, 64 aa, Glycine max
  Clone ID: PAT_MRT3847_137570C.1.pep
FLYLEVKLVYWQGMFVFSRDVSVSNHRRGKFCSHNLSWLTLLSYQQLNSLLTTCVSIPLRISSV

SEQ ID NO: 184447 - protein, 46 aa, Glycine max
  Clone ID: PAT_MRT3847_137571C.1.pep
EWMAAFLVLISPCCNDFPVPRLNIYHIECCTSFASKFPFNVHLVSC

SEQ ID NO: 184448 - protein, 35 aa, Glycine max
  Clone ID: PAT_MRT3847_137572C.1.pep
PQLSFHLILLEIRAALRNFKTRMHFEFVLYVAWQS

SEQ ID NO: 184449 - protein, 443 aa, Glycine max
  Clone ID: PAT_MRT3847_137573C.1.pep
MKLEESVSNSNITAPLLPPEDPSPSPQNGSISGAVFNITTTMIGAGIMSIPATMKVLGIVPGLVVIVLVALITDVTVEFMLRYTSSGKSSTYAGMMAESFGSIGSLAVKICVIITNLGVLIIYFIILGDVLCGNESNGITHLGILQEWFGINWLTSRAFALLFVALFIMLPLVMLRRVDSLRYSSAISILLALVFVVICSSMAVSALLSGKSQTPRIVPDFSQVTVLDLFTTIPVFVTGFGFHVNVHPIRAELIKVEHMGLAARISLIICVAIYFAIGFFGYLLFGDSIMPDVLVNFDQNSHTSTGRLLNAIVRLSYALHLALVFPIMNYSLRANIDELIFSNKNKPPLASDTPRFVSLTLTLLALTYLVAVTIPNIWYFFQFLGSTTIVSTSFIFPAAIVLRDMHGISKTKDQVMAIVVIVLAVGTSGIAIWTNLNGSGDDQ

SEQ ID NO: 184450 - protein, 136 aa, Glycine max
  unsure (1)..(136): unsure at all Xaa locations
  Clone ID: PAT_MRT3847_137574C.1.pep
LLNTIGRLSYALHLALVFPIMNYSLRANIDELIFSNKNKPPLHXDTPRFVSLTLTLLALTYFVAVAIPNIWFFFQFLGSTTIVCTSFIFPAAIVLRDMHGISKTKDQVMAIVVIVLAVGTSGIAIWTNLNGSGAAQ

SEQ ID NO: 184451 - protein, 110 aa, Glycine max
  Clone ID: PAT_MRT3847_137575C.1.pep
EHIDELIFSNKNKPSLASDTPRFVSLTLTLLALTYFVAVAIPNIWFFFQFLGSTTIVCTSFIFPAAIVLRDMHGISKTKDQVMAIVVIVLAVGTSGIAIWTNLNGSGAAQ

SEQ ID NO: 184452 - protein, 115 aa, Glycine max
  unsure (1)..(115): unsure at all Xaa locations
  Clone ID: PAT_MRT3847_137576C.1.pep
TRVIGDNGHRSVSGGERRRVSIGTDIIHNPIVLFLDEPTSNLDSTSAFMVVKVLQRIAQSGNIFIMSIHXPSYRIXLLDHLIFLSHGNTVFSEEAVARGIDDEAEEGDICGKVGV

SEQ ID NO: 184453 - protein, 163 aa, Glycine max
  Clone ID: PAT_MRT3847_137577C.1.pep
MDWAGPTRRLFISLNYIFCYNMKRFVFSLAWVFALLLASSLAHAAVVEHTFNVEDITVQRLCRQQLITAVNGTLPGPTINAREGDTIVVHVFNKSPYNLTLHWHGIIQFLTPWSDGPEFATQCPIASGSSYTYRFNLTGQEGTLWWHAHSSFLRATVYGALLI

SEQ ID NO: 184454 - protein, 131 aa, Glycine max
  unsure (1)..(131): unsure at all Xaa locations
  Clone ID: PAT_MRT3847_137578C.1.pep
IPRSPPLPRKPSPKKLRSGGGGEPTNPPSNLPIFTIPILRFHLGLPHYTTNRDHHTLPKPYKTHLHPLLQGGGGHLLHHLFNTFLQXERRYLHLPPRGAPXKNPSXTSKTNGRLIILPPLPXKTGGGGNNN

SEQ ID NO: 184455 - protein, 56 aa, Glycine max
  Clone ID: PAT_MRT3847_137579C.1.pep
TLGAHSACVSRRPNSSQNRRSKKGTVKCGNIVGWERVSGSSSCISPSTQKEIKREN

SEQ ID NO: 184456 - protein, 92 aa, Glycine max
  unsure (1)..(92): unsure at all Xaa locations
  Clone ID: PAT_MRT3847_13757C.1.pep
PTSKRTEDKVLFLGIPLFVLGLTIDDADEVDPNLNLIKGCGGALFXKKMVEAASNKFVTDKDDTKLVDGLGGSGLAMPVEVVXFCWKYNLDQ

SEQ ID NO: 184457 - protein, 86 aa, Glycine max
  unsure (1)..(86): unsure at all Xaa locations
  Clone ID: PAT_MRT3847_137580C.1.pep
GAXGXXEGGAHXXGYGXXGGAGDGGGARGEHGGGYGGGLHSLSCLHSSHLHLFPNFLQSTFSITPNGSQYHLLPLILRLYILILQR

SEQ ID NO: 184458 - protein, 42 aa, Glycine max
  unsure (1)..(42): unsure at all Xaa locations
  Clone ID: PAT_MRT3847_137581C.1.pep
SKGHXLSFKTYPHQTKTILKNGYIVIKCRPFNVVEFFNHKTF

SEQ ID NO: 184459 - protein, 69 aa, Glycine max
  Clone ID: PAT_MRT3847_137582C.1.pep
ILKIEMVLANNLNCLFKIIFTNYPTTSSKNSTAIQVLREIHTYQTIFLDLVIVKNEKIYTIGFYFNGQD

SEQ ID NO: 184460 - protein, 39 aa, Glycine max
  unsure (1)..(39): unsure at all Xaa locations
  Clone ID: PAT_MRT3847_137583C.1.pep
MAKDVEVAERGSXSGKDYQDPPPAPLIDXEVAHGLVHTH

SEQ ID NO: 184461 - protein, 55 aa, Glycine max
  Clone ID: PAT_MRT3847_137584C.1.pep
RIYINSSTIVGEHLARFGKVWAFASDGRQLIQRSNILMYKKKKNTNSVYQPAQSN

SEQ ID NO: 184462 - protein, 60 aa, Glycine max
  Clone ID: PAT_MRT3847_137586C.1.pep
KRSRRSLNLSRNLISNRRVFSQYCKSGKDNDSGSLCPAQRVIVFPLRNRTQISRKKLTDS

SEQ ID NO: 184463 - protein, 52 aa, Glycine max
  Clone ID: PAT_MRT3847_137587C.1.pep
MLGLFVQVMEGVKEITRNGAKFMDGKEKEFDAIILATGYKSNVPTWLRVEIL

SEQ ID NO: 184464 - protein, 74 aa, Glycine max
  Clone ID: PAT_MRT3847_137588C.1.pep
YNARPPPHTQRGDTNRQAGCKTSPKQRQGTRTGEGAGGPPDCPTQPGNPKEETTSSSRSPTKTRARRTPPQRQP

SEQ ID NO: 184465 - protein, 108 aa, Glycine max
  unsure (1)..(108): unsure at all Xaa locations
  Clone ID: PAT_MRT3847_137589C.1.pep
VVLCSVSAVSSCCVCVPLCVPALVSFPLGRFVSLLRFLRAVVPVRLCAVSVSPVLLGPPCACRPCAFRPRLPAVWSGPVSVTFWVVRWAFVFSSPALRPXAPPLRGRE

SEQ ID NO: 184466 - protein, 72 aa, Glycine max
  Clone ID: PAT_MRT3847_13758C.1.pep
KKPPCGIKRFCKPCFLLKGSTKMGLFYLRLKNKFWLGPPDFFRGPFPQKCSRHCGYKKKRAPRDWACLGGGF

SEQ ID NO: 184467 - protein, 205 aa, Glycine max
  Clone ID: PAT_MRT3847_137590C.1.pep
MIKVGDSCFSIVQNSSPIEEGGFRLISDTYQPECKKSRWDMSSSSNNINFQQPNSSISSSIEEPDPEAIAQMKEMIYRAAAFRPVNFGLEVAEKPKRKNVKISTDPQTVAARHRRERINEKIRVLQKLVPGGSKMDTASMLDEAANYLKFLRSQVKALESLGNKVDAMNCPPTSIAFSFNPSFPMQTPPLCHIHHSHGVKQNNPP

SEQ ID NO: 184468 - protein, 36 aa, Glycine max
  Clone ID: PAT_MRT3847_137591C.1.pep
FLGVQRKKICEECLKGFQLYNVSIVVKELKSILVNR

SEQ ID NO: 184469 - protein, 53 aa, Glycine max
  Clone ID: PAT_MRT3847_137592C.1.pep
IGMTLVHRQQLRLERSPGRFHMLQQQRMREVVLRRRLNSQWEQSIQSLRPIWL

SEQ ID NO: 184470 - protein, 52 aa, Glycine max
  Clone ID: PAT_MRT3847_137593C.1.pep
YYEDTVILSLGSMTYIVRRTGSYFMVVMLGVILCNACYLYVWWFVTAYMEGC

SEQ ID NO: 184471 - protein, 142 aa, Glycine max
  Clone ID: PAT_MRT3847_137594C.1.pep
KHQSQPEKMCDEEVAALVVDNGSGMCKAGFAGDDAPRAVFPSIVGRPRHQGVMVGMGQKDSYVGDEAQSKRGILTLKYPIEHGIVTNWDDMEKIWHHTFYNELRVAPEEHPVLLTEAPLNPKAYREKMTQIMFETFNTPGMY

SEQ ID NO: 184472 - protein, 130 aa, Glycine max
  Clone ID: PAT_MRT3847_137595C.1.pep
RSAISSKPSRNTLHPWTLAEIFLAGTAFYIIMPRKNNLRKNNARFVDEEHHDEVEHCDEEHRDEDVHHYIQQLINSLNKSQSESHGTESNHLNNSASTNAEQGSLKTRNVRGPTLLRDIWTMPPGKTIDV

SEQ ID NO: 184473 - protein, 103 aa, Glycine max
  Clone ID: PAT_MRT3847_137596C.1.pep
TRPRTRGRTRGRTRGLFQKSMLSSEGLRKRQQLQLQPLEKCQNHIRIGRTMNLLTTGFPRRPLIHPMLPTSLVALVLSPTTLFLLVSPLNQSQVLHCPVSVCQ

SEQ ID NO: 184474 - protein, 112 aa, Glycine max
  Clone ID: PAT_MRT3847_137597C.1.pep
FRDNGHPRPHPWLQVEVLLQSFQRWWTCQPMSLAAATVLGTRENLISNSFAFPSKFQRLSSSLSLNIESPHFMTYLISHHDLAPGFAPRKCCCSEAKESDGLDVLSICHFWN

SEQ ID NO: 184475 - protein, 217 aa, Glycine max
  Clone ID: PAT_MRT3847_137598C.1.pep
MSKISVAGVRTNVQQLLEYSNETKKRNFLETVELQIGLKNYDPQRDKRFSGTIKLPTLPRPRMSLCVLGDQHDIDRAKHHGVDAMSTDDLKKLNKNKKLIKKLAKKYDAFIASDALIKQIPRLLGPGLSKAGKFPTPVSHAEDLANKMNEVKSPIKFQLKKVLCMGVAIGNVGMTEDELIGNIMLAINYLVSFFKKGWQNVGSLTIKAPMSPPKRLY

SEQ ID NO: 184476 - protein, 74 aa, Glycine max
  Clone ID: PAT_MRT3847_137599C.1.pep
GACPGAAFGVGSACTSAGAVCYTGFLALWWANWALGASPGESPAPPFLPPPPPPPPPPPPPPPPPPPPKQAALL

SEQ ID NO: 184477 - protein, 56 aa, Glycine max
  Clone ID: PAT_MRT3847_13759C.1.pep
LVFVMELLVYRKKEFSRSGGTQGTPRNSKRETRGGPIRDIPGVNKEGRNAGYKGGK

SEQ ID NO: 184478 - protein, 33 aa, Glycine max
  Clone ID: PAT_MRT3847_1375C.1.pep
RCEEIHLNMVNRLVNNQNIIVYMLEPTHLQFLI

SEQ ID NO: 184479 - protein, 83 aa, Glycine max
  Clone ID: PAT_MRT3847_137600C.1.pep
KEGPYDVVVLPRGNLGAQNLSESAAVKEILKEQENRKGLIAAICAGPTGLLAHEIGFGSKVTTHPLAKDKMMTGGHYTYSENR

SEQ ID NO: 184480 - protein, 143 aa, Glycine max
  Clone ID: PAT_MRT3847_137601C.1.pep
PRVRPHLPNSLSNYYVICFMFQSFLRIPSTPIRLMAKAILLSNKWYGYEQFWVTRSYPTIQKFSHGKMDLKVKAATSLNSNAKQKANLFAEKKERIRLPTYNDDLGGKKYHISEFLSQPSGIAAVLNTKALQSFESLDANTYR

SEQ ID NO: 184481 - protein, 428 aa, Glycine max
  Clone ID: PAT_MRT3847_137602C.1.pep
LLHVLEDNPNNKECFMDLGLFPEDQRIPLPVLIDIWAVLYGFDDDGIEAMDIINKLDSMNLVNVLVARKNSSDSDNYYYNNHYVILHDLLRELAIYQNNLEPIEKRKRLINDINESEEKQQGMIARLLSKFCRCSVKQTLQQVPARTLSISADETNTSYQSHIQPSLAEVLVLNLQTKKYSFPEYIEKMSELKVLIMTNYGFHPCELDNFKLLSSVSNLRRIRLERISVPHLGALKNLGKLSLYMCSNISQAFENGTITVLDSFPKLSDLNIDYCKDMVKLPTGICDIVSLKKLSITNCHKLSSLPQEIGQLLNLELLNISSCTDLEEIPDSIVKLSKLRLLDLSNCISLSSLPEDIGDLCNLRNLNMTSCARCELPYSVTNLENLKVVVCDEETAASWEAFEAMLPNLKLEVPRVEVNLNWLHSISS

SEQ ID NO: 184482 - protein, 148 aa, Glycine max
  Clone ID: PAT_MRT3847_137603C.1.pep
EKGGPRLVIMGETKQLVTLLTQFQEAMRMVKDIVEKSRSSKTSKRLLRKTLKNMTPLLQEINQYNEHLDPPREEIDTLIKEKDAVEEIVCCYSCSRSIWWTKLFSWLPLYGDKFWNNKNYSLAADDNQVKYIKNTLYKVKEVLERLDI

SEQ ID NO: 184483 - protein, 105 aa, Glycine max
  unsure (1)..(105): unsure at all Xaa locations
  Clone ID: PAT_MRT3847_137604C.1.pep
GTVTSAPVPIPSFSVLNASASKVSVAXDKGSSPQAISLCTIKASLKYNGVDVECTGASVIQANNAMDIEELLGTDDWNLVISTNSYSVDPVENIQPDNNQSFTHN

SEQ ID NO: 184484 - protein, 81 aa, Glycine max
  Clone ID: PAT_MRT3847_137605C.1.pep
VGLWYQKSTIQHQFPLIYWFSLCLYFSPCNFKNLVTEKPHNWENLFALPNQKKCASGRKKTDFAPITITTQWYKIHGKINR

SEQ ID NO: 184485 - protein, 72 aa, Glycine max
  Clone ID: PAT_MRT3847_137606C.1.pep
VRRREMPFYNVGPVTTDLDHDYDHIPSRIAAANIAAIIADFMRFETSKVHVVLPHHDDIKALNVAYYIELHA

SEQ ID NO: 184486 - protein, 40 aa, Glycine max
  Clone ID: PAT_MRT3847_137607C.1.pep
KIFVPIFLYALSTTENTLIYRWCRYFFTVFTSEVNFIMDF

SEQ ID NO: 184487 - protein, 65 aa, Glycine max
  Clone ID: PAT_MRT3847_137608C.1.pep
ETCETTRFQFSLISWIKVTTMRRTLSIAPISLFVFSWQNLRAAKSTVKLETKKQSSYPAILYTDG

SEQ ID NO: 184488 - protein, 110 aa, Glycine max
  Clone ID: PAT_MRT3847_137609C.1.pep
IIKEAFMRKIKGFPLVETFPPLKPCYNVSGVEKMELPEFAILFADGAVWNFPVENYFIQIEPEDVVCLAVLGTPMSALSIIGNYQQQNFHILYDVKKSRIGYAPMNCADV

SEQ ID NO: 184489 - protein, 74 aa, Glycine max
  Clone ID: PAT_MRT3847_13760C.1.pep
ISGPEFNFRCTIKKVLYLKPGDVKFDPLKRRPLFFLLSFLFFLRVFFYIYFFFFFFLFFFLLFFFFFYVFFFCQ

SEQ ID NO: 184490 - protein, 40 aa, Glycine max
  Clone ID: PAT_MRT3847_137610C.1.pep
NVENAGTRYKLRGDRKVTPHLLVLLTPLRTCLFFPNGQLH

SEQ ID NO: 184491 - protein, 137 aa, Glycine max
  Clone ID: PAT_MRT3847_137611C.1.pep
KGGQKKRGKKNRGHPGNKPKKRGPKKQKNTGQKKNPKKNGEKHQRQRPHRPKNPKNPHKPGGQIKGGEKNGKRRKPQPKKKDPPKKGKQRAKRPQRKKNQKNLGRPKGGTTKRREWRCPHTRPKQEPTNQKAGTGAP

SEQ ID NO: 184492 - protein, 55 aa, Glycine max
  Clone ID: PAT_MRT3847_137612C.1.pep
QRHIARSESDHSRSPVVDYLSGQSSANAELGAHRRGQVCYFLGSNCLQQTVSCLF

SEQ ID NO: 184493 - protein, 75 aa, Glycine max
  Clone ID: PAT_MRT3847_137613C.1.pep
TTHASVFLSFLLILSPIVNYFIEILASFLLHEHPCDVKICKICIVHAFLVYIYIPKKHAHILSIMAIHIFTSHGS

SEQ ID NO: 184494 - protein, 90 aa, Glycine max
  unsure (1)..(90): unsure at all Xaa locations
  Clone ID: PAT_MRT3847_137614C.1.pep
XXTILLLSIILXXKFNNHYHQYHHKFQNLYNKSXXLYXQXPXISLTSTKLSLTLTKKIXXSTFXIPPLPIISIXQSLSPTSSKSIXXSFP

SEQ ID NO: 184495 - protein, 40 aa, Glycine max
  Clone ID: PAT_MRT3847_137615C.1.pep
CTSARLYRDRIDDLTCRPISSNTPSPRYVMRFVSEMSHMM

SEQ ID NO: 184496 - protein, 158 aa, Glycine max
  unsure (1)..(158): unsure at all Xaa locations
  Clone ID: PAT_MRT3847_137616C.1.pep
MSTVGTGKLTRAQRRAAARKNKRNTRVVQPVIVEPIASGQGKAIKAWAGYSVSKWTASCAAAEAKATSAITISLPNELSSERNKQLKVGRVLLWLGLLPSVSGTVKSCVTETQTTAAASFQVALAVADNSKDVVAAMYPEAXKGITLEQLAADLTIYL

SEQ ID NO: 184497 - protein, 191 aa, Glycine max
  Clone ID: PAT_MRT3847_137617C.1.pep
THLLAVDITSGSGLHLLRQGLNYLREGSKEARIGFLFSANQSTDSFSLLFVKVFEITSSSYSHKNNVLDFLEQLCSLYQQKYLLSSAVEADSIQAFIDKVCELAEANGLPSDGYRSALPEFSADEVRRHLSKVENFFHRVLGSESSANAVFTNGRVTYPIDESTFLSPDLLLLESIEFKQRTKHILEIIEE

SEQ ID NO: 184498 - protein, 58 aa, Glycine max
  Clone ID: PAT_MRT3847_137618C.1.pep
SFFSPAFSNLGGKSCGPVSPWKVSVNVPFKFFPLPKKIFKGFHSSPFLNYFLKKAGFS

SEQ ID NO: 184499 - protein, 75 aa, Glycine max
  unsure (1)..(75): unsure at all Xaa locations
  Clone ID: PAT_MRT3847_137619C.1.pep
LFLLLKNPLKKKDLLXLSTPKTTPPMLAHSFYPVAISATWDHYTPNFIHTCQILCSHLINFSRIMDHRLHLFSDA

SEQ ID NO: 184500 - protein, 145 aa, Glycine max
  Clone ID: PAT_MRT3847_13761C.1.pep
MAEAQSGQASEGIKLFGTTITLHGRERKEDRNDSEDGTEEIKRPDKIIPCPRCKSMETKFCYFNNYNVNQPRHFCKGCQRYWTAGGALRNVPVGAGRRKVKPQFGQEERLALDEWHVAAVAHGDFRQLFPSKRRRMSSGGQRQPC

SEQ ID NO: 184501 - protein, 383 aa, Glycine max
  Clone ID: PAT_MRT3847_137620C.1.pep
MLAAPKQKMVNSGSEDLATHQLQQAITEQLFKAAELIDAGNLELAHGILARLNHQLSPIGKPFQRAAFYFKEALQLLLHPNANNSSFTFSPTGLLLKIGAYKSFSEISPVLQFANFTCNQALLEAVEGFDRIHIIDFDIGLGGQWSSFMQELALRNGSAPELKITAFVSPSHHDEIELSFSQESLKQYAGELHMSFELEILSLESLNSASWPQPLRDCEAVVVNMPIGSFSNYPSYLPLVLRFVKQLMPKIVVTLDRSCDRTDAPFPQHLIFALQSYSGLLESLDAVNVHPDVLQMIEKYYLQPSMEKLVLGRHGLQERALPWKNLLLSSGFSPLTFSNFTESQAECLVQRTPSKGFHVEKRQSSLVLCWQRKDLISVSTWRC

SEQ ID NO: 184502 - protein, 53 aa, Glycine max
  Clone ID: PAT_MRT3847_137621C.1.pep
KIDFFYLGGAPLHLTGDLYCFTTKKKKSSFMLHNTTGAIKNIELYKIWNEPVL

SEQ ID NO: 184503 - protein, 103 aa, Glycine max
  Clone ID: PAT_MRT3847_137622C.1.pep
TRVLLLEKQKMSRLMSTQQKQECSVDSLSPNHGNELKNMDSSSHVDFQKVGNPPFDENAAFDFHGPTFSPLPMVSGTEYQNQPHPFKLPAASPYDNFMKAAGC

SEQ ID NO: 184504 - protein, 92 aa, Glycine max
  Clone ID: PAT_MRT3847_137623C.1.pep
MVAAISEDPLTSSNGTIPRRPKGRQVSSRYMSHSPSPSSTTTTTTTTSTSTSTSTTSSSSRRFPSPLLSHSTNSSTPLLPKRSQSVDRRRPR

SEQ ID NO: 184505 - protein, 82 aa, Glycine max
  Clone ID: PAT_MRT3847_137624C.1.pep
MASRKYFSIVIYAFILGAFANTAFSSLSRDYYDYSCPNALSTIRSVVEAAVQKERRMGASLLRTHFRDCFVNVRLYVFLLNI

SEQ ID NO: 184506 - protein, 57 aa, Glycine max
  Clone ID: PAT_MRT3847_137625C.1.pep
EKGYTPIVGIVQIYTGKSPITGHTIYKLLGAYKRVIVRYLKETAQIKTTSLKYTLVR

SEQ ID NO: 184507 - protein, 69 aa, Glycine max
  unsure (1)..(69): unsure at all Xaa locations
  Clone ID: PAT_MRT3847_137626C.1.pep
RIXNSSRAPGYPNTHLQITTSSIRLTKKAVSGYNLEKAAHATTRQCTTLAEHHIDNPLICYSIGQLYKL

SEQ ID NO: 184508 - protein, 123 aa, Glycine max
  unsure (1)..(123): unsure at all Xaa locations
  Clone ID: PAT_MRT3847_137627C.1.pep
MWIRREHRVTDRTTETARKRTWGTGFSKQLATXCARKSERTADGSMSCPQTRXVTVVLIVSRKDEHCTMLYRTKRHIQTLSGDIADVCKTARGCWSHAGLALPVSYVAYDVGLXRDNNLCVIH

SEQ ID NO: 184509 - protein, 144 aa, Glycine max
  Clone ID: PAT_MRT3847_137628C.1.pep
KHNKQNSIQEDSILSNDKAEKIESPKYEEVSEKLEENESKEKEGSKAKDDSVEVEYKMWESCKIEKKEFSPEREAEPESFEEEVNSKIEKGGESFDKINGNAVTENIDESGSPPSKQEQLKKKKKPLLGKFGSLLKKKGASNQK

SEQ ID NO: 184510 - protein, 64 aa, Glycine max
  Clone ID: PAT_MRT3847_137629C.1.pep
DDLTGQLYYIIQRLSGTLQVGQHLAEVTRFLSVTSFLFSASIIRCGRRICEGHSSSKRRSCHDP

SEQ ID NO: 184511 - protein, 71 aa, Glycine max
  Clone ID: PAT_MRT3847_13762C.1.pep
GSKAEMVGPGKRALIALLFGISIERNDASGGSGSDGARVSYGIRNKLAYIRAYRRVAASKAVKRRDLRADR

SEQ ID NO: 184512 - protein, 243 aa, Glycine max
  Clone ID: PAT_MRT3847_137630C.1.pep
MASTESSPFKKIQIQRDDTTFDAYVVGKEDAPGIVVIQEWWGVDYEIKNHAVKISQLGSGFKALIPDLYRGKVGLDVAEAQHLMDGLDWQGAVKDIAASVNWLKANGSKKAGVTGFCMGGALSIASSVLVQEVDASVAFYGVPASQLADPAQAKAPVQAHFGELDNFVGFSDVTAAKALEEKLKASGIPHEVHIYPGNAHAFMNRSTEGIQRRKNMGMPDEDEAAVQLAWSRFETWMTRYLSS

SEQ ID NO: 184513 - protein, 429 aa, Glycine max
  unsure (1)..(429): unsure at all Xaa locations
  Clone ID: PAT_MRT3847_137631C.1.pep
RWQKVEFEDNQDCLNLFEKKPLGLLSLLDEESTFPNGTDLTFANKLKQHLNSNSCFKGEREKAFTVRHYAGEVTYDTSGFLEKNRDLLHLDSIQLLSSSKCHLPKLFASHMLTQSEKPVVGPLHKSGGADSQKLSVATKFKGQLFQLMQRLESTTPHFIRCIKPNNLQSPGSYEQSLVLQQLRCCGVLEVVRISRSGFPTRERYDRSRANKLXVLLLENVASQDPLSVSVAILHQFNILPEMYQVGYTKLFFRTGQIGVLEDTRNRTLHGVLRVQSCFRGYRARCYRKELWRGITTLQSFIRGEKSRKEYAASLQRHRAAVIIQKRMKTVFSRNRMKNINDAAVVIQSFIRGWLVRRCSGDIGLSKSQGIKTNESDEVLVKASFLAELQRRVLKAEAALREKEEENDILHQRLQQYENRWSEYELKMKS

SEQ ID NO: 184514 - protein, 105 aa, Glycine max
  Clone ID: PAT_MRT3847_137632C.1.pep
LQIGVLEDTRNRTLHGVLRVQSCFRGYRARCYRKELWRGITTLQSFIRGEKSRKEYAALLQRHRAAVIIQKRMKPVLARNRMKSINGAAVVIQSCKNPSVVFSQP

SEQ ID NO: 184515 - protein, 149 aa, Glycine max
  unsure (1)..(149): unsure at all Xaa locations
  Clone ID: PAT_MRT3847_137633C.1.pep
SSLSIAKKSLAMDDSERNXSDASVYASDDRDFSWDVGTNHRRQESNGARXMSAGLSVISRLAEEFEQRSQVFGDDAKFLVEVKSGQVEASLNPDRELRRLKQMFEAWKKDYGARLRETKVILHKLGSEDGSIEKVKKSWWGRRNSTRIS

SEQ ID NO: 184516 - protein, 90 aa, Glycine max
  Clone ID: PAT_MRT3847_137634C.1.pep
AFQVTGASIWSMLSAVWRATEWLRAPSSWWVSSTPMVKMLLLGCRGYFSDGVGEHSICFGSVVGGSETLKLCADQRPGWIMNQRKKRPQM

SEQ ID NO: 184517 - protein, 85 aa, Glycine max
  Clone ID: PAT_MRT3847_137635C.1.pep
KCLKKLSSLINSLGEGEFITPAGFSTNPPFAHGYPPPQNPPLVLFYKKGGQKNEKIKPREIFHFFPSGDSFWTQENHGYLLSFPP

SEQ ID NO: 184518 - protein, 154 aa, Glycine max
  Clone ID: PAT_MRT3847_137636C.1.pep
PGVDLTLSEKKKKKKKKKKKKKKKKKKKKKKKGKKKKKIKYRGKVKKIKGNGVFGFLVLGISLSFLWVVGCLGSWLWRPFFVFLFFARFFSVVICSCAPFLSHWSSPLFLPIWRFVGGVFAQLLLLLLPGLYTPILTVFLLPFLPVFRFFSSIS

SEQ ID NO: 184519 - protein, 93 aa, Glycine max
  Clone ID: PAT_MRT3847_137637C.1.pep
AARRQKGTAARRQKGTAARRRQKGTHIFIHEISHCIHSSEKKKVTKINTKNRSEQSNNHGDSQTRIVHNHGSTSHRVRRERRGNSGHSSTENR

SEQ ID NO: 184520 - protein, 49 aa, Glycine max
  Clone ID: PAT_MRT3847_137638C.1.pep
HHMAVPEVVDFVNKCFRYHHQQRFPAKKAMAHYNFHPVRKSQSSRTCAH

SEQ ID NO: 184521 - protein, 69 aa, Glycine max
  Clone ID: PAT_MRT3847_137639C.1.pep
KKNFLVFFLQGGYFHLLLHTTWDFQIPRKTPGPTFSSHHERTGKKKNLRYNNFSLLSRIPGPEYIRGPN

SEQ ID NO: 184522 - protein, 51 aa, Glycine max
  Clone ID: PAT_MRT3847_13763C.1.pep
VNINRYLLHLVLAVSFSKEHHEIISSNDAGLLYVTIRFRSDKKVYISCSLS

SEQ ID NO: 184523 - protein, 63 aa, Glycine max
  Clone ID: PAT_MRT3847_137640C.1.pep
MMRARFPLLLLGVVFLASVAVSFGIAYWDTQNPSHNKCLRSCYSETDSYRHQACHARWHLLRV

SEQ ID NO: 184524 - protein, 230 aa, Glycine max
  Clone ID: PAT_MRT3847_137641C.1.pep
MLSLAKRLQVQPLTTPFLLGQLRWARTRPKSPPVALKRAEERSEWWAVDGEVHEIGDLVPLRERFVIPRENIPNKRRKQLREQFMRRTRLVLKESEHDPWCKKYMELYNELRENWERLYWDEGYTKKLAQDHANYESAEDDDGDFSPYRSRRPQSQMEHSKDQNFGRNRQSDNWEKVNLLRDKFEYDRERRMREKAFAPMHGGSVPDSHDSDRWNQPLNTDRYFSQTERH

SEQ ID NO: 184525 - protein, 89 aa, Glycine max
  Clone ID: PAT_MRT3847_137642C.1.pep
WVSLRNSGATPRLLSQLGFLGPILTFFFDPLNQNQKKPYFEPLNLGLLLCSPSPIVGTSSKTVKFHLCPFVKLIRIDEFVSFIQIPQYG

SEQ ID NO: 184526 - protein, 138 aa, Glycine max
  Clone ID: PAT_MRT3847_137643C.1.pep
LLTLIFFFRAFFLIFFLSFCLIGLQKHGGNLCKALKGFLEEGSIDIPSEEELDLAINTPQDDSPGASNQNPLSQSSASPVSPRRKSLGQRMKEAYKAWKKKNAGASSSQQKDVPKIPLSPTQKEQGPNLGRHPTFSSL

SEQ ID NO: 184527 - protein, 157 aa, Glycine max
  Clone ID: PAT_MRT3847_137644C.1.pep
NPYSFTKMGIFRGYYNLITISAELGYKQKSKHQRSPTGKQKGHYRLLRVQGKNSPPQEGKRGNLGVYHGKKNFSFLLKAGTFWSFTMFIHRAIGRGGLIFWGRNILFIFTGLTLGGINKLFILGGLILLNSILHERAFISQNSTPGASPSPFQNFGA

SEQ ID NO: 184528 - protein, 79 aa, Glycine max
  Clone ID: PAT_MRT3847_137645C.1.pep
SSSYTSIENKTAFYLTIPYTGTRYIIRGEHLQFTKNYPKINLLFLIPYISKHQTNFKRTKIIKHSNHQNPSLFHKLINS

SEQ ID NO: 184529 - protein, 44 aa, Glycine max
  Clone ID: PAT_MRT3847_137646C.1.pep
LTLVIYDTIYRTASVAMEHNFMVSKRSRKKVASIEICEIVAILL

SEQ ID NO: 184530 - protein, 69 aa, Glycine max
  Clone ID: PAT_MRT3847_137647C.1.pep
SDIDGGDLHFFHGTLFTGPFLVFHGINLTFFFNWFRYELLMQKFVLLQLTNNNQGIYLPLWKAFRGNRS

SEQ ID NO: 184531 - protein, 299 aa, Glycine max
  Clone ID: PAT_MRT3847_137648C.1.pep
MAALKQVSSLLLFPLFLIFSLFKSSHAGGIAVYWGQNGNEGSLEEACNTDNYQYVNIGFLNVFGNNQIPQLNLAGHCNPSTNECTGLSNDINVCQSKGIKVFLSLGGAVGSYSLNSASEATDLAAYLWDNFLGGQSNSRPFGDAVLDGIDFDIEDGSGQYYGDLARELDAYSQQRKVYLAAAPQCPYPDAHLDSAIATGLFDYVWVQFYNNPQCHYTSGNIDNLVSAWNQWTSSEAKQVFLGLPASEAAAPSGGYIPPDVLISDVLPAISGSPKYGGVMIWDRFNDGQSGYSDAIKASV

SEQ ID NO: 184532 - protein, 89 aa, Glycine max
  Clone ID: PAT_MRT3847_137649C.1.pep
SGSPTEPAFGNALTGTAVTPTTCEGTPSLQRPPFMGCDLRHLNTDEILAAGFKDNQDHQVRNRSGAMGPRCKTISTLNPSGDIYTENTG

SEQ ID NO: 184533 - protein, 66 aa, Glycine max
  Clone ID: PAT_MRT3847_13764C.1.pep
TPLQELQECKSSRKRCSAACRLRFIGADGAHDAPTQTGNPSNPASRVETFSRYEREKPNFLSPNAW

SEQ ID NO: 184534 - protein, 65 aa, Glycine max
  Clone ID: PAT_MRT3847_137650C.1.pep
KIVDFHWNSSDPCTIVSVSDDGESTGGGGTLQIWRMSDLIYRPEDEVLAELENFKAHLASCAPKN

SEQ ID NO: 184535 - protein, 60 aa, Glycine max
  Clone ID: PAT_MRT3847_137651C.1.pep
RAAALMIINVVIRVVDGKGRYKIIVYKIVLLDDIRLCMTRIIITFPTSDFYGIPIFYFIY

SEQ ID NO: 184536 - protein, 74 aa, Glycine max
  unsure (1)..(74): unsure at all Xaa locations
  Clone ID: PAT_MRT3847_137652C.1.pep
VYNCSRQHLHPSVQLQTTPALIHMXKSPVLSGEPTVETLKNSGKEPILNHQAVALHQDINNADATNVHNNVPSK

SEQ ID NO: 184537 - protein, 373 aa, Glycine max
  unsure (1)..(373): unsure at all Xaa locations
  Clone ID: PAT_MRT3847_137653C.1.pep
ATRRLLWLLLSFPRVAIATFFGEVTGFSVLLGMSGALETLCGQTYGAEAYRKFGNYTWCAIVTLTLVCLPRFLLWIFTDKILLLFWHVPVCWDLVRXVVTXLVRALLALAVPXPLNLACLAHSMIYPPVCSSITTLCLRIPFRCSPVFLKLAIPSGLMFWFACLSDDQLTLLPSPLTYPXLVPAVLFFCLNTTSLRFLIPYAVGASASTRVSNELGAGNPKTAKGAVRVVVILGVAEAAIVSTVFISCRHVLGYAYSNDKEVIDYVAEMAPLLCVSVTADSLIGALSGIARGGGFQEIGAYVNLGAYYLVGIPMGLLLGFHLQLRAKGLWMGTLSGSLTQVIILAIVTALIDWQKEATKARERVVENSIKAHI

SEQ ID NO: 184538 - protein, 210 aa, Glycine max
  Clone ID: PAT_MRT3847_137654C.1.pep
METHLVFLLGLIFTLVAGVGAQAQGPSTSPAPPTPQASPPPVQSSPPPVPSSPPPSQSPPPASTPPPSPLSSPPPSSPPPSSPPPSSPPPASPPPSSPPPASPPPSSPPPSSPPPFSPPPATPPPATPPPAVPPPSLTPTVTPLSSPPVSSPAPSPSKVFAPALSPSLAPGPSLSTISPSGDDSGAQNLWSFQKMIGSLVFGCALLSMLF

SEQ ID NO: 184539 - protein, 84 aa, Glycine max
  Clone ID: PAT_MRT3847_137655C.1.pep
IISELRYSISSVSIYYGTQSDIRVKSYCRLNFLRASIINFECLIILRDSVRQPSKKLLSFELSQSFGIPFRASRYTTGLNQTSE

SEQ ID NO: 184540 - protein, 158 aa, Glycine max
  Clone ID: PAT_MRT3847_137656C.1.pep
TRPPTRPARPLPAQARPWRSPVIPALGSAHLPLPRAVRPAERLHRTLLLPPNRAPLPWPTVVCPCSADPFLPALCTRAAPARLGAVSPCCHNRAYCRGRPAPLCALCFLAELVPARRGRVQLAQLGVSLSISPRSVSSSLCVSLFMVVVMLWRGERRA

SEQ ID NO: 184541 - protein, 55 aa, Glycine max
  Clone ID: PAT_MRT3847_137657C.1.pep
KKKNGRSKGYRPIYTIQPHLSSPTTSPIFNSVADIHIHWPSVKTSCKGKNCREPN

SEQ ID NO: 184542 - protein, 33 aa, Glycine max
  Clone ID: PAT_MRT3847_137658C.1.pep
RVCHDSQQRIYAYWVLGDLEYQLLLPLTIDSLL

SEQ ID NO: 184543 - protein, 54 aa, Glycine max
  Clone ID: PAT_MRT3847_137659C.1.pep
YNLLVSILKGIINLNSSNFLHTVSYFKQNPMSHFGLIFFSPPHNFPCFAQYGGI

SEQ ID NO: 184544 - protein, 320 aa, Glycine max
  Clone ID: PAT_MRT3847_13765C.1.pep
MASFCSRLTICLALFVLILGSANAQLSTNFYYHSCPNLFSTVKSTVQSAISKETRMGASLLRLFFHDCFVNGCDGSILLDDTSSFTGEKNANPNRNSARGFEVIDNIKSAVEKVCPGVVSCADILAIAARDSVQILGGPTWNVKLGRRDARTASQSAANNGIPAPTSNLNQLISRFSALGLSTKDLVALSGGHTIGQARCTNFRARIYNETNIETAFARTRQQSCPRTSGSGDKNLASLDLQTPTSFDNYYFKNLVQKKGLLHSDQQLFNGGSTDSIVRGYSTNPGTFSSDFAAAMIKMGDISPLTGSNGEIRKNCRRIN

SEQ ID NO: 184545 - protein, 50 aa, Glycine max
  Clone ID: PAT_MRT3847_137660C.1.pep
GSTNWCLPFWLKTVTIEYKLSMQHFVQWFIANPPDSTQYQQPLMISTYFQ

SEQ ID NO: 184546 - protein, 234 aa, Glycine max
  Clone ID: PAT_MRT3847_137661C.1.pep
TRPLEVEVGGGRKLSKFSSVRWLYIIGIQGISWKFELYRGGQKLIIPILLTRHLNPVFATGAFVVPASLYFVLKKLFIKPYYLRRNKQKALEEKEKTSAQVKEARATAEKAQNLQQNVANRKRNKQLETGGLVIMRALYGNQRILNNLKSSSETSFELTSEVIDVTIPLNFLVNDSGQLKLHEGVKKSGIMGFCDPYPGSPKDLYVEYVYAGNQYRVWAGDYEELQIPQGSHRI

SEQ ID NO: 184547 - protein, 37 aa, Glycine max
  Clone ID: PAT_MRT3847_137662C.1.pep
ERVLCSPPLSVDAQPQQKEEGNKGRKGPLSSILRAFY

SEQ ID NO: 184548 - protein, 80 aa, Glycine max
  Clone ID: PAT_MRT3847_137663C.1.pep
VLNIFCRPRERKLLAGSKDNVISQIPSQVQELAFPGSAKDIENLIKSQSESYFVDAQPQQKEEGNKGRKGPLSSILRAFY

SEQ ID NO: 184549 - protein, 60 aa, Glycine max
  unsure (1)..(60): unsure at all Xaa locations
  Clone ID: PAT_MRT3847_137664C.1.pep
GLKGKDPKSGRLASFPGLGFFVRAIVPGKGPLETLFDPLGDPVNKKAWAXPPNFVPGKWA

SEQ ID NO: 184550 - protein, 127 aa, Glycine max
  Clone ID: PAT_MRT3847_137665C.1.pep
PTRPADRMSQPSRAILIFYKVNGIDFEDVKVDLSKHHQLSPQFRAINPLMKVPAVVDGRFKLFERHRFCAMAEERQVIGVHTGDAWKGNSRMQKTPKNCTGRGKTFDMRNDRERTTGCGGGSGSKDK

SEQ ID NO: 184551 - protein, 53 aa, Glycine max
  unsure (1)..(53): unsure at all Xaa locations
  Clone ID: PAT_MRT3847_137666C.1.pep
ILQYLEVEAQTETNLFEKSLEDVETPKGYMLEXKISSVTLLFPKTHAGGTHSA

SEQ ID NO: 184552 - protein, 93 aa, Glycine max
  unsure (1)..(93): unsure at all Xaa locations
  Clone ID: PAT_MRT3847_137667C.1.pep
MCPAGRSEVYADLAGKLGAQQKANVILSMDTYKRSALNEPIGVQAIITSCNNTVLTAPMEVGTAMAVVCARVLXPYWLSSGTLSELAEKCQEV

SEQ ID NO: 184553 - protein, 42 aa, Glycine max
  unsure (1)..(42): unsure at all Xaa locations
  Clone ID: PAT_MRT3847_137668C.1.pep
XLCGTEKEGLKSXXFXLGSXTRNLGSRLIVXSXXPPHSPXHX

SEQ ID NO: 184554 - protein, 109 aa, Glycine max
  Clone ID: PAT_MRT3847_137669C.1.pep
MNNNWLSFPLSPTHSSLPAHDLQATQYHQFSLGLVNENMENPFQNHDWSLINTHSTIEVPKAADCLGVSKSEHESDLAASLNEIQSDDTDYLFTKHSLAAYAKPCRGHT

SEQ ID NO: 184555 - protein, 122 aa, Glycine max
  Clone ID: PAT_MRT3847_13766C.1.pep
MNMMEGAVLPNPIECLGKGFDLTSDFRLKFAKGSGRRLVVVDERNKKDITVPGTGRRGGATIPNVSEDIRCDKGDRLRFKSDVLQFNQMSELLNQKSAIQGKIPSGYFNALFGLSGDWFRDA

SEQ ID NO: 184556 - protein, 140 aa, Glycine max
  unsure (1)..(140): unsure at all Xaa locations
  Clone ID: PAT_MRT3847_137670C.1.pep
FLNKCFLVFTRNTSRRPAQFKRAHNSTXLKSPHKHLATNSARNSAPTTDGVNNPYLYLPVTFALLEIIKYHKSTDLLITNLPFHTFLPQIAQNFKTDLLFQIHAILSLQYASXAYLVFLFYDTNFVSIHPKRFTIIPNDI

SEQ ID NO: 184557 - protein, 68 aa, Glycine max
  Clone ID: PAT_MRT3847_137671C.1.pep
VMAVSCSMLAVLTLSSNERVVLKQQSTGFKKFLEEITLVLGPFIHIWLGALAITIVLIHYEQALVKQC

SEQ ID NO: 184558 - protein, 66 aa, Glycine max
  Clone ID: PAT_MRT3847_137672C.1.pep
DEIINMLNKYFDKIDINESYIRRQPQGTACSLDITKELTKIYVLFLEPTTFFNYPLLLTCCYFLKI

SEQ ID NO: 184559 - protein, 50 aa, Glycine max
  Clone ID: PAT_MRT3847_137673C.1.pep
IVQTALSNGCPQVHWNFFEPAEQHQTSLSVQCFSSVSEVKKRNIVHSDFS

SEQ ID NO: 184560 - protein, 92 aa, Glycine max
  Clone ID: PAT_MRT3847_137674C.1.pep
IPGSTHASGLHDRRVDVALIKVNHIILCVLSLLSSLSILLQFCVYDIYGLLHFLLLSCLFFITSITLIMCACDRRISTWPTLGLRQHETTKM

SEQ ID NO: 184561 - protein, 63 aa, Glycine max
  Clone ID: PAT_MRT3847_137675C.1.pep
FSGLVSSSKSHATRIAYNQAYTAEYIRTGRPLYSVRTTSCFIRCYSSSGLQKFYFVGVFTGVL

SEQ ID NO: 184562 - protein, 45 aa, Glycine max
  unsure (1)..(45): unsure at all Xaa locations
  Clone ID: PAT_MRT3847_137676C.1.pep
SREXGFVGKGVEXXPTRRXXRXFDXXXPXFRATNXYXRRLXXINA

SEQ ID NO: 184563 - protein, 51 aa, Glycine max
  Clone ID: PAT_MRT3847_137677C.1.pep
FSRSVIKSRSSAVDNNNNNKRNRSSMNPMTVRRFCFHVWYYCFPVLERWAG

SEQ ID NO: 184564 - protein, 92 aa, Glycine max
  unsure (1)..(92): unsure at all Xaa locations
  Clone ID: PAT_MRT3847_137678C.1.pep
XXXXCCVEXXXXXXXXXGXAXXXIXXXXXTXXXXXNXYPXRXPXXXXSXXXEXTXXRXPXFFFFLAESEETLTLQPFFSRAEFRAYVRVHAT

SEQ ID NO: 184565 - protein, 98 aa, Glycine max
  Clone ID: PAT_MRT3847_137679C.1.pep
LVGTKAITTSITHSLLPFPSFYSTTITYLVMWQSSEDGLACQCVQVPHRWREIPLPFCTMRIVPGKGCLISRSWTGISRLRRSAAYPVCKPKRPLKEP

SEQ ID NO: 184566 - protein, 129 aa, Glycine max
  Clone ID: PAT_MRT3847_13767C.1.pep
VFLGPLGGPPLFLLGLWFPGPPPPPFEKTKGAPTFFFGPRTPVLPPYEWGQGPAYPPFLSSPANKKKLVSIFSGSAPPKAFSWVWVTPSCNPFGFSFKQPPEAVVDFWVKGPPFFCGLKSFAFSPSDGV

SEQ ID NO: 184567 - protein, 60 aa, Glycine max
  Clone ID: PAT_MRT3847_137680C.1.pep
EPQVHITLWFEVHVGGDRETVQEDVRTGLLEVTLLAYQKNEASFIYLAEDWAQSEGGHRE

SEQ ID NO: 184568 - protein, 80 aa, Glycine max
  Clone ID: PAT_MRT3847_137681C.1.pep
HPLLPYHYGPDRFSLVTAPPLPTLEIASQPYTYTSYTHHTTGVCLFVRCHLVQHSKQLTFVLFVAAGRNRVTAEARSRRR

SEQ ID NO: 184569 - protein, 88 aa, Glycine max
  Clone ID: PAT_MRT3847_137682C.1.pep
NTGWVELALALLGLALLQHLRSTPTANSIALRHLPNPPIPKYCLFFIRHLHVFLDTLIHYPLLDLSKKHGPLFYVYFLSMPNRCFRHT

SEQ ID NO: 184570 - protein, 67 aa, Glycine max
  Clone ID: PAT_MRT3847_137683C.1.pep
PPIRSKEAGFFKSLFLINVEHPHQVILQFSLSLLIEISSYLFHFSHYSLCLFSLHGQITLSKFLQYS

SEQ ID NO: 184571 - protein, 90 aa, Glycine max
  unsure (1)..(90): unsure at all Xaa locations
  Clone ID: PAT_MRT3847_137684C.1.pep
KDVRRVECGIPYGFPQTVISXTLLRRCSIKYSYXNFWTRLKAPSMILQSFQKFCFFXAYGDDNTYKVHEKXKAYFSGXSKLKSFLAGHNI

SEQ ID NO: 184572 - protein, 208 aa, Glycine max
  Clone ID: PAT_MRT3847_137685C.1.pep
MPSLKMKSKVSVSCLTETKDLHVCPKSKIISKSPCSKIMISTQKAEIDTTVQNCLDVSSRTQPKDIACDQSIDNKEFLDKENSESEHQFSVCSSVLGKMELTNTCTANLETIFSPAFEPIEVHSQHYTEKDAVSICDTNMAGVGADEGRSICGYETCDVSDFYISDMIITNLPFGGNSFDDDISETNCLSDYGSTEPSMFTASEQYMI

SEQ ID NO: 184573 - protein, 106 aa, Glycine max
  unsure (1)..(106): unsure at all Xaa locations
  Clone ID: PAT_MRT3847_137686C.1.pep
MIHFYRVKVLIQFEDFTTHSASDPSEKYTIISWRIXDDIQRTCXVVLARLMASMNLVGGSLVDHTFLLLGXAGTGATEIPELIALETSKHNXAPEDETLRKIWLVD

SEQ ID NO: 184574 - protein, 102 aa, Glycine max
  Clone ID: PAT_MRT3847_137687C.1.pep
PATPISNANHATPISNANPIPVPHPHHDAPANNHKINLEGPRIDGTALHFQEEKLLECHSRTPSPPPPPSPAPPPLPPPPPSAPGAVTSTGRTHTAAPHNLA

SEQ ID NO: 184575 - protein, 46 aa, Glycine max
  Clone ID: PAT_MRT3847_137688C.1.pep
NKIQKIRAVTIMTHTQISASTYARNYIYHIYTLTPPFNRETINLAI

SEQ ID NO: 184576 - protein, 109 aa, Glycine max
  Clone ID: PAT_MRT3847_137689C.1.pep
GSSVLEGPALPFNVCHPRDNHCSGSWSGRPCAGLCKDTATLHAHGRGVTGLAVRSCERILFTTQAISYRALQKNTVPCSRTRSLLLQESAWGPVQPLQSWVRAITRCRS

SEQ ID NO: 184577 - protein, 52 aa, Glycine max
  Clone ID: PAT_MRT3847_13768C.1.pep
LPLFLSNRRQKKTLNILFKEKNSSHPNIYLIPPPLGPTHPQKSQNFFWPRNL

SEQ ID NO: 184578 - protein, 155 aa, Glycine max
  Clone ID: PAT_MRT3847_137690C.1.pep
EVYDKTNKKWTLELPSDSHLLLYLFCAFLEHPKWMLHVDAMSYAGAQSGKNPLFLGVLPPKERFPEKYIAVVSAVPSVLHPGACILAVGKQGPPIFALYWDKKLQFSLQGRTALWDSILLLCHKIKIGYGGVIRGMHLGASALSILPVMEAEYED

SEQ ID NO: 184579 - protein, 602 aa, Glycine max
  unsure (1)..(602): unsure at all Xaa locations
  Clone ID: PAT_MRT3847_137691C.1.pep
MGGFAMGSAFDSKSGLIIMAALLLMIMSFYAGNLFGNNAPLYVSQLVSHSSPNNVSSNGATKFTNKVALTYWKTPLVIPETGMDVCPLTFNEYIPCHDASYVATLKSFDFSXIRRIKALMYLLGSFLQCSTIILCKCLVPIKWPLSRDYVWRSNVNHTHLAEVKGGQNWVHEKDQLWWFPGGGTHFKHGASEYIERLGHMITNEAAGDLRSAGVVQVLDVGCGVASFSAYLLPLGIRTMSFAPKDVHENQIQFALERGISAMISALSTKQLPYPSESFEMIHCSRCRIDFHENDGILLKELNRLLRFNGYFVYSAPPAYRKDKDYPVIWDKLMNLTTAMCWRLIARQVQTAIWIKENNQSCLLHNVEQKHINLCDAADDFKPSWNIQLKNCVLVRNSKTDSYKLPPSHERHSVFSENLNTIGINRNEFTSDTVFWQEQIGHYWRLMNIGETEIRNVMDMNAYCGGFAVALNKFPVWILNVVPASMKNTLSGIYARGLIGIYHDWCEPFSSYPRTYDLLHANYLFSHYKTKGEGCLLEDIMLEMDRLIRPLGFIIIRDENDITSRILEVAPKFLWDVESQMLENKEKKMETVLICRKKFWAIV

SEQ ID NO: 184580 - protein, 56 aa, Glycine max
  Clone ID: PAT_MRT3847_137692C.1.pep
VINIEANLKLKFHKHKSITSTTSLLALMLTAERGSRLERFRNQSARQTVCSQSQQV

SEQ ID NO: 184581 - protein, 48 aa, Glycine max
  Clone ID: PAT_MRT3847_137693C.1.pep
LTKFGKNQKALFQLFRLKKRLPIICCGAFPLESFEQFLPLYQGGEHYC

SEQ ID NO: 184582 - protein, 312 aa, Glycine max
  Clone ID: PAT_MRT3847_137694C.1.pep
MGRLLLFLIIPSLVALSFLSEVQSASFKIVNKCRHTIWPGLLSGATSPPLPTTGFTLESGKSRTIKIPKSWSGRIWARTLCGQDSDGKFSCATADCGSGKVECVGGAKPPATLAEFTLNGADGLDFYDVSLVDGYNLPMLIVAKDGIRGGCSATGCLVDLNGGCPAELRVARSNGSRGSVACRSACEAFGDPRFCCSEAYSTPDTCGPSPYSLFFKHACPRAYSYAYDDKTSTYTCANANYLIIFCPFPYTSQKLLGARKDGAQLPLVNKTMMYLSRLQSGGSSPSGLIQTQSIIAYVASVFLVPFFLFCPL

SEQ ID NO: 184583 - protein, 56 aa, Glycine max
  Clone ID: PAT_MRT3847_137695C.1.pep
NYHTFFIVLYNYALDKKWSSDYSLFCLTQMCSKLRKLLLHLISQEQMTAVGDRTRG

SEQ ID NO: 184584 - protein, 63 aa, Glycine max
  Clone ID: PAT_MRT3847_137696C.1.pep
KRGHERFSPWKGGSGANPINGGWAPHKAPQVLPFNFPAGILWGIVRGKNFSPGKSYAHVFAKF

SEQ ID NO: 184585 - protein, 165 aa, Glycine max
  Clone ID: PAT_MRT3847_137697C.1.pep
WGLGRSVQCVLSNEEVVRIVSSAPTRSSAARILVDSAALEWKLKYPTSKMDDCAVVCLFLDGKMDSESDCDEQCSFFATIQKNHWGNPVESDDSQKPEPSLRRNFTVRSSEENETYGGGGVEEVSVGVEDRTSAAEDQHWSGLEGVTRVNSLVQLPRFSEERPNS

SEQ ID NO: 184586 - protein, 65 aa, Glycine max
  Clone ID: PAT_MRT3847_137698C.1.pep
LKIPSRKLVPFMVRPTHTRFGWEVGWQFFMSTVSNDQFFRQLLCMPLVLLSPLSPDMFTFCLLTI

SEQ ID NO: 184587 - protein, 146 aa, Glycine max
  Clone ID: PAT_MRT3847_137699C.1.pep
ALVINCHMMLHYIPDETLSDTTGLTSFLYDSSSLAASSAVSVTPTSSLRSLFLKSLRGLDPTVVILVDEDADLTSNNLVCRLRSAFNYLWIPYDTVDTFLPRGSKQRQWYEADICWKIENVIAHEGVQRVERVEPKNRWEQRMKNA

SEQ ID NO: 184588 - protein, 80 aa, Glycine max
  Clone ID: PAT_MRT3847_13769C.1.pep
KRYGNLLIIYIDSFGKWGSEEPRGKHVTATTPCVSSPSWIIRCDNTQGSIRSSGIFVISLNCIAPLSFVHPHGIYTELSY

SEQ ID NO: 184589 - protein, 103 aa, Glycine max
  Clone ID: PAT_MRT3847_1376C.1.pep
FIFFFHFFFFFFFFGFKTKHVFISFQNKNLVVPPLFFKLIIGGGGFPTFPKAHNFFGNGGINKLSGSLGGPPLFSTRYLISPPPPKGGQFRGKGLFFQGWAQK

SEQ ID NO: 184590 - protein, 100 aa, Glycine max
  Clone ID: PAT_MRT3847_137700C.1.pep
YYGNFIVCCSFQFHFISLTNQVKSCFYSVDKGCPSFHLCCVYFPMLVTVAFMHLKESLVKYSINIFLCFKWAERLIVVVAMLGLSIIISHCSVLSVTRNR

SEQ ID NO: 184591 - protein, 74 aa, Glycine max
  Clone ID: PAT_MRT3847_137701C.1.pep
YINQGAHFYPFQNAKYASASTSNYMLATSSITFNRKCFSFLLLRLCPLHALSEPNRIAIIRTRNCIIDLYISEK

SEQ ID NO: 184592 - protein, 263 aa, Glycine max
  unsure (1)..(263): unsure at all Xaa locations
  Clone ID: PAT_MRT3847_137702C.1.pep
TRGSRPDGLLKVYQERRALAHALSDTKTAVKQLNKLVTVLLVVVTIIVWLLLMEIATTKVLVFLSSQLVLAAFMFGNTCKNIFEAIIFVFVMHPFDVGDRCVIDXGVELLVEEMNILTTVFLKLNNEKVYYPNSVLATKPISNYYRSPDMGDRVDFSIDFMTPAEKIGALKEKIKRYVERNPQYWHPNHGLVVKELEDVNKIKMALNVTHTMNFQEFGEKTKRRTELVMELKKIFEELNIRYNLLPQGIHLRHIESNSSLLNI

SEQ ID NO: 184593 - protein, 152 aa, Glycine max
  unsure (1)..(152): unsure at all Xaa locations
  Clone ID: PAT_MRT3847_137703C.1.pep
LXKDAKTTKDAEYSKVLSSTLTSILGWAEKRLLAYHETFDRGNVETMQGIVSLGVAAAKILVEDISNEYRRRRRNEVNVARERIETYIRSSLRTAFAQIMEKADSSRRASKNQPNALPGLVILAKDVGSLAVNEKQVFSPILKRWHPWQLVL

SEQ ID NO: 184594 - protein, 54 aa, Glycine max
  Clone ID: PAT_MRT3847_137704C.1.pep
SSRTKSSFLSRTLNSFETHLQQYIFHRIVQHAITGNPLLTIRCIMANGITDFQL

SEQ ID NO: 184595 - protein, 28 aa, Glycine max
  Clone ID: PAT_MRT3847_137705C.1.pep
FFFFFFFFFFFFFFFFFFFFFFLGKKKG

SEQ ID NO: 184596 - protein, 131 aa, Glycine max
  unsure (1)..(131): unsure at all Xaa locations
  Clone ID: PAT_MRT3847_137706C.1.pep
GLAYSLTDSRTVYIGSAVDWLANPIALGIAPSFLIAIAITVVGQIVLVRTVFGRYLVAIGTNEESVRLAGVNPRPYKIAVFALMGLLSXLAALFXVSRLEAADPNARVGNGAEVIAAALICAHSLKSASAS

SEQ ID NO: 184597 - protein, 60 aa, Glycine max
  Clone ID: PAT_MRT3847_137707C.1.pep
EMTTEKMSPVKDGDWTITNKLSRLEYRDMRIEIRQLQLPIAISVCIMCTTHRLEKHTLLD

SEQ ID NO: 184598 - protein, 167 aa, Glycine max
  Clone ID: PAT_MRT3847_137708C.1.pep
KRFTPEEDEKIKLAVFDYIESHGLGDEGLDMVLHCKSHPEIRDCWKEIGAALPQRPYVSVYTRAHILFERGEDRKWTPEEYEFLRKVKEQHGSDWKSVAEALGKHRFHVKDAWRRIKLTNTNQGRWTQEEYQNLFDLVNLDLRVRASQDYRKSKHGMLRDNIGWEAI

SEQ ID NO: 184599 - protein, 75 aa, Glycine max
  Clone ID: PAT_MRT3847_137709C.1.pep
LSALPFTSVVTTVRVFVVHLVSHTQLILSAYYYIIVLFPHLLCSIPSVIPFHIFSLPIGRFNRLHEFIIVVSEKH

SEQ ID NO: 184600 - protein, 124 aa, Glycine max
  Clone ID: PAT_MRT3847_13770C.1.pep
TPRFPYLPNKKLRQTLPHIGGKPPAGLSISQKPKETVPTGGKKIGKTITLYPTIITLYRHQPWKGVHHFKQRRILRGHHLQGALKIHQGEKILRGQQGIRVQLRERSLVRAQLLQTGPKIGIPR

SEQ ID NO: 184601 - protein, 66 aa, Glycine max
  unsure (1)..(66): unsure at all Xaa locations
  Clone ID: PAT_MRT3847_137710C.1.pep
EGSNDGLRNVWGPSLCXVLVXSGVRXXLGXVXXXVXRXXLFRRWFPXRXFLVCLCXWVXXCCXXAP

SEQ ID NO: 184602 - protein, 77 aa, Glycine max
  Clone ID: PAT_MRT3847_137711C.1.pep
HSAFNAALQLGMPFGIQPCRYFASAISGISSIQLSWVQQEFSQSDCCRVTGTGLSPVLRSVCYKQAGQVDLHVYAVR

SEQ ID NO: 184603 - protein, 64 aa, Glycine max
  Clone ID: PAT_MRT3847_137712C.1.pep
GCIYKPPPSAWRSNFSKEISNGLVITSAIANHCERDARRDSHTLASETRSWEGPPWPSRPPQGR

SEQ ID NO: 184604 - protein, 41 aa, Glycine max
  Clone ID: PAT_MRT3847_137713C.1.pep
LYVCQKLPSNGCTHTCDVECLDCIAKADSSLEASLTAILNG

SEQ ID NO: 184605 - protein, 75 aa, Glycine max
  Clone ID: PAT_MRT3847_137714C.1.pep
WLCTIGSLFSITEHMNQGRLSMHTESGSCPSLFFYRFRAITWARNEILHRPLCPKMCSFLCALIPLKTNKAYRVR

SEQ ID NO: 184606 - protein, 58 aa, Glycine max
  Clone ID: PAT_MRT3847_137715C.1.pep
ILKGPCPNCGTENTSFFGTILSVSSGDSTNKVKCENCETKMVYDSKTRLITLPEGSNA

SEQ ID NO: 184607 - protein, 317 aa, Glycine max
  unsure (1)..(317): unsure at all Xaa locations
  Clone ID: PAT_MRT3847_137716C.1.pep
MASKLAFTLTYPLPLTPISSLSSSSASRLHLLQFNGRHICLRPRLFLFSPMATADQDKVEEDAAVVDSKILQYCSIDKKEKKSVGEMEQEFLQALQAFYYEGKAIMSNEEFDNLKEELMWEGSTVVMLSSDEQKFLEASMAYVSGKPILSDKEFDELKLRLKMEGSEIVAEGPRCSLRSRKVYSDLSVDYLKMFLLNVPATVVALGLFFFLDDVTGFXEISYLIKIPEPFSFILTWFAAIPFILWLAQSITRAIVQDFLILKGPCPNCGTENTSFFGTILSVSSGDSTNKVKCENCETKMVYDSKTRLITLPEGSNA

SEQ ID NO: 184608 - protein, 76 aa, Glycine max
  Clone ID: PAT_MRT3847_137717C.1.pep
LHYHQYPRKFRDGNTTVNLREHRTLNTKDHKIITGDVNAPQAFIQFPLYKSGLKCIKNETFASNVVTQTTHTTVKK

SEQ ID NO: 184609 - protein, 433 aa, Glycine max
  unsure (1)..(433): unsure at all Xaa locations
  Clone ID: PAT_MRT3847_137718C.1.pep
MNALPSSSSSTFTFLTQSKNPNHLFKLTHKVPILPLHSPSPCCSLSDSSSSSTTVLDKNALSPEQNSRIAVSPDDSSFEEALVIRRPVTDFSAEYSGEEEEEEKETKEEEDDPKASAIDEGLARFAKKMPMFEPERVESKERPLAINLDLALYRAKLLARRTFQYEKAESLLRXPSHHPVWFAWGWMEWKERNLNKARQLYQKTLSIDQNSETAARCLQAWXCSGAVLEMQMGNIRRARELFDAATVADKRHVAAWHGWANLELKQGNLKKARILLGKGLQYCGQNEYIYQTLARLEARANRYLQARYLFNQATKCNPNSCASWLSWAQMEVEHENYRAARKLFEKAVQASPKNRYAWHVWGVFEANMGNIDMGRKLLKIGHNLNPRDAGLLQSLALLEYQYSTAYGARGGVLSYIYTYWCLVKIVLNSMTVA

SEQ ID NO: 184610 - protein, 342 aa, Glycine max
  unsure (1)..(342): unsure at all Xaa locations
  Clone ID: PAT_MRT3847_137719C.1.pep
ARGKGLQYCGQNEYIYQTLARLEARANRYLQARYLFNQATKCNPNSCASWLSWAQMEVEQENYRAARKLFEKAVQASPKNRYAWHVWGVFEANMGNIDMGRKLLKXRRASELNPRHQPVWFAWGWMEWKERNLNKARKLYQKTLSIDQNSETAARCLQAWGVLEHRVGNLSAARRLFKSSLNINSQSYVTWMTWASMEEDQGNSVRAEEIRNLYFQQRTEVVDDASWVMGFLGILDPAIDSLKRILKLNPNSYNMPLDSLRNIAGTNKNRVDSSSEDEDDDDANGKSDFDLDAFIKQKLTLDLSNLEIQLEEPKFYSVKRSTSPRRIWRRSINEIAEVQVTQ

SEQ ID NO: 184611 - protein, 119 aa, Glycine max
  unsure (1)..(119): unsure at all Xaa locations
  Clone ID: PAT_MRT3847_13771C.1.pep
LILAFYYVPTPKGWMVALKMCQTQIALPKNTIGGTILCMALXPNIMTKGTFRASGDWQRTHRIEGMIKMVATHGIPDNPRLSLAWAMNRTTXGRARSDINTICSQDXGLWHSACTKAMT

SEQ ID NO: 184612 - protein, 58 aa, Glycine max
  Clone ID: PAT_MRT3847_137720C.1.pep
DRAKRPLEVSEGTITQTPMNKNNLLHREGKLNHSWVREEYFRGTPSITKGSSTTFDRW

SEQ ID NO: 184613 - protein, 81 aa, Glycine max
  unsure (1)..(81): unsure at all Xaa locations
  Clone ID: PAT_MRT3847_137721C.1.pep
SLEPAFDSGTPLRASASSASRARPALPPSSASTPSPPPPSSAPRAFATAAPRQAPSPTXASSPAPSGPTSTAAPTAPSPDL

SEQ ID NO: 184614 - protein, 65 aa, Glycine max
  Clone ID: PAT_MRT3847_137722C.1.pep
MSLKNNMVVPKVCLLHLFLVGVRAARMELSVFNRDQSSTYDHDQYSKPSCDFSMSRRPIPSSLHL

SEQ ID NO: 184615 - protein, 90 aa, Glycine max
  unsure (1)..(90): unsure at all Xaa locations
  Clone ID: PAT_MRT3847_137723C.1.pep
RDLTDXTALWIMAIGIGHSLLGDGGSLQGNGMLYVNEARLSEDLNHCCEVLAEPIHTVMRKYGVPEPHEKLIELTRGRSVSIESIRDFIC

SEQ ID NO: 184616 - protein, 39 aa, Glycine max
  Clone ID: PAT_MRT3847_137724C.1.pep
PVWAIGTGKVATSAEGEVVHAGLRILDHDNVSACSCCIS

SEQ ID NO: 184617 - protein, 44 aa, Glycine max
  Clone ID: PAT_MRT3847_137725C.1.pep
NSARGPLVVNLTNLFILVTFSTRPTQLFYGTLSYKYHASRGGFR

SEQ ID NO: 184618 - protein, 100 aa, Glycine max
  Clone ID: PAT_MRT3847_137726C.1.pep
EVVEVGGTQRSRDGGYAAFAPMQSSVDVGFWHRLSSLKLNKHAIDDSPIPLFGFYAPCSQSHLTVLAESLPSVPGILYNTNTVDKNDLLNTETILDSCSA

SEQ ID NO: 184619 - protein, 56 aa, Glycine max
  Clone ID: PAT_MRT3847_137727C.1.pep
PMQHITIAPHSKNNLHSNQPNESISNYFLTLYLHFHLASFHPNTITIHQLMTSLYS

SEQ ID NO: 184620 - protein, 33 aa, Glycine max
  Clone ID: PAT_MRT3847_137728C.1.pep
ILTTNQFSEVVSADFMSMVADLYMCGILAMELI

SEQ ID NO: 184621 - protein, 58 aa, Glycine max
  unsure (1)..(58): unsure at all Xaa locations
  Clone ID: PAT_MRT3847_137729C.1.pep
KXXIAXXXTXXRXSXRXFXKXXXAAXXXSNXIXSXXXXXMRXPXVYKPPTEKXPVYXP

SEQ ID NO: 184622 - protein, 77 aa, Glycine max
  unsure (1)..(77): unsure at all Xaa locations
  Clone ID: PAT_MRT3847_13772C.1.pep
ADETLDASDTAALLDRTNALMEARLASISRAAPAFAAVLRAYRQALAXGDMHIADWLIAWLAGQPNVAASVKRRAGI

SEQ ID NO: 184623 - protein, 67 aa, Glycine max
  Clone ID: PAT_MRT3847_137730C.1.pep
SGDRPVHRARRGSIQTRIDYSDRKRLNDVLTNMSSTPRLRHPVDLVTNGTDGSHSFLLTVAKDSLSV

SEQ ID NO: 184624 - protein, 91 aa, Glycine max
  Clone ID: PAT_MRT3847_137731C.1.pep
FGSDGLNLTPLPLGGRFRSLEGDSNCDLKEDDAVGYGLNGHDDDAGGPLPLGVLQTVPCGFVLTDALDPHHPMIYFNGGFETDTGYRAVEV

SEQ ID NO: 184625 - protein, 139 aa, Glycine max
  Clone ID: PAT_MRT3847_137732C.1.pep
KIKAKKSFITHQSVTLWAKLSLSISLPCKHPTHTLSNVNRSKTHLCLPLFDLKVGSHKNVKKFHSREILLHRCRLNFRNPGCLRYVITLFHVFIHSICDDHNVTHRKLVDHMILFFLPLNPLFFLLPFFFSGCVFSKCT

SEQ ID NO: 184626 - protein, 63 aa, Glycine max
  Clone ID: PAT_MRT3847_137733C.1.pep
FILSTNKTLSLSLNLLLLQAPSHTLSNVNRSKTHLCLPLFDPKWAHKNVKNFIPVRLSSTDAD

SEQ ID NO: 184627 - protein, 119 aa, Glycine max
  Clone ID: PAT_MRT3847_137734C.1.pep
DFPPPMQIEFQESWVSAIRNHPFHVFIHSIYDDHNATHRKLVDRVILFFLPLNPPFFFSFFPFSFTLFFFRVRIQPVSLVNWIKLIILDLGKSHPKNKSKFYFSNGFFPLPSIIWCKAV

SEQ ID NO: 184628 - protein, 97 aa, Glycine max
  Clone ID: PAT_MRT3847_137735C.1.pep
PCLVFGYLFPKIHWFGCYSVCLICPLFFTFITTFGSFILPVFCCLHCSMVVLFYSLYCSILHLHYTPILLPSLCHFLHCLFCSIWHLHRLAAFIIAT

SEQ ID NO: 184629 - protein, 157 aa, Glycine max
  Clone ID: PAT_MRT3847_137736C.1.pep
FGSSSSRIGSSGSRRLEKTTEGEILEKREAAVFAKEQDSLQRLQEKRDAASFAIVNAREKQRKISSRELATFSNGGKGGMPGVEEKPVDTLSTAAEGNVEDVKLPDNGNVELVSYPELVKLCKEMDAAGLHKFISDNRKNLAAVRDEIPNALRAAPN

SEQ ID NO: 184630 - protein, 192 aa, Glycine max
  Clone ID: PAT_MRT3847_137737C.1.pep
MEDSDSVATLIDSTTSKIQQLQKAFAELESYRAVTLNLKWKELEEHFHGLEKSLKRRFDELEDQEKEFESKTRKAHEILEKREAAVFAKEQDSFQRLQEKRDAASFAIVNARDKQRKISSRELATVSNGGKGGIPGVEEKPVDTVSTAAEGNVEDIKIPDNGNGELVSYPELVKLCKEMDAAGLHKFISDNP

SEQ ID NO: 184631 - protein, 328 aa, Glycine max
  Clone ID: PAT_MRT3847_137738C.1.pep
MDQQEGNTWTMPPFWAVEQRNRRRLRRSYSLLLTSTSLLVLFLVLVLVFSLIVVPTLHSFASNIFKPRTVKNSWDSLNLVLVLFAIFCGFLSRNNNTSETLTPRSRRTFSNPSTPPSAWYQNDYSQIHNRSFNRLRSFNSYPDLRQQIAADERFRFYDDTYLLRHRNMRTETEEEEEKEIGIDNVATAPPQSPPQQGMEAVGRNVKRAYQVETVEEHKKEDLDAQISPPPPATRSKGVRRNVKRTYQAEAVEKHETNDFPVMDSRPPPVTITKGVRRNAKRTYQPETMEKRETNDFDEQNSQTLPSPPPPPVTRTRGVRRNAKPEEMI

SEQ ID NO: 184632 - protein, 132 aa, Glycine max
  unsure (1)..(132): unsure at all Xaa locations
  Clone ID: PAT_MRT3847_137739C.1.pep
IADKFQVMPLSGFLISTLLNLAPHFAAGLILIGCSPGGTASNIITYLSRGNVALSVIMTTASTLTAXLIMTPFLTATLAGKYVAVDASGLLISTLQGVLFPCVAGAXFLNQFFKPFCKLVSSLMPPIAVTTV

SEQ ID NO: 184633 - protein, 70 aa, Glycine max
  Clone ID: PAT_MRT3847_13773C.1.pep
LLFLHFGPKGYWNNLKGNFGVHKPSNQGSRATVPPGRKPTGRVTLPRKRIPGGSNIPHFFFNNSIFPLKN

SEQ ID NO: 184634 - protein, 69 aa, Glycine max
  Clone ID: PAT_MRT3847_137740C.1.pep
EFGQPCSVFRPGYIRIDQALDQAVLSVVPTTSSISFLFRCFEPIPYVLVFQENVQSTLKQRCSSSPCSI

SEQ ID NO: 184635 - protein, 104 aa, Glycine max
  Clone ID: PAT_MRT3847_137741C.1.pep
TTAKITIAPQCLATALTVLILSPALVPITAIATTSTFVDTLLLIILVMVVIIFTVILILLFTKVALSLVPTVLPTLFIVVVLLTVVPLPTLLIIPLCLYYRRHP

SEQ ID NO: 184636 - protein, 113 aa, Glycine max
  Clone ID: PAT_MRT3847_137742C.1.pep
NIVIKNTSHQRTGFRIKCGDIDPPRTGITVTKRSVTVTVTIPAEINFLVQFHRKLLVPMCLGALLYQTSTVGQRRREKERDLFLLTGWYCECSEVFLISLNVAVVNFFRRMLT

SEQ ID NO: 184637 - protein, 75 aa, Glycine max
  Clone ID: PAT_MRT3847_137743C.1.pep
GEPNLTTCFYCFGGFWINFFLNYIFLKPCWSSIYFSNPYSNPPLKKGGGGFHIQFTGGTNEGIFFFPFYQLAFNY

SEQ ID NO: 184638 - protein, 207 aa, Glycine max
  Clone ID: PAT_MRT3847_137744C.1.pep
MIAFLLFLLTSLGLVINASTFSACSNCGDFVVPYPLSTNEDCGDNRYKVYCNDGNLEFLSATGTYYKILRIDPSANKLVISPPPILKNTCYSSDLYMGGLLLDESLPFNISTQNTVMLFNCSYNILQSPLNCSSNSICRQFEEKVEEGTGCMDTLCCHYLKDSAMNSHKIRVKVGSCTAYTCLVGFKPNDQLETWNYGIELQWLSPN

SEQ ID NO: 184639 - protein, 174 aa, Glycine max
  Clone ID: PAT_MRT3847_137745C.1.pep
AGGDWVARSVPGSGLIVRPDLGRSESWQPWGKLEAWRERGIRDTVCCRFHLLSEAQGGEFLTSEIHISAEKGGEFFIDTEKHMQTVATAASPIPSPQSSGDFGALSPLVGGFVMSCRVQGEGKRSKPLVQLAMRHVTCVEDAAIFMALAASVDLSIVACKPFRRKVRRGFWHSM

SEQ ID NO: 184640 - protein, 116 aa, Glycine max
  unsure (1)..(116): unsure at all Xaa locations
  Clone ID: PAT_MRT3847_137746C.1.pep
XFLXXXXFSIXXXHXLXFXXFFXXXXSLLXXFXLSSSFXXFXXYIFXXXSXXXFLXXXXXVISSXLTPCXSSLXFXLXPXISSNLXLXXXXXSSXXXXPXSXSXXXXSXXXXRXXS

SEQ ID NO: 184641 - protein, 383 aa, Glycine max
  Clone ID: PAT_MRT3847_137747C.1.pep
MAISFSPKHPPYDEMIYTAIGALKERDGSSKRAIGKYIEQVYKDLPPTHPALLTHHLNRLKSSALLVLVKKSYKLPGSHHLPALQPQKTRGRPPKPKPHPVWPAAALTDSPALLSAKRGPGRPKKIGVSPPGPRGRPPGTGRSKLPKRPGRPPKPKSVSAISSGLKRRPGRPPKAQSNVNVIPFAAPVAPGLPTVQPILPTASVPNGSPRPRGRPKKSFTAAGAPALSAVAGAARGRGRGRPRGVFPVVRPGRPQKLAVGRSKNPVRRPVGRPKGSTAAAITAHKAANEDLRKKLEHFQSKVKESLGTLKPYFNHESPVTAIAAIQELEVLSTLDLKAPLRDETQQQPPPLPQTQTQVYEQQYPQPQSQQLPQFFQPHTSAPS

SEQ ID NO: 184642 - protein, 94 aa, Glycine max
  unsure (1)..(94): unsure at all Xaa locations
  Clone ID: PAT_MRT3847_137748C.1.pep
AANDDLRRKLEHFXQSKVKESLGTLKPYFNHESPVPAIAAIQELEVLSTLDLKAPLRDETHQQPQPQPQVYEQQYPQPQPLVQQFFQPHTSAPS

SEQ ID NO: 184643 - protein, 413 aa, Glycine max
  unsure (1)..(413): unsure at all Xaa locations
  Clone ID: PAT_MRT3847_137749C.1.pep
MDPTSIPPPPATTVPFTVEPSNHVTPADNTNTNHPPYDEMIYTAIGALKEKDGSSKRAIGKYMEQVYKDLPPTHSALLTHHLNRLKSAGLLILVKKSYKLPGSDPLPVLQAQKPRGRPPKLKSQPNTELTWPALALNDNPALQSAKRGPGRPKKIAGPVGVSPGPMVPGRRGRPPGTGRSKLPKRPGRPPKPKSXVSAISSGLKRRXPGRPPKAESNVNVIPFAAPVAPGLPTVQPIVPTASVPNGSPRPRGRPKKIVAGAGAPALSSVGGAPRGRGRPRGVLPLVRPGRPQKLAVGRPKNPARRPVAPQGIDAITAHKAANDDLRXRKLEHFQSKVKESLGTLKPYFNHESPVTAIAAIQELEVLSTLDLKAPLRDETHQQPQPQTQVYEQQYPQPQSLQQQFFQPHTSAPS

SEQ ID NO: 184644 - protein, 53 aa, Glycine max
  Clone ID: PAT_MRT3847_13774C.1.pep
IIKKKLSLYMSGFNPWRGGQILLVIVIISLKLFDSIPCFQWTPFSILNLLLLQ

SEQ ID NO: 184645 - protein, 93 aa, Glycine max
  Clone ID: PAT_MRT3847_137750C.1.pep
MTINSPYLLSPGFIVVLLFSCILAFFLNYSIFLNTTLNSALAQTICGNLKDLFTIGFGWIIFGGLPFDFWNVVGQLLGFAGSGLYAYYKLIGR

SEQ ID NO: 184646 - protein, 115 aa, Glycine max
  unsure (1)..(115): unsure at all Xaa locations
  Clone ID: PAT_MRT3847_137751C.1.pep
MTLNFPYLLSPSFIVVLLFSCILAFFLNYNIFLNTTLNSXLTQTKCGNLKDLFTIGFGWIIFGGLPFDFVSTLVPTDFYHLRLFSLLIEECVVFWLVECSRTTSGFCGLWFICLL

SEQ ID NO: 184647 - protein, 263 aa, Glycine max
  Clone ID: PAT_MRT3847_137752C.1.pep
MLLRNRSRAVTKPSLMGDQSCKRTIIPSLFSPKFRDFTVKCLSTGAEAARSPTSILETRALSAPFGSPLSHDKKIEAAITSPRMPSENTPFSSKRIGLALVGALKDETFPHNSTQPSSGTVLFGTKHRVKIPPLPLPPPSFESKTCASDCAAKTNDSQNFATGLMTLSEMELSEEYTCVIAHGPNPRTTHIFENCIVESYCSLPNTPNSPSLNFLSFCHTCKKHLEQTKDIFIYRGEKAFCSKECRHQEMVQDGARNSEFDRY

SEQ ID NO: 184648 - protein, 108 aa, Glycine max
  unsure (1)..(108): unsure at all Xaa locations
  Clone ID: PAT_MRT3847_137753C.1.pep
SXARVRKLGIRLERLECNIYKCCLHHSTTTKHGNGVAVALLRLCVQYVWNKKGKLFSQAVLCFIIGSVRGCPYCTELASGDCQGRPRSDPRGWWLLQKTELLEYLTIT

SEQ ID NO: 184649 - protein, 68 aa, Glycine max
  Clone ID: PAT_MRT3847_137754C.1.pep
FRLAELYTEATNYQTLKKKKGSNHELNTPLTGPKHLNLLEGKTWPLYFKGVWLTQNTRVRENHHRPNS

SEQ ID NO: 184650 - protein, 89 aa, Glycine max
  Clone ID: PAT_MRT3847_137755C.1.pep
FMMVKQGKGHSSYLPMNEFNLDYSFDAFFIGAVRLQHYALSGSFLLQSNYEWQKKQFCIQKFSPKKAWKDAWLEKIIFLLFVKILLFRE

SEQ ID NO: 184651 - protein, 239 aa, Glycine max
  Clone ID: PAT_MRT3847_137756C.1.pep
PRGANRGSPAFGLPSPFSKRESLKYKRGVRIRLEEYSNRSDLSAVKDRKSLHRHQIQEQVKVVIPTGNHGLPNAESHGPSSLLDRLRHGGGCDCGGWDMACPLILLGNPTIQFAEDCPLMEEHQPLELFVQGAKGSSPTFSMTRIEEGHYAVDFHAQLSTLQTFSICVAILHGTSAFSSASHEKNQQLSQCSSLKMLLEEDVDFFFKSVTTEKKTVCKNQKGIPRSYVLNPPFSPIARV

SEQ ID NO: 184652 - protein, 70 aa, Glycine max
  Clone ID: PAT_MRT3847_137757C.1.pep
TTKTSPEVISKLSRTLSNCVVHNPQNTCIIPCDTPRHTSILHVNPGVGAQTSNPSQLNSPNHKLSLTFII

SEQ ID NO: 184653 - protein, 88 aa, Glycine max
  Clone ID: PAT_MRT3847_137758C.1.pep
DSDLECELEALPPVSLECASEAAACVKVMIASRTLSESAPSSSTIEAPLTINVPVCHSSRTRIENSQPSNLMQGTSFIFPVTVQRQTL

SEQ ID NO: 184654 - protein, 82 aa, Glycine max
  Clone ID: PAT_MRT3847_137759C.1.pep
FSVPQKMDPRVLLLETRIQSCVFIPPEWQSRQLSPHFHSKVSLDGYVVKVRGYGDGKLMRKGIVLIILANYFLVCSSRIGVS

SEQ ID NO: 184655 - protein, 62 aa, Glycine max
  Clone ID: PAT_MRT3847_13775C.1.pep
SVLLLYNIYLSCHLLVNAWCCSLYFIYVILFFIKCGQGITDDELSPTCVSSILGIHIERVAA

SEQ ID NO: 184656 - protein, 218 aa, Glycine max
  Clone ID: PAT_MRT3847_137760C.1.pep
SDNKKKKYKGVRMRSWGSWVSEIRAPNQKTRIWLGSYSTAEAAARAYDAALLCLKGSSANLNFPSSSSSSQHYIIPQDTAMMSPKSIQRVAAAAANNFLDNNAIAINNATTPPSPPLASTSSSFVSSPSMSSSSPLDQIDDDVSLLTPFGAYTTTTATTICDETNESMAMMESWYDLEGLQSPKYVDQMLSGAFFDIDSTQLLDDLYEESDIRLWSFC

SEQ ID NO: 184657 - protein, 48 aa, Glycine max
  Clone ID: PAT_MRT3847_137761C.1.pep
EQRRERKHRRLSFPPFCLEEHIIEHMSSPLKISEPIASTHTNDNEVNQ

SEQ ID NO: 184658 - protein, 214 aa, Glycine max
  Clone ID: PAT_MRT3847_137762C.1.pep
MSLPQTATSPPPHLYPQELQLKLYQAFIFSIPILFSIILFLLFYLFYLKRRASSLSSSSHLLPRTIANPPTTTPYHSSPCRLDLTLQFLDKLPRILFDEDLLTRDSLCCVCLGEFELKEEVLQIPYCKHVFHFECIHRWLQSNSTCPLCRCSIIPTTKFLNPAPPINIISTDPPQQHGAIISDFPLQILSLPPQPQDHQEVVGASSNAANLSRE

SEQ ID NO: 184659 - protein, 94 aa, Glycine max
  Clone ID: PAT_MRT3847_137763C.1.pep
MENYHSSKSLHLPCKTLSLVLLFVYLLLIGSCDAIRIGQTMKLNERREILKGKRNNQHGFPYKSMVFNFFPKGPVPPSGPSKRHNAVVDSTPNN

SEQ ID NO: 184660 - protein, 187 aa, Glycine max
  unsure (1)..(187): unsure at all Xaa locations
  Clone ID: PAT_MRT3847_137764C.1.pep
SQLKIRNTQEEWPFATTLDLDAAMNIVATSRRLIYNRAMQYAKEYDHQXKELIRMNQHAYLRGGFYVYPQAXLLVIIRMLRTNAMDPIPWKTLRGXRLRQIFNGESVRLTXLVNMLNRDEPYVTYXYPLSRVREXYFKRWYLKHLKQTTALTDNCIIEQALSTYGIISTADLIHDIMTVGPHFTEAN

SEQ ID NO: 184661 - protein, 34 aa, Glycine max
  Clone ID: PAT_MRT3847_137765C.1.pep
STLSTSIEPTSSLPESNDALQQSLSIANGKLTHP

SEQ ID NO: 184662 - protein, 195 aa, Glycine max
  Clone ID: PAT_MRT3847_137766C.1.pep
MADSICRTLRDGALEGELAPTLTIKDSLASPFAFHVFSHILLQLSSHVIAQKSQSQGIVIVALSRSPSSYTSLLKMNGVDVASSNKWIHILDCYTDPLGWKDKARKSANVTDPSQQISLATSSYKTVKDVDKLFLVIAELGRGLVGENKARFCVAIDSLSELLRHASMQSVAGLLAICVAMIKFQSMFGLLHSDL

SEQ ID NO: 184663 - protein, 142 aa, Glycine max
  unsure (1)..(142): unsure at all Xaa locations
  Clone ID: PAT_MRT3847_137767C.1.pep
CFRSSKRRLSHCSIDLLSGGIVVDKTGDWITLIHNSPMRDLVRAAACKKGCVMVKIVMYGNAXFKRSDWASLVQVFITNINSTHHFDACQWTKSEPHFWELIFPIEVCGPNNGFETWSSECADQTSWPSSXLIDNAKQSTRF

SEQ ID NO: 184664 - protein, 135 aa, Glycine max
  Clone ID: PAT_MRT3847_137768C.1.pep
NFFSDFVFLIRPQFGWVNPRYAPLNYFPGRVKPKFKKYQCILWVFSLIILVVGLSVGLVALLQGVDANDHCSWCHYLSCVPTSKWSCHTEAAYCQSNQLGNQLNVTCSSNGKSSTYFMQNPTSSQIQQLCTQLCS

SEQ ID NO: 184665 - protein, 121 aa, Glycine max
  Clone ID: PAT_MRT3847_137769C.1.pep
MVHPVAAAETVEVPIQYPREEEVKHYGKWFSWLIPLFVVANIVMFVITMYVNNCPRNSVSCIASFLGRFSFQPFKENPLLGPSSLTLQKMGALDVSRVLHRHQGWRLITCMWLHAGGFHLM

SEQ ID NO: 184666 - protein, 55 aa, Glycine max
  Clone ID: PAT_MRT3847_13776C.1.pep
MEGEEVLDVDIQEEKLSGFIFMCNRITKPECYCYRVFGLPAGRKDVVEKINPGTY

SEQ ID NO: 184667 - protein, 387 aa, Glycine max
  unsure (1)..(387): unsure at all Xaa locations
  Clone ID: PAT_MRT3847_137770C.1.pep
MSGEPPRPLEIHLRVNSKRGGTTMVHPVATAVPVQYPREEEGVKHYRKWFAWLIPLFVVANVAMFAITMYVNNCPRNSVSCIASFLGRFSFQPFKENPLLGPSSLTLQKMGALDVSRVVHKHQGWRLVTCMWLHAGVFHLLANMLGILVIGIRLEQEFGFVLIGLLFFISGFGGSLLSALFXSHISVGASFGAXLFGLLGGMLSELQTNLXLVDNKLTXSSLLTLVIIIVINLAVGILPHVDNFAHIGGFLTGFLLGFVFLIRPQFGWVNQRYAPLNYSPGRVKPKFKKYQCILWVFSLIILVVGLSVGLVALLHGVDANDHCSWCHYLSCVPTSKWSCHTEAAYCESNQLGNQLNVTCSSTGKFSTYFMENPTSSQIQQLCSQLCS

SEQ ID NO: 184668 - protein, 83 aa, Glycine max
  unsure (1)..(83): unsure at all Xaa locations
  Clone ID: PAT_MRT3847_137771C.1.pep
VYAIIRIALVGCVVXAHHIFTVGIDLDSRAYFTRATIIIAVPTAVKIFSXLRTLFGNKFINQSVLYWVLGFIFLFTVGGLTGV

SEQ ID NO: 184669 - protein, 111 aa, Glycine max
  Clone ID: PAT_MRT3847_137772C.1.pep
SKHMMAMPHEHCNFRACFHWKVRILILSQLLLSQRHNVVMMSNNKYKCTALEVDAKLAYDFEKHIAPETIKIIVFLCTGQPVLMVIILASSFTLHKRVEVHIKLLSRLKLY

SEQ ID NO: 184670 - protein, 84 aa, Glycine max
  Clone ID: PAT_MRT3847_137773C.1.pep
KGGLPTEFLGAKKSWPRTQGPPVFAQSLSISKKGLQGNIPVRSSPVWFRVSSPGCWVNFWTPWPPGLRLGPPCFDPIVVSWPFF

SEQ ID NO: 184671 - protein, 218 aa, Glycine max
  Clone ID: PAT_MRT3847_137774C.1.pep
MNCEVCQLKELELEHFEIREVLRCILHTIVFHRALGLVRPKDVDLELFDVTYVQCGEAELEKKIDEKIEQFVCWVEKHPNKKSQICLSFYEVKNKQASWFSNKIERLYWEQWYINLNVAQHPKAHSSKYHHSKVVDPGEGALEDRNARSAALEASLREVLFQIIKFVNEKKDHVPPIPNLEGAVSFPYEITIPSSSDSAFGMDMIKRMLQTGHPTMLS

SEQ ID NO: 184672 - protein, 125 aa, Glycine max
  unsure (1)..(125): unsure at all Xaa locations
  Clone ID: PAT_MRT3847_137775C.1.pep
ARRLELXXNAGSGRPETRKHEXRRXXAXGEENXGXRAXQAXXXXARHKAEGAPXERXXDEDGEEXXNDDGDGEGEGGRKDDNNGNGRRGRKRGEENTERATKREREGPPTTRKGGKARKKKKTRG

SEQ ID NO: 184673 - protein, 107 aa, Glycine max
  unsure (1)..(107): unsure at all Xaa locations
  Clone ID: PAT_MRT3847_137776C.1.pep
MAAAKPQRTPQEVEDIVIRKIFLVSITEIATTTDSRIVYLELTAAEILSEDKELRLSRDCMERVLIDRLSGEFAGAVDESPFQYLVGWYHRAHEEGKKXANMKDKTL

SEQ ID NO: 184674 - protein, 144 aa, Glycine max
  unsure (1)..(144): unsure at all Xaa locations
  Clone ID: PAT_MRT3847_137777C.1.pep
LYLDCFNFLTYAYILLYIALSSGQIFFNKWVLSSKEINFPYPSALALPIGAMSAVTCFVGTTILKVITVEDGQMPEIFTTSVVPIGAMFAMXIMPVAVFVLGVAAGLEVMSXKMLSIMSVISFGGVVKDWVVVLLSAVCLLIQS

SEQ ID NO: 184675 - protein, 44 aa, Glycine max
  Clone ID: PAT_MRT3847_137778C.1.pep
ERERERERERERERERERERERETECVRLPPRSSLVSLVSLRSF

SEQ ID NO: 184676 - protein, 126 aa, Glycine max
  unsure (1)..(126): unsure at all Xaa locations
  Clone ID: PAT_MRT3847_137779C.1.pep
GRVPDRAVSAPPTSFRSGACHVCEARTFRDLKAQNPCVLTTRVGKLTGAQGTSMGDRXHPFRIPLGAGLTTAFLMNLPNAVLPMWRFYVRKLIYXLATMTSTYIKRAVSLFIAWGNMAGDAISFEV

SEQ ID NO: 184677 - protein, 137 aa, Glycine max
  Clone ID: PAT_MRT3847_13777C.1.pep
MEEDFPLESDGPRFLSLPDWPQIVYDVSSQDISVHIPLHRLLSMLLQKAMKRYFCESEGSDVTHVSSANSLLTSYNDFFEQALRGSHPYGFSAYVMEHPLRIRVFCAEVHAGMWRKNGDAALLSCELYRSVRWSEQC

SEQ ID NO: 184678 - protein, 280 aa, Glycine max
  Clone ID: PAT_MRT3847_137780C.1.pep
VYNMFRRSYQSSMAYVLITYAIWFMSLTWLCAPFLFNPAGFSWTKTVDDWKEWNKWIRQQGGIGIQQDRSWHSWWHDEQAHLRWSGFGSRLTEVLLSLRFFIYQYGLVYHLDISQHSKNFLVYVLSWIVIVAIFLLVKAVNMGRQLLSANYQLGFRFFKAFLFLAVLAIIFTLSIICELSLTDLFVCCLAFMPTAWGLIMMAQAARPKIEHTGLWDFTRALAREFDYGMGIVLFGPIAILAWLPIIKAFHARFLFNEAFKRHLQIPPILAGKKKRHRTWS

SEQ ID NO: 184679 - protein, 85 aa, Glycine max
  Clone ID: PAT_MRT3847_137781C.1.pep
MSALGAVIALLLWGQLFAVDSGDDVTDIADDGCPKPPEIAHGYVEHSVRYQCKNYYKLRTEGDGVYTLNDKKQWINKAVGDTLPE

SEQ ID NO: 184680 - protein, 80 aa, Glycine max
  Clone ID: PAT_MRT3847_137782C.1.pep
TRFGNMKRAQLPYKFFHPGERRQDHRCTLGGACSFTTIQTHSIHRPTISGTRSQGSVREPAACLILYCDAHWKSTGHHFT

SEQ ID NO: 184681 - protein, 180 aa, Glycine max
  unsure (1)..(180): unsure at all Xaa locations
  Clone ID: PAT_MRT3847_137783C.1.pep
MARRELSSTLKNLKFMQRAALREERTKKEEEVKPDVSVGTSTAVTRKWXDPHPGAAKGRMSFQSFNPLVDKLNEEEARLHQPAAETTMSRNQNANANIRENRSPVEGPECGNMDKKIVEVNGNAKRKQSDYEAQYPNKSPKNDHDDKHSSPSNSLGSFKKPSGDKLDWKVLRPSSVKQSR

SEQ ID NO: 184682 - protein, 104 aa, Glycine max
  Clone ID: PAT_MRT3847_137784C.1.pep
VSLPGSFMASSVTRSTSGFSFSEIWLLVAATALICGFVGYIAYDAIMATASELLERLLVIPSLLLIMIVHWLYTASQISCLMPGSEPSAIHRAGGSPWGATSGV

SEQ ID NO: 184683 - protein, 63 aa, Glycine max
  Clone ID: PAT_MRT3847_137785C.1.pep
LITGRPRQTKAIVIQDEAFALQSYPYISCSPDLQTPLGSSNRFELYDRQEMNTLFEGCSHNTE

SEQ ID NO: 184684 - protein, 89 aa, Glycine max
  Clone ID: PAT_MRT3847_137786C.1.pep
SFSLFKDQREIRLIVMMMIREEKGVKPVLLKFGLALALSFAGFIYSRLRTRRIKPSKSRKGCSFGAALSTCNAISEGNFLCSEKHASTR

SEQ ID NO: 184685 - protein, 39 aa, Glycine max
  Clone ID: PAT_MRT3847_137787C.1.pep
YGCEKTTEGGKNKGSLKPIPNMLLTAKNMELNSYANYLD

SEQ ID NO: 184686 - protein, 122 aa, Glycine max
  unsure (1)..(122): unsure at all Xaa locations
  Clone ID: PAT_MRT3847_137788C.1.pep
MHYTCLSFVSIPNSPSEALSHLAWRQAMIDERCALQCSGTWELVSLPPWKFVVWXPDGTIDRFKAHLVAKGYTQGYXDYTNNFSPIAKMASIRLLLSMAAIWHWPLFQLDIKNAFLHGDLEK

SEQ ID NO: 184687 - protein, 93 aa, Glycine max
  Clone ID: PAT_MRT3847_137789C.1.pep
IVVWKKEKNSIRGDGTGRASLHAPQRRPKYKSGPLGPPGVAYHSMYSLAAPVFEVENGGSFMAGSSFSGDGLTICSGGHGGALSARTKPCMAF

SEQ ID NO: 184688 - protein, 54 aa, Glycine max
  Clone ID: PAT_MRT3847_13778C.1.pep
MFASVNIKDLAAYGFQHCAESVDLPDVRSLELQHDLLRVYAFSSDGRAVYKAWC

SEQ ID NO: 184689 - protein, 523 aa, Glycine max
  Clone ID: PAT_MRT3847_137790C.1.pep
GCFRLGVSALGLTGGGPRVPRPQWGPDGRVGGEGKENKALCRRRCGDAAEGAARLAFIRDLRTEFKGLDDVYVWHALCGSWGGVRPGATHLNSKITPCKLSPGLDGTMQDLAVVKIVEGSIGLVHPDQANDLYDSMHSYLAQSGVTGVKIDVFHSLEYVCEEYGGRVELAKAYYDGLTNSIVKNFNGSGIIASMQQCNDFFFLGTKQIPMGRVGDDFWFQDPNGDPMGVFWLQGVHMIHCAYNSLWMGQMIQPDWDMFQSDHVCAKFHAGSRAICGGPVYVSDSVGSHDFDLIKMLVFPDGTVPKCIHFALPTRDCLFKNPLFDQKTVLKIWNFNKYGGVIGAFNCQGAGWDPKMKKIKGFSECYRPISCTVHVTEVEWDQKKEAVHMGKAEEYVVYLNQAEELHFMTPKSEPLQFTIQPSTFEIYNFVPVEKLGGSIKFAPIGLTNMFNSGGTIQELECVEKGAKVKVKGDGRFLAYSSESPKKFQLNGSDVAFEWLPDGKLTLNLAWIEENGGVSDLAIFF

SEQ ID NO: 184690 - protein, 77 aa, Glycine max
  Clone ID: PAT_MRT3847_137791C.1.pep
KKRESIISTALVTSRSSLDQTWMLTAFLQGESMAQRTQLAPDQVNEIKAEYRFPLLWSSFKERSILKKDFRQLFSLL

SEQ ID NO: 184691 - protein, 54 aa, Glycine max
  Clone ID: PAT_MRT3847_137792C.1.pep
FLPGKPRSSHLIIHAPKYLLGVRSKIPTQFHISLGLCVNIITPKDITISWIYVK

SEQ ID NO: 184692 - protein, 56 aa, Glycine max
  Clone ID: PAT_MRT3847_137793C.1.pep
ELTTHQRSVTITIGTQVRVLGKNQEILPTPIKNIEFEIPTVRVFSRIFYTRKCRPG

SEQ ID NO: 184693 - protein, 94 aa, Glycine max
  Clone ID: PAT_MRT3847_137794C.1.pep
KFLHLFPLLECLLKYIRRDFSIRGHVPKCPSVVYCHKWPSAFTHLIFVLPYKIMACPQLNYQLRSQDRRIFPGHRVYACTSQKERYVLRWRQFG

SEQ ID NO: 184694 - protein, 104 aa, Glycine max
  unsure (1)..(104): unsure at all Xaa locations
  Clone ID: PAT_MRT3847_137795C.1.pep
SKQLTNEQISELNRTLQLISTTTANKASQPRELGTLMPSFFQNPSNAKLQNMISQKDADDTGTMDFXEYIYIMAQRINDIDSNRXLKRPLRSSTKTQNGFISAA

SEQ ID NO: 184695 - protein, 80 aa, Glycine max
  unsure (1)..(80): unsure at all Xaa locations
  Clone ID: PAT_MRT3847_137796C.1.pep
SLPSICWSYIGNHPCSYHGAGYFFHPSCESGXLVSLCKRINDTGSPRTCSIQNIVADQRGTVYVMARHCGRARHSLAYIV

SEQ ID NO: 184696 - protein, 70 aa, Glycine max
  Clone ID: PAT_MRT3847_137797C.1.pep
NAQYMRGYGMGIFFTEKQTKSYLLDINTKLLPKNKGLGTFPTYQKTLPRGLRQNKNNCLHSFKTLGWTPL

SEQ ID NO: 184697 - protein, 71 aa, Glycine max
  Clone ID: PAT_MRT3847_137798C.1.pep
RHRKPCPFISVGNSYSGSRADRESHPQKSFVPQGNMADNQHSLPMRNSKALGAEHAPPSNFQDLESIRRIR

SEQ ID NO: 184698 - protein, 95 aa, Glycine max
  unsure (1)..(95): unsure at all Xaa locations
  Clone ID: PAT_MRT3847_137799C.1.pep
SGPGSTHASDFILCTLPQQYTPFXISYNTHKDKWSINELMTMCVQEEERLIMEESEKVNLTTSTSGKDRKKSVGTNKGRIPTQPTIKKESKCFFC

SEQ ID NO: 184699 - protein, 79 aa, Glycine max
  Clone ID: PAT_MRT3847_13779C.1.pep
RSASKTTEGLKKKKKKKKKKKKKKKKKKKKKKRMHKKEQKFSIACLQMHFRCAFVPPHFNWLAPGVPHLNRVTPRRSPP

SEQ ID NO: 184700 - protein, 59 aa, Glycine max
  unsure (1)..(59): unsure at all Xaa locations
  Clone ID: PAT_MRT3847_1377C.1.pep
IIFLNLSRDDQILFNGLLYYLGCYTLSGASRLPLWRXSEVVMAILLHAGPMEFLCYWLH

SEQ ID NO: 184701 - protein, 202 aa, Glycine max
  unsure (1)..(202): unsure at all Xaa locations
  Clone ID: PAT_MRT3847_137800C.1.pep
MKNQHGYVPPAYIPLGPSDSEAVDVSLLQRSSTNGSNQMQAQWSSGICACCDDMQSCMLLPYPVTSFXYKGCIGCLCPCFLFGKNADFLGSGTFLGSCVTHFILWSVVNTACCLLTDGLFWGLPGCLVSCYACGYRKALRSKYNLPEAPCGDFVTHFCCHPCAICQEYREIRERSGDCEATDLKLAVVTAPPIQTMHSDSKQ

SEQ ID NO: 184702 - protein, 64 aa, Glycine max
  Clone ID: PAT_MRT3847_137801C.1.pep
RQFLYYLTPYFHLYKHPLSFKPSHNSNTVNNNTLTHLNYLHPLNPPFLTLYLLRIKHNKPNLIC

SEQ ID NO: 184703 - protein, 61 aa, Glycine max
  Clone ID: PAT_MRT3847_137802C.1.pep
NPLHLFLSVTSIMASRAVILLAMCVLPAMVERIPPPKNPSCVTDLAYCNPCPARFDISSTT

SEQ ID NO: 184704 - protein, 258 aa, Glycine max
  Clone ID: PAT_MRT3847_137803C.1.pep
MRHPVDITRCPELPVCSVPLMKRRLQSVLEENMGISKLFPVQVALWQETVGPGDFERDLCINSPTGSGKTLAYALPIVQNLFTNPGGRLRALVVVPTRDLALQVKRVFDALASPLGLRIGLAAGQSSLRHELSSLIYLPGEDDGPDPGFLSPLWFQSKVDILVATPGRLVDHVNKLSLKHLRYLVVDEADRLLREDYQSWLPTVLKLTQSRLAKIVLSATLTRDPGRLAQLNLHHPLFLSAGKMRYRLPEYLECYKLI

SEQ ID NO: 184705 - protein, 100 aa, Glycine max
  Clone ID: PAT_MRT3847_137804C.1.pep
FSLAVLPATRNVNNQGRGGFGRGRWQNDRGAGLLPRPGPYPQRQNFGYGNRVQNGRHDERFVSELKLSKSEDTLSRKCIAFHEVWECHFPIFNCFCIKQF

SEQ ID NO: 184706 - protein, 58 aa, Glycine max
  Clone ID: PAT_MRT3847_137805C.1.pep
PTFFSSSFHHLTIPTHGMPQTTFFTPSRHTCKRKLGVPGSDENHNLFLLGLQNICKRY

SEQ ID NO: 184707 - protein, 41 aa, Glycine max
  Clone ID: PAT_MRT3847_137806C.1.pep
IKKKKKKKKKKKKIKKKKKKKKKKKKKQKDKIKKIREKKLD

SEQ ID NO: 184708 - protein, 88 aa, Glycine max
  unsure (1)..(88): unsure at all Xaa locations
  Clone ID: PAT_MRT3847_137807C.1.pep
MEEEDFGQKAFEVTWACHEASYLGHTEKVTAAHGEQYWEVKSPGXKLDKLVHHSQTNDTKAEKNREATENDKSGNQLNRGDKRGYGPS

SEQ ID NO: 184709 - protein, 50 aa, Glycine max
  Clone ID: PAT_MRT3847_137808C.1.pep
FIPSWFHSKGFLMDLTIIGFHPSFHSGIWQNFYFIPINRLKSPLGEWQKW

SEQ ID NO: 184710 - protein, 133 aa, Glycine max
  unsure (1)..(133): unsure at all Xaa locations
  Clone ID: PAT_MRT3847_137809C.1.pep
MLRPSRHEMSSTGTFVKHVSSFNVENIEADHGALGKLLFSCTYALQYLXGVKLFRRXLFNMTTCSDDDFQCQVLPQNNEIPCMTENKGRRRVVXTNGESNTQGXHYLRSRGQQYYAADARFLQWHAILETCPT

SEQ ID NO: 184711 - protein, 74 aa, Glycine max
  Clone ID: PAT_MRT3847_13780C.1.pep
TPGGPPPPLDKDQLLVRPFLPPPPGVPFNWIPPWGGKKSFLKPPFGVSPPGSEEKTPPGFEKRGPPPNSRAHPY

SEQ ID NO: 184712 - protein, 77 aa, Glycine max
  Clone ID: PAT_MRT3847_137810C.1.pep
DYSLTDSICALKHSRIEIIKKGLMTLLNKPHPASDRYSPNTRAIVKTKTNGEDDDGEVSGVPVYSLLEVAEEDSMEI

SEQ ID NO: 184713 - protein, 98 aa, Glycine max
  unsure (1)..(98): unsure at all Xaa locations
  Clone ID: PAT_MRT3847_137811C.1.pep
KHPPVPKPPSSKQASCPKDTIKFGVCADVLCLINVRLGKPPKTPCCNLIHGLADLEAAVCHGTDLNANVSCMNLNVAVNLSLLLNYLXKGVPKGFVCY

SEQ ID NO: 184714 - protein, 79 aa, Glycine max
  Clone ID: PAT_MRT3847_137812C.1.pep
HASCTVSIPLFNRSPGYYYGRFFTMWKLPIFYCTDSFHMLKTFNKLRLHTPMASFLIIGFDNVSQVQCITLIAYKPPCF

SEQ ID NO: 184715 - protein, 111 aa, Glycine max
  Clone ID: PAT_MRT3847_137813C.1.pep
AKFHIQCLIKKKKKKKKKKKKKKKKKKKKKKKKKKKKKKKKKEKKKKKKKKEKKGKKKKKKKKRGANIKEPNDKTARRRRIIFLIRETKIKLRGRILKRSKKKNLGHKTKK

SEQ ID NO: 184716 - protein, 82 aa, Glycine max
  Clone ID: PAT_MRT3847_137814C.1.pep
MSTPALSGGTGLFSGFTRLCKGLAVVLVCGHIAVQFFPSAVNYLALIPARYGGGLLMLIIKDGGSSSTAGLGFMRLVYGDLH

SEQ ID NO: 184717 - protein, 53 aa, Glycine max
  Clone ID: PAT_MRT3847_137815C.1.pep
GIRFDRPSQQTNNKPSSHASIMLCTLRFVWKYFTINVVLIQIQLIIFIVTTND

SEQ ID NO: 184718 - protein, 104 aa, Glycine max
  Clone ID: PAT_MRT3847_137816C.1.pep
GNEEKQLEGMDAEMRKIEIEEVEYAKAKAKRRLRLEALDVTKLALLRPDGHPGPYMNPFPFVNGNAGSVQNDCVHWCLPGPIDTWNEILLEMMKKWEKQSRNED

SEQ ID NO: 184719 - protein, 77 aa, Glycine max
  Clone ID: PAT_MRT3847_137817C.1.pep
FHHYQVVTRAVLTKTYQNAKIFRMKLWTTNKVRAKSKFWYFLKKLSKVNKSNGYILAVTEILENSLSTIQNYRMWLR

SEQ ID NO: 184720 - protein, 193 aa, Glycine max
  unsure (1)..(193): unsure at all Xaa locations
  Clone ID: PAT_MRT3847_137818C.1.pep
MDFWKVGLLSLLCAASAFAIGAVELGRHQPTERISGSAGDVLEDDPVGRLKVFVYELPSKYNKKILRKDPRSXHMFVDEIFMHHFLLSSLVXTLNPKEAYWFYTLVYTTCDLTPNGLPLPLKSPRMMRSAIQLIFSHWPHWNRTTGEAHFFVXPHEFGACFHYQVRNLVYHFSFFIYITISYIKNSNKFCGVW

SEQ ID NO: 184721 - protein, 274 aa, Glycine max
  unsure (1)..(274): unsure at all Xaa locations
  Clone ID: PAT_MRT3847_137819C.1.pep
KLPLNDLTGNDGLYIVGGVATPADRKEAKGHARLFMKSIISTLLCTSAILVLLTIHVLIRAHVANKALNGNNNXXIPRAQKFEFSVDDIVRNLTSSNVIGTGSSGVVYKVTVPNGQILAVKKMWSSAESGAFTSEIQALGSIRHKNIIKLLGWGSSKNMKLLFYEYLPNGSLSSLIHGSGKGKPEWETRYDVMLGVAHALAYLHHDCVPSILHGDVKAMNVLLGPSYQPYLADFGLARIASENGDYTNSEPVQRPYLAGSYGYMAPEHASMQRI

SEQ ID NO: 184722 - protein, 41 aa, Glycine max
  Clone ID: PAT_MRT3847_13781C.1.pep
KGVFTSHPCPYKHKHKIIKSTQGTFSIMQRKKKRELSSFCF

SEQ ID NO: 184723 - protein, 325 aa, Glycine max
  Clone ID: PAT_MRT3847_137820C.1.pep
MSSNSGKVVCVTGASGFIASWIIKLLLQRGYTVRATVRDPSKPEKVDHLLKLDGAKERLHLFKADLLEEGSFDSAFEGCDGVFHTASPVHFIVTDPQNQLIDPAIKGTLNVVKSCAKSPSVKQVILTSSVAAVLYNGRPRTPEVVVDETWFSDPDFLRENERWYAFAKTSAEDAARKFLSEYDIKLVVINPSMSIGPLLQPELNASSSSILNLINGSPTFSNNSFGWINVKDVANAHIQAYEIDSASGRYCLVERVIHFSELAKILRDMYPTLQIPDKCEDDEPFMPTFQVSKEKAKSLGVEFIPLEVSLRETVESLKEKKFVDF

SEQ ID NO: 184724 - protein, 36 aa, Glycine max
  Clone ID: PAT_MRT3847_137821C.1.pep
SGDLICLVTVHFYGRGFLLSSLLNMVTIEHCLEIIL

SEQ ID NO: 184725 - protein, 118 aa, Glycine max
  unsure (1)..(118): unsure at all Xaa locations
  Clone ID: PAT_MRT3847_137822C.1.pep
KGNNQPKVKPAXLVFIIAEKAEGVFPCRGNSLVVSQKIFFSEALSGYXVPLITLNGRKFPFPISNFFHPPYXKVVPKKGMPLPKDPSKKGNLRLKFNLKFPIRVPEEQKAGFRNLLNA

SEQ ID NO: 184726 - protein, 79 aa, Glycine max
  unsure (1)..(79): unsure at all Xaa locations
  Clone ID: PAT_MRT3847_137823C.1.pep
SPXXXFFXAALXVXKXYCSFXFYTCGKLKIXWXEXXNXXTRSXNNGEVHXXXFXXXXLCTTSTHDRALXXQTEXXCXXK

SEQ ID NO: 184727 - protein, 247 aa, Glycine max
  Clone ID: PAT_MRT3847_137824C.1.pep
MDRHSIPGVSNLCIFLFLVSLFPQALTLRVSSPSSPTGQINSNSILVALLDSHYTELAELVEKAMLLQKLEDTVATHNITIFAPTNEALDRNLDPDFKRFLLEPANLHSLQTLLLSHITPAQIGSKTLTRHVTSLSDHNLKLSENLTTVDEARVTHPNVVTRPDGVIHGIDRLLLPRSVEDDFNRRRSLRSISAVKPEPAPEVDPRTHRLKKPPPPAKPGSLPELPIYDAMAPGPFLAPAPAPGPGG

SEQ ID NO: 184728 - protein, 61 aa, Glycine max
  Clone ID: PAT_MRT3847_137825C.1.pep
MTIEPHQSICKHIHNHANIATTSPRAHNTQDMDLNYHWPPLLDVQFGSLLPPAFQPIPLFG

SEQ ID NO: 184729 - protein, 32 aa, Glycine max
  Clone ID: PAT_MRT3847_137826C.1.pep
CCVTIPKDIRDNKGLHFGENSNSDHVTSPSPT

SEQ ID NO: 184730 - protein, 174 aa, Glycine max
  Clone ID: PAT_MRT3847_137827C.1.pep
PEDNEVAAIDVSIGDIYFSSRFGSRAVFAYQKALTVFKSTKGESHSCVALVYIRLADLYYRTGKLRESKSYCENALRIYSKPVAGTTAGEIASGLTEISAIYEALNEPEEALKLLQKAVKLLEDIPGQYRTVAGIEAQMGVMFYMVGKYMDAWKSFENAITKLRASGEKKSAFF

SEQ ID NO: 184731 - protein, 49 aa, Glycine max
  Clone ID: PAT_MRT3847_137828C.1.pep
HHDLQSIYNCHKKTTECFPSHFLRGCTLHFNALDITCLPKDRRNTSHYH

SEQ ID NO: 184732 - protein, 59 aa, Glycine max
  Clone ID: PAT_MRT3847_137829C.1.pep
DTMLPTAERREFFARFHNLIPNCTIAYALEHPENFNRGPFFCHEPRRRYWFSKQQQHEP

SEQ ID NO: 184733 - protein, 100 aa, Glycine max
  unsure (1)..(100): unsure at all Xaa locations
  Clone ID: PAT_MRT3847_13782C.1.pep
PVILSLAGDVCTDVESDPYSNAPGVLRKRYGPXAYVMRGGVLLYMFRSVSTPFWACKILCIDADTVITNFFNLNMWTLLSEYDTFRGHFVQFIWLTRYPT

SEQ ID NO: 184734 - protein, 113 aa, Glycine max
  unsure (1)..(113): unsure at all Xaa locations
  Clone ID: PAT_MRT3847_137830C.1.pep
LFVRSLRSSDCNSRVDDXAMEEGPDSDFAEPTLGCTVWVAAMTNNQLVVANAGESRWVISWLGLVFNSPVDHQPHLVIDMHRVLKACRYIHARLVDRSLNGARPIGDMKFAQN

SEQ ID NO: 184735 - protein, 280 aa, Glycine max
  Clone ID: PAT_MRT3847_137831C.1.pep
FHGGGWVSGSNDSVALEPRRIARLCEAVVVAVGYRLAPENRYPAAFEDGMKVLNWLAKQANLAECSKLMGGRRLEGQHKHIVGSFGASMVEPWLAAHGNPSRCVLLGVSCGANIADHVARKAVEAGKLLDPVKVVAQVLMYPFFIGSVPTRSEIKLANSYFYDKAMCMLAWKLFLPEKEFSLDHPAANPLAPDHSPPLKKMPPTLTVVADHDWMRDRAIAYSEELRKVNVDAPVYEYKDAVHEFATLDVLLKSPQAQVCAEDIAIWVKKYISLRGHEFSY

SEQ ID NO: 184736 - protein, 57 aa, Glycine max
  Clone ID: PAT_MRT3847_137832C.1.pep
PTRPNGISPRCKCSSRSLTCDLTLALIRIESLFFKILSHHLSSLVRRRFPDPGESNS

SEQ ID NO: 184737 - protein, 45 aa, Glycine max
  unsure (1)..(45): unsure at all Xaa locations
  Clone ID: PAT_MRT3847_137833C.1.pep
SVSLLWAWFSFPLXIVXVCGAPPSLDPRVAFVPVNTLPGRFRLRR

SEQ ID NO: 184738 - protein, 65 aa, Glycine max
  unsure (1)..(65): unsure at all Xaa locations
  Clone ID: PAT_MRT3847_137834C.1.pep
LCRRLAVRRGAGFVLGRVGAFYALRCLVVVPLPGARAFGLVLLPALLFAFSVLXWLPPVXLSQIL

SEQ ID NO: 184739 - protein, 154 aa, Glycine max
  Clone ID: PAT_MRT3847_137835C.1.pep
MGVAVLYPQDSLPHKPSTHYQTIIPHFPSMNPKSHRTSRNRKKRPVPGPARPTTSSKSQVNNKPPQQLVMGQVKILKRGELLSQTTPDPQPQTESVEKKTETVVKKGLTSTVEGLYAGYSMLVMSPPPSSVPVPAFITKKFAALSEATSDLREM

SEQ ID NO: 184740 - protein, 32 aa, Glycine max
  Clone ID: PAT_MRT3847_137836C.1.pep
MASTKVHRVMTQPINLYFSVLHSKARIHIWLF

SEQ ID NO: 184741 - protein, 52 aa, Glycine max
  Clone ID: PAT_MRT3847_137837C.1.pep
KKKKKKNKIKKKKKKKKKKKKKKKKKKKKKKKKKKKKKKKKKKKKKKKGRSF

SEQ ID NO: 184742 - protein, 105 aa, Glycine max
  Clone ID: PAT_MRT3847_137838C.1.pep
ALDTAHRSTGSGPAQFRLYNLGNTSPVAGSKLVRILEKLLKVNAHKKLLPKPPNGDVFFPQGEISLAKKELGHNPPLHLETGLRKFFDWEKEYYFSSSPRPKRGW

SEQ ID NO: 184743 - protein, 258 aa, Glycine max
  Clone ID: PAT_MRT3847_137839C.1.pep
MTSMYSGGYTALVTNLSPRATEDDVRNFFTYCGLIEHIEILRSGENAPTAYVTYRDAYALETALLLNGSMILDQCIFISRYEAYVNDYDNWSNHASNPEYSITTSQDVHMDKFVASPGEALTMAQVVVKTMVAKGYVLGKDAFVMAKAFDESHSVSSTAATKVAELSNKIGLTDTINSGIETFKSVDEKYHVTDFTKSAATVTGTTAIVVASVTGKAAVAAGTAIANSSYFAKGALWVSDVLTRAAKAAADLGQNEKK

SEQ ID NO: 184744 - protein, 41 aa, Glycine max
  Clone ID: PAT_MRT3847_13783C.1.pep
LELLCLLYKSCYPFPVINEPLCLPALVLFWIILTIKLILLD

SEQ ID NO: 184745 - protein, 67 aa, Glycine max
  Clone ID: PAT_MRT3847_137840C.1.pep
SPQLLEKLDERTSIKFKVHKLILTYGKNSIEFTFLFSSPISLYKKVYPNRSLIYILNDLYQQMYTLL

SEQ ID NO: 184746 - protein, 86 aa, Glycine max
  Clone ID: PAT_MRT3847_137841C.1.pep
VRVPSRSLLFVPPFLRPTPLFYLLSSIPNTQYPSGYLKKHLFFRFCLGPIRLYFIGSSLIERPCWFLLVLWISNPCSCDIPIQVKQ

SEQ ID NO: 184747 - protein, 145 aa, Glycine max
  Clone ID: PAT_MRT3847_137842C.1.pep
MPCSLATQSSVLKRRAPASPQQAKMHDKKRHFDESANNGQEKADKVPSKGDKVSPTNEEKKKNVAFATLAIHAGNEPEKWDMNQVVPPISLATTYKQQFAGMPKGHDYARGGNPTRDVLQQSIAALENARHCRVFSSGLSATAAM

SEQ ID NO: 184748 - protein, 41 aa, Glycine max
  Clone ID: PAT_MRT3847_137843C.1.pep
QNQLHITCMKQEARKKKKKKKKKKKKKKKKKKKKKKKKKKK

SEQ ID NO: 184749 - protein, 62 aa, Glycine max
  unsure (1)..(62): unsure at all Xaa locations
  Clone ID: PAT_MRT3847_137844C.1.pep
XSTXACLPVQHXXXFHHNNPXQHXXISXTYQXXHXSLTFXLALAXXLXKHPXISXTHXINMX

SEQ ID NO: 184750 - protein, 68 aa, Glycine max
  Clone ID: PAT_MRT3847_137845C.1.pep
CIFPDERWFQSTCFKNRKCSFGGSNHVKRFQFDPLVEDVLNWWGYNALKMEFFFFFGGLKDKILLGQR

SEQ ID NO: 184751 - protein, 36 aa, Glycine max
  unsure (1)..(36): unsure at all Xaa locations
  Clone ID: PAT_MRT3847_137846C.1.pep
LVYQDLLTGDELXSASFRYKEIDIGMLWEVEGKCLV

SEQ ID NO: 184752 - protein, 107 aa, Glycine max
  Clone ID: PAT_MRT3847_137847C.1.pep
KKLNWKNLDGTKIKKLGAKPIFARCRKTKYTRSDLLSKRLPNLNVKWNPPCKGKKNATVMGVTHTETVTFDHALTPELCNLFNTFFPTFVAFPCKALKGGLPLGLKF

SEQ ID NO: 184753 - protein, 109 aa, Glycine max
  unsure (1)..(109): unsure at all Xaa locations
  Clone ID: PAT_MRT3847_137848C.1.pep
ISCFIPARGFNTPVLPLLVNYMNLRLYSTGALAAIGVGEVARLLNRRMHVHTVQLHTPPNVAIPLTRRYPGFIFTRLRLHGMVDYLXVLIADDLSRTMPVYSLAGWFMS

SEQ ID NO: 184754 - protein, 218 aa, Glycine max
  Clone ID: PAT_MRT3847_137849C.1.pep
MEELLLYETRHHASNHPPQHHQNQHQQQQQENESAKGSLLSLLSSRGVSQLKEKWSEYIQPKRLIRLVSLFVSATAKHVAVAAGNRITFLSKEDDYQNPRAIFTSSSFGTFSVGAWSENEDVLGVADDSDTLYFIKFSGEVVAEISKKHLKVSTPIVALFSDIDLDTHESYLFSIVTSDGSLQRIEISRGQSGSTFSQSTSRFSNNIFCFDRPSELNL

SEQ ID NO: 184755 - protein, 45 aa, Glycine max
  Clone ID: PAT_MRT3847_13784C.1.pep
TMKRVLFSEVRSYYSSQPPYFLLFIALGQFPLFPWLGNITVNWVK

SEQ ID NO: 184756 - protein, 67 aa, Glycine max
  Clone ID: PAT_MRT3847_137850C.1.pep
CGIAIEPSYPVKNGPNPPSSGPSPTSPEKPPNVCDNYYTWADIATWCLFLKIGNASFEWGCCPFEGA

SEQ ID NO: 184757 - protein, 141 aa, Glycine max
  Clone ID: PAT_MRT3847_137851C.1.pep
FWDAIENLPTDGSFLEYNDIAIGNGSRSTEADPPANDILDEYLTLPDDDIYKYISFDSPQIQESENFIPNQGSPFTRQNVEGETADKSVVSNHNSESQTRNEASSVQNTHEAKFAPGSTNPLVKQAYGLLGQHPLLAPGTM

SEQ ID NO: 184758 - protein, 69 aa, Glycine max
  Clone ID: PAT_MRT3847_137852C.1.pep
GNAIEIHLICHIEEIKQYEVWITLGLIFYEGEKWILYTNTLPFGYEGMSDILQLMKLYRWTMITSNTYL

SEQ ID NO: 184759 - protein, 89 aa, Glycine max
  Clone ID: PAT_MRT3847_137853C.1.pep
SSRENILKREEEMKSMLEKVKKDVADRTKAISKAFKADLKNIKATVEAAKEVVHCKDYAYLRRCEALQRSLKSSEDAVKMPFCRLLAAV

SEQ ID NO: 184760 - protein, 60 aa, Glycine max
  Clone ID: PAT_MRT3847_137854C.1.pep
HNPTYMATLHINQTIHSLTPPFTFNPTTVPTLSQSLYLKITADYTESYSIYILIHLHNTL

SEQ ID NO: 184761 - protein, 115 aa, Glycine max
  Clone ID: PAT_MRT3847_137855C.1.pep
MVVTGDGELGFDSGWVAWGLNLVGDGMRGAEAFLAFPSSASASAITLGRYNLTSYKAIDEVKAFTFDSWDLAAEESNGAVTIYGSVKIPDSARNVSHVWQVGPVAAGKPGVHSFE

SEQ ID NO: 184762 - protein, 52 aa, Glycine max
  Clone ID: PAT_MRT3847_137856C.1.pep
KLLWVVTQKEVKKDSLLIYVMTYVFVKEWSSSANNWCCYGPVWPPSQLGISF

SEQ ID NO: 184763 - protein, 87 aa, Glycine max
  unsure (1)..(87): unsure at all Xaa locations
  Clone ID: PAT_MRT3847_137857C.1.pep
GKSYPTVTTDYHKAVEKANKKLRGIIADKRCAPLMLHLAWHSAGTFDKGTKTVEPFXTSEGRAELAHSANNGLDIAGRLLEPLNAEF

SEQ ID NO: 184764 - protein, 96 aa, Glycine max
  Clone ID: PAT_MRT3847_137858C.1.pep
SVPLSSASMPFLLFDSGRSTCKMEGIKLLPLFVHNCCRTIVRVGCPGNKGLIQNGFQTGNQVGLNRHVLNVLCRSNSRFKNMFLPIPVHVLHLNIS

SEQ ID NO: 184765 - protein, 58 aa, Glycine max
  unsure (1)..(58): unsure at all Xaa locations
  Clone ID: PAT_MRT3847_137859C.1.pep
ICNLTRVDPSAVTXLAGLFGVRNEKLSSNATNPMLTRLLVNXKSVRYLMDECACAYVN

SEQ ID NO: 184766 - protein, 38 aa, Glycine max
  Clone ID: PAT_MRT3847_13785C.1.pep
TQRGSGSAAKQSRKTKSTPKGASIVSKGNTLPQRPIHP

SEQ ID NO: 184767 - protein, 39 aa, Glycine max
  Clone ID: PAT_MRT3847_137860C.1.pep
INKYTALWFFYVLGFQNFERLIIIYIFSPNFACKLLLII

SEQ ID NO: 184768 - protein, 56 aa, Glycine max
  Clone ID: PAT_MRT3847_137861C.1.pep
VNIDGGAIALGHPLGASGCRILVTLLHTLERVGGTRGVAALCIGGGMGVAMCVQRG

SEQ ID NO: 184769 - protein, 158 aa, Glycine max
  Clone ID: PAT_MRT3847_137862C.1.pep
MISTSSMALLSLLPKTAPHALSLTNPSSSTPLILPFSFQCLPHPLPSPLSSLKATFSDGGDNLRGKPLVPQAFEEEDDDDDNKWVDWEDLILEDTVPLVGFVRMILHSGQYDNGDKLSPEHEKTIIEKLLPFHPEFEKKIGSGVDYITIGYHPDFERS

SEQ ID NO: 184770 - protein, 135 aa, Glycine max
  Clone ID: PAT_MRT3847_137863C.1.pep
SHFPSGSCELRLEPRFLASGLGLEVVRMMSVTGKGIDFAGKNLVSGCSSNASFDWYTVRNYAKANSNNSNGCGRGHGRKLVCCKRRSTQCRVSSMKTAHPTVNGGTHAIEGLTTGLDLKGLLKTPHFPHLVFFET

SEQ ID NO: 184771 - protein, 258 aa, Glycine max
  unsure (1)..(258): unsure at all Xaa locations
  Clone ID: PAT_MRT3847_137864C.1.pep
TLGIRLELKETLKALHYLHRHGHIHRDVKAGNILLDTSGAVKLSDFGVATCLYDAVDRQRCRNTFVGTPCWMAPEVLQPAGSGYNSKADIWSFGITALELAHGHAPFSKXIRLEVLLMTMQNAPPGLDDRDKKFSKSFKEMVAMCLVKDQTKRPSAEKLLKHSFFKHAKPPELSVKKLFADLPPLWNCVKSLKLKDAAQLAVKKMPSADEEAISQSQYQRGVSAWNFDIDDLKAQASLVMDDNDNAKMKDDENKFFTN

SEQ ID NO: 184772 - protein, 76 aa, Glycine max
  Clone ID: PAT_MRT3847_137865C.1.pep
CESCHCELYVTFQLIEELNYEGSRADVDGEFNRTTLGNAITLFRLSFLQPLLKACKEEIENSYYLKLQQSKNSLAW

SEQ ID NO: 184773 - protein, 64 aa, Glycine max
  Clone ID: PAT_MRT3847_137866C.1.pep
LVVGVPIGNAHDKFIIHPQTSLHGHSPYPRKTTIGSTSLHSAALDGWLMVSLIFTCKASTHFGG

SEQ ID NO: 184774 - protein, 63 aa, Glycine max
  Clone ID: PAT_MRT3847_137867C.1.pep
IHHGALTIFHCHSVLTLILFPPCFFTFFQRHDHVFTQCWPQNCVIICKVCWSSKQGHGKHVQC

SEQ ID NO: 184775 - protein, 74 aa, Glycine max
  Clone ID: PAT_MRT3847_137868C.1.pep
NSARGSRKCMKNNRWNKYTSGFLLTKKKGRRARKKKKKRDLQQIRGATTKRNWRLPAEKKTGGGPHLGDSSPRK

SEQ ID NO: 184776 - protein, 158 aa, Glycine max
  Clone ID: PAT_MRT3847_137869C.1.pep
RGQKLIFKGKVLEDPMTLTASKLTNGSKLMLVASQCLYQGDGPVLKKAQVVPKSRKDGHSGSSNDMKKIPVKNRMERWKATGVVALSECNLEAIPDEVWVCGSSARVLDCNKNSIKNIPNEIARLTSLEKLFINANEIVDESIRWEGLTTLKYLTVLS

SEQ ID NO: 184777 - protein, 55 aa, Glycine max
  Clone ID: PAT_MRT3847_13786C.1.pep
KPTKWVFRAELRQSLFEECTCMNERTGMLRMIFLMVKIQYTCSPHLSEFYRRIYY

SEQ ID NO: 184778 - protein, 52 aa, Glycine max
  Clone ID: PAT_MRT3847_137870C.1.pep
RMINVSVHKFPHMRSLKNIGDHYEVKRKKTMVQYKRSFENCGLTEKCNALRI

SEQ ID NO: 184779 - protein, 35 aa, Glycine max
  Clone ID: PAT_MRT3847_137871C.1.pep
ISGHEGTVVVLVLTSMTVPRPLKSYVIKKESVRSN

SEQ ID NO: 184780 - protein, 412 aa, Glycine max
  Clone ID: PAT_MRT3847_137872C.1.pep
NIYAGIGSRITFSTKQLDNAVGLQYFDGGIFVGRNVIPIFLAARYLIGVVLLFVLLIYKWRRRHLSIYENIENFLLDSNLNPIRYGYKEIKKMTGGFKVKLGQGGFGSVYKGKLRSGLDVAVKILTKSNDNGQDFINEVATIGTIHHVNVVRLIGYCVEGKKRGLVYEFMPNGSLDKYIFPKEGRVPLSYEKTYEISLGIARGIAYLHEGCDVQILHFDIKPHNILLDESFIPKVSDFGLAKLHPVKDRSLVLPEAIGTLGYIAPELYYKNIGGVSYKADVYSFGKLLMEMASRRRNSDPLPDQLSSNDYFPFWIYDELKEEKDIDLEDASDKDKLLVKKMFMVALWCIQFKPNDRPSMKKIVEMLEGNVESLEMPPKPIIYPHDGEINSNQTSWSDSTCSSRNLCRSISSD

SEQ ID NO: 184781 - protein, 82 aa, Glycine max
  unsure (1)..(82): unsure at all Xaa locations
  Clone ID: PAT_MRT3847_137873C.1.pep
AXSLXXRHAQXSXXQAXXMSXXXIXXXIDMRISXXDRIYXLLAXLXQXXXTXXSXXXXXXWXYNVVSXXLEPNSELTYACXR

SEQ ID NO: 184782 - protein, 271 aa, Glycine max
  unsure (1)..(271): unsure at all Xaa locations
  Clone ID: PAT_MRT3847_137874C.1.pep
MNNNPTTIIGSTTHGSEEEDEHITEIREIHALTPPPPRGRAWETVHTHRSSSLSVASEGGASSSENFSMSREFSALVLAGSSIDHDNSNNNNSNSPMNENNNSNSLLGRIREEDLMEETNPLAIVPDNHPLDPVPSSSSQGVRGGGAAREEHVSVQRVKKEEVDAKISAWQNAKVAKINNRFKREDAVINGWESEQVQKASSWMKKVERKLEEKRARPMEXMLNVIAKAHRKAEERRASAKAKRGSKVARVLEIASLMRAEERPPAKKSFL

SEQ ID NO: 184783 - protein, 33 aa, Glycine max
  Clone ID: PAT_MRT3847_137875C.1.pep
GHLRNILVTGASSALRHDPGTLSKLGINYNTIT

SEQ ID NO: 184784 - protein, 49 aa, Glycine max
  Clone ID: PAT_MRT3847_137876C.1.pep
VVGVDGIDNVLCNLIHVSFINSFENGEYSQLAKISLTFRVSQSVIPEIL

SEQ ID NO: 184785 - protein, 290 aa, Glycine max
  unsure (1)..(290): unsure at all Xaa locations
  Clone ID: PAT_MRT3847_137877C.1.pep
MSITSLTMAESCLLSSPSSLFHTKTKPSLFTPPSKPLTLQFSCLNSSVSLSLAAPTHRSPLVTFVAQTSDWAQQEEEQSLAETEAGLESWEPNGEDAGDESFVEPPEEAKLFVGNLPYDVDSQKLAMLFEQAGTVEIAEVIYNRETDQSRGFGFVTMSTVEEAESAVEKFNRYDIDGRLLTVNKASPRGTRXNARPPRHSFEPSLSIYVGNLPWDVDNTRLKQIFSEHGNVVNARVVYDRESGRSRGFGFVTMSDETEMNDAVAALDGQSLDGRAIKVSVAEDRPRRGSF

SEQ ID NO: 184786 - protein, 352 aa, Glycine max
  Clone ID: PAT_MRT3847_137878C.1.pep
MKSNPKSKTPPHLLYYLLIILSLLFFFPCVSSTQQFKEAPQFYNSPNCPSIEHNICSEEAVHVAMTLDTTYIRGSMAAILSVLQHSSCPQNTFFHFVCSSNDNTNASLLRATISNTFPYLNFQLYPFHDAVVSGLISTSIRAALDCPLNYARSYLANLIPPCVKRVVYLDSDLVLVDDIAKLATTSLGENNNVLAAPEYCNANFTSYFTPTFWSNPSLSLTFADRKQKACYFNTGVMVIDLERWREGDYTRKIEEWMELQKRMRIYELGSLPPFLLVFAGNIVSVDHRWNQHGLGGDNFRGLCRILHPGPVSLLHWSGKGKPWMRLDANRPCPLDALWAPYDLLKTSFSLDS

SEQ ID NO: 184787 - protein, 101 aa, Glycine max
  unsure (1)..(101): unsure at all Xaa locations
  Clone ID: PAT_MRT3847_137879C.1.pep
MDQVVGSFRSAAGSGFFSTLXDGKIAKGLSGDPDEGPVLYVGYHMLLGLELISLTDGSLSEKGIALYGITHPDLFMPEMESRTSEFAMIDWVKIYGGVPVS

SEQ ID NO: 184788 - protein, 104 aa, Glycine max
  Clone ID: PAT_MRT3847_13787C.1.pep
DQTASHLHSDSNLQARLLEDSSPNSPLDSSTPSNTQQLSEGRHSVDDVATAAAGVPQNQGAVVSEERIKKLVSMGFDRTQVEVALAAADGDLNVAVEILMSQQG

SEQ ID NO: 184789 - protein, 151 aa, Glycine max
  unsure (1)..(151): unsure at all Xaa locations
  Clone ID: PAT_MRT3847_137880C.1.pep
LXVXIRQXGKMXPNPXSQXVXAXXRKNCHGXQSFGRGTKVYWVRRPPIPQPVXNLYRGLGLXSGXGEXNXXYWPSNHXSTPXHLWVITVFSXIXSXXSXXXTXXXXXTHAXXXXXNXXXXXPXXWXEXXXRXYXXGXXXSXSSRFRLSTVX

SEQ ID NO: 184790 - protein, 89 aa, Glycine max
  Clone ID: PAT_MRT3847_137881C.1.pep
INILLHFQSAHAPIHFLTCDFRILHIPNHLLLDFLIGQILYLGLFIFSHFLFFLRTLHTLHKTLLIKNSYLVFFSGVVLVVGWSHIASG

SEQ ID NO: 184791 - protein, 43 aa, Glycine max
  Clone ID: PAT_MRT3847_137882C.1.pep
YSYSAVSFPIDVPRISDLGVSVVITFKYSSDDKSPNVPYIMLM

SEQ ID NO: 184792 - protein, 49 aa, Glycine max
  Clone ID: PAT_MRT3847_137883C.1.pep
QNLKKKKNPVAKQTRKLQQELAMLKNRKTRKSDPGFSLTFAIFGGPLGA

SEQ ID NO: 184793 - protein, 120 aa, Glycine max
  unsure (1)..(120): unsure at all Xaa locations
  Clone ID: PAT_MRT3847_137884C.1.pep
FFLRALPWACLVCPPTLSSSCFFLRACSLVPSLSTPGSPSPCFVVPFSSGLPFAQSACPIPPRVPVALFLPRVLLFFAAPXSWSLVGVPVLPPLLLLLCVLFSRARGPXRWVPAAGSPGR

SEQ ID NO: 184794 - protein, 105 aa, Glycine max
  unsure (1)..(105): unsure at all Xaa locations
  Clone ID: PAT_MRT3847_137885C.1.pep
XXXXXXRXXXXXXSAXGXXFWXSXXXXXXLXREXXXPLXQWXXXXSGXXXXXXXMLXGSRXTXMXXXSXXXXFXXGXGXXPFXDMCXXAXXKKXKXXXXXXHXXX

SEQ ID NO: 184795 - protein, 64 aa, Glycine max
  Clone ID: PAT_MRT3847_137886C.1.pep
HMKNMFIEPYATKRRAIYGCYTHSRGHKLVQRCPLQESLNLSNNTHSPTYLTKEGQGMVCPHTD

SEQ ID NO: 184796 - protein, 73 aa, Glycine max
  Clone ID: PAT_MRT3847_137887C.1.pep
KTLLCYATQYLVPLEEVFQTLRCDSNGLTIASAERLSHSGKDRILASIFTKLKLLWLFHQPMIGNYLFFVILI

SEQ ID NO: 184797 - protein, 82 aa, Glycine max
  Clone ID: PAT_MRT3847_137888C.1.pep
GRSNRGFSFPWSRNLLYNTEKNKIFYCKNTSGEDVSFTSRISQSLINSSQVLRMASSLSSRLCKSSHSKISQNSLELGPFSL

SEQ ID NO: 184798 - protein, 44 aa, Glycine max
  Clone ID: PAT_MRT3847_137889C.1.pep
YSSEVDHQVVDCGIVNANIPTNGTKIGGAFVRKNMTAAAPEAGN

SEQ ID NO: 184799 - protein, 53 aa, Glycine max
  Clone ID: PAT_MRT3847_13788C.1.pep
LSILKSLTSTLCSGCIIQVRQKNRLQLFTHIVRYYVLFLCGSRSALLFWLLKY

SEQ ID NO: 184800 - protein, 52 aa, Glycine max
  Clone ID: PAT_MRT3847_137890C.1.pep
MDDKGARGSNTLLSCEDEMDLRRGPWIVYEHRTLNNYIATHGEGRWHRLAVS

SEQ ID NO: 184801 - protein, 108 aa, Glycine max
  unsure (1)..(108): unsure at all Xaa locations
  Clone ID: PAT_MRT3847_137891C.1.pep
FHSYPPSKPTSTSSTTDNFHHPYPPQPHSTHNSQPNPSTKIHTTLMPTXSNSPSNPNTPTQPNTKTPYHPKPTTKPTTPHPSTYNPNHSHSKPKRTNPTLKPTPNPTS

SEQ ID NO: 184802 - protein, 128 aa, Glycine max
  Clone ID: PAT_MRT3847_137892C.1.pep
RDVVIGGGGYIVKDVKFTVHQAVEPVEKGITRFNEKLHRISENMKKHDKNGRRTKDDSCIASSSPARRVIRGIDDPLLNGSVSDSGMLRVKKHRRKSGYTSAESGGESSSDQGFGGYQIRGRRWVTKE

SEQ ID NO: 184803 - protein, 89 aa, Glycine max
  Clone ID: PAT_MRT3847_137893C.1.pep
NQNGMILISQYKPIPLQGSKFIWWYSRGRPMAKALDFTFENRLPVCPEHLHQMINPSSYANPLGNSPLIKSTILAGPYMLQLPMKTEFP

SEQ ID NO: 184804 - protein, 94 aa, Glycine max
  Clone ID: PAT_MRT3847_137894C.1.pep
PECTPFLTSGMINPEGKIKTLQKGCRKQLGGAGSNSHDNGEAKESMLKNPNPNNGGCEFPFCGEPSSFHMEIPFLNRQATALDTTCCRKFPFIV

SEQ ID NO: 184805 - protein, 105 aa, Glycine max
  unsure (1)..(105): unsure at all Xaa locations
  Clone ID: PAT_MRT3847_137895C.1.pep
NWRLEHKPAIDHKISDLSAPFHAMLKACSRESLSETIDLSENNXSTSSMMXIRIISSTWNLPDVHSNLXAETLAIANKXCSQRLNQARNRRLASLVSSRKDALEL

SEQ ID NO: 184806 - protein, 34 aa, Glycine max
  Clone ID: PAT_MRT3847_137896C.1.pep
DYVILLGIILYGQDSIHHIINFSKKKLFFILLNC

SEQ ID NO: 184807 - protein, 33 aa, Glycine max
  Clone ID: PAT_MRT3847_137897C.1.pep
LGCIRTVTVMNKYPTICKLMRKSSEMTTHHKVD

SEQ ID NO: 184808 - protein, 41 aa, Glycine max
  unsure (1)..(41): unsure at all Xaa locations
  Clone ID: PAT_MRT3847_137898C.1.pep
MGGYMGDDEXDYLLMLDLIGDSGVGKSNLLSRFTREEFHLG

SEQ ID NO: 184809 - protein, 167 aa, Glycine max
  Clone ID: PAT_MRT3847_137899C.1.pep
NLDPLAYTVALQGIRIGERKLNISPAVFRADAGGSGQTMLDSGSEFTFLVNEAYDKVRAEVVRAVGPRMKKGNVYGGVADMCFDGNAIEIGRLIGDMVFEFEKGVQVVVPKERVLATVEGGVHCIGIANSDKLGAASNIIGNFHQQNLWVEFDLVNRRMGFGTADCK

SEQ ID NO: 184810 - protein, 891 aa, Glycine max
  unsure (1)..(891): unsure at all Xaa locations
  Clone ID: PAT_MRT3847_13789C.1.pep
MNRYYVCVPLFVCLVLAIELVXAEDFQPTDKILLNCGGPPSSTDTDGREWTTDNGSKFGSSTAKSATSPAATQDPAVPQVPYMTARVFHAPYTYTFPVASGWKFLRLHFYSASYSSLNASDALFAVAANSYTVLRNFSVAQTTLALNYAYIMREFAIHVEGESLNVTFTPSTNASNAYAFVNGIEIVSMPEIYTSTDGTLMMVGSNSPFPIDNSTALECVYRLNVGGNDISPSHDTGMFRSWSDDMPFLYGAAFGVTEPADPDVKFEYPPGTPSYIAPLDVYSTARTMGPNPEINTNYNLSWIFNIDSGFSYLVRLHFAEVSSNITKSNQRVFDIFLNNQTAMPEADVIAWAGEFDLSHSNGVPVHKDYVVFVPNGEPRQDLWLALHPDETNKPMYYDAILNGVEIFKINDTAGNLAGTNPIPPPVQDIIDPSTARASHHGKSKNHTGIIAGVAGGVVLLLVIGLFAFAASRRRRQGKDSGTSEGPSGWLPLSLYGNSHSAASAKTNTTGSYASSLPSNLCRHFSFAEIKAATNNFDEALLLGVGGFGKVYKGEIDGGTTKVAIKRGNPLSEQGVHEFQTEIEMLSKLRHRHLVSLIGYCEENTEMILVYDCMAYGTLREHLYKTQKPPRPWKQRLEICIGAARGLHYLHTGAKHTIIHRDVKTTNILLDENWVAKVSDFGLSKTGPTLDNTHVSTVVKGSFGYLDPEYFRRQQLTDKSDVYSFGVVLFEVLCARPALNPTLAKEQVSLAEWAAHCYKKGILDSIIDPYLKGKIASECFKKFAETAMKCVADQGIDRPSMGDVLWNLEFALQLQESAEESGNGFGDIHCEVEPLYTDSKGKDSNPGYDGNATDSRSSGISMSIGGRSLASEDSDGLTPSAVFSQIMNPKGR

SEQ ID NO: 184811 - protein, 103 aa, Glycine max
  unsure (1)..(103): unsure at all Xaa locations
  Clone ID: PAT_MRT3847_1378C.1.pep
SDPAKNLAGVQPITXKGKGALRAQRDYTASSNTLIMVACTTQTLCAGREGLDPLPNKTATARLNLDGRDXKLXTGHPTVLTLAYTTPCGADRHIIGLGVGLXL

SEQ ID NO: 184812 - protein, 631 aa, Glycine max
  unsure (1)..(631): unsure at all Xaa locations
  Clone ID: PAT_MRT3847_137900C.1.pep
MGGGEEKRHQMMQNLFGDQSEEEEELDVDSEHESNPQQNYPSDEGEGVGEQEGEGEVEGQGEVEIESDGDGDGEPDRESEGEREQSSQEVEVVEREEESEGRDSDSDVKDGGYSQRGVTSKRRDDFVESGSEENQYAHHDDGEEEVDEARSPSGSPRDEKDETRDLHSAPEIRDVFGDFDDDEEEEMGYAIQQDIEQDSNRYAVEEEGSYGKNLRPEDILADEDHQYESEEENIEIKTKEKPLGPPLELEVPLRPPPALPEKMHMIKVSNIMGVDPKPFDPKTYVEEDTFVTDESGTRKRIRLENNIVRWRTTRNPDGTTSCESNARFVRWSDGSLQLLIGNEVLDISVQDAQHDQAHLFLRHGKGILQSQGRLLRKMRFMPSSLSSNSHRLLTALVDSRHKKAFKVKNCITDIDPEREKKKKKXVTRELXACTSLLDRKEAEMNRKYTPAVERRRQLSPGFLEDALDEEDEADYYDNRRSQHRFEDDLEAEARAEKRIMNAKKSQGPKDIPRKSSFPPAKSSRNPMGYPDDEREESEYETEEEDERPPSRKRDEDTEPEYEDEEEEEEHYEEAEQVNDASDEEEEEEPKQKNKEFRGSAKRKGFESDEDSPPRKTTTHRRMAVVYDSDED

SEQ ID NO: 184813 - protein, 361 aa, Glycine max
  unsure (1)..(361): unsure at all Xaa locations
  Clone ID: PAT_MRT3847_137901C.1.pep
MLWLMRFSGFFSAAMLVILLSPSLQSFHPAEAIRSSHHLDGLLRLPPPRLSFRPAPRFRNAADANKCASSSVSTSVCDPSLVHVAITLDVEYLRGSIAAVHSILQHSQCPENIFFHFLVSETNLESLVKSTFPQLNFKVYYFDPEIVRNLISTSVRQALEQPLNYARNYLADLLEPCVERIWYLDCDLVLVDNIAKYWSTSLGSRTIGAPEYCHANFTKYFTAGFWSDMRFASAFAGRRPCYFNTGVMVIDLVRWRKIGYSKRIERWMEIQKNDRIYELGSLPPFLLVFAGRVAPIEHRWNQHGLGGDNVKXSCRDLHAGPVSLLHWPGXGKPWTRLHSIKPXPCPLDALWAPYDLYGHAH

SEQ ID NO: 184814 - protein, 198 aa, Glycine max
  Clone ID: PAT_MRT3847_137902C.1.pep
GHSNHGWCVFAKYMEGGSVHDLMMKNKKLQTKDVVRIAVDVAEGIKFMNDHGVAYRDLNTRGILLDKHGNACLGDMGIVTACKSVGEAMEYETDGYRWLAPEIIAGDPENVTETWMSNVYSFGMVIWEMVTGEAAYSSFSPVQAAVGIAACGLRPEIPKDCQQTLKHIMTKCWNNTPSKRPHFSEILAILLRPNNNNR

SEQ ID NO: 184815 - protein, 51 aa, Glycine max
  Clone ID: PAT_MRT3847_137903C.1.pep
APSIIPHLNKLTRTYITPPKPTPVYSLKWVGSGIPIAQAFTNSHALFDCYC

SEQ ID NO: 184816 - protein, 33 aa, Glycine max
  Clone ID: PAT_MRT3847_137904C.1.pep
VWFILITRFDLLCQVRLGTTSSVISRSCDPTES

SEQ ID NO: 184817 - protein, 109 aa, Glycine max
  unsure (1)..(109): unsure at all Xaa locations
  Clone ID: PAT_MRT3847_137905C.1.pep
WEHYPRKSLPNYIRRYLYTLFLXIHPSIFHCLNINISXNMNNIHITGLFNDGXYKFWTKHEKNLVLTEEEKMEVNRNKXFPADVLAKRAHXFEKHVAHESLIDKIPVYD

SEQ ID NO: 184818 - protein, 70 aa, Glycine max
  Clone ID: PAT_MRT3847_137906C.1.pep
DNIVFVYEASLHYRPHYTVCLIFFLLFSSPYNRQRHKYKGHTTKYSSKILTRSIYTASRVSKSACQTPWP

SEQ ID NO: 184819 - protein, 74 aa, Glycine max
  Clone ID: PAT_MRT3847_137907C.1.pep
MDKTRYENAIKVCALDKDIEDFSHGDLTEIGQRGINMSGGQKQRIQLARAVYNDADIYLLDDPFSAVDAHTAAI

SEQ ID NO: 184820 - protein, 89 aa, Glycine max
  Clone ID: PAT_MRT3847_137908C.1.pep
NLLLVMLLHPALFGLFPIAWNSPLHMLLPVVVMPRVYCLVMSPTAFKPVRGPGRFTICFATCGGIRVYPYSGVATKKWVLVAPNRWSRC

SEQ ID NO: 184821 - protein, 66 aa, Glycine max
  Clone ID: PAT_MRT3847_137909C.1.pep
KSYKWTIRIFEDGGKKIDHRFIENLLKRESPNHVYIFLKEMIHGMEKAWIGLPYSTTNYLIAILVL

SEQ ID NO: 184822 - protein, 39 aa, Glycine max
  Clone ID: PAT_MRT3847_13790C.1.pep
ALGGNRDVAGSQNSLEIDGLARFAVEEHNKKQVFLSFFP

SEQ ID NO: 184823 - protein, 149 aa, Glycine max
  unsure (1)..(149): unsure at all Xaa locations
  Clone ID: PAT_MRT3847_137910C.1.pep
SCHNITITEGGDXSSAAVPLTTLADCDSLKRNFKPMSNVLWVAPEDKAXLWSQLHYVSCHNLETQEANLVNLVNVLRESYLHSPXEARQSRRKALXSRIEWLQKAGVPTIAQIEXFHSIHRMMNASDSNDNIDPLVSLDLWGLQGARKA

SEQ ID NO: 184824 - protein, 314 aa, Glycine max
  unsure (1)..(314): unsure at all Xaa locations
  Clone ID: PAT_MRT3847_137911C.1.pep
MRVFASRTSNLFKLNVEHFLLIHNPNFNSVREFSQSTAIPKXQLRVRDHGYDNYMEVEKKTRKVLKFQNLILSEPSQSLPISRLETLARRFGFTRHESGAFVLKFPHVFEIFEHPVQRILFCRLTRKAILQIEQERRALAAELPRAVTRLRKLLMMSNHGRFRLEHVRIARAAYGLPDDFENSVVLRYPQFFRLIDAKETRNKYIEVVERDPGLGTCAIEEARERVYRERGSDAEDIRFSFVIDFPPGFKIGKYFRIAMWKWQRLPYWSPYEDVSGYDLRSIEAXKRMEKRAVATIHELLSLTVEKKITLERIA

SEQ ID NO: 184825 - protein, 70 aa, Glycine max
  Clone ID: PAT_MRT3847_137912C.1.pep
HQLSLMISIKPRFISHIECVNVCNVGCSSPVWDCAICKKVCVQHGDLCSSVQGFTSPDDAYRRAQYTSFR

SEQ ID NO: 184826 - protein, 118 aa, Glycine max
  Clone ID: PAT_MRT3847_137913C.1.pep
SYPIDNVKVKFQVKEGIPPHQQRLIFGGNHYEYGRALGCLNIQKEPALPLVLCFRGGFYSRSHFLWDVQRWIFPHILSTNVMCERSELSLENKWCDFCLLYWPINVGTVCYHSCGVNI

SEQ ID NO: 184827 - protein, 157 aa, Glycine max
  unsure (1)..(157): unsure at all Xaa locations
  Clone ID: PAT_MRT3847_137914C.1.pep
TLLIYILPSFLTAGIKYQRHLRNIHISRXIYGCGCKCWAGHEKNHAHTEXEKMEVIXNIGIXADYLATRAHESEKHXVAHESLEXIKFADDMKPTTKVDRXAKIMNVRQSVDGDLKLXTDGKSCEGXHIHVPNIRAGENHVFQIPLMAHEEIMYYSA

SEQ ID NO: 184828 - protein, 64 aa, Glycine max
  Clone ID: PAT_MRT3847_137915C.1.pep
MASLKVARVVLMCMAVMSAPMMVQAVSCNDLSENLPPCLSYLMHGGNLPNICCFRVCNMLRLPA

SEQ ID NO: 184829 - protein, 55 aa, Glycine max
  Clone ID: PAT_MRT3847_137916C.1.pep
IIIVHNNVKRKSKKGLPIYRPKLYVHVLATVITLLKGDQITITWPSVNNVITVKT

SEQ ID NO: 184830 - protein, 41 aa, Glycine max
  unsure (1)..(41): unsure at all Xaa locations
  Clone ID: PAT_MRT3847_137917C.1.pep
VRKGSDLVNVHKVLGPRAKNIQLMXKVNNQKGVLNFNKILR

SEQ ID NO: 184831 - protein, 55 aa, Glycine max
  Clone ID: PAT_MRT3847_137918C.1.pep
PFHPRFQDMSNGRCLDQTDRPKCHLNGPKNFLPKWWVHFNKTGGIDPFGVLLPPD

SEQ ID NO: 184832 - protein, 68 aa, Glycine max
  Clone ID: PAT_MRT3847_137919C.1.pep
INKRFFIRVHVSQFLRRSTDEVSFHAYNCQTVLCKSERDRQIERARERDYRVRERFIDRGVKNIEIIE

SEQ ID NO: 184833 - protein, 49 aa, Glycine max
  Clone ID: PAT_MRT3847_13791C.1.pep
PPKGKFLGQSINPSFPLFEPELGPCLFPGKNFFPWFLPPFLPPYWPGFY

SEQ ID NO: 184834 - protein, 212 aa, Glycine max
  unsure (1)..(212): unsure at all Xaa locations
  Clone ID: PAT_MRT3847_137920C.1.pep
LTKFWRSLIVQNSSPDIYNPQAGSITTATSLDFPALWXLLNLSAQYGSLRKNAYVRATPTPLTADRIIYPLIGRALVPVVNCNGERMFDGEXLQEGGVLIVPQTFAVGLQNPRADNLEYXVSFKTXDRPFIGNLCRGKPHLLKPPLPRRESDSAHLLTXRAQQAKQVKNHNPFNFPWFPLKKSQKKSCGLKKPFCMCYHTFVLLGSTSAGSS

SEQ ID NO: 184835 - protein, 89 aa, Glycine max
  Clone ID: PAT_MRT3847_137921C.1.pep
KWDEVTLPERWVMDNETPSIPRPAPTIEHIKQDNSGKVEITFNRRNSFSSRIEASRSEYESARRSFSVRTRSIPVGLTRSALLSSSRSR

SEQ ID NO: 184836 - protein, 227 aa, Glycine max
  Clone ID: PAT_MRT3847_137922C.1.pep
AAATNAAFATTDFASLIGDPFRDLKIGEGFDAKGEFAFATNASSRVDENSVSEQINNLKIVTDNESNESDLRNELMKKLSIKEGGGSNAAVAENSAHEVIYQLKNLNVNDAIGSNVHKSAVDVKPSLENVTTFRNRETEAADLLRKLEMLNLVKEKEDCVEPNLCNPFVEGIHPRVASGGAQVAASASASASVFFQPAGVGKREEFVFTGKQDISSSSFVEFNTPQP

SEQ ID NO: 184837 - protein, 300 aa, Glycine max
  unsure (1)..(300): unsure at all Xaa locations
  Clone ID: PAT_MRT3847_137923C.1.pep
MCGRARCTLRADDVPRACHRSTSPTRTLHIDRYRPAYNVSPGFDVPVVRRDDASGGEGYVLQCMKWGLIPSFTKKTEKPDHYRMFNARSESIDEKASFRRLLPKSRCLVAVEGFYEWKKDGSKKQPYYIHFKDGRPLVFAALYDSWQNSEGETLYTFTIVTTSSSSALQWLHDRMPVILGSKESTDIWLSSSASGFKSVMKPYEESDSVWYPVPSVMGKASFDGPECIXEIQVKAQGSTAISMFFSKKAVESKDAKPEQRVSCLTVVNSVHTEILTESKVSQPEQKTSSRDFARVNPQKI

SEQ ID NO: 184838 - protein, 73 aa, Glycine max
  Clone ID: PAT_MRT3847_137924C.1.pep
KIDFFYWLRSDLSLKINLILFKPTYIHPYIFIHKFIISLIFIFIFYISIKLSYNLHLFLKIYLVKEIILPGAE

SEQ ID NO: 184839 - protein, 82 aa, Glycine max
  unsure (1)..(82): unsure at all Xaa locations
  Clone ID: PAT_MRT3847_137925C.1.pep
AALRXPVSKSSCRIMATRIIGLSFFLGFLCIALLFASGSAQIVCQQKGICPNTIACYNYCLGLGFQGYGRCDDNGLCCCKKG

SEQ ID NO: 184840 - protein, 46 aa, Glycine max
  Clone ID: PAT_MRT3847_137926C.1.pep
FAKPKTLFYYLLSICYFAFEENCPLKLKENLEIRIGGTRKLNHKGI

SEQ ID NO: 184841 - protein, 67 aa, Glycine max
  Clone ID: PAT_MRT3847_137927C.1.pep
PSNVSATAALPLLRSVHFTNLLSTAFFCVFYFGYLILSFLYCSYIPPPSLVMSPPPPQRRRTSYSDD

SEQ ID NO: 184842 - protein, 338 aa, Glycine max
  Clone ID: PAT_MRT3847_137928C.1.pep
MPAPGQGSSMIGGGWQLAWKWSERESPDGKKEGGFQRIYLHQEGGSGSRRGSVISLPGGDFDGEIVQAAALVSRSALYNKELMRQRPVGPAMIHPSETIAKGPSWSDLFEPGVKHALIVGVGMQILQQFSGINGVLYYTPQILEQAGVGYLLSNLGLGSTSASFLISSVTTLLMLPCIAVAMRLMDISGRRTLLLTTIPVLIVALLILVLGSLVDLGTTANASISTIRVIVYFCFFVMGFGPIPNILCAEIFPPRVRGLCIAICALTFWICDIIVTYTLPVMLNSVGLAGVFGIYAVVCFIAWVFVFLKVPETKGMPLEVIIEFFSVGAKQFDDAKHN

SEQ ID NO: 184843 - protein, 55 aa, Glycine max
  Clone ID: PAT_MRT3847_137929C.1.pep
CHITYQYPIVARMHCDLRNYMKRTEILLRYNIVLLEMDWSTQRMMSRLQKIGTIP

SEQ ID NO: 184844 - protein, 225 aa, Glycine max
  Clone ID: PAT_MRT3847_13792C.1.pep
MVQNGEGKCKRKTLSGIEEKTIIQDEIACQKEHDPFNKESVQLGAVPEVAFVPVIDKQVNASWEKAVQNNQLAASKDCFPSDASNTFNGFRIPFTGGIITILMGVITMLRMTRNMPRKVTEATALYANPLYCDGNMMKAPAISMNDQMALMKRMAELEEKVNVLSMKPTMPPEMEELLNNALNRVNTLEQELDSTKKSLDDALARQVELQAPLDKKKKKKKFFRW

SEQ ID NO: 184845 - protein, 126 aa, Glycine max
  Clone ID: PAT_MRT3847_137930C.1.pep
VSMDSVLVHVISCPNASATTGGNLWRSKHSTEKIYSTSSCASKALQNKRKIQMEYNLLRFQQPTLNHHYKSTERGHVYQESNIKYVVKAVSKPSFDYEPPTSNSKNMLESIKNFLAAFYWFCYPYT

SEQ ID NO: 184846 - protein, 281 aa, Glycine max
  unsure (1)..(281): unsure at all Xaa locations
  Clone ID: PAT_MRT3847_137931C.1.pep
MSESKDENPDLPPKSKPQEEHGFAMDFDISLESLWPSDHISLVSNPMSPFLFSTSSEQPFSPVWAFSDAEDERQIRIAASAGNTNTTTENPIENDDNXKTVPPLVAMTASENPDGYCLIKERMTQALRHFKELTEQNVLAQVWAPVRNGNRYALTTSGQPFVLDPHSNGLHQYRTASLMYMFSVDGENDEILGLPGRVFQHKIPEWTPNVQFYSSKEYQRLNHAQHYNVRGTLALPVFELARQSCVAVVELIMTSQKINYASEVDKICKAFEAVKLRSSEI

SEQ ID NO: 184847 - protein, 110 aa, Glycine max
  unsure (1)..(110): unsure at all Xaa locations
  Clone ID: PAT_MRT3847_137932C.1.pep
VLDFFDATIFVAWEFHAYDMFPLRMNTGYCARTPDVKCAHWKLAVEAHNIFGFETIPEECVETTKEYIHGEQYRSNSSTVNQQAYFXYARDLEXHPQETFVFSIDGTVLS

SEQ ID NO: 184848 - protein, 39 aa, Glycine max
  Clone ID: PAT_MRT3847_137933C.1.pep
PQSLWLRSSTTPQINVHNALIETFNHLESSFSHTKPYYK

SEQ ID NO: 184849 - protein, 80 aa, Glycine max
  Clone ID: PAT_MRT3847_137934C.1.pep
TAITGCRTLKPETKAIVTCSQESVNFLLLVCVRFLKGQKITLCAGHRLGESLSFPLLAYVLNTLLFDIGLRVRFKLLLSV

SEQ ID NO: 184850 - protein, 286 aa, Glycine max
  Clone ID: PAT_MRT3847_137935C.1.pep
MAKDVEVQEQGGEYSAKDYHDPPPAPLFDPEELTQWSFYRALIAEFIATLLFLYVTVLTIIGYKRQTDTTVGGTDCDGVGILGIAWAFGGMIFILVYCTAGISGGHINPAVTFGLFLGRKVSLIRALLYMVAQCAGAICGTGLAKGFQKAYYNRYGGGANSVADGYNNGTALGAEIIGTFVLVYTVFSATDPKRNARDSHVPVLAPLPIGFAVFMVHLATIPITGTGINPARSFGAAVIYNEDKIWDDQWIFWVGPIVGAAVAAFYHQYILRAAAIKALGSFRSNA

SEQ ID NO: 184851 - protein, 230 aa, Glycine max
  Clone ID: PAT_MRT3847_137936C.1.pep
DSDPSSEKRSLDFYGPRDETFSDVKQSQFTMSTISSGLSAILESLDAILTDQNLGFRSFEDIDTIYKEGFKLPPLKGNGLNFLQRTVPRLIEAANDSQNLLRFDTPETLKRDKFFWFSDEEFARETLAGVNPYSIQLVKEWPLRSKLESQIYGPPESAITREVIEPHILGYGTIEEAIKEKKLYMLDYHDLLLPYVSKVREIGGTTLYGSRTLFFLTKQGTLKPLAIELT

SEQ ID NO: 184852 - protein, 32 aa, Glycine max
  Clone ID: PAT_MRT3847_137937C.1.pep
MIIYSLNQSNRTPIRSQLSVVGIHDFMLWDEQ

SEQ ID NO: 184853 - protein, 60 aa, Glycine max
  Clone ID: PAT_MRT3847_137938C.1.pep
YVEKKVRCANGVWDLTLYMLHTLFLLKMASSVLCDCKYYKQIIPMCQKNLQKNKKNMMHI

SEQ ID NO: 184854 - protein, 53 aa, Glycine max
  unsure (1)..(53): unsure at all Xaa locations
  Clone ID: PAT_MRT3847_137939C.1.pep
NSRGKGIDKLDNQVISVSNPPIHIVREYILSDFSTSGGNXSLGKLLINFLKSI

SEQ ID NO: 184855 - protein, 158 aa, Glycine max
  Clone ID: PAT_MRT3847_13793C.1.pep
NSEWSLHIYGNHHKGDTFTVSYLINSCGVSPKLAKELSNRVNLKNAHGPNAVLDLLNNYGLSKIQVAKLVEKYPKVLIIKAEKTLLPKLKFFRSIGVSNTDMPKILLRNYVILKSSLENYLIPRYEILRDIVGDDQKGVRILKITAFCLTYGDMMNNF

SEQ ID NO: 184856 - protein, 68 aa, Glycine max
  Clone ID: PAT_MRT3847_137940C.1.pep
QVAFRSAVDQACSAAVGSGEAFFVGIADKSAGNCINGSVSSRRNTGLGNTCQVLGSMGRKEFIGVFQS

SEQ ID NO: 184857 - protein, 78 aa, Glycine max
  Clone ID: PAT_MRT3847_137941C.1.pep
VAKGQPSYLGRQARNKYGITRVRIPLILSQPPPIRCPCSLGSVSPTGYFTRAAIARPTVKTRWLSWLCGGGYSSIGLN

SEQ ID NO: 184858 - protein, 215 aa, Glycine max
  Clone ID: PAT_MRT3847_137942C.1.pep
GGIPGSTHASAQTSQCNTENSECNETLHTSPNDPPLPISDPPENISQTSRCNTENSECNETSDTRPSDLPLPISDPPKNIPPTSGSKNDEAGNTVNLPKDKKQNKLQWFWPFGRNNAEVISEKAGGAAEAANRDSTQNNTPQPASSVANEPCSSVSCSGESVDKNVMGTLKNIGQSMLDHIQVIESVFQQDRKGQVTAMTALKELRKISNLLSEM

SEQ ID NO: 184859 - protein, 43 aa, Glycine max
  Clone ID: PAT_MRT3847_137943C.1.pep
SGHVLPLSKFKCFGLVMGALSSWLLLFFCFKCLVIGRLRKKLG

SEQ ID NO: 184860 - protein, 81 aa, Glycine max
  unsure (1)..(81): unsure at all Xaa locations
  Clone ID: PAT_MRT3847_137944C.1.pep
QSACSPTKVGIGTMHTPIFANASLWHVIHCKACTPDVKAFVAGKNALLAVPAAXVAVATLVYGRQWKALLGASAAMWSGGV

SEQ ID NO: 184861 - protein, 80 aa, Glycine max
  unsure (1)..(80): unsure at all Xaa locations
  Clone ID: PAT_MRT3847_137945C.1.pep
KPPVETPPETGPPGEKPPXAQPPERKPPVSNPPEENPPVYKPPGEKPPIXKPPVKKPPVPKPPYGRPPNPRDPPSDAPPF

SEQ ID NO: 184862 - protein, 106 aa, Glycine max
  Clone ID: PAT_MRT3847_137946C.1.pep
WSTKCGLCSNESLITSREEVCILAVPQLSRSMTCLHSGHTDAFIGYTAHILRLLLHPQRLGIMQESCCKHYVYMVLRFVFWVRCRCIPIGSEIDETSAPFESGSLG

SEQ ID NO: 184863 - protein, 51 aa, Glycine max
  Clone ID: PAT_MRT3847_137947C.1.pep
PKCNGYCSLAPMIHYNITFPLTLYSCPFNSTMQIRTTNPFTITVSLSYFKL

SEQ ID NO: 184864 - protein, 104 aa, Glycine max
  Clone ID: PAT_MRT3847_137948C.1.pep
PTLVFSFLTNNLKTLPNPLPNNGDGGAMFFSLTSNPLPNPNLPPKSINPNPTLLCIPRFLRPSRPMTNNAMFFSNPLPNPNLTPIPSCYVLSLRTLYLSALMDN

SEQ ID NO: 184865 - protein, 96 aa, Glycine max
  Clone ID: PAT_MRT3847_137949C.1.pep
KLCLRGNNFETLPSLKELSKLLHLNLQHCKRLKYLPELPSRTDVPSPSSNKLRWTSVENEEIVLGLNIFNCPELVERDCCTSMCLSWMMQMVQAFT

SEQ ID NO: 184866 - protein, 121 aa, Glycine max
  Clone ID: PAT_MRT3847_13794C.1.pep
WLEKNPTKNFLLRDQALINLPLGILKTPSNFLRVNTLLVPPTGNKGIPSRKSHGQKCQQNAVGPLRTYRVLWLAIWRIISKKQRPQKHVKGWFNAWGDQGPKGPLGFFVGQPLLGGDPKLP

SEQ ID NO: 184867 - protein, 141 aa, Glycine max
  unsure (1)..(141): unsure at all Xaa locations
  Clone ID: PAT_MRT3847_137950C.1.pep
TNMPYYQKHGYGVDEFNETLYDEWVNMGDAPXLPETLTNHNMLSLLGCYIVFLTGRSLDXIAETQANLKKAGFHTWXHAILNDTHLITPDALSYTSSLKENLTMQRYIIVEILGDHWSYLLAYHXSEIKTFKLSNPMYYIE

SEQ ID NO: 184868 - protein, 31 aa, Glycine max
  Clone ID: PAT_MRT3847_137951C.1.pep
GTSFVSAGINVIVITQYLIGVFGYRATSHER

SEQ ID NO: 184869 - protein, 65 aa, Glycine max
  Clone ID: PAT_MRT3847_137952C.1.pep
QPIYELIWACRKECCNGKFSHRSAHLGAWAQVFGALIQNAPPAFKVETSTFGCFFNCSSANDPYQ

SEQ ID NO: 184870 - protein, 72 aa, Glycine max
  Clone ID: PAT_MRT3847_137953C.1.pep
KKSRLRVSLGIFPPPIFLLGAKKRLYNLLCYQAKTGLVESIIGKLLAPWAFFQNNMFQGVYPQKYPLFGDAF

SEQ ID NO: 184871 - protein, 129 aa, Glycine max
  Clone ID: PAT_MRT3847_137954C.1.pep
TWMNASRMSPAYEEGIEEFLSFASERSRLDKDGKYFCPCINCLNARRQVLDDIWEHLLCEGIKKNYTTWIRHGELIDMNMGSKTKPIDVEMGDRLEDMICDLGQDSFEQEHLMCDTLESDSKEPLYQEC

SEQ ID NO: 184872 - protein, 207 aa, Glycine max
  unsure (1)..(207): unsure at all Xaa locations
  Clone ID: PAT_MRT3847_137955C.1.pep
IDNVYSKIQDKEGIPXIQQRLISAGKQLEDGRTLSDYNIQKESTLHLVLRLRGGMQIFVKTLTGKTITLEVESSDTIDNVKSKIQDKEGIPPDQQRLIFAGKQLEDGRTLSDYNIQKESTLHLVLRLRGGMQIFVKTLTGKTITLEVESCDTIDNVKSKIQDKEGIPPDQQRLIFAGKQLEDGRTLSDYNIQKESTLHLVLRLRGGQ

SEQ ID NO: 184873 - protein, 106 aa, Glycine max
  unsure (1)..(106): unsure at all Xaa locations
  Clone ID: PAT_MRT3847_137956C.1.pep
MVSDRASYAAHVRHQGXMEPVRPHIYIGFGNWEYSPVDLENPCXNNEGSVHLWQGDEDMMVPVALRRYIPHDLPWVNCHELLSSGHILADADGVRDTISKSLLRAK

SEQ ID NO: 184874 - protein, 80 aa, Glycine max
  unsure (1)..(80): unsure at all Xaa locations
  Clone ID: PAT_MRT3847_137957C.1.pep
NGVVVVAPQRSSHNPELTITAAATHSRGLHVYTLPDLDYDYXALEPAXSXDIMQLHHQKHHQTYITXYNKALEQSKTPSP

SEQ ID NO: 184875 - protein, 54 aa, Glycine max
  unsure (1)..(54): unsure at all Xaa locations
  Clone ID: PAT_MRT3847_137958C.1.pep
KKPCPKSLFVEKKNWGPSEAFFYHAQRXMQRRLLGPPEEGNARQSLYSFQRPSQ

SEQ ID NO: 184876 - protein, 58 aa, Glycine max
  Clone ID: PAT_MRT3847_137959C.1.pep
FQREAGLPSSIIANNKYGIFPTLSGDRETCFPVTVCGALVRVGLVVVPCFLHESLSLC

SEQ ID NO: 184877 - protein, 247 aa, Glycine max
  unsure (1)..(247): unsure at all Xaa locations
  Clone ID: PAT_MRT3847_13795C.1.pep
MGSIDDDTPLLEEGLLQDDEGSEQFTGDGSVNFRREPALKKGTGNWRACPFILGNECCERLAFFGITTNLVTYLTTKFHEGNVSAARNISIWQGTCYLTPIIGAVLADGYWGRYWTIAVFSVFXGMCTLTLSVFTLKPAECLGSVCPSATPAQYAVFYFGLYVIALGIGGIKSCVPSFGAGQFDDTDPKERVKKGSFFNWYYFSINLGAIVSSSIVVWIQDYAGWGLRFGIPTLFMVLXVISFFIGT

SEQ ID NO: 184878 - protein, 76 aa, Glycine max
  Clone ID: PAT_MRT3847_137960C.1.pep
NFDKVFPQSPAFRPVSFLCFFGNPHCKVTLKEGAPSQPFAPVQGLEPLCSGWAPSLLHTSLASLGPRSFLPFLKAQ

SEQ ID NO: 184879 - protein, 130 aa, Glycine max
  unsure (1)..(130): unsure at all Xaa locations
  Clone ID: PAT_MRT3847_137961C.1.pep
RCARAGSARVGRCSILGHCSCAMADGVQSSGLADVLSRALDFLEDAPYLAIVPAVSLICSIITEFITSNDATATLLVPLLFXVAEFAMCHIEIKDMLKVGVPLKVVGIVVLSLLMPSLGTIVFGTNNDTQ

SEQ ID NO: 184880 - protein, 70 aa, Glycine max
  Clone ID: PAT_MRT3847_137962C.1.pep
LLDSPLFKRPSGIYREYRAFGGAKRRPFSAQFTKRGGLFWCVLSKRPIKAFVKHWSLKKHFLKTTVSTGG

SEQ ID NO: 184881 - protein, 163 aa, Glycine max
  Clone ID: PAT_MRT3847_137963C.1.pep
MSWNDCKKLPWNLILLLGAGFAIADGVQSSGLADVLSRALDFLEDAPYLAIVPAVSLICSIITEFITSNDATATLLVPLLYHIARTMHVHPLLLMVPGGIATEFAFWLPTSTPSNVVGFATGHIEIKDMLKVGVPLKVAGIVVLSLLMPSLGTIVFGAGTGTQ

SEQ ID NO: 184882 - protein, 57 aa, Glycine max
  Clone ID: PAT_MRT3847_137964C.1.pep
PTRPAILSPEQFRILRQKGTEFPGTGEYDKFYEEGVYNCAGCGTPLYRSITKFNSYS

SEQ ID NO: 184883 - protein, 70 aa, Glycine max
  Clone ID: PAT_MRT3847_137965C.1.pep
KPQLLDDEEREPRREEVQNQVQQGGGGRRMSGWGKISAPIVATPCEAHNIRYRREGEGVFFQKRWDGGRV

SEQ ID NO: 184884 - protein, 202 aa, Glycine max
  Clone ID: PAT_MRT3847_137966C.1.pep
MGLSILRSTSISTPISSSKSKPIFSTLVRSSFASISPTKCVTPTTLFVSATPFFTASPKRGFRGGIVAMAAAGSLRKSEEEWRAVLSPEQFRILRQKGTEFPGTGEYDKFFDEGVYNCAGCGTPLYRSLTKFNSGCGWPAFYEGIPGAINRNPDPDGMRTEITCAACGGHLGHVFKGEGFPTPTNERHCVNSISLKFAPANS

SEQ ID NO: 184885 - protein, 55 aa, Glycine max
  Clone ID: PAT_MRT3847_137967C.1.pep
ILGRLLVKQILSLFLHSLSTLSPFPLYSLPDDIGLSFKYLYFNILFLIIIKNNFM

SEQ ID NO: 184886 - protein, 76 aa, Glycine max
  unsure (1)..(76): unsure at all Xaa locations
  Clone ID: PAT_MRT3847_137968C.1.pep
LVYSQSYFIKNCFKAXAFKFNRKGXLLTQNXHQNLKKQIRITLCNYHVKKFYQDSRYSYNFYITFYQQTLLLYLLI

SEQ ID NO: 184887 - protein, 202 aa, Glycine max
  Clone ID: PAT_MRT3847_137969C.1.pep
MGFNILRTTSISTPISSSKSKPIFSTLLRSSPSTIFPPKSVTPTTLFVSATPFFTLHPKLGFRGGIVAMAAPGSLRKSEEEWRAILSPEQFRILRQKGTEFPGTGEYDKFYDEGVYNCAGCGTPLYRSLTKFNSGCGWPAFYEGIPGAINRNPDPDGMRTEITCAACGGHLGPVFKGEGFPTPPNERHCVNSISLKFAPAHF

SEQ ID NO: 184888 - protein, 206 aa, Glycine max
  Clone ID: PAT_MRT3847_13796C.1.pep
MPSRRRTLLKVIILGDSGVGKTSLMNQYVNKKFSNQYKATIGADFLTKEVQFEDRLFTLQIWDTAGQERFQSLGVAFYRGADCCVLVYDVNSMKSFDNLNNWREEFLIQASPSDPENFPFVVIGNKIDIDGGNSRVVSEKKARAWCASKGNIPYFETSAKEGINVEEAFQCIAKNALKSGEEEELYLPDTIDVGNSSQPRATGCEC

SEQ ID NO: 184889 - protein, 57 aa, Glycine max
  unsure (1)..(57): unsure at all Xaa locations
  Clone ID: PAT_MRT3847_137970C.1.pep
NINTIDKSVVHIGLIQXITSLLFEVIRNTVAYFPKTWDEMHTNFSRSQLVTGPVSGL

SEQ ID NO: 184890 - protein, 74 aa, Glycine max
  unsure (1)..(74): unsure at all Xaa locations
  Clone ID: PAT_MRT3847_137971C.1.pep
KSQGPSIGIDLGTTYSFVCVWQHDRFXIIANDQGNKTTPSYFAFTDTKRLICDAAKNQVAINPTNTVFDAKRFI

SEQ ID NO: 184891 - protein, 131 aa, Glycine max
  Clone ID: PAT_MRT3847_137972C.1.pep
HSSRRTRGMNLSTAQENGPTFNTIQLILFLSLNKKITGRGIYWKGRHETKCNWLRPIRRNTSDALLLTLLGKGGYVRRPILNQLNLTLSSASNTRIFIPVKNNLSTLYRTCLVRLIEPPKKAGKGHHLSIP

SEQ ID NO: 184892 - protein, 57 aa, Glycine max
  Clone ID: PAT_MRT3847_137973C.1.pep
WRLSKAHGRRFSCDQGPRKQVECTLASNRVNIFMTGVTTHRVCSAGIGSKSFSTGSS

SEQ ID NO: 184893 - protein, 57 aa, Glycine max
  unsure (1)..(57): unsure at all Xaa locations
  Clone ID: PAT_MRT3847_137974C.1.pep
TALRLSERNRVKERREIGKSTHEVLYQIXSGSTNPNFHQLELELEQRTEKETEKVSI

SEQ ID NO: 184894 - protein, 51 aa, Glycine max
  Clone ID: PAT_MRT3847_137975C.1.pep
FMQMISVHLHNFYQKRLSAIIMQKDVTEHRLYKDTYNFMRWPQRNKIFEGL

SEQ ID NO: 184895 - protein, 279 aa, Glycine max
  unsure (1)..(279): unsure at all Xaa locations
  Clone ID: PAT_MRT3847_137976C.1.pep
LEPLNSMAAAETGILAGLLPALTKQISESVVEVTGEVENALHQRLESTGSKKKQAKQLNAVAKSSGKYMSKVHRAFEKNFEKFELYVRRNIVLVPDALADEVAQIRAEKQKKDGEHERRITQQEEKDIALLSKEEREEREVNAQLEALRLKLRELTTANQRLELEQKALHERTQHLRGLVTQVAFLDDVPERTISPLKRTAEDISGLHEAFLQRDGIQAALEEGSRQSKXXKEATRGSFRNLRKRFAARTAEMTYRTPEDLEELHSKLLTRYPQTQASQ

SEQ ID NO: 184896 - protein, 156 aa, Glycine max
  Clone ID: PAT_MRT3847_137977C.1.pep
KATNLEFLEISSCSQLLSMNPSILSLKKLERLSSHHCSLNTLISDNHLTSLKYLNLRGCKALSQFSVTSENMIALDLSFTSVSAFPSTFGRQSNLKILSLVFTNIESLPSSFRNLTRLRYLSVESSRKLHTLSLTELAASLEVLDATDCKSLKTVY

SEQ ID NO: 184897 - protein, 244 aa, Glycine max
  unsure (1)..(244): unsure at all Xaa locations
  Clone ID: PAT_MRT3847_137978C.1.pep
PPTLFQPFFRDSAPPPPFVRAPFFFSTPPPPPPGVPPEIPAXPGGRPTFPNRDPYKTGAQPGPKRAPGENGYPPPIPPNIRPGSKKGNPGGPQGGPSPPLMGGRPRPPSQGETLAPPLHKGTPPPPGRGGSPMGPPGGFPFPQGAGPPLMAPPRPPPKEYPQAAPLGRPPGKNPVEGGPRGKKPGPSPGIAPPPPPEKPPPPPPQPGTLGKGGPPIGPPPPPNRGPRGGHPPPILKGGENTNPP

SEQ ID NO: 184898 - protein, 84 aa, Glycine max
  Clone ID: PAT_MRT3847_137979C.1.pep
NGIFKYYYILYNILWGALFKCLNFLFSCMEFLYFSFYWSPLILLLLSWAFYNIILIWVKFYAFSPHLYFLVRIISSFCQIVLIF

SEQ ID NO: 184899 - protein, 184 aa, Glycine max
  Clone ID: PAT_MRT3847_13797C.1.pep
HTQFRYVNKKFSNQYKATIGADFLTKEVQFEDRLFTLQIWDTAGQERFQSLGVAFYRGADWWVLVYDVNSMKSFDNLNNWREEFLIQASPSDPENFPFVVIGNKIDIDGGNSRVVSEKKARAWCASKGNIPYFETSAKEGLNVEEAFQCIAKNALKSGEEEELYLPDTIDVGNSSQPRATGCEC

SEQ ID NO: 184900 - protein, 42 aa, Glycine max
  Clone ID: PAT_MRT3847_137980C.1.pep
LERVDLTPQLVVKINPLMTLPEKCLSSTKSLAYRKVRKIKCM

SEQ ID NO: 184901 - protein, 31 aa, Glycine max
  Clone ID: PAT_MRT3847_137981C.1.pep
RFSNVHSHVRKIKVANTIVLLYVVPQLTVTR

SEQ ID NO: 184902 - protein, 41 aa, Glycine max
  Clone ID: PAT_MRT3847_137982C.1.pep
VPGSPNPNRSVGAIASYCSTLPEHFVSALLAHQTKSKYETT

SEQ ID NO: 184903 - protein, 84 aa, Glycine max
  Clone ID: PAT_MRT3847_137983C.1.pep
WCSVNQEFTVLLGMDSINSWPWIVTPLEGICKLARLLWVLERRINRNLPLHFCSTLERLLRRVTTVTGNLLNYRSQCSSTCTIH

SEQ ID NO: 184904 - protein, 58 aa, Glycine max
  Clone ID: PAT_MRT3847_137984C.1.pep
KFAKIFQGSPITFNLHNNYLQFFNKRVPCESNRGNPQLIASPSEIQYLGRARIPSIRT

SEQ ID NO: 184905 - protein, 85 aa, Glycine max
  Clone ID: PAT_MRT3847_137985C.1.pep
KGFFFPLLGVPSKGFFFPPPHPQNLSESVSMLPITLHPFGFCPPRKILSRGGHNFFSPGPGTFNLSHQKGSPHPPPLNPPPKPPP

SEQ ID NO: 184906 - protein, 46 aa, Glycine max
  Clone ID: PAT_MRT3847_137986C.1.pep
LDEESNLKKLSHMYDGIASTRRRCCTRTYCTTMLCFKVIGINWRCC

SEQ ID NO: 184907 - protein, 71 aa, Glycine max
  Clone ID: PAT_MRT3847_137987C.1.pep
IRAWHMASCFPHWCSSIIRSCMAVYTASVGRSILSPHENAADSIYLCPVSSPVEASLSRINVCPVVPSIRL

SEQ ID NO: 184908 - protein, 147 aa, Glycine max
  Clone ID: PAT_MRT3847_137988C.1.pep
THLKKRLPQQAKQKQQQKLSSLDTLNSKQQPVNLPTEEKKPLSPPQCVSSSMSTLTTSSDTTTNEHNSNHHHVPMMNNSTTAPESLDDDFWSQVLSADNNNSDATTSFPATGAAADGKFQGVHPSSVYNNVDYWFDVYMGAQEFPKF

SEQ ID NO: 184909 - protein, 250 aa, Glycine max
  Clone ID: PAT_MRT3847_137989C.1.pep
MALAPSKVSTFSGFSPKPSVGGAQKNPTCSVSLSFLNEKLGSRNLRVCASTVPLTGVIFEPFEEVKKSELAVPTAPQVSLARQNYADECESAINEQINVEYNASYVYHSLFAYFDRDNVALKGFAKFFKESSEEEREHAEKLMKYQNTRGGRVVLHPIKNVPSEFEHVEKGDALYAMELALSLEKLVNEKLLNVHSVADRNNDPQMADFIESEFLSEQVESIKKISEYVAQLRRVGKGHGVWHFDQRLLD

SEQ ID NO: 184910 - protein, 40 aa, Glycine max
  Clone ID: PAT_MRT3847_13798C.1.pep
SKWRSWVQSLDVGGVRSRWSTHERRMCLSLGVPDINMDRF

SEQ ID NO: 184911 - protein, 388 aa, Glycine max
  unsure (1)..(388): unsure at all Xaa locations
  Clone ID: PAT_MRT3847_137990C.1.pep
VSSQVPLSVRNSVITVFATVQSLNLGLERSGLGAETYVPEAMHSIRPQPSXAAARAEAEQVMFGALDKLFQSTNIKPKDIGILIVNCSLFNPTPSLSSMIVNKYKLRGNIRSFNLGGMGCSAGVIAVDLAKDLLQVHRNTYAVVVSTENITQNWYFGNKKSMLIPNCLFRVGCSALLLSNKPADRRRAKYRLVHVVRTHRGADDKAFRCVYQEQDDAGKTGVSLSKDLMAIAGGALKTNITTLGPLVLPISEQLLFFVTLLMNKLFKAGVKPYIPDFKLAFDHFCIHAGGRAVIDELEKNLQLLPEHVEASRMTLHRFGNTSSSSIWYELAYIEAKGRIKKGNRIWQIAFGSGFKCNSAVWQALRNVRPSPNGPWEDCIHKYPVEIVT

SEQ ID NO: 184912 - protein, 272 aa, Glycine max
  unsure (1)..(272): unsure at all Xaa locations
  Clone ID: PAT_MRT3847_137991C.1.pep
MTVTSGEEEGAVGGVQIQHRSRMVLPDFLQSVNLKYVKLGYHYLISNLVTLFLVPLILVTLIQVFQTTDIDHLRHLWLHLQYNLLTILTCSAVLVFGLTLYAVTRPRAVYLLDSACFRPADHLKAPLRSFMDHSRLTGDFEESSLEFQRKILERSGLGEETYVPDAMHSIPPQPSMAAARAEAEQVMFGALDNLFQSTNIKPKDIGILIVNCSLFNPTPSLSSMIVNKYKLRGNIRSFNLGGMGCSAGVIAVDLAKXTXQVHRNTYAGVGST

SEQ ID NO: 184913 - protein, 453 aa, Glycine max
  Clone ID: PAT_MRT3847_137992C.1.pep
MRPQYPGYGQSQQSLKDGQYLPNLNTAQRSVVGSHLSSNAIRKAKKKLFLPTVRDLLLLMVFENFCIEGNVKEAVEVLELLEKLDIPVDLPRYLQLMHQCGENKSLEEAKNVHRHALQHLSPLQVSTYNRILEMYLECGSVDDALNIFNNMPERNLTTWDTMITQLAKNGFAEDSIDLFTQFKNLGLKPDGQMFIGVLFACGMLGDIDEGMQHFESMNKDYGIVPSMTHFVSVVDMIGSIGHLDEAFEFIEKMPMKPSADIWETLMNLCRVHGNTGLGDCCAELVEQLDSSCLNEQSKAGLVPVKASDLTKKKEKRTLTNKNLLEVRSRVREYRAGDTFHPESDKIYALLRGLKSQMKEAGYVPETKFVLHDIDQEGKEEALLAHSERLAIAYGLLNSPARAPMRVIKNLRVCGDCHTALKIISKLVGRELIIRDAKRFHHFNDGLCSCRDYW

SEQ ID NO: 184914 - protein, 114 aa, Glycine max
  unsure (1)..(114): unsure at all Xaa locations
  Clone ID: PAT_MRT3847_137993C.1.pep
HPENDKIYALLRXLXSQMKEAGYVPETKFVLHDIDQEGKEEALLAHSERLAVAYGLLNSPARAPMRVIKNLRVCGDCHTALKIISKLVGRELIIRDAKRFHHFKDGLCSCRDYW

SEQ ID NO: 184915 - protein, 76 aa, Glycine max
  unsure (1)..(76): unsure at all Xaa locations
  Clone ID: PAT_MRT3847_137994C.1.pep
RPNPSANFSFAAAKAINGLKDQSQVLTSPYPTYVGVNNGNGGPKLLEXVKQRLFPYMHTFATEQRRLSVDVIKKAF

SEQ ID NO: 184916 - protein, 75 aa, Glycine max
  Clone ID: PAT_MRT3847_137995C.1.pep
PQLNLKVSGALGCVQVPKQEKGWEAVTGGLARNPAQKKTKRVCFPRVSRFLNFGDPTGILTFIGGVLFGATHFLS

SEQ ID NO: 184917 - protein, 624 aa, Glycine max
  unsure (1)..(624): unsure at all Xaa locations
  Clone ID: PAT_MRT3847_137996C.1.pep
MMSSKRASSITVSSLLKLCKGCCSPKGLSTLSAVSTAAERTDLQFSGGYQNDDSSGYQQNRVGFYQESQNKVDSNELLNKQRPDYVSQANAEQNSYGAGQIADGGHINMTQNVHNNLVGYNGSVNGYFGQGNMRMQQKVRAGVGSAWGSGMHANPLVEKHGWTHEPGQKMQSPNAYGSPRPLESQGNLRGDLNQNIDHFQQPENVHYKGSHEMRQQYPGSGQFQQSLKDGRYLPNLNIAQRSGVGSHLSNNANHDGESDKASNDSPYRATLEELDNFCIEGNVKEASNGLELLEKLHIPVDCXRYLQIMHQCGENKSLEEAKNVHRHALQHLSPLQVSTYNRILEMYLECGSVDDALNIFNNMPERNLTTWDTMITQLAKNGFAEDSIDLFTQFKNLGLKPDGQMFIGVLFACGMLGDIDEGMQHFESMNKDYGIVPSMTHFVSVVDMIGSIGHLDEAFEFIEKMPMKPRDTFHPESDKIYALLRGLKSQMKEAGYVPETKFVLHDIDQEGKEEALLAHSERLAIAYGLLNSPARAPMRVIKNLRVCGDCHTALKIISKLVGRELIIRDAKSKIKVSLTTILLCRYGLNRMAVGKLEFCLTRLFHTNKSSSGTCIQVAEALFIE

SEQ ID NO: 184918 - protein, 81 aa, Glycine max
  unsure (1)..(81): unsure at all Xaa locations
  Clone ID: PAT_MRT3847_137997C.1.pep
MGYDIVNINLAVIVHIYSGKSTATGHQIYKLTGIDKXRVITRFEKVAATTYKRTTKLAXMLVRLKAAPDIGITLLIALWTP

SEQ ID NO: 184919 - protein, 43 aa, Glycine max
  Clone ID: PAT_MRT3847_137998C.1.pep
TSQSPKPFLFRFVKRGKLESCSEDAKDSSSAIRARYSSSTSRV

SEQ ID NO: 184920 - protein, 133 aa, Glycine max
  Clone ID: PAT_MRT3847_137999C.1.pep
GAKWQLKRMERGIKVRKSIYKFWVHDSSCVSKTSSNLSLTVVLFLILAHHHPSPFRRCCRLCSKYTNNSHHTFIHPPPSYNTISPFCPSFPPHLYKYFNLSPISFIKHTLTLFFLILSFITLIRRLRSSRFSN

SEQ ID NO: 184921 - protein, 123 aa, Glycine max
  Clone ID: PAT_MRT3847_13799C.1.pep
MENTKKREVREGEDDEDEMKMEKFYALLRSFRDARDRRRRELEKEKHESRHSWKKMKTTAATTKDNKSQVSFEFQDFTTEIHFRKPPLTFANPVASCDTSIKDDNKGKKKEQQDLALDLKLAL

SEQ ID NO: 184922 - protein, 80 aa, Glycine max
  Clone ID: PAT_MRT3847_1379C.1.pep
TTPVSLTTAAKVTFTFFSSNCWSISIRRIISYLAISSTTIQGISLCQRSPSMHLFSAWGELSSLAAPFLMGKYLNVRRGP

SEQ ID NO: 184923 - protein, 86 aa, Glycine max
  Clone ID: PAT_MRT3847_137C.1.pep
GIFFIGILIFYHVYGLTGMLVSMLDVTSLGTPSVNSLLLVLCKSDHAVTVTLMTVQYHHSSRGHLHGTRVYGHYDHYNSVRAHQIL

SEQ ID NO: 184924 - protein, 83 aa, Glycine max
  Clone ID: PAT_MRT3847_138000C.1.pep
FTLVRDTKRSIQYFEVSVVRSTCAKILFNRYVTREAISIKSAHLSFGITIPQSSFISVKYRSQASAFSSQVTRPHISGSICEP

SEQ ID NO: 184925 - protein, 57 aa, Glycine max
  Clone ID: PAT_MRT3847_138001C.1.pep
LGIKVAEINYTSHHQRRPRGDIASESRVSKREAHMVRQGIGIPHGAANSGASSPDAW

SEQ ID NO: 184926 - protein, 71 aa, Glycine max
  Clone ID: PAT_MRT3847_138002C.1.pep
HASGKLIGDESHVCQFQVPCTYCLFKWIDIYMHFKMFSWQNIDIVFPVFLVLFSTQNQSFTIKVCYVDLSK

SEQ ID NO: 184927 - protein, 83 aa, Glycine max
  unsure (1)..(83): unsure at all Xaa locations
  Clone ID: PAT_MRT3847_138003C.1.pep
ASGLFFVFANKLPHYQPTLQLXWAFFHLKAKGYLGPWTQPCPNLLLLIYLFTFQIPRLLIFKRRKGVNRFFLWNGTQTPQPWP

SEQ ID NO: 184928 - protein, 160 aa, Glycine max
  unsure (1)..(160): unsure at all Xaa locations
  Clone ID: PAT_MRT3847_138004C.1.pep
QLFNFIATETSIENLDASEISPSTSSESLGETPEIXTLPLGIDLVSAARRNICFLRTSADSLCLHHTPIMVEAVRRYHDFWMPLIADLTLQNSSPPMILPPLDIHWVWFCHTLNPVSYREYCETRFSKLIGKAGIFDEENREYALMRCMEILSSRYPVGV

SEQ ID NO: 184929 - protein, 35 aa, Glycine max
  unsure (1)..(35): unsure at all Xaa locations
  Clone ID: PAT_MRT3847_138005C.1.pep
PYIRNGISHIIRFSFVEQPTVCLSSAXQNISGFPV

SEQ ID NO: 184930 - protein, 113 aa, Glycine max
  unsure (1)..(113): unsure at all Xaa locations
  Clone ID: PAT_MRT3847_138006C.1.pep
SPPNYKAWHFRXTTWAAKAQYPARLYKGLLISDYLLCISASVPCCVTLPAIASGTLTSLTTTGTHTGQVNNLGYITAYLAAGHATSDTGLFWPSATCLAXARARFPTLPYQCL

SEQ ID NO: 184931 - protein, 92 aa, Glycine max
  Clone ID: PAT_MRT3847_138007C.1.pep
KKKKKKIKKDTILQDKRLSGCTLKNKDLKAVHEIMKLAHKAIETNDVIVDVKLKMAVWNQWILSVVSRIRIRIARKRNYDEDAKEELNCNVT

SEQ ID NO: 184932 - protein, 107 aa, Glycine max
  Clone ID: PAT_MRT3847_138008C.1.pep
TKGRFLGFLAPPGGFLPPRWVFLFFPAFPPGVFWGSSLFKPLPRKRGAQPKGVVFFWMGGPFFVDPPFFGGLGGGFFFWECLSPPPLGDQGQMVWAVFQVILLKGLP

SEQ ID NO: 184933 - protein, 89 aa, Glycine max
  unsure (1)..(89): unsure at all Xaa locations
  Clone ID: PAT_MRT3847_138009C.1.pep
XYXIDCIXXKSXIXSQIFFVSLXLXCXLSSSVYRXRVLVGRKTKSVCXXVWFGFXLFFIFLREDTHTERDGYDEDXXXEKKXKTRSCAS

SEQ ID NO: 184934 - protein, 106 aa, Glycine max
  Clone ID: PAT_MRT3847_13800C.1.pep
PRGGKKPSFWGWLLNMAQGGGKKKGGPPNLFSPFPPFWGGKGGFAPPGSKIKGFLKTCLLPTLGDGIWQIWWGGAIEGKIPPEISFFFGWKIIPRLKISQGGVSIC

SEQ ID NO: 184935 - protein, 111 aa, Glycine max
  unsure (1)..(111): unsure at all Xaa locations
  Clone ID: PAT_MRT3847_138010C.1.pep
XRKPARGTAVHSLHNLSILCSPQTGGAGLNWVGRLRSNKGIPTGDEPDLDSFLLSAPPQSPQARPNDPPLNPPSVARDEPMPMSTILAELFCMGATLSKTNKKCPRKQTQP

SEQ ID NO: 184936 - protein, 42 aa, Glycine max
  Clone ID: PAT_MRT3847_138011C.1.pep
CQTYLFFLQKICIKFQLCKTSPLKRVKGPLPLLAHANLLLIN

SEQ ID NO: 184937 - protein, 121 aa, Glycine max
  Clone ID: PAT_MRT3847_138012C.1.pep
VRFFLAGKNCSFSFACPSFRNQLFCPNGGGPPVMKNKKIGQSSFSFWHGIYKALCSSLSVPYSLFFRPLLLLNIRSNSPRFFFIMLHYTQYFPHISPVCPLFLYLGCQQKCKINIFYFCFS

SEQ ID NO: 184938 - protein, 99 aa, Glycine max
  Clone ID: PAT_MRT3847_138013C.1.pep
ERESPSPEEVTFCIRCNLEIYLILHSNPCHRAIINHARRPSYPRHYAPSDEFITQRFSLPLIETTHQNMGVQRSGVQAFVSPYPICFSTFALTFQSTIF

SEQ ID NO: 184939 - protein, 121 aa, Glycine max
  unsure (1)..(121): unsure at all Xaa locations
  Clone ID: PAT_MRT3847_138014C.1.pep
RKGGFNXFFFFFFLLFFFXGKTGNRYWKKTCIFYRAYRGEGQLLPYLKFLLRGGGQHTKPQXXKKTQNGGGRGGQKKKRDRGGPQKRPEKEEEEPTRGPNKTXRTKGTGKXAQPKRSGQPP

SEQ ID NO: 184940 - protein, 82 aa, Glycine max
  Clone ID: PAT_MRT3847_138015C.1.pep
CGPPYFGFEHGHLALRPFKGPPRPPPAVFFSPPSPVIAPSRLDTYEKKGRTDGPNFFLEIHHSRPRGTGCLKQNFFSLVTTT

SEQ ID NO: 184941 - protein, 64 aa, Glycine max
  Clone ID: PAT_MRT3847_138016C.1.pep
VAATELTSCGFHAPPDNLCSIPAESCDCTCFFARIYWKVLEELSQNHQKFQAFTNSSDHNHTSL

SEQ ID NO: 184942 - protein, 75 aa, Glycine max
  Clone ID: PAT_MRT3847_138017C.1.pep
PLRPPTRPPTRGVRLTLPSPPSILRPSSVLRSLHSVSTGRKKKKCLKKIRNSILTLSFRLATLRGGFHPQSRYLP

SEQ ID NO: 184943 - protein, 66 aa, Glycine max
  Clone ID: PAT_MRT3847_138018C.1.pep
NASSNGNGPSELADDDLPSVMTCANYLKLPPYSTKEIMYKKLLYAISEGQGSFDLSLYVLSSLLLK

SEQ ID NO: 184944 - protein, 471 aa, Glycine max
  unsure (1)..(471): unsure at all Xaa locations
  Clone ID: PAT_MRT3847_138019C.1.pep
MKKQVQGPIPNACLSESSRGARWSLNGMTALVTGGTRGIGHAIVNDLAAFGAAVHTCSRNQTELKKCLQEWQTQGFQATGSVNNVGTNFRKPTVEYSAEEYSELMTVNLDSGYHLCQLVYPLLKASVKGSIVFISSVAGVLSKNLACEWANDNIRSNCVVPWATRTPLVEHVICXQNQKFVEDILSRTPLKSIAEAEEVSSLXRSSINRGARWSLNGTTALVTGGTRGIGHAIVSDLAAFGAAVHTCSRTQTELNKCLQEWQSLGFQVTGSVCDVSSPSQREKLIEEVTSILNGKLNIYVNNVGTNFRKPTIEYTAEEYSQLMTVNLDSSFHLCQLAYPLLKASENGSIVFISSVAGVVSLGTGAVYAASKAAINQLTKNLACEWAKDNIRSNCVVPWATRTPLVEHLLRDQKFVDDIMSRTPIKRIAEPEEVSSLVTFLCLPAASYITGQVICVDGGLTVNGFQPSMRIT

SEQ ID NO: 184945 - protein, 72 aa, Glycine max
  Clone ID: PAT_MRT3847_13801C.1.pep
TNVYGKPFQFVLVLGTFQKLFFFFRTKTGLKLTPVKFMGSLRQSIFRLCLCIGPQNKFAFAFPYWGQALKNF

SEQ ID NO: 184946 - protein, 827 aa, Glycine max
  unsure (1)..(827): unsure at all Xaa locations
  Clone ID: PAT_MRT3847_138020C.1.pep
GDSTSEDEDLDISPVEIDEALVIEDDDISDDEDDDHDDVLRDDSLPVCSPDKVHDVKLGDIVEESNVAPATSDGGQTNAASGSSSKAGTVRGSDSADFRSGYTSSSRGAMSFAAAAMAGLGSANSRGIRGGRDRLGRPLFGSSNDPPKLIFTTGGKQLNRNLSIYQAIQRQLVLDEDDDERFAGSSDYVSGDGSSLWGDIYTITYQRAENQPDRTPPGGSTSNASKSGKSGSVLNSSSEDKLNQTSVLDSILQGELPCELEKSNPTYNILALLRVLEGLNQLASRLRAQVVTDSFAEGKILDLDELSVTSGARVPTEEFISSKLTPKLARQIQDALALCSGSLPSWCYQLSKACPFLFPFETRRQYFYSTAFGLSRALYRLQQQQGADGHGSTNEREVRVGRLQRQKVRVSRNRILDSAAKVMELYSSQKAVLEVEYFGEVGTGLGPTLEFYTLLSHDLQKVVLQMWRSGSSEKYQMEIDGDEKKMKNXKASCVGDGELVQAPLGLFPRPWPANADASEGTQIFKVIEYFRLLGRVMAKALQDGRLLDLPLSVAFYKLVLGQELDLHDIXFIDAELGKTLQELNALVCRKHYIQSTGGSCTDTFAGGDCRGAPIEDLCLDFTLPGYPEYILKPGDEIVDINNLEEYISMVVEATVKTGIMRQMEAFRAGFNQVFDISSLQIFSPQELDYLLCGRRELWKTETLADHIKFDHGYTAKSPAIVNLLGIMGEFTPEQQRAFCQFVTGAPRLPPGGLAVLNPKLTIVRKLSSSAANASSNGNGPSELADDDLPSVMTCANYLKLPPYSTKEIMYKKLLYAISEGQGSFDLS

SEQ ID NO: 184947 - protein, 234 aa, Glycine max
  Clone ID: PAT_MRT3847_138021C.1.pep
MAGSSINRGERWSLNGMTALVTGGTRGIGHSIVSDLAAFGAAVHTCSRTQTELNKCLQEWQSQGFQVTGSLCDVSSPPQREKLIQEVASTFNGKLNIYLAYPLLKASEKGSIVFISSVAGVVSLGTGAVFAASKAAINQLTKNLACDWAKDNIRSNCVVPWATRTPVVEHLFKDQKFVDDIMSRTPIKRIAEPEEVSSLVNFLCLPAASFITGQVICVDGGLTVNGFQPSMRIT

SEQ ID NO: 184948 - protein, 511 aa, Glycine max
  Clone ID: PAT_MRT3847_138022C.1.pep
FVSGKLPPKLARQIQDALALCSGSLPLWCCQLTKACPFLFPFDTRRQYFYSTAFGLSRALYRLQQQQGADGHGSTTEREVRVGRLQRQKVRVSRNRVLDSAAKVMGMYSSQKAVLEVEYFGEVGTGLGPTLEFYTILSHDLQQVGLQMWRSYSSEKHQMEIDRDEKKKKSDGSGPNLAGDGELVEAPLGLFPRPWPTNSDASESSRFSKVVEYFRLLGRVMAKALQDGRLLDLPLSVAFYKLVLCQDLDLHDILSIDAELGKTLQEFNALVCRKHYIESIGGSYTDTIVNLYFRGAPIEDLCLDFTLPGYPEYTLKPGDEIVDINNLEEYISLVIDATVKTGIMRQIEAFRAGFNQVFDISSLQIFSPQELDNLLCGRRELWKTETLADHIKFDHGYTAKSPAIVNLLEIMGEFTPEQQRAFCQFVTGAPRLPPGGLAVLNPKLTIVRKLSSSAANASSNGNGPSELADDDLPSVMTCANYLKLPPYSTKEIMYKKLLYAISEGQGSFDLS

SEQ ID NO: 184949 - protein, 75 aa, Glycine max
  Clone ID: PAT_MRT3847_138023C.1.pep
RLMGLPLAELTGTYSPLLVLLSDLDGSVHVLLVLSHDLHGLSHLRVMQCLIDQLIARLCSLEKQQYRDSTLTVTK

SEQ ID NO: 184950 - protein, 270 aa, Glycine max
  Clone ID: PAT_MRT3847_138024C.1.pep
MAGSSINRGERWSLNGMTALVTGGTRGIGHSIVSDLAAFGAAVHTCSRTQTELNKCLQEWQSQGFQVTGSLCDVSSPPQREKLIQEVASTFNGKLNIYVNNVGINIRKPTIEYTAEEYSQIMTVNLDSSFHLCQLAYPLLKASEKGSIVFISSVAGVVSLGTGAVFAASKAAINQLTKNLACDWAKDNIRSNCVVPWATRTPVVEHLFKDQKFVDDIMSRTPIKRIAEPEEVSSLVNFLCLPAASFITGQVICVDGGLTVNGFQPSMRIT

SEQ ID NO: 184951 - protein, 438 aa, Glycine max
  Clone ID: PAT_MRT3847_138025C.1.pep
GEPFKPFDQLMGTLPASSSSALPEKYRDLMIDPSSPILQFYPADFEIDMNGKRFAWQGVAKLPFIDEKKLLSATSKLEATLTEEEQLRNSKMLDLLYVSSAHNLAPHILSYHQYSCQLPLHERPALPIDPRASDGMNGYLWLYERNVLRTTVSSPIKGLQDIEFNQVLNITYLNPRKHRHIPKPPDGVLMPKKILKAIDIKPFPVLWHEDNSGRRQGRERQQVHGAMAGPQLGEAAHRLVKNSLNIKSNNMPYGSPEQFPGHHAMNRLRSAGPSGSGKYYGEDTSGYYGQHYNHQGIITRPRYPVSSNGGHNDKQNFRIQDRSYHHDQYYNGTTGFYTMAMEEGARARPYAVPLPRTPAVTLSRPPNSGSTTNGQHQFVQNMGPPIPPPNWITRVPDTNGIYAGHQETALGGTYDKQNMKVYQVKTRQPQDMPEYGNQ

SEQ ID NO: 184952 - protein, 331 aa, Glycine max
  Clone ID: PAT_MRT3847_138026C.1.pep
GVTVLYLGQPEPHLLNICSKTKSLWKIFCLGPLLRALQKRKKCHHWTSQVICVDGGLTVNGFEPSIINRGARWSLNGTTALVTGGTRGIGHAIVSDLAAFGAAVHTCSRTQTELNKCLQEWQSLGFQVTGSVCDVSSPSQREKLIEEVTSILNGKLNIYVNNVGTNFRKPTIEYTAEEYSQLMTVNLDSSFHLCQLAYPLLKASENGSIVFISSVAGVVSLGTGAVYAASKAAINQLTKNLACEWAKDNIRSNCVVPWATRTPLVEHLLRDQKFVDDIMSRTPIKRIAEPEEVSSLVTFLCLPAASYITGQVICVDGGLTVNGFQPSMRIT

SEQ ID NO: 184953 - protein, 529 aa, Glycine max
  Clone ID: PAT_MRT3847_138027C.1.pep
PGEPRASVLDKVKLGEPGYKERYYAEKFGALDLEKIDKIKKDTVLKYVEGLCWVCRYYYQGVCSWQWYYPYHYAPFASDLKDLADLEITFFLGEPFKPFDQLMGTLPASSSSALPKKYRDLMIDPSSSILQFYPADFEIDMNGKRFAWQGVAKLPFIDEKKLLSATSKLEATLTEEEQLRNSKMLDLLYVSSAHNLAPHILSYYQYSCQLPLHERPAQPIDPRVSDGMNGYLWLYERNVLRTIVSSPIKGLQDIEFNQVLNITYLNPRKHRHIPKAPDGVLMPKKILKAIDIKPFPVLWHEENSGRRQGRERQVHGAMAGPQLGEAAHRLVKNSLNIKSNNMPYGSPEQFPGHHAMNRLRSAGPSGYGKYYVEDKSGYYGQQNNHQGMITRPRYPVSSNGGNNEKQNFRIQDRSQHHEQYYNGRTGFHTMTMEEGARPRPYAVPSPRTQVVMLSRSPNSGPTTNGQHQFVQNMGPPIPPPNWITRAPDTNGIYAWHQETALGGAYDKQHIKVYQAKTRQPQDMPEYGNQ

SEQ ID NO: 184954 - protein, 100 aa, Glycine max
  unsure (1)..(100): unsure at all Xaa locations
  Clone ID: PAT_MRT3847_138028C.1.pep
XXRKLXXXXEXAFRYLHLXXXLTSXKXXNXXXNCXXXQXXXKXXXKKXQXSXEXXXXEKXXXKXXKNXXVXSXXXXFNQRGKXQXXXXXXXXXQTXNKTX

SEQ ID NO: 184955 - protein, 83 aa, Glycine max
  unsure (1)..(83): unsure at all Xaa locations
  Clone ID: PAT_MRT3847_138029C.1.pep
GSPTSMXRNTSFKTIISGDFWGDRIPMVWHLQYSRRGTIFSLQTIPFGLLAHRDSLLTISVAKPTVRDLTIKSCKYKTCLFEN

SEQ ID NO: 184956 - protein, 63 aa, Glycine max
  unsure (1)..(63): unsure at all Xaa locations
  Clone ID: PAT_MRT3847_13802C.1.pep
RXQHISRISKKNLASLFNTXLLXQHKKKCSTFGGQIHRLTKAPEKSPLQINSISKCKNNDCWF

SEQ ID NO: 184957 - protein, 60 aa, Glycine max
  Clone ID: PAT_MRT3847_138030C.1.pep
DIPNAVDVTYILNEPKEKNIHCFSPVTIPSKTKTQEHNLDIRLFHSMLTSKHKIVLTTHK

SEQ ID NO: 184958 - protein, 116 aa, Glycine max
  unsure (1)..(116): unsure at all Xaa locations
  Clone ID: PAT_MRT3847_138031C.1.pep
KKKRGEPNFIPKTQKSLFGIQKAPFSHRGKQPLGGSSLKSRVQNFFLALGLSKKLYRWNPPFSKPLQNRKKGKAKKKAFFGPKKGAKKGKKKGAENKGLFLISPGASPFFXQFLLG

SEQ ID NO: 184959 - protein, 159 aa, Glycine max
  Clone ID: PAT_MRT3847_138032C.1.pep
MSTSAGQNRRPRAPTITIDTSAVGRSSENLVQPEQDHSQASNGSPMLRPTSTGQATPPELRKSGSFESRESRPVSPHNISSPTQISHPQNFLAVPVQRKRGGSVESDGGDTISTTDTTYVGTDHQSKAFGGDEVRHGAGDHPVLPDKDALIPDPGTEAD

SEQ ID NO: 184960 - protein, 81 aa, Glycine max
  Clone ID: PAT_MRT3847_138033C.1.pep
VYLRLFRGSGLLKDKSKPIIFSMARLDRVKNITGLVESFGKNSKLRELVNLVIVAGYIDVKKSSDRERNAEIEKMHELMKK

SEQ ID NO: 184961 - protein, 179 aa, Glycine max
  Clone ID: PAT_MRT3847_138034C.1.pep
MSNSQQNEIDLTGDGEERSNSLLANTRCSFCFPCCFGSRCHSVSVGFAWWERVRATSSWSETSPHSEAQPATGSSSGSWWSGGVRAFMKVREWSELAAGPRWKTFIRRFSRSRSGWARHAAGKYQYDPLSYSLNFDEGHNGYFDGDGYDGLRNFSARYAAPPPFKPVSSDSIQDAAVLG

SEQ ID NO: 184962 - protein, 71 aa, Glycine max
  Clone ID: PAT_MRT3847_138035C.1.pep
HSLEQYTFHWNDITHTEGSCYCSHCFQFPLLAIQWHKSMILCTSIKLMSDLHPVCSHSSDPTGSSANRVSQ

SEQ ID NO: 184963 - protein, 51 aa, Glycine max
  unsure (1)..(51): unsure at all Xaa locations
  Clone ID: PAT_MRT3847_138036C.1.pep
TVLFAFYRLTWTIRKRKIDTSLPLERTXXRSEFSLSMGGYIGARALLLSTS

SEQ ID NO: 184964 - protein, 222 aa, Glycine max
  Clone ID: PAT_MRT3847_138037C.1.pep
MAPRDHKTSNAKANGNGNSGVKEVHFRGVRKRPWGRYAAEIRDPGKKSRVWLGTFDTAEEAARAYDAAAREFRGPKAKTNFPLPLENVKNSSPSQSSTVESSSRDRDVAADSSPLDLNLAPAAVASARFPFQHQFPVFTGAVPAANQVLYFDAVLRAGMAGPRGFAFGYNHHPVAASEFHATTSDSDSSSVIDLNHNEGEVKGNGSRIFDLDLNHPPPHEIA

SEQ ID NO: 184965 - protein, 155 aa, Glycine max
  Clone ID: PAT_MRT3847_138038C.1.pep
VCCRTNRPNKKLLSRITYIKDPDHPDSFEELKVITEEAVEVDDQRDPEHAYSLEELKVITEEAVEVDDHRNYVRVTFTPTVEHCSMATVIGLCLRVKLMRSLPSRYKVDIRVAPGSHATEAAVNKQLNDKERVAAALENPNLLNMVDDCLASSYD

SEQ ID NO: 184966 - protein, 113 aa, Glycine max
  unsure (1)..(113): unsure at all Xaa locations
  Clone ID: PAT_MRT3847_138039C.1.pep
LRLCPLPLLSAWGWSPPFLVFLPLLPLLFRSAVASCFAVCLVAPGLLSCWGGCRRCFWGVFLSCVSLVLLVLGSXVGGIPGFSFSRSPLSLSRPRVCIRARVSLPGFPDRVLP

SEQ ID NO: 184967 - protein, 47 aa, Glycine max
  Clone ID: PAT_MRT3847_13803C.1.pep
VVPRLYHVNLMNDSAALVPMHQVIWNGDYGPFSVMIRMGPHKWDHGH

SEQ ID NO: 184968 - protein, 78 aa, Glycine max
  Clone ID: PAT_MRT3847_138040C.1.pep
KYHTLHTSLRELKEGRKFSYRLTILLLRVMPIFLYGTKQTYIQEKTQRPYLQGIPLSQNIRAIPVEQKRLAYKVNSYY

SEQ ID NO: 184969 - protein, 105 aa, Glycine max
  unsure (1)..(105): unsure at all Xaa locations
  Clone ID: PAT_MRT3847_138041C.1.pep
ILGKNKQNRTSSILHFYRYPVNIWSGXSYLVDDKVRKYENAIAGTATGCCGHCHTDVVQCIVHQTRKLQHSTGLYLNNSIVDFTQCLXSSIPXNLKVELFTNSAT

SEQ ID NO: 184970 - protein, 58 aa, Glycine max
  unsure (1)..(58): unsure at all Xaa locations
  Clone ID: PAT_MRT3847_138042C.1.pep
TRAESARREKQNPSHNKCLXRSNSDKDYYRNQACHARXNLHKVDSEQECEKVQFRITT

SEQ ID NO: 184971 - protein, 104 aa, Glycine max
  unsure (1)..(104): unsure at all Xaa locations
  Clone ID: PAT_MRT3847_138043C.1.pep
KKKCVNMCVKLTGLGLDPPPKVXAATTPKRREPGREKEGGLTTKRERKWWLLRETQEERPPPPPKKKKKRRLMKSSGAEPXKXPPQQETTAALWVSLFFPSHHP

SEQ ID NO: 184972 - protein, 47 aa, Glycine max
  Clone ID: PAT_MRT3847_138044C.1.pep
NLFAFINLTTLSIYEFLGCFPVLFEVFKLLTNLFVCFSFNKIMHCYS

SEQ ID NO: 184973 - protein, 109 aa, Glycine max
  Clone ID: PAT_MRT3847_138045C.1.pep
ANPPPVRPWFRLASIRSSPPALHLGQLPLPRSYPANIYNWLARSSAQIQPSQASPQPHKEPSSQHNRFSSSSLATSPENHNITRIPLPSTSHSPKSSTPPSQLVLIAPR

SEQ ID NO: 184974 - protein, 67 aa, Glycine max
  unsure (1)..(67): unsure at all Xaa locations
  Clone ID: PAT_MRT3847_138046C.1.pep
XSWCXYDSSXLXPVASLPSXGVNCSAPXXXSXSHXXLXXXRXQXXXXCASXFEPEFPSXTYAXXXLL

SEQ ID NO: 184975 - protein, 48 aa, Glycine max
  Clone ID: PAT_MRT3847_138047C.1.pep
DKNTNFTVDGLPGFTIGRPIKESRIRSLFQLSHLSLNQKHFFELTDDF

SEQ ID NO: 184976 - protein, 49 aa, Glycine max
  unsure (1)..(49): unsure at all Xaa locations
  Clone ID: PAT_MRT3847_138048C.1.pep
MFTSMKKIHKESDADPTXFDESVRQALFDLXNTNSDLKTDLRDLYINSS

SEQ ID NO: 184977 - protein, 32 aa, Glycine max
  Clone ID: PAT_MRT3847_138049C.1.pep
TCSSIIFLDCINVSYGRDLYSAICSKNVLITT

SEQ ID NO: 184978 - protein, 42 aa, Glycine max
  Clone ID: PAT_MRT3847_13804C.1.pep
QSNLNVMYLLFYSPIVLLSQIHRLWFYPMEPHHFCVVRYNLM

SEQ ID NO: 184979 - protein, 82 aa, Glycine max
  Clone ID: PAT_MRT3847_138050C.1.pep
CEKCKYSRQYSTLVHSVKSSAPSIHRVGCPNAYRGCRQINCTPQSFCHPLFFWNTCRCSSKASEFRVGNYSCSKRVNYAGNF

SEQ ID NO: 184980 - protein, 52 aa, Glycine max
  Clone ID: PAT_MRT3847_138051C.1.pep
NQSFSLVFKNSMPITLSICLISGIDQYNTYYMSQVLRYYMYNLQSLGSVSIN

SEQ ID NO: 184981 - protein, 127 aa, Glycine max
  Clone ID: PAT_MRT3847_138052C.1.pep
MASLATLAAVQPAALNGLAGSSLSGTKLSFKPSRHTVKSKNFRSGAVVAKYGDKSVYFDLEDLDNPLQSKFFETFAAPFTKRGLLLKFLILGGGSTLAYFSATASGDILPIKKGPQLPPKLGPRGKI

SEQ ID NO: 184982 - protein, 144 aa, Glycine max
  Clone ID: PAT_MRT3847_138053C.1.pep
MASLATLAAVQPAALNGLAGSSLSGTKLSFKPSRHTVKSKNFRSGAVVAKYGDKSVYFDLEDLGNTTGQWDLYGSDAPSPYNPLQSKFFETFAAPFTKRGLLLKFLILGGGSTLAYFSATASGDILPIKKGPQLPPKLGPRGKI

SEQ ID NO: 184983 - protein, 109 aa, Glycine max
  Clone ID: PAT_MRT3847_138054C.1.pep
NSVTKHYRSGAVVAKYGDKSVYFDLEDLGNTTGQWDLYGSDAPSPYNPLQSKFFETFAAPFTKRGLLLKFLILGGGSTLAYFSATASGDILPIKKGPQLPPKLGPRGKI

SEQ ID NO: 184984 - protein, 169 aa, Glycine max
  unsure (1)..(169): unsure at all Xaa locations
  Clone ID: PAT_MRT3847_138055C.1.pep
MGKSSLKMTQLPFMAVVCIVMLFVVYRTLKYQSYQEQIDKQWNIREDEKAYSETSGNLKGLPRGIIQATSDFELRPLWSPSSLRSKVSVYSNRNLLAVPVGIKQKHNVDAMVQKFLPDNFTIILFHYDANMDXHRDLNWTMWELHITDLLFTREFKLWVVATIQLKFQV

SEQ ID NO: 184985 - protein, 86 aa, Glycine max
  unsure (1)..(86): unsure at all Xaa locations
  Clone ID: PAT_MRT3847_138056C.1.pep
PQNRPETRSTHAFFPFCPKPLXPGPLVKTGGGPSQPFFNLRSHYPISKNSLNSPPHSITNTKPSRVTDDEPRDSPRYISASPMNSK

SEQ ID NO: 184986 - protein, 80 aa, Glycine max
  Clone ID: PAT_MRT3847_138057C.1.pep
RQVFSLLVLIPNSYLKTKPCERDRKKNVQKFSPKFFSHKRSLRPSSQEDFLILLPEFLVIGSYMDPNYSSSCICIMNNLP

SEQ ID NO: 184987 - protein, 65 aa, Glycine max
  Clone ID: PAT_MRT3847_138058C.1.pep
PIVPLKAEYLWELLRFYQLAAACREVTAGPKLPGSCREDKTIDHHEVLCMCRTRVTPSVKSEQEI

SEQ ID NO: 184988 - protein, 200 aa, Glycine max
  unsure (1)..(200): unsure at all Xaa locations
  Clone ID: PAT_MRT3847_138059C.1.pep
PRGPGSRLRPAPELYTSTVLRWXEAQPPGMGFLTQETSAPPPSRTLFCLFPVSDRPGIHLPMINSDVSSGSLYEDYSQKPESTTGRIAHYGQRISSEMPKGIVSFERKVLPFKNDSIHISYPDANFWSTSAIPLCRFEVHSSGLIEDQSSGAAEVDLANKYLGGGALGRGCVQEEIRFMVSPELEAGMLFLPAMADNEAI

SEQ ID NO: 184989 - protein, 119 aa, Glycine max
  unsure (1)..(119): unsure at all Xaa locations
  Clone ID: PAT_MRT3847_13805C.1.pep
MGFLVLHHFSLLGLSSSSSISTHRSILDLDLTKFTTQKQVSSLFQLWKSEHGRVYHNHEEEAQRLEISRHNLTKTREMMQTRHPPNSNXLRIDQFGGIKPQEFNKKLLAAPKDVSQEIK

SEQ ID NO: 184990 - protein, 45 aa, Glycine max
  Clone ID: PAT_MRT3847_138060C.1.pep
KVLLPQTDVVEVCTGMNIAVMVGGFPRKEGMEKNDEMTKNGSIYK

SEQ ID NO: 184991 - protein, 72 aa, Glycine max
  Clone ID: PAT_MRT3847_138061C.1.pep
GVVPNRVTYGCFVSYYCAVNEIDKGVEMLREMQRLGDGVASSSLYTPIIHALCEAGRNQFEFECLNLVLSWI

SEQ ID NO: 184992 - protein, 80 aa, Glycine max
  unsure (1)..(80): unsure at all Xaa locations
  Clone ID: PAT_MRT3847_138062C.1.pep
REEAMVGRRLLGAEARYLRTDLHPVAAPLALLRNSRIFVKLIDAAVTPGDRVIVXTSREDANAPELLPLLHLPKMEGTDG

SEQ ID NO: 184993 - protein, 143 aa, Glycine max
  unsure (1)..(143): unsure at all Xaa locations
  Clone ID: PAT_MRT3847_138063C.1.pep
SMAVTNGVKVRASALVIPELIDLQDDLEKYLFAYSIRLSLEPXGCTINGMSFSSCQLHWRHWIIRANDIVISDVNGEAVIGQYPLLRPGAQEFVYQSRMHLPTPSGSIEGSFTFIPGRLADPKGDPFLATVARFPLQLPDYIF

SEQ ID NO: 184994 - protein, 57 aa, Glycine max
  Clone ID: PAT_MRT3847_138064C.1.pep
RSTQVGSKSSSSLFNVSLTGQPVSRPVACPPHLISGTIVVSSYWVPASSNNFKASNS

SEQ ID NO: 184995 - protein, 443 aa, Glycine max
  Clone ID: PAT_MRT3847_138065C.1.pep
MGLESVGDLAINVILKKLGAQDIARVACVSKRFSSSASDDTLWINLCFNELALTQPLDHLGNPLSSFKECYLAWRGAFVMYPWSLVKRVKRCWDRIKTWLTNNFPEAEATLCKGATEADIQELENVLKVKLPLPTRILYRFHNGQEFAKADPETSTFGRSLGLIGGYSFYGHLVNVYLLPICQIILETQQTRRRLSFLRRSKYVLVAASSTYSRKLFFLNCTNGQLYVGTRSPLTERDIIPCVPHDLISLHQELNSSEQQDAMLLWLEEHGRRLEHGFIKLHDEGNGKSINLFPEEPHICSTAVTNGVKVRASALVIPELMDLQDDLGEYLFAYSIRLSLEPQGCIINGMSFSSCQLHWRHWIIRANDIVISDVSGKAVIGQFPLLRPGAQEFVYQSCTPLPTPSGSIEGSFTFIPGRLADPKGDPFLATVARFPLQLPDYIF

SEQ ID NO: 184996 - protein, 280 aa, Glycine max
  Clone ID: PAT_MRT3847_138066C.1.pep
MGSQQAAVSFLTNLARAAFGLGASATLLSSSLYTVDGGQRAVLFDRFRGILDETVGEGTHFLIPWVQKPYIFDIRTRPHTFSSVSGTKDLQMVNLTLRVLSRPDTDKLSLIVQNLGLEYDEKVLPSIGNEVLKAVVAQFNADQLLTDRPHVSALVRDGLIRRARDFNILLDDVAITHLSYGAEFSRAVEQKQVAQQEAERSKFVVMKAEQERRAAIIRAEGESDAAKLISDATASAGMGLIELRRIEASREVAATLAKSPNVAYLPGGKNLLMALNAGGR

SEQ ID NO: 184997 - protein, 45 aa, Glycine max
  Clone ID: PAT_MRT3847_138067C.1.pep
ILFLWVWKIYTNRVTEMFNLNHFVYIRGIAMRENFDRYLIPYNAN

SEQ ID NO: 184998 - protein, 36 aa, Glycine max
  Clone ID: PAT_MRT3847_138068C.1.pep
LCIIKLLNKLPKLLNKFDYLTTKPKKIFILTVCTSK

SEQ ID NO: 184999 - protein, 231 aa, Glycine max
  unsure (1)..(231): unsure at all Xaa locations
  Clone ID: PAT_MRT3847_138069C.1.pep
MGEESQPQRTLWSNAERTCLHLLQCRTKSIPTLLQIHAFILRHSLHSNLNLLTAFVTTCASLAASAKRPLAIINHARRFFNATHTRDTFLCNSMIAAHFAARQFSQPFTLFRDLRRQAPPFTPDGYTFTALVKGCATRVATGEGTLLHGMVLKNGVCFDLYVATALVDMYVKFGVLGSARKVFDEMSVRSKVSWTAXIVGYARCGDMSEARRAFDEMXGSDIVGFYAMIDG

SEQ ID NO: 185000 - protein, 88 aa, Glycine max
  Clone ID: PAT_MRT3847_13806C.1.pep
KVRGVLRMLQGFSGPPFFWDKNANIFRAKSGVYVSHLSQKSLHSLLNQFIHAATCLQLVAITLNKVETAVPKSPPTLNAFVCLKGLRN

SEQ ID NO: 185001 - protein, 65 aa, Glycine max
  Clone ID: PAT_MRT3847_138070C.1.pep
HASAHASADAGVDKKLNREHRLPDLKTGTKSNCYLMSRILQDITTLCGTITYGKENHSLRWPQTW

SEQ ID NO: 185002 - protein, 88 aa, Glycine max
  unsure (1)..(88): unsure at all Xaa locations
  Clone ID: PAT_MRT3847_138071C.1.pep
ISXCKXITIXXSIRADLTVHGTLAXAXDAACXELIXQXFFXFLPXTTNDQQNXFXXNATXSAXAXFLSAXVRNAXXVTVXLXXXMYXR

SEQ ID NO: 185003 - protein, 82 aa, Glycine max
  unsure (1)..(82): unsure at all Xaa locations
  Clone ID: PAT_MRT3847_138072C.1.pep
EQPHLCPFDPYQRTLASFWSKFIDDKVFGASXKSVFTADEKEREKNFEEAIEAFSFLKEIKDKNFWRKELVVDFCCLYFWVL

SEQ ID NO: 185004 - protein, 117 aa, Glycine max
  unsure (1)..(117): unsure at all Xaa locations
  Clone ID: PAT_MRT3847_138073C.1.pep
QPHGTLHNXXXPQAREXEXGGRGRRENRRDATNXAEGXXREXGERDQXRTXENEPXAXAXGGEEQGTAPPQRGXPPXGTTNSTRGNTTXEPXXAEQQXGRXHXAAARKHRRKXRDQQ

SEQ ID NO: 185005 - protein, 69 aa, Glycine max
  Clone ID: PAT_MRT3847_138074C.1.pep
LTKGTYSTGMKTIMHSKGFILKHSNQRHTHMFRDIILHASRSYHTTETHLLLTTDYPLLHACAVYPSTP

SEQ ID NO: 185006 - protein, 51 aa, Glycine max
  Clone ID: PAT_MRT3847_138075C.1.pep
DEILILCVNNWSKTLGGRAHIGKTPPFNFSFILTGLGICFSEMAFHKLTSQ

SEQ ID NO: 185007 - protein, 42 aa, Glycine max
  Clone ID: PAT_MRT3847_138076C.1.pep
RVIRSCISPTKGLITPSDFVTCFSIYVLRSNGPTQCPLVSYF

SEQ ID NO: 185008 - protein, 108 aa, Glycine max
  unsure (1)..(108): unsure at all Xaa locations
  Clone ID: PAT_MRT3847_138077C.1.pep
MVLLSKATTEQYSYIKNYMPTAFSSTIPIVDLSKPDAKTLIWKACEEFGFFKVINHGVPMETISQLESEAFKFFSMPLNEKEKVGPPKPYGYGSKKIDXNGDVGWVEY

SEQ ID NO: 185009 - protein, 107 aa, Glycine max
  Clone ID: PAT_MRT3847_138078C.1.pep
LRSGQRQFSVAVTRPWEDKWLTLPPVSASSSASVELNQLSSTPTTALKWVVRCCPHLPRALVHKLFRLRQVRIHPATAIQQQTFKRVAAKDTLNTGDRILLPQSVKV

SEQ ID NO: 185010 - protein, 113 aa, Glycine max
  unsure (1)..(113): unsure at all Xaa locations
  Clone ID: PAT_MRT3847_138079C.1.pep
MLPVADAHIHDYVSTPTDTAKQAVEGRHLELLRAVPGALTPGLPTLIPGVTDAGTTTKTANLTCPKTDDHKDXELATXGYPRMQPSSAWPSASRTQYAIDSPRTTRYESMPAF

SEQ ID NO: 185011 - protein, 71 aa, Glycine max
  Clone ID: PAT_MRT3847_13807C.1.pep
LLDEEACFSLEREQALPPDGCDISTLIFRYASQLQTDGCDPGFSAAFVLKKNKCSQCHCARDFAFTLMARP

SEQ ID NO: 185012 - protein, 111 aa, Glycine max
  unsure (1)..(111): unsure at all Xaa locations
  Clone ID: PAT_MRT3847_138080C.1.pep
KAMTMSFNPHPRSDAWSMXLLKRTGFHCDIMCVTGXTATPMQDVQATIDWFISSHECAPRTYCVSNPQDPFASNKRMGKLTFRHGTFRNVKKMSISIGGGADAKNAILMNM

SEQ ID NO: 185013 - protein, 228 aa, Glycine max
  unsure (1)..(228): unsure at all Xaa locations
  Clone ID: PAT_MRT3847_138081C.1.pep
RPTRPRFFMNMERYTLPAPPINIILEEEEEEENIAIAMGAPLIPSFKSMLQHQQQQPDSYFNFNFNSSISSATIPFVPNMESFPSLDPFSPSLSSLPFFNNNSSNNMAFDPGFDLGLDTTGLHSSVPPAPHLFSQAQMGFEFSELEALTGPGNGNNAPFADGAKVAAAMLLRPPPLDGAQQQQQQPTLYRKRRGTAAEIPGLETVRRKGRKWEEGGRGGEGVRKGSXC

SEQ ID NO: 185014 - protein, 256 aa, Glycine max
  Clone ID: PAT_MRT3847_138082C.1.pep
MGSASLIPVSWLPWRPLSPFKGTVKTLVAKPWLKKIQQARPLISVVNKAASLSSPVTAPSVGVRFRLDNLGPQPGSRKRAKRKGRGISAGQGASCGFGMRGQKSRSGPGVRKGFEGGQMPLYRRIPKLRGIAGGMHAGLPKYVHVNLRDIEDAKFKEGEEVSLESLKAKGVINPSGRERRLPLKILGEGELSKKLTLKARAFSTSAKEKLENAGCSLTVLPGRKKWVKPSVAKNLARADEYFAKKRAMAASEPASA

SEQ ID NO: 185015 - protein, 63 aa, Glycine max
  Clone ID: PAT_MRT3847_138083C.1.pep
MMICLLGFGAYDKKMGEGERFQLETVGALTLSVVSSVSIVICNKALMSSLHFIFACKNVNRST

SEQ ID NO: 185016 - protein, 180 aa, Glycine max
  unsure (1)..(180): unsure at all Xaa locations
  Clone ID: PAT_MRT3847_138084C.1.pep
IWALQGTVKSLVAKPWLKVEQARPLVSSVGIRGISAGQGASCGFGMRGQKSRSGPAVTIGFEGGQMPLYRRIPKLRGIAGGMHAGLHKYVHVNLRDXDAKFKEGEEVSLEFLKAKGVINTSGRERRLPLKILGEGELSKELTLKARAFSTSAKEKLENVGXGSSLCFPGRKKWVKPSDNC

SEQ ID NO: 185017 - protein, 62 aa, Glycine max
  Clone ID: PAT_MRT3847_138085C.1.pep
LTLKARAFSTSAKEKLENAGCSLTVLPGRKKWVKPSVAKNLARADEYFAKKRAMAASEPASA

SEQ ID NO: 185018 - protein, 128 aa, Glycine max
  Clone ID: PAT_MRT3847_138086C.1.pep
MQSQQTVKEEDDEGPPPGWQPLPAQPPPPPRPSGWAQMVCGSCRRLLSYPRGAKHVKCSCCQTVNIVLEADQVGQVKCGSCAVLLMYPYGASQVRCSSCRFVTEIGAHNKRPPWSVQQRKPSPPKTGC

SEQ ID NO: 185019 - protein, 351 aa, Glycine max
  Clone ID: PAT_MRT3847_138087C.1.pep
MGEGERFQLGTVGALTLSVVSSVSIVICNKALMSSLHFIFATTLTSWHLLVTFCSLHVALKMRFFEHKPFEQKAVMGFGILNGISIGLLNLSLGFNSVGFYQMTKLAIIPCTVLLETIFLGKRFSKRIQFALSILLLGVGIATVTDLQLNALGSFLSFLAVITTCVAQIMTNTIQKKYKVSSTQLLYQSCPYQAATLLISGPYLDKLLTNQNVFGFNYTTQVTVFIILSCLISISVNFSTFLVIGKTSPVTYQVLGHLKTCLVLAFGYILLRDPFSWRNILGILIAMIGMILYSYYCTLENQQKTVEAASQSSQAREDESDPLMNVENGSAVVSSNVGQRQMSPVWSKSKD

SEQ ID NO: 185020 - protein, 346 aa, Glycine max
  unsure (1)..(346): unsure at all Xaa locations
  Clone ID: PAT_MRT3847_138088C.1.pep
FITWLIIIFVLLILAYQRAQVLKRPLRFKKLAFMLLLSIFILYLNHILISGTLYALDVYHIEIDTSLLRYYFWMTIVIIMLLVGVIAWLFDYKYKRPHHSIDLTLCDAIIQKYGGNYLSHLVYSGDKDCFFNENKDSFIMYRYKSNALVVLGDPIGNTKSFESLLEAFYQFAEYQGYEIIFYQISDQYMPLYHNXGNQFFKLGEEAIIDLTTFTTSGKKRRGFRATLNTFDDLKINFEIIEPPFTQDFFDELKFVSDKWLDGRSEMHFSVGQFTQTYLSKAPIGVMRDHSGKMIAFCSLMPTYSNNAISVDLIRWLPELDLPLMDGLYLHMLLWSKENDELLYHIR

SEQ ID NO: 185021 - protein, 226 aa, Glycine max
  Clone ID: PAT_MRT3847_138089C.1.pep
MDFRQRAPTFRPQLSVRRVYETLEPRSETEELPEAYLLRVYIPGFPRENVKITYVASSRTVRITGERQLQGNRWHKIDKSYPIPDYCEAEALQGKFEIPILTITMPKKATSQAATKQQEVGTSQEKGAVVAEPKPQEKVQETTSAPQPTTTTKVEEPIEEKKSASPTSPDLKAQQKNDTFEDTPSQSLSKPIKDQKGQEELVPKPTPTPTPTPRATTMTYEKAQKG

SEQ ID NO: 185022 - protein, 228 aa, Glycine max
  unsure (1)..(228): unsure at all Xaa locations
  Clone ID: PAT_MRT3847_13808C.1.pep
MKNKNGKLKLTFEKFTWTISNFSKLDSKKLYSEKFXLDHHTWKILAYPKGTDVGSSPSSADAGVVNLPFGWSKFANFKFALINQANDKMTKIKETTKQFNATEIAWGFPKFIHLDELNDSSSGFMVNDTCIIEVQILVSKSEQENQVDQQVNKIDDNHDIDKPIKHTDIFLPKETFPTSFGELVDFQGLGKIEQAFVPLLEEVFSRHPSLIDCQQKEVAGLLNGHSQL

SEQ ID NO: 185023 - protein, 59 aa, Glycine max
  Clone ID: PAT_MRT3847_138090C.1.pep
MATEKAHINIVVVGHVDPDEATTINELNNPVVEKEAPGHAISWHARTATEGNQTIMLTK

SEQ ID NO: 185024 - protein, 35 aa, Glycine max
  Clone ID: PAT_MRT3847_138091C.1.pep
ICLLLFLSLRFLGTHYTCLHNVKTLHLSFVRPHEK

SEQ ID NO: 185025 - protein, 48 aa, Glycine max
  unsure (1)..(48): unsure at all Xaa locations
  Clone ID: PAT_MRT3847_138092C.1.pep
FIVCRCAYKLLAVLLFLLSTHSRRELKRGLFNVRAYEVTKFNLXCCNI

SEQ ID NO: 185026 - protein, 58 aa, Glycine max
  Clone ID: PAT_MRT3847_138093C.1.pep
EKWYQIKYVYVRNHKRQSRCDMQKNSPSYRIHNFALEPLRPTVHWIKPLGSVCGANTS

SEQ ID NO: 185027 - protein, 54 aa, Glycine max
  Clone ID: PAT_MRT3847_138094C.1.pep
MVLPMASNQIVNELKDRHTASPTSCIASPVADHMYHWQATIMGHLDNPYASSVF

SEQ ID NO: 185028 - protein, 119 aa, Glycine max
  unsure (1)..(119): unsure at all Xaa locations
  Clone ID: PAT_MRT3847_138095C.1.pep
HINTVTVEQTXQCFTTIKDFGETRLTLWSQFQRVSGTFMEASLLDNEVTKRVLCTTVYICLINISVTINTGVLCTRVIATQPLLLKFLDGDYVYGYANLRALSNSAHCIICLFLSLLSF

SEQ ID NO: 185029 - protein, 84 aa, Glycine max
  Clone ID: PAT_MRT3847_138096C.1.pep
ESLQAGPLKFGGLLQFASFFLQIPPPALMTFTGIKKFAPPKIILKGCIIYFASGETKFFFNQLIHSSSLFKNQNQKKKKKKKKK

SEQ ID NO: 185030 - protein, 288 aa, Glycine max
  Clone ID: PAT_MRT3847_138097C.1.pep
ATKLGVPPALDQSTPIASVTRENCIQGVKKHNKQRKKKITKKQIEGKANAGLVAKTKGVLSASHSSSEPEHPHCSNRGEEEHEVKNDCGPVPRDVANFDVGEEESVARDLANSDVSFKSVPVSQGATNSDSGCVEVDGHVYAQPTNEPIWRGSMYFCNGTIRTVSGLLAHISNLACSQVAEETGHFPEVLHAEFLPRDKVWAESFKRGDPTDQDIALFFFPDSEGSEKDFDVLVEDIMICKHVIRFVGKNAELLIFPSTELPVQNWRYEAKYYLWGVFRKKANLRRDK

SEQ ID NO: 185031 - protein, 208 aa, Glycine max
  unsure (1)..(208): unsure at all Xaa locations
  Clone ID: PAT_MRT3847_138098C.1.pep
GSFPRGFHSWXKLNDLNLXANNEIGGKILDEIGILSVLNFLDLSNNEISGNVPLGLQNLKLNLLNLSYNRLSGRLPPLLAKDMYRASFMGNPGLCGDFKGLCDGKGDDDNSKGFVWILRAIFIVASLVFVVGVVWFYFRYRNFKNAGRSVDKSKWTLMSFHKLGFSEDEILNCLDEDNVIGSGSSGKVYKVVLTSGESVAVKKIWGGV

SEQ ID NO: 185032 - protein, 150 aa, Glycine max
  Clone ID: PAT_MRT3847_138099C.1.pep
AFLDEVVEDPRIEVGTHDWNSIIHAFCKAGRLEDARRTFRRMMFLQFEPNDQTYLSMINGYVLAEKYFLVLMLWNEVKRKLSLDGQKGIKFDHNLVDAFLYAMVKGGFFDAVMQVVEKAYEMRVFVDKWRYKQAFMETHKKLKVAKLRKR

SEQ ID NO: 185033 - protein, 213 aa, Glycine max
  Clone ID: PAT_MRT3847_13809C.1.pep
WESPLGCLMFSFTMQMEDGRVVPLVQYVVSLAMTEAIKDICDKNGLPSIDVKIKWPNDLYLNGSKVGGILCTSTYKSKKFNVSAGIGLNVNNKKPTTSLNTILKGFYSGAYQFQREEVLAAFFNKFEIFYDLFLNQGFQTLEELYIKTWLHSGQRVVVQEKNEDKVIEHVVTIQGLTSSGYLLAVGDDHQMCELHPDGNSFDFFKGLVRRKLE

SEQ ID NO: 185034 - protein, 79 aa, Glycine max
  Clone ID: PAT_MRT3847_1380C.1.pep
GHLSSKYTRKHPRFVHHILHHPQIFLRRWGRNPILIRTVCGRLVTLNKTYTHCKAPHTRHAYDLVAKNPYISSPFPPLI

SEQ ID NO: 185035 - protein, 101 aa, Glycine max
  Clone ID: PAT_MRT3847_138100C.1.pep
HIDSFTHCTHPFVHSDATLSCALGSHLLPLSFAECNHEDNQPLQKLYAERGVCLHHPLHEEKEQGLGYGYLPPPPISDDYATMETKFLDHDTHMAICIHHT

SEQ ID NO: 185036 - protein, 47 aa, Glycine max
  Clone ID: PAT_MRT3847_138101C.1.pep
NNKLGVQLIITMHSTSECYTGKGKACGGSKASPFSRIHNGRLEIEQR

SEQ ID NO: 185037 - protein, 53 aa, Glycine max
  Clone ID: PAT_MRT3847_138102C.1.pep
ILYREEEKSLAKTQHLDKEIQKHLLLQSKCIPTMPENSCWKKKVKFILHTSLK

SEQ ID NO: 185038 - protein, 43 aa, Glycine max
  Clone ID: PAT_MRT3847_138103C.1.pep
HAPAHATGQHESLKRAEIHSTTERSGIPYAPSIGSDPDRINYI

SEQ ID NO: 185039 - protein, 55 aa, Glycine max
  Clone ID: PAT_MRT3847_138104C.1.pep
KHGNGSWSCNPLDDAVDGAHETSASEPCRPLSADLANVRQTVNEEEVSLRERKRF

SEQ ID NO: 185040 - protein, 103 aa, Glycine max
  Clone ID: PAT_MRT3847_138105C.1.pep
FPPPPPPPPPPPPPPPPPSSFFFFFFKKQKKICLGQTSANIFFFWKPNNFFNKGVPTKKTYPFLGLGFLQRQPLTFWASGEISKKKKGKPWGLPLREGDPSKF

SEQ ID NO: 185041 - protein, 53 aa, Glycine max
  Clone ID: PAT_MRT3847_138106C.1.pep
SVLVLLKKKKKKKKKKKKKKKKKKKNKNKKKTKKKTKSNRHLKTKNWHKAIKR

SEQ ID NO: 185042 - protein, 190 aa, Glycine max
  Clone ID: PAT_MRT3847_138107C.1.pep
PACWRPRWARARSTSHQGRPRRRPLLALRLRPRQKLIRVNQVQFQSEQNLVAQWSCAFKPDRISRHSEQVVLSRIQRLADTSSQKSSTNAKKASATSWKKPSSRSKNWRWLPSGQLGHSRRLTRTDDRTDTVPTKHPRHQKADAENRFPPRNRKMDMRTIPHTLFPPPPTDGPGFSLLPTSSASPSPNPT

SEQ ID NO: 185043 - protein, 47 aa, Glycine max
  Clone ID: PAT_MRT3847_138108C.1.pep
QPHVVVNYSVKVMHLTDLVELRKFLAWANNMVHILHNQLLNLRAIRS

SEQ ID NO: 185044 - protein, 68 aa, Glycine max
  Clone ID: PAT_MRT3847_138109C.1.pep
KQKMKTQSASLLWLFLSLAILLASGTAASATPRSAVPSHHVSTFNRSLFPSTFLFGIGSSAYQVLTTT

SEQ ID NO: 185045 - protein, 61 aa, Glycine max
  unsure (1)..(61): unsure at all Xaa locations
  Clone ID: PAT_MRT3847_13810C.1.pep
MAEXTEKAFLKQPKVFXSTKKTGKXKRPXKGGNRFWKSIGLGFKTPREAIXRNLAPSWHVS

SEQ ID NO: 185046 - protein, 64 aa, Glycine max
  Clone ID: PAT_MRT3847_138110C.1.pep
KAWLYPSQKLKKKSLGFLFQFGKTPDIKNEINNFFPPANKKLMLEMFQKGPSISNPGKVNPWTP

SEQ ID NO: 185047 - protein, 313 aa, Glycine max
  unsure (1)..(313): unsure at all Xaa locations
  Clone ID: PAT_MRT3847_138111C.1.pep
VISDDNESVETAVFSGGCCSGTEHKIVDRGHVLNGSQVNMINEESNETVIPEMQVGDPLALNQNVEQELAVATTPMAKITAVTEDLVVETFPLSSVSGTTDLGGLGDSSNSPENDIKMLEVKQGEKYAPGNQILENSSNTGLDKEENVQDILEESSNHSTRKEHFDHHEFEDRTDSQVRASHQNTTTFKTIDQNQMIDGTSTHTNNLSKTCKPSEEDGSLLKADKHRVDDQLGGNSQRRKNTTVDRINLESWDGAAKNSAKQEPNPLLAVLKVFVDAFXEILVRVKILMFVSFSSVVLSMYGDGGVDFLYLTE

SEQ ID NO: 185048 - protein, 57 aa, Glycine max
  Clone ID: PAT_MRT3847_138112C.1.pep
SAYTTASRARTRCIGLFMTYSRAQSETLVLMRSRCIDNYRLALTAHIYQWDISQRCL

SEQ ID NO: 185049 - protein, 191 aa, Glycine max
  Clone ID: PAT_MRT3847_138113C.1.pep
MAYIATTTVGASSVTTVDCQKQVRSWRLLRSLMEFLIPTCNCTFVEEENQPQKCLQKHPQQLMTSTTITGTIFGYRKGKVSFCIQANANSSNPILLLELEVPTSVLAKEMRGGTLRIVLESGNNNNLNLFSTPLWIAVGTGVINSCKEDELMYLRANFQRVRGSSNCESFHLIDPEGSIGQELSIFFFRPR

SEQ ID NO: 185050 - protein, 205 aa, Glycine max
  Clone ID: PAT_MRT3847_138114C.1.pep
MAYIATTTVGASSVTTVDCQKQVRSWRLLRSLMEFLIPTCNCTFVEEENQPQKCLQKHPQQLMTSTTITGTIFGYRKGKVSFCIQANANSSNPILLLELEVPTSVLAKEMRGGTLRIVLESGNNNNLNLFSTPLWSMYCNGRKVGYAVKLAVGTGVINSCKEDELMYLRANFQRVRGSSNCESFHLIDPEGSIGQELSIFFFRPR

SEQ ID NO: 185051 - protein, 242 aa, Glycine max
  unsure (1)..(242): unsure at all Xaa locations
  Clone ID: PAT_MRT3847_138115C.1.pep
MAYIATTVGASSVTTVDCQKQVRSWRLLRSLVELLIPTCNCTFVEEEENQSPQKCLQNHPQQQQLMMTTSTTITGTIFGYRKGKVSFCIQANANSSNPILLLELALPTSVLAKEMRGGTLRIVLESSTTTGTCSNNVNNNNNNLFSTPLWSMYCNGRKVGYAVKRRPSNGDFEALSLMRSVAVGXGVINSSCCSKEDEIMYLRANFQRVRGSSNCESFHLIDPEXSIGQELSIFFSSLLSDL

SEQ ID NO: 185052 - protein, 376 aa, Glycine max
  Clone ID: PAT_MRT3847_138116C.1.pep
MATGVTRKISAASARAHTRRAKKTNSLPLPSGILGTALAVLFIGFLAWAYQVIQPPPPKICGTPDGPPITAPRIKLRDGRHLAYKEHGVPKDAAKYKIISVHGFNSCRHDAVIADTLSPDVVEELGIYIVSFDRPGYGESDPDPNRTLKSIALDIQELADQLGLGSKFYVVGVSMGGQVVWNCLKYIPHRLTGAVLVAPVVNYWWPGLPANLTTEAYDQQKLQDQWALRVAHYVPWLTYWWNTQRWFPRSSVIAHSPHIFSHQDKELLPKLLSDRKSYAAQVIQQGDYETIHRDINIGFGNWEYSPLDLENPFPNNEGSVHLWQGDEDMMVPVTLQRYIAQNLPWINYHELQGSGHIFAHADGMSDTIIKSLLRAK

SEQ ID NO: 185053 - protein, 66 aa, Glycine max
  Clone ID: PAT_MRT3847_138117C.1.pep
IKNGTQKKRSSLPIFLFFPIQITVESDRVSTAAAFFAPNLWLWKPRPISFINSSCSRKMVIISFFM

SEQ ID NO: 185054 - protein, 141 aa, Glycine max
  unsure (1)..(141): unsure at all Xaa locations
  Clone ID: PAT_MRT3847_138118C.1.pep
GSRQHHGNVNAHAQRAQFQRNSDGGANAAAGYGGGGSVVHPGHLKVPXLGPGIGFHPADGAAAQAALNPAMAQASTDLMAXQGTLSLTNLLGSIGTRAVVNSGVTAVGTAVQGGGYRSKTNIIPVVDGGIGNHGGVTGCVS

SEQ ID NO: 185055 - protein, 55 aa, Glycine max
  Clone ID: PAT_MRT3847_138119C.1.pep
VCTNTTFKTCEVGYDTTCVLQEIRRVRTLLISSYGRVRFVQSVVLNDHSLSLVLK

SEQ ID NO: 185056 - protein, 39 aa, Glycine max
  Clone ID: PAT_MRT3847_13811C.1.pep
RLELFLGDPLTVLRFILSSMWLGRIYYEDRFLTDALILL

SEQ ID NO: 185057 - protein, 44 aa, Glycine max
  Clone ID: PAT_MRT3847_138120C.1.pep
LTHYRIKVSRTTYRTGSRTSLQIFAYIATSYFTEHKQLPLQVPD

SEQ ID NO: 185058 - protein, 72 aa, Glycine max
  Clone ID: PAT_MRT3847_138121C.1.pep
HASAQMYGYLWEQEKGLQSLPDLPEFQLSLRPDDYELPEIDPAWDSENWESLGQPLKEHLRDSDEHDENPTD

SEQ ID NO: 185059 - protein, 37 aa, Glycine max
  Clone ID: PAT_MRT3847_138122C.1.pep
YYSAAHYTAPCTALDLFFDWYSDPLFYGDYPESMKSF

SEQ ID NO: 185060 - protein, 115 aa, Glycine max
  Clone ID: PAT_MRT3847_138123C.1.pep
RERERERERERERERERERERERERERERERERERLTLINKVNSMQKEKELPWDLYTDYEGWSVCIYVDLPNDVNCLDDPDHIQEVAENPITVTKNYNLRNRNLCIDCLTTPILI

SEQ ID NO: 185061 - protein, 262 aa, Glycine max
  unsure (1)..(262): unsure at all Xaa locations
  Clone ID: PAT_MRT3847_138124C.1.pep
MVRNRRKMLPRRCTASMGSSNGSESDASDLVMRCPSCEGEYDMDDSGPFRECFPEAHEAEEELRREIEELQXKVSFLNSPLSQTKSFNXEIIPVPVEEFQAVPIPAHKHLXWLSRSXPVFKAMLENXMAERRSGTIKISDVSYDTLHAFVNYLYTAEASLDNELACNLLVLGEKYQVKHLKTYCEKYLIAKMNWDKAISNYAFAYQYNCKQLQSVSLAVILDHMDSLTQNECYAELVDTNPRLVVEIYETYIGRLLNTAGAF

SEQ ID NO: 185062 - protein, 414 aa, Glycine max
  Clone ID: PAT_MRT3847_138125C.1.pep
MGKRNEEVHFDQDALLDQALDALDEKRDSTRERALSVIIGAFSSKMQHQFVDKKFATLLHQCLALIKKGSKKASAKEIALTSHAIGLLSLPSGVVITAEESASSFLVSTMRFLTSKSHLTKIPSLLECLAIITFVGGNGLEETERSMDILWRVIHPRLGSNVVAVKPSAPLITAVVSAWSFLVSTMSDLKLNSKNWQNSISYLSSLLDKEDRPVRIAAGEALVVIFEIGIIEKFSADSKGASDMSQEEINLQESYTHLQGLKGKVITQVKNLSVEAGGKGSAKKDLNNQRNLFRDIVEFFECGYSPEISMKIGGDSLQTSSWSQMIQLNFLKHFLGGGFIKHIQENEFLQDVFNFKPKRRYLNNNEHRMSSGEKRMFKSPNSVQNKARTQLLNKQRLLSEGRNLGHYAANMVDD

SEQ ID NO: 185063 - protein, 123 aa, Glycine max
  Clone ID: PAT_MRT3847_138126C.1.pep
MGKRNSQRKNAAMLDSDDDSSSVSSSSTSRTDHISVSGNEEVHFDQDGLLDQALDALDEKRGSTRERALSVIIGAFTSNMQHHFVDKKFATLLHQCLASIKKGSKKASAKEIALASHAIGLLT

SEQ ID NO: 185064 - protein, 102 aa, Glycine max
  Clone ID: PAT_MRT3847_138127C.1.pep
SFEISFNNKIATHISTAQVSMCYSLLVYETTIHRCRLNSNQLPSTVLHQCRTLVLSTVSQADHNLHRSCTIRNVVAVSQTLLQTMPSHDFHSCTTAPVGHTR

SEQ ID NO: 185065 - protein, 94 aa, Glycine max
  Clone ID: PAT_MRT3847_138128C.1.pep
PPIPPPPPSPGLSPPPGFTQAPSAQSVPPPMYPIPPLTPRFFNPNHNRMFSGDNTMFKSPISVQTKASPQSLNKPRLLFEGTNLGPYPANMVDD

SEQ ID NO: 185066 - protein, 140 aa, Glycine max
  unsure (1)..(140): unsure at all Xaa locations
  Clone ID: PAT_MRT3847_138129C.1.pep
MGKRNSQRKNTAMLDNDDDSSSSVSSSSTSRTDHVSVSVSGNEEVHFDQDALLDQALDALDEKRDSTRERALSVIIXAFSSKMQHQFVDKKFATLLHQCLALIXKGSKKASAKEIALTSHAIGLLSLTVXCSDNAREIFE

SEQ ID NO: 185067 - protein, 86 aa, Glycine max
  unsure (1)..(86): unsure at all Xaa locations
  Clone ID: PAT_MRT3847_13812C.1.pep
MQDCSGTRDPHGEPLVTSYNRRFLGTVDYIWRSXGLQTTRVLAPISKHAMQWTPGFPTKKWGSDHIALVTELAFLKDSTDTSNDVK

SEQ ID NO: 185068 - protein, 58 aa, Glycine max
  Clone ID: PAT_MRT3847_138130C.1.pep
CCVSETLSLWSCWSYLLIFYEFLLCAAESLGIPLIKPHLGIKNFGGSGMDGMWKGEPI

SEQ ID NO: 185069 - protein, 63 aa, Glycine max
  Clone ID: PAT_MRT3847_138131C.1.pep
TWVNAMLRWIDTKHTVNLIIYPASGRKLLRSKDDNLGNTEGTSNVNERSCNVLRNTNIVFPRV

SEQ ID NO: 185070 - protein, 72 aa, Glycine max
  Clone ID: PAT_MRT3847_138132C.1.pep
DKRAVITPHLRFVGSPIRHHRQQKCCFRLVSGLVLPVDDALHTRGLLRPGFRAAVIYADHSSWNACSHRSAA

SEQ ID NO: 185071 - protein, 85 aa, Glycine max
  unsure (1)..(85): unsure at all Xaa locations
  Clone ID: PAT_MRT3847_138133C.1.pep
TLAGEIISEIGVQATAAKRFNLFTTHLHHVQNLTDKIHGTELDLDEYXHHNESVKHWTYTIYGKVTTRNDSITSVDEENNAISYN

SEQ ID NO: 185072 - protein, 57 aa, Glycine max
  Clone ID: PAT_MRT3847_138134C.1.pep
EGPYYFSERGSIIDLSPSSNGRNRFPSYNVEFITLNALLLDSNLTDWRHFIHKLTQD

SEQ ID NO: 185073 - protein, 70 aa, Glycine max
  Clone ID: PAT_MRT3847_138135C.1.pep
PNTFLSLFSISIENKNKQTFQPNTPYILSHQNPFLNLCQELCTRKKNPRRYKSIIYILFNLTIPDTKVKK

SEQ ID NO: 185074 - protein, 422 aa, Glycine max
  Clone ID: PAT_MRT3847_138136C.1.pep
GRVGAGFLLLGFIGVLIWCMRRQKRKLPVSGGYVMPSTLASSPESDSSFFKTHSSAPLVQSGSGSDVVYTPSDPGGLGNSRSWFSYEELIKVTNGFSTQNLLGEGGFGCVYKGCLPDGRDIAVKQLKIGGGQREREFKAEVEIIGRIHHRHLVSLVGYCIEDSRRLLVYDYVPNNNLYFHLHGEGQPVLEWANRVKIAAGAARGLAYLHEDCNPRIIHRDIKSSNILLDFNFEAKVSDFGLAKLALDANTHITTRVMGTFGYMAPEYASSGKLTEKSDVYSFGVVLLELITGRKPVDASQPLGDESLVEWARPLLSHALDTEEFDSLADPRLEKNYVESELYCMIEVAAACVRHSAAKRPRMGQVVRAFDSLGGSDLTNGMRLGESEVFDAQQSEEIRLFRRMAFGNQDYSTDFFSRASLNP

SEQ ID NO: 185075 - protein, 131 aa, Glycine max
  Clone ID: PAT_MRT3847_138137C.1.pep
PPRPPPSPPAPPPPPPPPASTPPTTPPPPHREHPPPPHPGAHPHPPPAQPPPPPRPTGPPPRAPKEPAPPAPPTTAKGPHSPPADCHPKTTRHSPARQIRTNTHDTTPSKTGNPSHGVASPLKENQLPNKR

SEQ ID NO: 185076 - protein, 73 aa, Glycine max
  Clone ID: PAT_MRT3847_138138C.1.pep
MSNVSCISMFTAPATMLLAKYTELTGNLPAIAAHCLQKLSSSNNKLILNCDHHTLNPIVEDSYAYCSSAKGSI

SEQ ID NO: 185077 - protein, 119 aa, Glycine max
  unsure (1)..(119): unsure at all Xaa locations
  Clone ID: PAT_MRT3847_138139C.1.pep
STGVSIRALYGARRVVQLATQLATHAIGASTVAATSRPTNLDLLNNLATDXAIDYSEDNPEDLPETYDAVYDAIRPCDTADNAIKDGXSTVALTRARTTAGFTFEVTSNGALLTKLNTY

SEQ ID NO: 185078 - protein, 175 aa, Glycine max
  unsure (1)..(175): unsure at all Xaa locations
  Clone ID: PAT_MRT3847_13813C.1.pep
ECGSRRKHKDASRDGSGSSRELEYEAKRIEKEKGPSSSDQRKQDMSYAEDAPAREEGLASMAAANSITNNTVSSTSGIANSDASTPPEDQNLSSMRNSPRNVSDDDTATAGRPVHRTLPXLINDIMSKGRRMTYEELCNAVLPHWHNLRKHNGEAYAYSSHSQAVLDWLRNRHEW

SEQ ID NO: 185079 - protein, 102 aa, Glycine max
  Clone ID: PAT_MRT3847_138140C.1.pep
AKRGVGPCLGFEPPKGSPRQPFTARKPFKPRKSKGPHNAQGSEGLQKRQGPQKKDGPQVHAPPQGGKIILAMEKMFPLSLKVAFFFWPPRVQGPTHFHRKKN

SEQ ID NO: 185080 - protein, 69 aa, Glycine max
  Clone ID: PAT_MRT3847_138141C.1.pep
SCIIFIQSVKNVIAKICNYHRVLYDKGCLHLSGSIFQLHSLVFEFKSRYITILDRRQDRSLFKCPEQGL

SEQ ID NO: 185081 - protein, 107 aa, Glycine max
  unsure (1)..(107): unsure at all Xaa locations
  Clone ID: PAT_MRT3847_138142C.1.pep
XXVVWTHPLPXLAXLSXXLXNCXLLVPXXILSNDPRTSQXXFHNXXYXTXDGSHWSRHXXHXXSXFHXFDXLXXXPXSLSXXCXXXXXXXPVXXIFSSRIPPYXXXX

SEQ ID NO: 185082 - protein, 157 aa, Glycine max
  unsure (1)..(157): unsure at all Xaa locations
  Clone ID: PAT_MRT3847_138143C.1.pep
KGRKKIXVVELVYGGMXXRDVXKXVEKEFEMGLXDRVMEEXKDKKNGVEGYVYEMKKKIFFFYEEXGVDXEREVFFATLQEAEDWLYEDGEDESKGEIIGKGEEVEKEGDPIEEGLKEYMERGEXIEKIGDWIKXYRESGMANDRKFDQNDINEETK

SEQ ID NO: 185083 - protein, 117 aa, Glycine max
  Clone ID: PAT_MRT3847_138144C.1.pep
MAKSCSLAMMLISAATVLVAMSRWPTAVGGGGDHHLGMGWASTCKGSIAECLGGEEYELDSEINRRILATNKYISYGALQRNTVPCSRRGASYYNCRPGAQANPYSRGCSAITRCRS

SEQ ID NO: 185084 - protein, 57 aa, Glycine max
  Clone ID: PAT_MRT3847_138145C.1.pep
CTFGSSAITTFDPSLSNVAVVVVSKKPSIHFREKQTPSSFLSFFRFSCFFFSALVTC

SEQ ID NO: 185085 - protein, 33 aa, Glycine max
  Clone ID: PAT_MRT3847_138146C.1.pep
ISIENNIYYLMHIKCLISALNPLGTENLNKPHW

SEQ ID NO: 185086 - protein, 71 aa, Glycine max
  Clone ID: PAT_MRT3847_138147C.1.pep
TSTFYNMENNTQYKIVGNLELVHHISTGWFSKDVTRFKTTHLQDYRHAAEQYSLQLTMNFMDNQAQYFDPT

SEQ ID NO: 185087 - protein, 82 aa, Glycine max
  Clone ID: PAT_MRT3847_138148C.1.pep
TGSFLTVLNFFRKTPASPLFLRLLPVLFNAGKMVFFFFPHFFCLPKICPINPTFPKKITFISPFWKPVGYFFLNKTDFIFLK

SEQ ID NO: 185088 - protein, 141 aa, Glycine max
  unsure (1)..(141): unsure at all Xaa locations
  Clone ID: PAT_MRT3847_138149C.1.pep
SPHLIFSLSIRAGGVGANFQSAHPVISFDPDWNPQXVDLRARARAHRIGQYRNVLVIRFNRIHTVEDLVRASAEHNLGVAIQSTTAGFFGNNTSAQDRREYLQALLRECKKKYAAPVLDDDALTDVLARSQSELDIFEAVH

SEQ ID NO: 185089 - protein, 331 aa, Glycine max
  Clone ID: PAT_MRT3847_13814C.1.pep
MEFSFDEKDFASCCGSTKFAKEMASASPFRSFQDAVSVAKGVWFNSVDVNGWLQAFSAHPQIGQTHAPSVASEASAQWSKGEQSTALATATGSSLQELSEWNARYREKFGFVFLICAAGRSTDEILAELKRRYTNRPIVEFEIAAREQMKITELRLAKLFSSRENISSTADKNSTARKAEDRISIISSHMTATSESSTGKSIQHPARTRPPITTHVLDVSRGAPAAGIDVLLEVWRGTQSQPTFGATGGGSWVFQGSSKTDSDGRSGQLLSIVDEASPGIYRISFNTGKYIPNGFFPYVSIVFEIKESQKREHFHVPLLLSPFSFSTYRGS

SEQ ID NO: 185090 - protein, 182 aa, Glycine max
  unsure (1)..(182): unsure at all Xaa locations
  Clone ID: PAT_MRT3847_138150C.1.pep
MASSDDEGEAQPLSVSNYHFEDNKDVPVCFSVLPIQWSESQSPVGKKMQVFLHGFVDNGLQKFFVQVVAWRFDLSYVRPEILVLSKDGRWIKLEKPRKSYEDTIIRTILITIHFLSYVKKNPDSSAKSVWDNLSKNKEFRSYEVMPSQNDLLNHMTXMGEAAKRDTALAKSKLLLMVLEDKG

SEQ ID NO: 185091 - protein, 43 aa, Glycine max
  Clone ID: PAT_MRT3847_138151C.1.pep
MESQVNHALLVKVMGRTGSRGEVRQVRVKSLDHQYRHITRTVN

SEQ ID NO: 185092 - protein, 79 aa, Glycine max
  Clone ID: PAT_MRT3847_138152C.1.pep
GKTRREGKGNKKSYVKTEAVQLCQFFRQKGTPPRFHPVVSKIHNGHPGVSVALSNKVARGKVFGCHQKFGSSNLTRKVC

SEQ ID NO: 185093 - protein, 143 aa, Glycine max
  unsure (1)..(143): unsure at all Xaa locations
  Clone ID: PAT_MRT3847_138153C.1.pep
RSSWCLSPWSWRWRPPCPCASSAATSSWRSTATDTTATPPRTRTSTWRATTPCPCTRSTSRSTTCLTTTTVTXAATATWRCPSTRTRVTSSGTRRTAAAWARPPTTAPPSPTAPTTARTRTRTRGRRPCPRTPTRPTKGHSAY

SEQ ID NO: 185094 - protein, 98 aa, Glycine max
  Clone ID: PAT_MRT3847_138154C.1.pep
MSTTESQRYKGTVKWFNEEKGFGFITPEDGGSDLFVHYSAIQTDGGFRTLSEGQSVEFLVTQDDSGRAAAVNVTTTTVKSSDSGNGENSGGDAANVEK

SEQ ID NO: 185095 - protein, 64 aa, Glycine max
  Clone ID: PAT_MRT3847_138155C.1.pep
LEELQFNLPIFTFGLKPHQPHHVSKDLLPCSLINYIISYLITTISSIIFHYIFIFCFCCSSLQQ

SEQ ID NO: 185096 - protein, 105 aa, Glycine max
  Clone ID: PAT_MRT3847_138156C.1.pep
SFFFFFWETKNYIFDKPKNRPVLRSQQTHLHNKLADPNKKNTKWHEALCDLAEGNYQGLRKRDKLPKTQGGGTQDVTHIEYSMPYLPIYKKETSLISWRLELAGM

SEQ ID NO: 185097 - protein, 69 aa, Glycine max
  Clone ID: PAT_MRT3847_138157C.1.pep
NHPFCSEARVSEDALGTSKGGVIANEVIDLWHCYVPKFLVVIQVFGVPPRYLFLRTLIILKKAKTKNNI

SEQ ID NO: 185098 - protein, 53 aa, Glycine max
  Clone ID: PAT_MRT3847_138158C.1.pep
SCPTNLPELSRGIPPLPRSRQLLYFHKDLMSEPKWHQALHGERGPKQRAKTYR

SEQ ID NO: 185099 - protein, 225 aa, Glycine max
  Clone ID: PAT_MRT3847_138159C.1.pep
MLAPIKVKNLLQYYIFAYVDAPGYQILKNFNIISTGVLYRIILKKRLSEIQWAAFVLLAAGCTTAQLNSNSDRVLQTPFQGWVMAIVMALLSGFAGVYTEAIIKKRPSRNINVQNFWLYVFGMCFNAVAILVQDFDAVMNKGFFHGYSFITVLMIFNHALSGIAVSMVMKYADNIVKVYSTSVAMLLTAVVSVFLFGFHLSLAFFLGTVVVSVAIYLHSAGKIQR

SEQ ID NO: 185100 - protein, 136 aa, Glycine max
  Clone ID: PAT_MRT3847_13815C.1.pep
ISTAKLIHHPARTRPPITTHVLDVSQGSPAAGIEVLLEVWRGTQSRPTFGASGGGSWVFQGSSTTDLDGRSGQLLSIVDDVNPGIYRISFNTGKYIPNGFFPYVSLVFEIKESQKREHFHVPLLLSPFSFSTYRGS

SEQ ID NO: 185101 - protein, 126 aa, Glycine max
  Clone ID: PAT_MRT3847_138160C.1.pep
MSSSSSKGGGGIEVRASHILIKHEGSRRKASWKDPEGRIIKSTTRENAVSQLKALRDDIVSGKASFEDIASRFADCSSAKRGGDLGPFGRGQMQKPFEEATFALKIGEISDIVDTDSGVHIIKRTK

SEQ ID NO: 185102 - protein, 126 aa, Glycine max
  Clone ID: PAT_MRT3847_138161C.1.pep
MSSSSSKGGGGIEVRASHILIKHEGSRRKASWKDPEGRIIKSTTRENAVSQLKALRDDIVSGKASFEDIASRFSDCSSAKRGGDLGPFGRGQMQKPFEEATFALKVGEISDIVDTDSGVHIIKRTK

SEQ ID NO: 185103 - protein, 161 aa, Glycine max
  unsure (1)..(161): unsure at all Xaa locations
  Clone ID: PAT_MRT3847_138162C.1.pep
RPPPFFASILGSFRLSPFLRFLPCSLRPPILPFWASCRGFWLPPARRATIAGTSAVPGPQHDVRRPRRVLGPASFSPPSHFCGLPLPPASVFFCPPFFFWVPPPLRKGILKFFSPPPFPPFPFFFGDFLFFLVQGPFFPYEAHNXFWFKKNGERHSRPPAG

SEQ ID NO: 185104 - protein, 78 aa, Glycine max
  unsure (1)..(78): unsure at all Xaa locations
  Clone ID: PAT_MRT3847_138163C.1.pep
LTLEDPPHSVADYASFATTHDGAERMCRISVLSTLLXTKIEQLLKATGFSSLLLIYANTYSLLFVNLFCFWHLYACIG

SEQ ID NO: 185105 - protein, 109 aa, Glycine max
  unsure (1)..(109): unsure at all Xaa locations
  Clone ID: PAT_MRT3847_138164C.1.pep
LGAFCWGSVCSPRGLPLSPRRPGGVGXCPCPWLRSFXCGPCFLLLLAVRVSSALSRGLCARVAVPVGVGLAASSSRPPPVFPFARGALYRWGGSARPFRSGPGWGLSFP

SEQ ID NO: 185106 - protein, 120 aa, Glycine max
  unsure (1)..(120): unsure at all Xaa locations
  Clone ID: PAT_MRT3847_138165C.1.pep
WGSGTPNPATDAHAICFQICLIIGHPLNHHLIAVVPNAPVISSPSENAXIWVALKVAHLHPQRYLFFEESVRTPQAAARVGLHTVQVGKSQGISGPDIAVRSILSHRGAVPVLWEDDIQS

SEQ ID NO: 185107 - protein, 155 aa, Glycine max
  unsure (1)..(155): unsure at all Xaa locations
  Clone ID: PAT_MRT3847_138166C.1.pep
MFVLAQCLLRSQANCLKVVGLCGEALVDAIICGMKETGLSSKXIGNNHGSLSGEACQSALITRWAGHIKFWKQGIDRILLNLXIENIQDQLSKPVLSLKKQISMVKEGLKANYHLGLGSYLXDILGWLTIHCGENLNPHTHGSELCINLLITCAL

SEQ ID NO: 185108 - protein, 75 aa, Glycine max
  unsure (1)..(75): unsure at all Xaa locations
  Clone ID: PAT_MRT3847_138167C.1.pep
KLREFGLGGQGFWXAGGHLXXPGLFRVDDXSAFYAFSLSVRACGLSICWDASESESAIPIGGRRAGGDTTAPWGG

SEQ ID NO: 185109 - protein, 125 aa, Glycine max
  unsure (1)..(125): unsure at all Xaa locations
  Clone ID: PAT_MRT3847_138168C.1.pep
QNFGLELNLSLDSCPPAHDIITELPDFSYYRSXNTDFSWLXNIFLDCADQIYYASLIAELHEKDLSEKDTYXNFGSINFLYIETINLTFPXECPTFVSCTDILLLSAKHGIVSLRRPPIPLTTGR

SEQ ID NO: 185110 - protein, 144 aa, Glycine max
  Clone ID: PAT_MRT3847_138169C.1.pep
MTGKRNQITTSPVGSPTSGNISDSSSSKEQDRFLPIANVSRIMKRALPANAKISKEAKETVQECVSEFISFITGEASDKCQREKRKTINGDDLLWAMTTLGFENYVGPLKFYLNNYRETEGEKSSMAKQEEHSPTHQTNIDGGG

SEQ ID NO: 185111 - protein, 124 aa, Glycine max
  Clone ID: PAT_MRT3847_13816C.1.pep
MEFSFDEKDFVSCCGSTKFAKEMASASPFGSLHVAVSVARDVWFNSVDVNGWLQAFSAHPQIGQSHAPSVASEASAQWSKGEQSTALATATGSSLQELSEWNARYREKFGFVFLICAAGRSTDE

SEQ ID NO: 185112 - protein, 54 aa, Glycine max
  Clone ID: PAT_MRT3847_138170C.1.pep
TVNSSRISSFPNCIHLLCKFLLFVDSIFHVNSFIHKLLVSFQIVRPHNDTLDPG

SEQ ID NO: 185113 - protein, 92 aa, Glycine max
  unsure (1)..(92): unsure at all Xaa locations
  Clone ID: PAT_MRT3847_138171C.1.pep
XSXEREQGXXDFGIRRFIXXXKRLGLGXLGLHSXTKLSIQIGQKGSDSSEHVIXXXHTWQKNXFAPPPXPPEDXMLRRCRYRRXQSQHKLLL

SEQ ID NO: 185114 - protein, 73 aa, Glycine max
  Clone ID: PAT_MRT3847_138172C.1.pep
CNPIIIVEYFSSFIKPSHLTPPKRRGVTPSPPFIVGHDSFFSADHLSHVHVPTAAAKQIPCHLVVVSLCGRVV

SEQ ID NO: 185115 - protein, 46 aa, Glycine max
  Clone ID: PAT_MRT3847_138173C.1.pep
NYMYMTQKALYFLLSEGTIISLNFYALLYNFTLDIIYKSKKLIIFL

SEQ ID NO: 185116 - protein, 77 aa, Glycine max
  Clone ID: PAT_MRT3847_138174C.1.pep
IWGVHLKYFLVFTTPGCKQQGDDPTCKLQMLDHSRNTRAHKKHRNRPQTGLWGVIRCDNKEKSLLYINLEAPEPTPL

SEQ ID NO: 185117 - protein, 67 aa, Glycine max
  unsure (1)..(67): unsure at all Xaa locations
  Clone ID: PAT_MRT3847_138175C.1.pep
PTRPPTRPPTRPAERXHKHGYTRLTSLKTSLLMTRRFCLRMVVVVTSSSIFKLYATCNTILSLIKNI

SEQ ID NO: 185118 - protein, 123 aa, Glycine max
  Clone ID: PAT_MRT3847_138176C.1.pep
MEDSAPQPKPILQKPPGYRDPNSKPPPPPPRKLMLPPSFQPKRKRRNFCRICCCTFCILILILLLVLVIAAALFYLIYDPSLPEFHLGSFRVPKLNVTNAADGAYLAADTAARVEVKNRSGRM

SEQ ID NO: 185119 - protein, 104 aa, Glycine max
  Clone ID: PAT_MRT3847_138177C.1.pep
IGKGFNFSARLSLLKSTPGFGPGLKSEKKLWVKCFPKKKKRGGVKGPKKVLRLGGLRISPKGNGRLWFQVPPFQFPGGGPSPGTLISCCQRRFFLFKKGFVFVP

SEQ ID NO: 185120 - protein, 90 aa, Glycine max
  unsure (1)..(90): unsure at all Xaa locations
  Clone ID: PAT_MRT3847_138178C.1.pep
GKFPFLAKTTPKSIHKDQGLVEILVXKKTIIILGVRNWAPHSGELFHKAPRALQVNAPREANARVFHAHPPISEGVKKPPRPPYYKPLPL

SEQ ID NO: 185121 - protein, 38 aa, Glycine max
  Clone ID: PAT_MRT3847_138179C.1.pep
AATRTPTRSVFFFVILTLCREPSIVIALVILHVICLQY

SEQ ID NO: 185122 - protein, 364 aa, Glycine max
  Clone ID: PAT_MRT3847_13817C.1.pep
MMNGRNRFPFTPSQWQELEHQALIYKYMASGISIPPDLLFTIKRSYFDSPLSSRLLPNQPQHFGWNYLQMGLGRKIDPEPGRCRRTDGKKWRCSKEAYPDSKYCERHMHRGKNRSRKPVEVLKTTTPSSTMTTTNTNSNASSTQQAISSITKINTLSPLASSETHQHHPQHYGSFLYHHHPPSYGSEKTTEGEDNSAPLFLDTGSCSQSNTDCRSRYVYGEKEEVDEHAFFTEPCGVMKSFSASSMDDSWQLTPLTMSSSSSSSKQRSSFGLSSDYSCLQLQSHSKQQQEHHQDQGCYMFGAGQVVKEEPQKTVHRFFDEWPHKGREGSWLDLDDKSSTTQLSISIPTSSHDFSTFSSRTHHDG

SEQ ID NO: 185123 - protein, 61 aa, Glycine max
  Clone ID: PAT_MRT3847_138180C.1.pep
KRKQPFSTFKKIYSSNPHETPLQKRLDTNQSLKVHLITHFLKINKPTEAYSNTRTFYSFAT

SEQ ID NO: 185124 - protein, 142 aa, Glycine max
  unsure (1)..(142): unsure at all Xaa locations
  Clone ID: PAT_MRT3847_138181C.1.pep
FSFGIDAIEDVLYHIETYDVTTIXACTPICLMSRLIKSLGVKWVIPREGSSEIFGGYLYLHKAPYKEEFLREPCLWIKALDHYDRLRANRSTFGWGLEARVPFWDKACINAAXEFSPEWNMMKRDXGRIEKWVLRRAFDDEE

SEQ ID NO: 185125 - protein, 109 aa, Glycine max
  Clone ID: PAT_MRT3847_138182C.1.pep
TSLLMSKTPGFVTTHKCNTCRRKWLKPTSCALYTSSKDFCWIFSFSVVVSYLSFSTTAKENRSLATSPSRDLTKASALAARVSNPLASMVRASTWSSKLLLSSTSFMFA

SEQ ID NO: 185126 - protein, 76 aa, Glycine max
  Clone ID: PAT_MRT3847_138183C.1.pep
KYDQLPISSCFTTFIYICKKVVNGIRSINNPISHQNIMLSIIVYIVFFLNQWIMQLLHMTHAVGFPNHMDHASKPF

SEQ ID NO: 185127 - protein, 69 aa, Glycine max
  Clone ID: PAT_MRT3847_138184C.1.pep
AFPGAMGYFLAVGNADNMRPMWLPIVGASFNMSSPFQVRGGSGHLFTLTLQWQNVVYVPKDCGVMIYQV

SEQ ID NO: 185128 - protein, 42 aa, Glycine max
  Clone ID: PAT_MRT3847_138185C.1.pep
KSIITMIKLSSSKLNARNKQVTVTAIHYLAGFFYHREDQIRA

SEQ ID NO: 185129 - protein, 130 aa, Glycine max
  unsure (1)..(130): unsure at all Xaa locations
  Clone ID: PAT_MRT3847_138186C.1.pep
AGPGPISGWSYTRALSPKAAGVNATCVRGRGGLPTTXWIKSGIKNGFLWIIERIHTKLGKGKKXMVVTEKXPLSVDRLGGXFGKINETMGCRSTNPMLTRLLVNCTSFKDLFEECPFAFADSDEALQSLN

SEQ ID NO: 185130 - protein, 368 aa, Glycine max
  unsure (1)..(368): unsure at all Xaa locations
  Clone ID: PAT_MRT3847_138187C.1.pep
MMLGGATARGVSLIKLLPLFRFRFKHSSALSKTICFQVYSTEASSGIERVTHQVLKEFLATVENAPTSNAKVYYAYIDKICKPGNLSVASKMLQILNDKSIAVTLNVYNFILVEASQKNDIDLSCQVFXKLLLSCKSPSATSCLKFAQAFKNXDCVKLLQFLEVISVITCSSISSFINKIIFAFAKCGQRDKSLVIFDHLKRQGYGLDLVTYNIVLDILGRTGRMDEMLDVFASIKDTGFVPDTVSYNTLINGLRKAGRFDMCFVYFKEMTEKGVEPDLLTYTAIIEIFGRSGNVEESLKCFREMKLKGVLPSIYIYRSLIHNLNKTGKVELATELLKELNSSSTCLAGPADFKQKRKQRNPLKVFSF

SEQ ID NO: 185131 - protein, 139 aa, Glycine max
  unsure (1)..(139): unsure at all Xaa locations
  Clone ID: PAT_MRT3847_138188C.1.pep
RACAVVGLTSTYTPTTLLGSDLHYDSWPLAEYIGRMSNVLITLYTPIERFXREGNIYSDIKSRSRLKKVSCTKAQFVSGKTFTIDIIVAGSHSTQDFPDKVDQEKPKXTRARLRQRIYPQYNEVQAQMETNXFKLSLDD

SEQ ID NO: 185132 - protein, 85 aa, Glycine max
  Clone ID: PAT_MRT3847_138189C.1.pep
GKEKVSKEKKNGRKKKKKKKKKKTKKIFFKKKKGRKKLGGKKIMPTPRKSKAGTKNAQKGGKKASPKGGEGHPKKKNGPASRRKE

SEQ ID NO: 185133 - protein, 148 aa, Glycine max
  Clone ID: PAT_MRT3847_13818C.1.pep
FFFFFFFFFFFFFFFFFFFFFFFLRTQPKPSPTKKKRKKKKKNPKKKRKGKGKQKQSPCSLDREPDKKEPPPPEMEIWGGPPPPQRQNTNTGKSKSQRRAPARWPGAPTPSPRAGGKKNFWEREPFAFLDKGEGAQPHRFWGGQEQKP

SEQ ID NO: 185134 - protein, 118 aa, Glycine max
  Clone ID: PAT_MRT3847_138190C.1.pep
ESLVKGHLCKLSSINKWCWWRVLVVLPREEATLSNLNVISHTTFLPKHALQGTKCVREGKEQRKEETLMMGKCVWKRVRREGVYMLVQPGAHSGLDQDQFLFFYFKFFLKTLFFPSNI

SEQ ID NO: 185135 - protein, 45 aa, Glycine max
  Clone ID: PAT_MRT3847_138191C.1.pep
NDGTKKYEKAVNILVTYWLVGREITIPPAEASHSRGSYGSSDAPT

SEQ ID NO: 185136 - protein, 72 aa, Glycine max
  Clone ID: PAT_MRT3847_138192C.1.pep
FILGGDEHPCTRWGKYAQHSILLSESSPVTHFYQPELLLLYSTSTLIISSKSIGKEVSVIICLTPVKYSSCA

SEQ ID NO: 185137 - protein, 34 aa, Glycine max
  Clone ID: PAT_MRT3847_138193C.1.pep
PRRGAALLHHCFTLWSSMWIVRSPTDHWLGENGC

SEQ ID NO: 185138 - protein, 76 aa, Glycine max
  Clone ID: PAT_MRT3847_138194C.1.pep
FRVGIGTCIAFTEQEAAVVHEETGPSEVNIFSGTRLIDSSQAPTTQVKPVCQLHKVLKFKLSPDSEIQNVTAKEAK

SEQ ID NO: 185139 - protein, 93 aa, Glycine max
  unsure (1)..(93): unsure at all Xaa locations
  Clone ID: PAT_MRT3847_138195C.1.pep
FCSNTGYPPXHIVGNVTIDGRRNAIFLSVSIELQQRALVMRRSKCGTKRMQKGGISEVRASKGCNKHLLGFSHFIICKFCASFCLVFFSSSGF

SEQ ID NO: 185140 - protein, 87 aa, Glycine max
  Clone ID: PAT_MRT3847_138196C.1.pep
QSRSRKQLSDKSAEQGSWIADGRKALTQRAGEFLRNMEQDLDAIAKEYSSLQEGFISQLPVQQHVDLKFLFFRLDFNEFYRRLCPSM

SEQ ID NO: 185141 - protein, 58 aa, Glycine max
  Clone ID: PAT_MRT3847_138197C.1.pep
YQLILLRHLQLCNFMLAQSLDLFHSSVIRSRCYKKISESIESGNKFNSKYFFGSWERK

SEQ ID NO: 185142 - protein, 80 aa, Glycine max
  Clone ID: PAT_MRT3847_138198C.1.pep
VLPWGIFGYDLIPLSGFQWDRLGCCLGVLFCVFYFSSASFFFSFCSFFRAFKMLRPVGGSHYILSCLSWLIFLGLGYFFG

SEQ ID NO: 185143 - protein, 193 aa, Glycine max
  unsure (1)..(193): unsure at all Xaa locations
  Clone ID: PAT_MRT3847_138199C.1.pep
MKLINKPSQLRSLLSLFCSILLLLELAFVAAEDPYRFFDWTITYGDIYPLGVXNRGILINGQFPGPEIYSVTNDNLIINVHNNLTEPFLLSWNGVQQRRNSYQDGVYGTTCPIPPGKNFTYTLQVKDQIGSFFYFPSLAFHKAAGGFGAIKILSRPRIPVPFPRTQLVISSFLIGDWYQINHKKLQSVLDFGH

SEQ ID NO: 185144 - protein, 143 aa, Glycine max
  Clone ID: PAT_MRT3847_13819C.1.pep
MMNGRNVDTNRFPFTPSQWQELEHQALIYKYMASGISIPPDLLFTIKRTTHLDSSRLLPQHFGWNYLPMGLGRKIDPEPGRCRRTDGKKWRCSKEAYPDSKYCERHMHRGKNRSRKPVEVLKTTPMTAATNTDASTPTTILSI

SEQ ID NO: 185145 - protein, 67 aa, Glycine max
  unsure (1)..(67): unsure at all Xaa locations
  Clone ID: PAT_MRT3847_1381C.1.pep
MVMINMVIVLLVATMHGTWLWHAYYILTLTMNTPYRVXSKDVKCSPWRMAVVTHIIFGSPTITKKCL

SEQ ID NO: 185146 - protein, 41 aa, Glycine max
  Clone ID: PAT_MRT3847_138200C.1.pep
NFYVMYPNLVGYCTHIGVGVMKLKSHTSQRRSLSLKTHVHA

SEQ ID NO: 185147 - protein, 70 aa, Glycine max
  Clone ID: PAT_MRT3847_138201C.1.pep
IRECFLWDSIFFFFIQYEVCFGLISVLMLFFNWDCFRLGLWNGGICMCFMVFWVKAGFGCSYEKVSLILR

SEQ ID NO: 185148 - protein, 78 aa, Glycine max
  unsure (1)..(78): unsure at all Xaa locations
  Clone ID: PAT_MRT3847_138202C.1.pep
MEDVITEAAPPSRFLEEDLNIFTPPSPALPKPFLIFPHNIRGGXXXXLIXXXAPSSLARCNETLTANAEATRLRMSPG

SEQ ID NO: 185149 - protein, 37 aa, Glycine max
  Clone ID: PAT_MRT3847_138203C.1.pep
RNVRSKRLGPYRLDLNVHTHWLSVSYTRWHLYFPKLL

SEQ ID NO: 185150 - protein, 36 aa, Glycine max
  Clone ID: PAT_MRT3847_138204C.1.pep
GPIDIYVFALFNENVKPGPASERNYGLYYPKGSPVY

SEQ ID NO: 185151 - protein, 86 aa, Glycine max
  unsure (1)..(86): unsure at all Xaa locations
  Clone ID: PAT_MRT3847_138205C.1.pep
ESVSQPAFSIIKSTITKPSSKLLPSSFLLKTRSPVTARWVGGELGCLQSLLPLHSAVSSARLTSCLGIDXSRSRSLSQEMGLSTPR

SEQ ID NO: 185152 - protein, 431 aa, Glycine max
  unsure (1)..(431): unsure at all Xaa locations
  Clone ID: PAT_MRT3847_138206C.1.pep
MGNEESTHDSHDDFFRQPRSHDGSSPNTSHQYHQPPSYDGSSANTSHQYHQPSSYAGSSVNTRHQYKQRPTYIADSFSSLDQXYCTQVVSALREAGLESSNLIIGIDFTKSNEWTGKHSFNHKSLHFTGNTPNPYEQAISIIGRTLSSFDEDNLIPCFGFGDASTHDQYVFSCYPDECYCHGVEQVLARYREFVPRLLIXGPTSFAPVIDAAVGIVERSNGQYHVLVIIADGQVTRNSDTPHGKFSPQEQATINSIIAASHYPLSIILVGVGDGPWDEMQHFDDNITQRLFDNFQFVNFTKITSENKDASKKEAAFALAALMEIPIQYRITQNLQIANENPTSHQRKRPLPPPKEVIDRDNAVLAVPHVPNFESVEPSAPAAVESVCPICLTNPKDMAFGCGHTTCKECGVTLSSCPMCRQEITTRLRLYT

SEQ ID NO: 185153 - protein, 152 aa, Glycine max
  unsure (1)..(152): unsure at all Xaa locations
  Clone ID: PAT_MRT3847_138207C.1.pep
MSDLILMREIVITVFLFIGAATADDASVEANDYPKLKKLRTDCTGHVGETCCSTTSCRGSELFKQKQDGEALRLWDSMERSLIDHHTYVGTLGDLITHAPFPPRPAVDPNIIPLARPSKIVSFIKRRRSKLDNSXTDAGTFGKVITHSPIRA

SEQ ID NO: 185154 - protein, 81 aa, Glycine max
  Clone ID: PAT_MRT3847_138208C.1.pep
GNYQWRDYHTLFLPLIYTLRIEPDIVALPLSLITLLPFYTLQTTRANLVPATYFRCGTRIQESESPTPHSQLMFHVLKPLS

SEQ ID NO: 185155 - protein, 78 aa, Glycine max
  Clone ID: PAT_MRT3847_138209C.1.pep
GGSVMPAEKKVVTFLLHSVSPSKGCILAGGMIRHTCMGWNVVPNHIQNDGLQCLKSQSLNVPNISWKHILLLRFMLGV

SEQ ID NO: 185156 - protein, 260 aa, Glycine max
  Clone ID: PAT_MRT3847_13820C.1.pep
RGTRTPSAEQIQQITAQLRRFGKIEGKNVFYWFQNHKARERQKRRRQMESAAEGHHTRDFDSTLEKKDLGASRTVFEVDQTKNWAPSTNCSTLAEESVSIQRAAKAAIAECRTDGWLQFDEGELQHRRDFMERNATWHMMQLSCPPPPTVSPHLINTSPITSTTSMATATTVTARLMDPKLIKTHDLSFFTSPNRENGIIHLSSISTQDDNSVESQTLQLFPTRNADRSSDNINQQKETEVSVSAMNAPSQFFEFLPLKN

SEQ ID NO: 185157 - protein, 99 aa, Glycine max
  unsure (1)..(99): unsure at all Xaa locations
  Clone ID: PAT_MRT3847_138210C.1.pep
MEVLAGALHSITSKCMVLLVTVLILRALLFASFPGFGGIEWGNLVYLRAPLLNFDFGIRQDKFLVVPQLVWGXNKPEIAFARACLTXRLLNRTLXMPSL

SEQ ID NO: 185158 - protein, 60 aa, Glycine max
  Clone ID: PAT_MRT3847_138211C.1.pep
GWLCVHGCLVIQVPLTVPDRCFCFNIVSTPCMLRCSAWALLFRCISQFSIVFLVEHCLRQ

SEQ ID NO: 185159 - protein, 85 aa, Glycine max
  Clone ID: PAT_MRT3847_138212C.1.pep
HSQVSDQSVVHFALDTIHPVHVALTLHHARLPRVHAFLGAGLNLGAQALIRCWWVSHDNSSPRNELVHQSTAVVITKLVCNNSIK

SEQ ID NO: 185160 - protein, 74 aa, Glycine max
  Clone ID: PAT_MRT3847_138213C.1.pep
MLSIKKKKKKKKKKKKKKKKEKKKKKKKKKKKGKPKKKKKKKKKKKKKKKGGAFLKDQILLPGAGKEKFFFWGP

SEQ ID NO: 185161 - protein, 105 aa, Glycine max
  unsure (1)..(105): unsure at all Xaa locations
  Clone ID: PAT_MRT3847_138214C.1.pep
YSVKAKIQDKVRIPPXQQRLIFAXSELKDGRTLADYNIQKETTLHLDLHVRGGMQIWVRTLTANTITEQGYNSNTLDNILNEIEDEEDGSCIWRTLMILVKMLLN

SEQ ID NO: 185162 - protein, 50 aa, Glycine max
  Clone ID: PAT_MRT3847_138215C.1.pep
KQLVTAKQHRPWPKKSSHHIRPKHIAIRDHCVREAEALGRSVPTTAQQKI

SEQ ID NO: 185163 - protein, 114 aa, Glycine max
  Clone ID: PAT_MRT3847_138216C.1.pep
MADKQPHLNGAYYGPAIPPAEQPRYRPHSHRGRSCCCCLFGILWKILVALIVLVGLAVLIFWLVVQPRSFKFHVTEADLTQFDYYTNNNTLHYNMVLNFTARNPNKKLIIYYDK

SEQ ID NO: 185164 - protein, 154 aa, Glycine max
  Clone ID: PAT_MRT3847_138217C.1.pep
MADKQPHLNGAYYGPAIPPAEQPRYRPHRERSCCCCLFGILWKILVALIVLVGLAVLIFWLVVQPRYFKFYVTEADLTQFDYYSNNNTLHYNMVLNFTARNPNKKLSIYYDKAEALAFYEDVRFANYSVITPMNSFRQYKKSSSTMSAVLSGQQ

SEQ ID NO: 185165 - protein, 81 aa, Glycine max
  Clone ID: PAT_MRT3847_138218C.1.pep
PQLMQHLQKPSSIIRKGVVRRRVDSRQRMPPLLEKGSAKEIRTRSDVSICYAEGFDPRAEIPGRIFEREDRRLSMSRYRLL

SEQ ID NO: 185166 - protein, 58 aa, Glycine max
  Clone ID: PAT_MRT3847_138219C.1.pep
KKRGKKNNPFLSIMGSPTQPRFLTQPGKTHHGGGGLQDYIWGQKLFFKPFSLSLFRGP

SEQ ID NO: 185167 - protein, 79 aa, Glycine max
  unsure (1)..(79): unsure at all Xaa locations
  Clone ID: PAT_MRT3847_13821C.1.pep
XXXXXYIFFFFFFFPPAPLLGAHIIKRSFFIKNPAPTTFYKLCPRGIIKKQNGGEKFCGSSKSQRGIFFFGGPFKTHGG

SEQ ID NO: 185168 - protein, 119 aa, Glycine max
  unsure (1)..(119): unsure at all Xaa locations
  Clone ID: PAT_MRT3847_138220C.1.pep
VLSAGSHAGLADDGLRILDTLVKVHGFVPSEDHFSRLGDLWVRNEYLDEAERVIKSGYFGAHCNICCSXISACAAHGNVGLGRTAARLILERDHTNASVDVLVSNICAADDQWEDAANL

SEQ ID NO: 185169 - protein, 134 aa, Glycine max
  Clone ID: PAT_MRT3847_138221C.1.pep
EKLARAQYLKNKNPKDCALLYIALNRVQVLAGLFKISKDEKDKPLVGFLSRNFQDEKNKAAALKNAYVLLGKHQLELAIAFFLLGGDHSSAINICAKNLGDEQLALVICRLVEGHGGSLEHHLITKYVLPSAID

SEQ ID NO: 185170 - protein, 125 aa, Glycine max
  Clone ID: PAT_MRT3847_138222C.1.pep
VNNGIPQQKARDTCQKEGRSLVSIHDQEKELFVNGVVSIFGNKKKYWIGYQNDGTRWNWDDKSTNPFTDWDNANGQPNTNGGKNMCAYALQGTGFNVKWTAANCAAGGIIYVCESAPCSIGNKNC

SEQ ID NO: 185171 - protein, 75 aa, Glycine max
  Clone ID: PAT_MRT3847_138223C.1.pep
KITFISGWVFFTNTRLILFLLFYTLSSKNHHCPGDAETKKITSSQAPGLILEKKMPLLIERRHRDPQSLKPFYRG

SEQ ID NO: 185172 - protein, 94 aa, Glycine max
  Clone ID: PAT_MRT3847_138224C.1.pep
MANSHYSKTLHLPCKAFSLAILLAFLLLVGSCTATRTGATMRLNEGSELLRPKQQKPRFPYKGLVFNFFPKGVPIPPSGPSKRHNSLVASTPQN

SEQ ID NO: 185173 - protein, 94 aa, Glycine max
  Clone ID: PAT_MRT3847_138225C.1.pep
HARSLLMLLAGLSPAVTEYAAFPAPGVGVAPFWPSSGCVDYVHGGRNLLCALHSPLLCWSASSCCCGTVRSYVGFFHFRLHIASYSYWSSSCTC

SEQ ID NO: 185174 - protein, 339 aa, Glycine max
  unsure (1)..(339): unsure at all Xaa locations
  Clone ID: PAT_MRT3847_138226C.1.pep
ATAIVKKLASMNLANVLVTRKNTSDTDSYYYNNHFIILHDILRDFAIYQSNQEQVEQRKRLMIDITENKPKWWPREKQQGLMIRVLSNIFGWRVEQKPQQIPARALSISTDETCTSYWSHLQPVQAEVLILNFQTNQYTFPKFLKEMSKLKVLTVIHHGFHPSKMNNFELLGSLSNLKRIRLERILVPPFVTLKNLKKLSLFLCNTRQAFENGNMLISDAFPNLEDLNIDYCKDLIELPXGVCDITSLKMLSITNCHKLSALPQQFGNLENLKLLRLSSCTDLQEIPNSIGRLSNLRHMDISXCINLPNLPEDXGNLCNLRNLYMXKCPKCELPPLIII

SEQ ID NO: 185175 - protein, 65 aa, Glycine max
  Clone ID: PAT_MRT3847_138227C.1.pep
NSFPLLHKKKKKNIKKKKKKKKKKKKKKKKKKKKKKKKKKKKKKKKKKKKKKKKKKKKKKKKKKK

SEQ ID NO: 185176 - protein, 76 aa, Glycine max
  unsure (1)..(76): unsure at all Xaa locations
  Clone ID: PAT_MRT3847_138228C.1.pep
TDFILRITYPTIRXLADSTVVKLVRDLIYKYTCIVLNICLNNVFLDAVTYTEHACRXTVTAMDVVYALIKQGNTLY

SEQ ID NO: 185177 - protein, 64 aa, Glycine max
  Clone ID: PAT_MRT3847_138229C.1.pep
THTHTHTHRWGLGTALHTIHSGHFPQRHPSLGASGELRARGYSDGAQMDWEEGEGDALINGFVN

SEQ ID NO: 185178 - protein, 147 aa, Glycine max
  Clone ID: PAT_MRT3847_13822C.1.pep
MAVPLQLRCYYFNVSRGLHLHVIGSASSNVFSSQALHQTVSIHSQPQAPFNFNFNLDDPTLPKFLELLKKVAHSSPQAEGLHLSGFQANRDLICSAIWALREEWKPALLAFKWNCHGNDEKVCNLMIWVLTTHGKFSTAWCIIRDMH

SEQ ID NO: 185179 - protein, 49 aa, Glycine max
  Clone ID: PAT_MRT3847_138230C.1.pep
PGNVTSRPNYYNCGLLLALPYPVSHWALANSSHRLLSSIPLYTSPTRTP

SEQ ID NO: 185180 - protein, 112 aa, Glycine max
  unsure (1)..(112): unsure at all Xaa locations
  Clone ID: PAT_MRT3847_138231C.1.pep
MLWRRNNAGVHCVGSLTKVPFSVIQNTFDNNVFGDXAMRMIRLVVPHMATWKQGKILNIGGVSALASGLWSGTYNASKAALHAFTDTLRGFSSSSSSSSNLPYSTCTLHESC

SEQ ID NO: 185181 - protein, 217 aa, Glycine max
  unsure (1)..(217): unsure at all Xaa locations
  Clone ID: PAT_MRT3847_138232C.1.pep
YIHARGHVLFCNECLQFQATLLLQQCSPCFALIGGLLVYLYAPYCRIMKXPGPPSLPLXGHLPLLAKDGPDVFSYLANQYGPIDRFHMEKXPLMIIAYXTFVRTVXIDNCQELSHRRSSSPPSASPLRQKRLCLLSSIHNEATMXNPILSLLLPSYLSRSLPTRLSYXESATQELESHKEDIXFSNLSLRLATDVIEHAAFGVHFGLSRPHSALDSI

SEQ ID NO: 185182 - protein, 142 aa, Glycine max
  Clone ID: PAT_MRT3847_138233C.1.pep
NNIVTATTMNSQHSSRDISLIQNQLHDLHPSTVSMVTTDTCHTSNVLQGFGNFSMASDLACVNQQQQIDGSMRVFYGLETMDVATNGSTNTSTSTESISWGDISSLVYSPLLVSDYEACQQRLLMPQDVTFEESSYFAMQTQ

SEQ ID NO: 185183 - protein, 324 aa, Glycine max
  Clone ID: PAT_MRT3847_138234C.1.pep
TRLIDCVSFCHNKGVFHRDLKLENVLVDAKGNIKITDFNLSALPQHFREDGLLHTTCGSPNYVAPEILANKGYDGATSDIWSCGVILYVILTGYLPFDDRNLAVLYQKIFKGEVQIPRWLSPGSQNIIKRMLDANPKTRITMAMIKEFGSSKEGYTPANPEDEEESVYIDDEDFSIHDVSHEADQGCPRSPTLINAFQLISMSSSLDLSGLFEQEDVSERKIRFTSIHSPKDLVERIEDIVTEMGFRVQKKNGMLKVIQEIKVQKCPGSFSVEAEVFEISPSLYVVELSKSCGDASLYRQLCKKLSNDLGVHTRQQLGSSEVMA

SEQ ID NO: 185184 - protein, 94 aa, Glycine max
  Clone ID: PAT_MRT3847_138235C.1.pep
MKDFENFMSLCRGGKKLNHASTIAGSPKLGTYETDFGWGKPKKCEILHIEYSRTISLSDSRDEEGGVEVGLALGRAQMSKFSAILEEYLRNIAI

SEQ ID NO: 185185 - protein, 35 aa, Glycine max
  unsure (1)..(35): unsure at all Xaa locations
  Clone ID: PAT_MRT3847_138236C.1.pep
PGXWWSVSNFWKHCTCLPGISVNHVWACSRYVGIT

SEQ ID NO: 185186 - protein, 110 aa, Glycine max
  Clone ID: PAT_MRT3847_138237C.1.pep
DFSEREDQEIPKKIDARLRQRIHPQYNEVQAQMETNLFKLSLDDVETSKGSMLDLKKAQSKRALPKNTLGGTILRWDLLANFLTGGNSRASVDLQGTHRVKGMIQMVATD

SEQ ID NO: 185187 - protein, 209 aa, Glycine max
  Clone ID: PAT_MRT3847_138238C.1.pep
RIHLIGGAMKPTTDGRWAHLACAMWIPETCLADVKRMEPIDGLSRISKDRWKLLCSICGVSYGACIQCSNNSCRVAYHPLCARAAGLCVELENEDRLYLLSVDDDEDQCIRLLSFCKKHRQPSNEPSVADERMVRVAGLCSDYEPPPNLSGCARSEPYDYFGRRGRKEPEALAAASLKRLFVENQPYLVGGYCQHGSLNNLEPSAEESA

SEQ ID NO: 185188 - protein, 88 aa, Glycine max
  unsure (1)..(88): unsure at all Xaa locations
  Clone ID: PAT_MRT3847_138239C.1.pep
SSELSRADLDSTRYVMKSEPCDGKLALEDPENRQCLQYXTDQAREGKQMDKLNNMLYAFMASGRHVDLSQVTGKEHMDGQPSKEGRGR

SEQ ID NO: 185189 - protein, 129 aa, Glycine max
  unsure (1)..(129): unsure at all Xaa locations
  Clone ID: PAT_MRT3847_13823C.1.pep
MGSSSSMWTVSVNVASLSCAALCANPRRPVDAQFGRNYVPRLAFDQFXYVKGGYCIQFHLDKDTGTGFHCQRAYLFGHLRLVTKMDAGDSAGTNTCLVIIFPNTEHEXIDFEYLENRTRQPYIVQTHWF

SEQ ID NO: 185190 - protein, 66 aa, Glycine max
  Clone ID: PAT_MRT3847_138240C.1.pep
QSETRKGHDMITAVTARAVTYLLKIQAVSQVRAQGQGPLVLQLRPRPQLNGVGSSVPPHVGITQAI

SEQ ID NO: 185191 - protein, 56 aa, Glycine max
  Clone ID: PAT_MRT3847_138241C.1.pep
PIAHLVFLTLMNNLLRGFSLAYALVTNARQPYTSFTLISETTYLLINLRSYLYFLQ

SEQ ID NO: 185192 - protein, 62 aa, Glycine max
  Clone ID: PAT_MRT3847_138242C.1.pep
FQLKCDFLDAEQNKINFISYRTNLNQNITPIQKNRDFFGAIKSNNTKNFLRYKTIGGAFPAS

SEQ ID NO: 185193 - protein, 41 aa, Glycine max
  Clone ID: PAT_MRT3847_138243C.1.pep
KIDSVLWLSRNKNVKGNYFYSNISFPFSLVYFTSFILNHRD

SEQ ID NO: 185194 - protein, 61 aa, Glycine max
  Clone ID: PAT_MRT3847_138244C.1.pep
SPSLDYLPYLRFFRKSALPTKHRLVSYHELLLGNVWCVRYQFSTLIRVLRGCLSSLALYYN

SEQ ID NO: 185195 - protein, 41 aa, Glycine max
  Clone ID: PAT_MRT3847_138245C.1.pep
IPCTFQPLKEGYRSWASGFCVSKGVSGAKLEWAYEFVNWFL

SEQ ID NO: 185196 - protein, 116 aa, Glycine max
  unsure (1)..(116): unsure at all Xaa locations
  Clone ID: PAT_MRT3847_138246C.1.pep
YPKMEKDTYDAYRLTLMKVNYIKEGMKTIVEGILLIQDLIHTYILILQIRNTFYKLPSVRLKPVDNEIDVLNMKSTTKLFTNSPAFVPYWHINQYVTIWXNPNYSTIMYPYCPSYI

SEQ ID NO: 185197 - protein, 80 aa, Glycine max
  Clone ID: PAT_MRT3847_138247C.1.pep
QVQQILTSNTFFMQDSTGFVFRNYFYLELSDKGKELYLHLNTMKETGIIDINEKEKENLKLTSVFEVGLGSLLLTCILII

SEQ ID NO: 185198 - protein, 81 aa, Glycine max
  unsure (1)..(81): unsure at all Xaa locations
  Clone ID: PAT_MRT3847_138248C.1.pep
MPYDNYNAKTSSRLITRKVAGTGRKQSAKADQDPNKPKRPPRAVXHHMNDHREQIXKEHTNNISAIVVRTVRHDKGKQLDD

SEQ ID NO: 185199 - protein, 61 aa, Glycine max
  Clone ID: PAT_MRT3847_138249C.1.pep
NVNRLFILLQWKSLCKAFLVEAKWFASGNLPSAEEYLKNGIVSSGVHIVMVHAFFFFGHGF

SEQ ID NO: 185200 - protein, 107 aa, Glycine max
  unsure (1)..(107): unsure at all Xaa locations
  Clone ID: PAT_MRT3847_13824C.1.pep
ALHMAEFTANNLLELDPTIATGYVQLANVYAAQNRWDHVAMIQKSIKENNVXPGYSWFEIKSVVHEFRLRDRLHPXLVYIHEKLNVLENKMKLTGYVPDLAFVLHDV

SEQ ID NO: 185201 - protein, 88 aa, Glycine max
  unsure (1)..(88): unsure at all Xaa locations
  Clone ID: PAT_MRT3847_138250C.1.pep
MGRNSQPRPFASKRWAARQNTAQTLVDAMTNNLTTKSVFTQKCGTLDQENAEHNANTIXDVAFATANLHYEKHADGDGRSALXLYAKQ

SEQ ID NO: 185202 - protein, 104 aa, Glycine max
  Clone ID: PAT_MRT3847_138251C.1.pep
YYRRGPRKLLRPLRHPRASCPAEQQLPSLWPRGRVIAFPPGMHRQKPTNSNPSPKGDRAVTTKAFLYLKSFYLNNIPEEPHFHKSPGMIPSCARHAFGNLVLTL

SEQ ID NO: 185203 - protein, 57 aa, Glycine max
  Clone ID: PAT_MRT3847_138252C.1.pep
LAYSEDSAKYIKLRFNLEFYFSNVFSLFCFVVIYPSCYWKAYSKLADLIIKVVIHWG

SEQ ID NO: 185204 - protein, 64 aa, Glycine max
  unsure (1)..(64): unsure at all Xaa locations
  Clone ID: PAT_MRT3847_138253C.1.pep
DRELPGSGSFSQRRQKTVALLRKDINIIKETSKLFYYFALIXHINLLKQTIRSNKRYSINKTKQ

SEQ ID NO: 185205 - protein, 112 aa, Glycine max
  unsure (1)..(112): unsure at all Xaa locations
  Clone ID: PAT_MRT3847_138254C.1.pep
KVGXMVFFSVLGIPLAITXSVPFALASIYSSTSGAGQGLSLGVLNIAIVVPQMIVSTISGPWDALFGGGNLPAFVLGAVAAVVSAILAVLLLPTPKKADEVRASSLNMGSLH

SEQ ID NO: 185206 - protein, 467 aa, Glycine max
  Clone ID: PAT_MRT3847_138255C.1.pep
MANENEPAKLLLPYLQRADELQKHEPLVAYYCRLYAMERGLKIPQSERTKTTNALLVSLMKQLEKDKKSIQLGPEDNLYLEGFALNVFGKADKQDRAGRADLTTAKTFYAASIFFEILNQFGAVQPDLEQKQKYAVWKAAEIRKALKEGRKPTAGPPDGDEDLSVPLSSSSDRYDLGTTENTVSSPGPESDSSRSYHNPANYQNLPSIHPAAPKFHDTVNDQHSANIPSSMPFHDRVDNNKHSSVVSPSSHSFTPGVYPSQDYHSPPPSRDYHSPPPSQDYHSPPSSQDYHPPPPSQDYHPPPSQDYHPPPARSEGSYSELYNHQQYSPENSQHLGPNYPSHETSSYSYPHFQSYPSFTESSLPSVPSNYTHYQGSDVSYSSQSAPLTTNHSSSAQHSSRNETVEPKPTTTQAYQYDSNYQPAPEKIAEAHKAARFAVGALAFDDVSVAVDFLKKSLELLTNPSAGQ

SEQ ID NO: 185207 - protein, 98 aa, Glycine max
  Clone ID: PAT_MRT3847_138256C.1.pep
TPQSLTVRAAELNKAPRKSSTLGVDGSCGVIIKRQIQGWKRNSQATGKSVPSASKHLPKANQLVVMDECGHISNRVKISWGINAFILYPKICLVLSLC

SEQ ID NO: 185208 - protein, 51 aa, Glycine max
  unsure (1)..(51): unsure at all Xaa locations
  Clone ID: PAT_MRT3847_138257C.1.pep
TAARRRQKGLREXIAEGQPRTLRPLEEDNGYLWKGIYSIGRESFCKPSRRS

SEQ ID NO: 185209 - protein, 58 aa, Glycine max
  Clone ID: PAT_MRT3847_138258C.1.pep
PFWAYKSGRSHGSLNCHVDLRAIYLRLVSTCFICTRIHRSLGALLRPNHYYWRGFHAT

SEQ ID NO: 185210 - protein, 50 aa, Glycine max
  Clone ID: PAT_MRT3847_138259C.1.pep
LVTDIVRALWSDIFLSYHNIRSCQAAHIPPALEAERGREREGPAGKQVKQ

SEQ ID NO: 185211 - protein, 57 aa, Glycine max
  Clone ID: PAT_MRT3847_13825C.1.pep
GRPKNLDQGLNNWLRLSQFLGLPPPLEVGRHPVLFFPFKRVLRVGGAFLYLGPLWLE

SEQ ID NO: 185212 - protein, 132 aa, Glycine max
  unsure (1)..(132): unsure at all Xaa locations
  Clone ID: PAT_MRT3847_138260C.1.pep
PPLVFYVIRGIVRKGLSENNKATFIAHGHSLEGELAILFGSIMCMLAEHTXLLKSLEAIYTFGQPRVGDEAYPKYPSQKFKAHXIRYCRFLYXNDHVQRMPSHVKEMMSRHFGTSLCFNSRYEPWVSVQFQA

SEQ ID NO: 185213 - protein, 55 aa, Glycine max
  Clone ID: PAT_MRT3847_138261C.1.pep
AWLKPGKASLCMPMVLAMAAPAVGPERSWYIHDARREYIFIKQLLCKQSTIKEGD

SEQ ID NO: 185214 - protein, 51 aa, Glycine max
  Clone ID: PAT_MRT3847_138262C.1.pep
RRGPEICYTNSSGIGHELYGESTTTGHPIDKREGIDKREIDRPERDRADNE

SEQ ID NO: 185215 - protein, 198 aa, Glycine max
  Clone ID: PAT_MRT3847_138263C.1.pep
MANPKTKSHHSLGGEDDPDSTESRWVFQEDEDPSEIEDFDAADLRHQSMFDSDDEDNAEQRLVRTGPRIDSFDVEALEVPGAHRNDYEDVSVGKGILLAFQTLGVVFGDVGTSPLYTFSVMFRKAPIKGNEDILGALSLVLYTLILIPLVKYVLVVLWANDDGESGTFALDSLMCRNANGSLLPNQVAIGCRIGSPLA

SEQ ID NO: 185216 - protein, 92 aa, Glycine max
  Clone ID: PAT_MRT3847_138264C.1.pep
DWCCYQLYLNSNFWDGGLNKKKLGGFSYKKREATPGGLYPPKKRKKKANCYKKVFMEKGGRKKKHGPINKKTKLWGPGYEDRPKKEKKTKGL

SEQ ID NO: 185217 - protein, 57 aa, Glycine max
  Clone ID: PAT_MRT3847_138265C.1.pep
QQGLSPLQTQAILNGFFIKFDGIHWQNKKKNGFNKINLRLVLDFYINKSFWGLKNLQ

SEQ ID NO: 185218 - protein, 48 aa, Glycine max
  unsure (1)..(48): unsure at all Xaa locations
  Clone ID: PAT_MRT3847_138266C.1.pep
CYRVLGLRLSLVIXAARHKTISDKGPQLTRGMYHERQTTTNLASDIRN

SEQ ID NO: 185219 - protein, 54 aa, Glycine max
  Clone ID: PAT_MRT3847_138267C.1.pep
SLMLLHSRSKCLCTYTFPSSLSKKISSLKQRPFKLRMDVASMPCMELCLTTPVL

SEQ ID NO: 185220 - protein, 80 aa, Glycine max
  unsure (1)..(80): unsure at all Xaa locations
  Clone ID: PAT_MRT3847_138268C.1.pep
QXSITXXXGGANLISPXPRFFSKXXPYGLKXGIPEXLNGIXKGVIPTVLSLXLKSVISRXXAXXEPLNXXSSVFLXNXGX

SEQ ID NO: 185221 - protein, 58 aa, Glycine max
  Clone ID: PAT_MRT3847_138269C.1.pep
AKSPFKLEHPLGRRQAESARIRDKYAERIPVIVEKAEISDIPDMDKRKDVVAADGTRG

SEQ ID NO: 185222 - protein, 87 aa, Glycine max
  Clone ID: PAT_MRT3847_13826C.1.pep
GEGQFRSLSNPNSTEHSFPYKFDVVSFRSHSKKTFCRRFQSELRKKRNLIADRVESNVAVVPFFFIIFLPFEDSHFGYCCVLCFLVF

SEQ ID NO: 185223 - protein, 193 aa, Glycine max
  unsure (1)..(193): unsure at all Xaa locations
  Clone ID: PAT_MRT3847_138270C.1.pep
LPKFIGYDFIIQYSPGKENIPADALSRSFAMAWSEPSXYMASNSGSCNDESLMKIYQLCSNNAGKSGDYVLHHDVIIWKGRIMLPNDSQLLKMIMTESHASKVGGHAGTTRTIVRINAQFYWPKMREDIMKFVQECVICQQAKVTHSLLPAGLLQPLPIPNMIWDXIAMDFITNLPLSHGYSNIMVVVDRLSK

SEQ ID NO: 185224 - protein, 66 aa, Glycine max
  Clone ID: PAT_MRT3847_138271C.1.pep
TSALRFLLKSSHSTNFMVRTCCIMGAETFSNGDIMASTDPFQLRATHVGSDNLISPPFVILKICAK

SEQ ID NO: 185225 - protein, 127 aa, Glycine max
  Clone ID: PAT_MRT3847_138272C.1.pep
QDREETDKLSDRTLLRHQITHTCSERAAQKKASTTSLSQRNMTIIPSTGQNRSERGLIIICCGNSICACAILGVIYILKYMDLDNVPAARANGLERDLKLTGNQDTKCSILALRWIHSGSCSLQYDR

SEQ ID NO: 185226 - protein, 476 aa, Glycine max
  Clone ID: PAT_MRT3847_138273C.1.pep
MYKVANASEYLVITGVGITDIKLAKKAWVLPGQSCTVFDLSPVNYTFEVQAMSAEKLPFILPAVFTIGPRVEDEDSLLKYARLLSSHDKLSHHVKELVQGIIEGETRVLAASMTMEEIFRGTKSFKQEVFEKVQLELNQFGLLIYNANVKQLVDVPGHEYFSYLGQKTQMEAANQAKVDVAEAKMKGEVGSKQRQGQTLQNAAKIDAETKIISTQRQGDGKKEEIKVRTEVKVFENEREAVVAEANSELAKKKAVWAQTAQVAEVEAAKAVALREAELQREVERMNALTRTEKLKAEFLSKASVEYETKVQEANWELYKKQKAAEAILFEKEKEAEAQKALAEAAFFSRQQEAEAELFAKKKEAEGLVALGQAQGAYLKTLLGALGGNYGNLRDYLMINSGMFQEIAKTNADAIRGLEPKISIWTNGGDTNDGYGSGAMKDVAGVYKMLPPLFKTVHEQTGMLPPAWMGTLPDNGS

SEQ ID NO: 185227 - protein, 203 aa, Glycine max
  unsure (1)..(203): unsure at all Xaa locations
  Clone ID: PAT_MRT3847_138274C.1.pep
SQEDGQAIEXWIFIDPXAFTENGEWAIRHRPAKMLLDSVAPAEEAGHQKVVFYLLIQRKPLFYVINIIAPCVLISSVAILIYFLPAKAGGQKCTVATNVLLAQTVFLFLVAKKVPETSQAVPLISKYLTFLMVVTILIVVNSVVVLNVSLRSPHTHSMARGVRKVFLRLLPQLLRMHVRPLAPAAVQDARFRLQNGSSSGWPI

SEQ ID NO: 185228 - protein, 183 aa, Glycine max
  unsure (1)..(183): unsure at all Xaa locations
  Clone ID: PAT_MRT3847_138275C.1.pep
ECLPSDRHALCFSGKMLKNRRTLXDYTIHRVSTVRISLRLRGRYEQSSLLLRGRVLSDSIDNVXATIHDYDSLPPNRQXLIFAGKQFXDWRALDNYMIQQTSTLRLQLRLLTGMHIFVNTLTGKTITLHVERSDTIDNVKAKIREKEXGIRRDQQRLILHEKQLEDGRTLCDYYILKVSALHL

SEQ ID NO: 185229 - protein, 83 aa, Glycine max
  Clone ID: PAT_MRT3847_138276C.1.pep
PTARASYSLLQLLTFRNLEISRSRTVSRRFGQSHDSKIIFDRQVPLLLPCHGLNRLDSRYHIVTPSIWIKTPLTINDVVIGFR

SEQ ID NO: 185230 - protein, 59 aa, Glycine max
  Clone ID: PAT_MRT3847_138277C.1.pep
NFTLKIFFFYTKKSFLLYILIIILNYYKQLTHLFNFKQSTIHHLPQTSSIPNINTFNII

SEQ ID NO: 185231 - protein, 90 aa, Glycine max
  unsure (1)..(90): unsure at all Xaa locations
  Clone ID: PAT_MRT3847_138278C.1.pep
VIPNFMCQGGDFTAGNGAGGNSFYGAXYADNNFVKNHTGPGILSMANAGPGTNGSQFFICTTNTDWLNRKHVVFRQVVKGMDVFLDIKKV

SEQ ID NO: 185232 - protein, 64 aa, Glycine max
  Clone ID: PAT_MRT3847_138279C.1.pep
LTICLFLTLGTMKGMGFSSWSRSFLKLLPGCTFLRKHCRFKLFTPLIPIPPPLLENCHTLNYLV

SEQ ID NO: 185233 - protein, 57 aa, Glycine max
  unsure (1)..(57): unsure at all Xaa locations
  Clone ID: PAT_MRT3847_13827C.1.pep
PVFLKSYGNSLFLNPTRRGKRERERERERERERERIVENRESEQRVRNDPXXPARAA

SEQ ID NO: 185234 - protein, 460 aa, Glycine max
  unsure (1)..(460): unsure at all Xaa locations
  Clone ID: PAT_MRT3847_138280C.1.pep
MPSKRLQWRSLVLGCFKATKNQSLESPNIVSKKSSSSRIFLSDLSLSDYSSVSIMSDLSNSLVGSNLRIFTYQELSEVTHNFSKSNYLGEGGFGKVFKGFIDDNLKPGLKAQTVAVKALNLDGKQGHKEWLAEVVXFLGQLKHRHLVNLIGYCCEDEHRLLVYEYMERGNLEEKLFKALPWLTRIKIAIGAAKGLMFLHEEEKPVIYRDIKASNILLDADYNPKLSDFGLAIDGPEKDQTHITTHVMGTHGYAAPEYIMTGHLTTMSDVYSFGVVLLELLTGKKSVDKKRPTREQDLVEWARPLLKDSHKLERIMDTRLEDQYSTEGARKFAALAYQCLSHHAKARPTMRTVVRTLEPLLELKDIPVGPFVYVVPSEEESTKVNEKVTENEHVEINQGELKTKEKEEEEKGAKKEKGPPRQRKSRRNRRRVKPLRSLTAYSDTALYKTLGTNLYSPKQSQ

SEQ ID NO: 185235 - protein, 154 aa, Glycine max
  unsure (1)..(154): unsure at all Xaa locations
  Clone ID: PAT_MRT3847_138281C.1.pep
EVYLTRKSKSCGTXKIPTREQDLVEWARPLLKDSHKLERIMDTRLEDQYSTEGARKFAALAYQCLSHHAKARPTMRTVVRTLEPLLELKDIPVGPFVYVVPSEEDKTKVNENDHVEINQGELKTKEKEEKGHHRQRKSRRNRRRVKPLRSTKVS

SEQ ID NO: 185236 - protein, 48 aa, Glycine max
  Clone ID: PAT_MRT3847_138282C.1.pep
SLILNYFWLLCRVFGSTLVGSSLISGSRALTHIVVCVLKTPESIGVKM

SEQ ID NO: 185237 - protein, 90 aa, Glycine max
  Clone ID: PAT_MRT3847_138283C.1.pep
RAESARGCERRQKGLLQFLSICLSSACVPNVLFKETMASLLSLCTTLPVATRLSPNIILYPSSHIHSILFVFTHFSMDVKSRMILYSAKS

SEQ ID NO: 185238 - protein, 96 aa, Glycine max
  Clone ID: PAT_MRT3847_138284C.1.pep
NALFFCTPNQGARASSFIGDDIKITGIASPPRSSVLSLLLQPKSLFESIFMEDSGNLMKLNGIFINSFEELEGEALATLNGGIVVKGLPPVYGVGY

SEQ ID NO: 185239 - protein, 248 aa, Glycine max
  Clone ID: PAT_MRT3847_138285C.1.pep
VKEKLQMRQEGAIKRDRTKAYSQSKKKSTERASPNSRAAKSVIPLKNRNLDSKSSGWNMLDLWMAAKPWESRSMVEMYLDSPDMTPVTSKSDHLVLPFNSDQQNGSVKSRSNGVTTRISTNSLTTSQSTPSSSAISSECMHDDSPMSTSCTSGSPSRPSNNNVTVEATEERNACKPSYMNLTASTKAKLKPYRCFSQNAKRIFMDDCVSLSGVTRSSSGFYPSANTWKNLYATPLRTSYQKRYTMEYK

SEQ ID NO: 185240 - protein, 82 aa, Glycine max
  Clone ID: PAT_MRT3847_138286C.1.pep
VCLKWWACEILVLLAGLFPNPKLETSVLSICLTISTLHFTIPYGFGAAASTRVSNELGAGNPQAVRVAVSATMFLAVTEGLI

SEQ ID NO: 185241 - protein, 95 aa, Glycine max
  unsure (1)..(95): unsure at all Xaa locations
  Clone ID: PAT_MRT3847_138287C.1.pep
ALFLDCAFTIXYLPXATAQIMLDTDDDPLQNGGTYYMLPVMTGKGGAIEVDSTGTEICPLTVVHSPNELNQGIELVFTSSLHALRIAXCYPLSIK

SEQ ID NO: 185242 - protein, 70 aa, Glycine max
  Clone ID: PAT_MRT3847_138288C.1.pep
PLPFKGQIKATRAESQGIGAKRPLCHLQNPGGYLSRLQRILPPPRWELRFKGFRRANPPHKGHQPHLPLG

SEQ ID NO: 185243 - protein, 65 aa, Glycine max
  Clone ID: PAT_MRT3847_138289C.1.pep
LFYYLTRQAERPTESKHIYALYRMTSILEKLSTQMRKRQSWTALDPRAQQTCGNITPIAAGYIPF

SEQ ID NO: 185244 - protein, 278 aa, Glycine max
  unsure (1)..(278): unsure at all Xaa locations
  Clone ID: PAT_MRT3847_13828C.1.pep
MWSAYLEKNRVNQQTTKISMTCKREDIWSHGCQHYRRRCRIRAPCCNEIFDCRHCHNEAKNDINIDQKHRHDIPRHQVKQVICSLCGTEQEVQQNCINCGGLYGTSTSVETCKLFDDDISKQQYHCSGCGICRTGGSENFFHCYKCDCCYSTNSEKQSPLCSRXQLHLDCPVCFEYLFISANDVTVMPCGHTXHKSFLNEMREHFQYSCPLCLXSVCDMSKVWEKFDMEIAATRMPEQYQXIKWFWILCNDCGKTSHVQFHFVAQKCPNCKSYNTRQT

SEQ ID NO: 185245 - protein, 128 aa, Glycine max
  unsure (1)..(128): unsure at all Xaa locations
  Clone ID: PAT_MRT3847_138290C.1.pep
KPKGPKSGGGNPINPLEPPPWGGEGGAPPSLKPNPPQNFSTPLEPPPGNPKXSGAPKGERAPIGDPQPPLNSRKNRGPDTHGKRKGGKRGKIKKAQRLGGAPPPGGGKTPKNPRPSPKKPRFLKKNPP

SEQ ID NO: 185246 - protein, 71 aa, Glycine max
  Clone ID: PAT_MRT3847_138291C.1.pep
KQTPNYSHLNFLHHTFSIFPTLSSNKKSFLLHTFYFYLKLTCHSLIFLSSNVNFQQYFTLPQNINFLKLIN

SEQ ID NO: 185247 - protein, 55 aa, Glycine max
  Clone ID: PAT_MRT3847_138292C.1.pep
IVKFGFVYLDIYIYIYIYYMWYMKMRVANSVYIVGKDRDETVVSDLLPKKKKKKK

SEQ ID NO: 185248 - protein, 41 aa, Glycine max
  Clone ID: PAT_MRT3847_138293C.1.pep
FVLKPVFLFKTKYSFYNSQEKNFVQKSATVNCTLSLMTSMQ

SEQ ID NO: 185249 - protein, 64 aa, Glycine max
  Clone ID: PAT_MRT3847_138294C.1.pep
KPFKDLMKLVNNVFWKLNSIYFISYYRKTQSNKFLLHVIGPNSHIGRPLIMSLAEAVKIIVKEF

SEQ ID NO: 185250 - protein, 139 aa, Glycine max
  Clone ID: PAT_MRT3847_138295C.1.pep
MASHDKAQGSSTTKKGISRSNKAGLQFPVGRVARYLKTGKYAERISSAAPVYLASVLEYLAAEVLELAGNAVMDNKKTRIMPRHIQLAVRNDEELNKLLGDVTIANGGVMPNIHSMLLPKKVGTSTSTFMGASVNDNDA

SEQ ID NO: 185251 - protein, 101 aa, Glycine max
  Clone ID: PAT_MRT3847_138296C.1.pep
ARGSLFNIRMPFTLELKKKKTKTTRESAFFFIYLYRWSVILFASFVGCLGEAGGSFLFVCPGDDLCTTVCGPDSILVLGMFRIFCILGGLVVTTYIFMLAV

SEQ ID NO: 185252 - protein, 110 aa, Glycine max
  unsure (1)..(110): unsure at all Xaa locations
  Clone ID: PAT_MRT3847_138297C.1.pep
LLFFPWFWCLVVRPGGCCSFWLPLACCGGLGVGGPFCCGLCFGCRLVVCPLLAWVLCASCSPPLGVPLFVPLXVXLPCVPPLPLLGPPVLCGRPPSNELVVPGFWFRAGP

SEQ ID NO: 185253 - protein, 99 aa, Glycine max
  unsure (1)..(99): unsure at all Xaa locations
  Clone ID: PAT_MRT3847_138298C.1.pep
SLRGPPPPPRLSKVDVNFPGKRGPCKKSVLAFLMAILKGNPFVVKGSAFSPPHKKQKRGANSFFLYLPIKFTGGCPNHWFLKKKKKKKNHQIKKFXKKK

SEQ ID NO: 185254 - protein, 76 aa, Glycine max
  Clone ID: PAT_MRT3847_138299C.1.pep
MLQPRGCLPAPRKSSGDLYSSVSITLVEGVLSCGARTVVKGQCAVYKIGLVLNDQNSALDVCLRDVKGVRMVQGNV

SEQ ID NO: 185255 - protein, 102 aa, Glycine max
  Clone ID: PAT_MRT3847_13829C.1.pep
MGEVAVMHSEPLQFECNDISVNMTEKEVYPPESNVERLPGEESSQSTDHKNINDLQERGYMEYGCQHYRRRCRIRAPCCNEIFDCRHCHNEAKVSQFPKSSI

SEQ ID NO: 185256 - protein, 70 aa, Glycine max
  Clone ID: PAT_MRT3847_1382C.1.pep
SRLAAVTSAITTPNEIELQSFTHKKISQCNTTFTSIHEREKEDQHIIFFTPTTNRSRDPFCVSRSRTRAE

SEQ ID NO: 185257 - protein, 43 aa, Glycine max
  Clone ID: PAT_MRT3847_138300C.1.pep
VINFSTANAESFSIWSCPHLNMLIIIYLCGSWEKVGKLVLIAY

SEQ ID NO: 185258 - protein, 27 aa, Glycine max
  Clone ID: PAT_MRT3847_138301C.1.pep
SFMINLGKIPTLSYSFKFYIQIPTLLF

SEQ ID NO: 185259 - protein, 101 aa, Glycine max
  Clone ID: PAT_MRT3847_138302C.1.pep
MGHKVVSEGVCYGLNIQLGPIVVKVDALVLELGGLDMVLGVSWLSTLGKVVMDWKVLSMQFMYEDQWVKLKGQGGTQEKQSYLAKFADQIFNERNNNNNNK

SEQ ID NO: 185260 - protein, 50 aa, Glycine max
  Clone ID: PAT_MRT3847_138303C.1.pep
CSNWSTFTYEHQETTGPLSPLLFPLFRSPELPQSLSIHASCMLMPLLGRR

SEQ ID NO: 185261 - protein, 71 aa, Glycine max
  unsure (1)..(71): unsure at all Xaa locations
  Clone ID: PAT_MRT3847_138304C.1.pep
VATAASAVLASNAMAIEVLLGGDDGSLAFVPHNISVASREKIGFKNNAGIPHNVGFDXDEITSGVDAGKSS

SEQ ID NO: 185262 - protein, 89 aa, Glycine max
  unsure (1)..(89): unsure at all Xaa locations
  Clone ID: PAT_MRT3847_138305C.1.pep
SCLAFGLALFSRLSFFPFSSLCCISLLCHLNPQKQHCIPISCXSIFVTSSLSSFVHAHEYGRCWSKVISLRHTLILFIILDLGFHHFFF

SEQ ID NO: 185263 - protein, 71 aa, Glycine max
  unsure (1)..(71): unsure at all Xaa locations
  Clone ID: PAT_MRT3847_138306C.1.pep
NGLXPXHFCEYXLMXPKKPYISCVPLTAAINRLXFLCNCXRAKXKKVKXVSSKRXXKVXVKLNVYKLFHVV

SEQ ID NO: 185264 - protein, 160 aa, Glycine max
  Clone ID: PAT_MRT3847_138307C.1.pep
TANRGRRLGAVKRLEKLVEEGEREFQAEMRAIGKTHHRNLVRLLGFCAEGSKRLLVYEYMPNGSLENLIFGAQSQRRPGWDERVRIALEIAKGILYLHEECEAPIIHCDIKPQNILMDEFWTAKISDFGLAKLLMPDQTRTITGARGTRGYVAPEWDKLN

SEQ ID NO: 185265 - protein, 145 aa, Glycine max
  unsure (1)..(145): unsure at all Xaa locations
  Clone ID: PAT_MRT3847_138308C.1.pep
WNGTLKVPPGFFQRQLLGWVRLLGGFPPPLXKGKLRVGSKKFFSPQKGGVFGFPPLKFFLPEGFVSPPCLKKKKGGGWFFFFFPKKPLGFFFFIRAKNFFFFKMQVCPFPIVPAPNFFLGVPFFEGGGPPGCGFFFKKRPLFKLF

SEQ ID NO: 185266 - protein, 125 aa, Glycine max
  Clone ID: PAT_MRT3847_138309C.1.pep
VRLVKAKFFCFKKFSLEILLKIKLGLTHYTIRHPHSLYGMADHVCQAISNIWSVSKLWESLLSLLLDDDNQVNLLKPLVIAMLGIVVSVLCSTSWHIKKRKRRICNGFVPESELVHWLLFGLAGT

SEQ ID NO: 185267 - protein, 139 aa, Glycine max
  Clone ID: PAT_MRT3847_13830C.1.pep
DNFFHCYKCGCCYSTLLKNSHPCVEGAMHHDCPVCFEYLFESRNDVTVMPCGHTIHKSCLNEMREHFQYSCPLCLKSVCDMSKVWEKFDIEIAATPMPEQYQNKMGWILCNDWGKTSHVQFHFVDQKCPNCKSYNTRQT

SEQ ID NO: 185268 - protein, 329 aa, Glycine max
  unsure (1)..(329): unsure at all Xaa locations
  Clone ID: PAT_MRT3847_138310C.1.pep
MPEFCVTGGTGFIASYLVKALLEKGHTVRTTVRNPGDVEKVGFLTELSGAKERLKILKADLLVEGSFDEAVRGVDGVFHMASPVLIPYDENVQQNLIDPCIKGTLNVLNSCVKATVKHFVLTSSCSSIRYRDDVQEVCPLNESHWTDLEYCKRYKLWYAYAKTIAEREAWRIAKENGMDLVVVNPSFVVGPLLAPQPTSTLLSKQSVVNGVVVDPSFVVGALLAPQPTSTLLLILSIVPGVKGEYICSRVVVLWSQIIEMLRAKYPSYPYENEXVKPCKSITLCSSQEGDNNPHSMDTTKITQLGFPPFKTLEQMFDDCIKSFQDKGFL

SEQ ID NO: 185269 - protein, 131 aa, Glycine max
  Clone ID: PAT_MRT3847_138311C.1.pep
CCPLLAPQPTSTLLLILSIVKGMKGEYPNTTVGFVHINDVVAAHLLAMEDPKASGRLICSSTVAHWSQIIEMLRAKYPSYPYENECSSQEGDNNPHSMDTTKITQLGFPPFKTLEQMFDDCIKSFQDKGFL

SEQ ID NO: 185270 - protein, 57 aa, Glycine max
  Clone ID: PAT_MRT3847_138312C.1.pep
VTNTATNTYHFSLSLSSHHITNLICHLSLSKRLHDHTLGCQNLLLVVYTRMFWLRHF

SEQ ID NO: 185271 - protein, 51 aa, Glycine max
  Clone ID: PAT_MRT3847_138313C.1.pep
SRCYRCSSQEGDNNPHSMDTTKITQLGFPPFKTLEQMFDDCIKSFQDKGFL

SEQ ID NO: 185272 - protein, 143 aa, Glycine max
  Clone ID: PAT_MRT3847_138314C.1.pep
TQYHLSRKTQASYLVKALLEKGHTVRTTVRNPGDVEKVGFLTELSGAKERLKILKADLLVEGSFDEAVRGVDGVFHMASPVLIPYDENVQQNLIDPCIKGTLNVLNSCVKATVKHFVLTSSCSSIRYRDDVQEVCPLNESHWT

SEQ ID NO: 185273 - protein, 49 aa, Glycine max
  Clone ID: PAT_MRT3847_138315C.1.pep
RVLMGNAFGINYNLTNNFRTSSSDNYSNFYSFHSYGMVLVDLYFLFLCF

SEQ ID NO: 185274 - protein, 691 aa, Glycine max
  Clone ID: PAT_MRT3847_138316C.1.pep
MPALACCVDAAAPPGYAFAGDISFPAPVALTGVPPATTDDSNNNRWSPSLSAALYNVDGWGGPYFAVNTAGNISVRPHGSDTLSHQEIDLLKIVKKASDPKSLGGLSLQLPLIARFPDVLKNRLESLQSAFDYAIQSGGYESHYQGVYPVKCNQDRFVVEDIVKFGSPFRFGLEAGSKPELLLAMSCLCKGNPDALLICNGFKDAEYISLALVANKLALNTVIVVEQEEEVDLIVELSKKLCIKPVIGLRAKLRTKHSGHFGGTSGEKGKFGLTTAQILRVVKNLDLAGMLDCLQLLHFHIGSQIPSTALLADGVGEAAQIYCELVRLGANMRVIDIGGGLGIDYDGSKSCDSDISVEYSLEDYAVAVVHAVQCVCDRRSVKHPVICSESGRAIVSHHSVLIFEAVGTSSTTGGGASPALSAQYLAEELSEDYRNLSELAFRGEYETCLVYTEEMKERCVEQFKQGTVCMEQLAAVEGLCELARKAVGAGESVRRYHVNLSVFTSVPDAWGIEQVFPIIPIHRLDEKPSVRGILSDLTCDSDGKIDKFINGESSLPLHEMEGGRTYYLGMFLGGAYEEALGGVHNLFGGPSVVRVSQSDGPHSFAVTRAVPGPSCGDVLRVMQHQPELMFETLKHRAQEYVSHDNAAALLAAGLARTFDRMPYLLSLSSFVADDVAAAVPAAQDLGEQWSY

SEQ ID NO: 185275 - protein, 71 aa, Glycine max
  unsure (1)..(71): unsure at all Xaa locations
  Clone ID: PAT_MRT3847_138317C.1.pep
MPVLACCVDAAAPPGYAFAGDISFPAPIAFTGVPPATADDTNNSNNHWSPSLSAALYXVDRWGXPYFAVNT

SEQ ID NO: 185276 - protein, 152 aa, Glycine max
  Clone ID: PAT_MRT3847_138318C.1.pep
IGLSMGIYNMCHRPLKERKHFGAALVVFQIRHQKLVQMLGNIQAMILVGWRLCKLYESGKMTPGHASLGKSWITLRARETAALGRELLGGNGILADFLVAKALCDIEPIYAFEGTYSITTLVTGREVTGFSSFKSVAQKSRLLKCKMCSCMD

SEQ ID NO: 185277 - protein, 46 aa, Glycine max
  unsure (1)..(46): unsure at all Xaa locations
  Clone ID: PAT_MRT3847_138319C.1.pep
NGVNETKSNXXXXFTKKVHASSAFWIRPRVPPTQPHTPPQLXLSFP

SEQ ID NO: 185278 - protein, 88 aa, Glycine max
  Clone ID: PAT_MRT3847_13831C.1.pep
IIPIHPSFQLSYYFNRKLHSALLLAWFLITSHKRPVIHTMHNNPMFQKLKQRLNRGLDHSLKLVKLMIQQELKYDRTGSQFVQLNTDF

SEQ ID NO: 185279 - protein, 123 aa, Glycine max
  unsure (1)..(123): unsure at all Xaa locations
  Clone ID: PAT_MRT3847_138320C.1.pep
PPTLTPLLPVSISLGCYWRXVFCYSPLTNIWHLATFAKMCHSTRPLRNHYIVDTVARRYQALRDASPTIPTRVRKQRRATLFGSVSYHSLALFFSNHYILCFVSFYFSSFSFAVTGPWTVRST

SEQ ID NO: 185280 - protein, 51 aa, Glycine max
  Clone ID: PAT_MRT3847_138321C.1.pep
FPSLSGCMENKPNFSGFTILKWECSPQRIEKGKGLFNPIMGPTSWWHNHHL

SEQ ID NO: 185281 - protein, 98 aa, Glycine max
  unsure (1)..(98): unsure at all Xaa locations
  Clone ID: PAT_MRT3847_138322C.1.pep
RNSARDLTIAFTLSXLLGTFIFRSHLISTLLCLEAIILSLFVITSTSTLNSNSIISITIPITILVFAACEXPVGLALLVXKISNTYGTDYXVQNLNXX

SEQ ID NO: 185282 - protein, 63 aa, Glycine max
  Clone ID: PAT_MRT3847_138323C.1.pep
TLIKGFFFFFICLAIRNFSCHSLYSHINHSIVMSIFGSLSSIKIYTCKLGRKPKLISSRLVYS

SEQ ID NO: 185283 - protein, 49 aa, Glycine max
  Clone ID: PAT_MRT3847_138324C.1.pep
AVSMISTPSATTVNRAGARMAAPFTDLNYMAGFPTMKTNRHVTSIVSNA

SEQ ID NO: 185284 - protein, 90 aa, Glycine max
  unsure (1)..(90): unsure at all Xaa locations
  Clone ID: PAT_MRT3847_138325C.1.pep
GVLTFEDETTSSVAPATLYKALITDADNVIPKAVDAFTSVENVVGNGGPGTIKKNTFLEDGXTNFVWLQIEAIDEANLGYSYIVLGGEGV

SEQ ID NO: 185285 - protein, 194 aa, Glycine max
  unsure (1)..(194): unsure at all Xaa locations
  Clone ID: PAT_MRT3847_138326C.1.pep
MGKSVGELGVEELVNAGGLRVEEGNELYHALRDILSEFQSPSHIWRQIVTRRLLKPSYPHSLHQLLYYSVYHSQHSSLPLYCLPSLDQSKRSNLGRLMEKHGPELLGPSYKDPITSYPLFHKFSVQHPQLYWSLVLKELSVSFVEPPKCILDTFDPSKHGGTWLPGSVLNIADCCLQPSXHPHKTDDTLPSLER

SEQ ID NO: 185286 - protein, 137 aa, Glycine max
  Clone ID: PAT_MRT3847_138327C.1.pep
GKQGDLKKNILSKHDFKGTWFLEEFFFFFLNQSNFKTSRIPCRRYSPQRFVPSKIWGAPMTDGSRFKFLTGWGPKKGGGYKTKIPNFIIPPTPFLTFPPILGSHDSNRSRFHPRKNCAPAKTLFRFCNFLCFSPLEK

SEQ ID NO: 185287 - protein, 45 aa, Glycine max
  Clone ID: PAT_MRT3847_138328C.1.pep
YNMIKGIVIMIQSYYFSKLSEPFGKFLKSNISFYRESIRVLHSLL

SEQ ID NO: 185288 - protein, 56 aa, Glycine max
  Clone ID: PAT_MRT3847_138329C.1.pep
KSRKLKANKAIKKKYEVLFRQYSSSQYPNMFYGKQGRKRKTGIFQNPAEEDAGSIG

SEQ ID NO: 185289 - protein, 173 aa, Glycine max
  unsure (1)..(173): unsure at all Xaa locations
  Clone ID: PAT_MRT3847_13832C.1.pep
MGEVAVMHSEPLQFECNDITVNMTEKEVYPPESNVDHLPGEESSQSTDHKNINDLQERGYMEYGCQHYRRRCRIRAPCCNEIFDCRHCHNEAKNDINIDQKHRHDIPRHXEVKQVICSLXCGTEQEVQQNCINCGVCMGKYFCGTCKLFDDDISKQQYHCSGCGICRTGGSEN

SEQ ID NO: 185290 - protein, 48 aa, Glycine max
  Clone ID: PAT_MRT3847_138330C.1.pep
KIKTGKSKLLLNLYVQAHKNGTHYRDRIVFKGKQNLNLFSPAIAKRLV

SEQ ID NO: 185291 - protein, 321 aa, Glycine max
  Clone ID: PAT_MRT3847_138331C.1.pep
MVCEEELLIEKVCSIYEQISSLESLKPCKNVDMLFTKLVLTCIPPSPIEVTKLNKTVQDIRSHLIKLCGEAEGHLESHYSTILGSYHNPLNHLNIFPYYSNYLKLGLLEFTILSQHCTHVPTKVAFVGSGPLPLTSIVLQLCWHRTTTFHNYDMDPSANSNAMRLVSSDPDLSKRMFFHTNDILEVSTALKEYEVVYLAALVGMDKEGKNRIIDHLGKHMNPGALLMLRSAHGARAFLYPVVEPCDLRGFEVLSVFHPSDEVVNSVVIARKLYHPVPMHSLDQQALVGSMILPNKCSEIQAFNPLNHGNMIEELAVEEQLS

SEQ ID NO: 185292 - protein, 39 aa, Glycine max
  Clone ID: PAT_MRT3847_138332C.1.pep
LSLVWPSCYLNEKAVISAIADFAHWGSLVACNNLLLCYF

SEQ ID NO: 185293 - protein, 385 aa, Glycine max
  Clone ID: PAT_MRT3847_138333C.1.pep
MLESKDSTMKLFGKTIPAPEISAGAPALSSGDADAVGVVQNHGSSSVNGDGEEHEIEQDIMGEETTESEKEDEVTNLDTVSRPGEVSINPSTKKEDLTLKTSKKTEQEQGENSQDKTLRKPDKILPCPRCNSMDTKFCYYNNYNVNQPRHFCKNCQRYWTAGGVMRNVPVGAGRRKNKNFTSQYRQITVPEAALLSSQPDLPNGVSHPSLNCNATLLAFGSDTPLCESMTSVLNLAEKAVNNSTTNGFNGSEELEIPFAYVAGEKVNDDSNKSSDMSTKPMEGETTNRSQEQVIENCHPFPPHAPYFPGAPWPFPWNPALWNSPVPSPPAFFPQGFTMPLYPAAAYWGLTIPGAWSIPWLAQPSLPNSTVSNSGPDPIARTIAMS

SEQ ID NO: 185294 - protein, 55 aa, Glycine max
  Clone ID: PAT_MRT3847_138334C.1.pep
SSRVPSNSPSSIPSPTSQRDEGTIGIHEIKHVVFFCCCVCCSDVPVPLWVLIWMH

SEQ ID NO: 185295 - protein, 63 aa, Glycine max
  Clone ID: PAT_MRT3847_138335C.1.pep
RSARNATSVIISRWIHIVSFFILHELNGTHIHGCGCFFPQTEGCNRIQSCSPPHKYLWYCHIY

SEQ ID NO: 185296 - protein, 74 aa, Glycine max
  unsure (1)..(74): unsure at all Xaa locations
  Clone ID: PAT_MRT3847_138336C.1.pep
XAXXDVKVNXXAEXDVVAXQNMXAQLLPLALPXPXMPXMXRPRRYGXRLXPPPPWVXWGXPXCTPYGVPTVGSF

SEQ ID NO: 185297 - protein, 59 aa, Glycine max
  Clone ID: PAT_MRT3847_138337C.1.pep
AHLEKATVGGDDDDKVQEDEADVHLQPDVHLTELVDTDTNDEADEPTFQMRAKLFKFDR

SEQ ID NO: 185298 - protein, 316 aa, Glycine max
  Clone ID: PAT_MRT3847_138338C.1.pep
GERAIGEFCREDDELFLNSNAQGMAFSDKNKQLQLPGNHIENHMHQGQPNLGNSFLSGIKQRLLSFIFQGLWNEERDDTLRIQRLRKKFYFHFQDYVDLIIWKVQFLDRHHLLIKFGSVDGGVSRNADHHPAFVAVYNMDTTEIVSFYQNSPDELYLLFEQFCDHFHATSRNSMYMNFISSHSNNIHALEQLRSIKDKASSSAQFFVKKMLASLPFSCQSQSPSPYFDQSLFRFDDKLISATDRHRQSTDHPIKFILRRYPYSLKFKIKPGPEAGSMDGRAKKISSFLFHPILPLALSVQQTLFLQPSVVNIHFRR

SEQ ID NO: 185299 - protein, 77 aa, Glycine max
  Clone ID: PAT_MRT3847_138339C.1.pep
IPRWSLIVCKRVMSRTWEGDCGCGVATANRSVAAELRLLTYGRPGRCGASPLCSLCVFLRTFASFLKFFSFHSLQVR

SEQ ID NO: 185300 - protein, 54 aa, Glycine max
  unsure (1)..(54): unsure at all Xaa locations
  Clone ID: PAT_MRT3847_13833C.1.pep
FWQELAHCQFWICWRAPALWSSHLQVFLQSYLECARQSSQRVEAVAFXPCRGPG

SEQ ID NO: 185301 - protein, 212 aa, Glycine max
  Clone ID: PAT_MRT3847_138340C.1.pep
MASYEAIKNFDDDDDEDVEMALLHNQISESRSATVSPTIAQTTPLHLHINNIIEEQHIIARHQPQPQPKSPRLVSLDVFRGLTVALMILVDDAGGLIPALNHSPWNGLTLADYVMPFFLFIVGVSLALTYKKLSCGVDASRKASLRALKLLVLGLFLQGGYFHRVNDLTYGVDLKQIRWMGILQRIGVAYLVAALCEIWLKSDDTGNSGPSL

SEQ ID NO: 185302 - protein, 399 aa, Glycine max
  unsure (1)..(399): unsure at all Xaa locations
  Clone ID: PAT_MRT3847_138341C.1.pep
MGEAPALLVDDVQDGALNGLELKNGTCKTTATVGDKMYVIGGADDGTLSIEVQIFDGSLGEWVRPTVRGTKPVLCNGLSAVPLEDRILILKKGSKPDDRIWFLEIDTQYVRQQQKILGTEVVAWSKGVIGNAEKPVVISGPSGVGKGTLISMLMKEFPSMFGFSVSHTTRAPRGIEKDGVHYHFTEKSIMEKEIKEGKFLEFASVHGNLYGTSVEAVELVADAGKRCILDIDVQGARSVRASSLEAIFIFICPPSMEELEKRLRDRGTETEEQILKRLRNAEAEIEQGKSSQIFDFILYNEKLEECHERLKKLLGLDGFVTAPPKSGPIEIDLPMDHSVSKIDNKIIINCISSGEKESKNLIILXDVSSLKGGAPGRTRGLNFQAIGLFLKWLEWDRST

SEQ ID NO: 185303 - protein, 355 aa, Glycine max
  unsure (1)..(355): unsure at all Xaa locations
  Clone ID: PAT_MRT3847_138342C.1.pep
LAKQLLQLAIRRVRPTVRGTKPVSCNGLSAVPLEDRILILKKGSKPDDQIWFLEIDTQYVRQQXKILGSEVAAWSKGLKRFWAPISLWEKPVVISGPSGVVKGTLISMLMKEFPSMFGFSVSHTTLSPRGMEKDGVHYHFTEKSIMEKEIKEGKFLEFASVHGNLYGTSVEAVELVADAGKRCILDIDVQGARSVRASSLEAIFIFICPPSMEELEKRLRDRGTETEEQILKRLRNAEAEIEQGKSSQVFDFILYNEKLEECYERLKKLLGLDGFITAPPKSGPIEIDLPMDHSVSKIDNKIIINCISSGEKESKNLIILDVSSLKGGVPGRTRGLNFQAIGSFSNGLNGIDQLS

SEQ ID NO: 185304 - protein, 71 aa, Glycine max
  Clone ID: PAT_MRT3847_138343C.1.pep
DYLCLLCVKEGKIWCTFLYSLTITDLGVGGIEKRTPRSVIVREYEGGLQHEYFKFKDVCQILGVILGMAIH

SEQ ID NO: 185305 - protein, 34 aa, Glycine max
  Clone ID: PAT_MRT3847_138344C.1.pep
MAAPTSGAVWNGLASSFLSGGNKSQTLLATVIGG

SEQ ID NO: 185306 - protein, 103 aa, Glycine max
  Clone ID: PAT_MRT3847_138345C.1.pep
GMAQTYIALHFRIKVGLVAIDVFESFAIAASIIHASIGLMIETSCEILEYIEKGSVVPAETRYLVMDEAYSILDGGLGPDIHKNLRPLTRSRNLNLMSEDYYL

SEQ ID NO: 185307 - protein, 290 aa, Glycine max
  unsure (1)..(290): unsure at all Xaa locations
  Clone ID: PAT_MRT3847_138346C.1.pep
DGTGLQFKSVMTGKYLCAESGGGTILVANCTDASGWETFRLWRINEDTFRLRVFNKQFVGLDGINVVAVSNICTYSETFHIVKESDNSSRIRIKASNGYFLQAKTQELVTADVSEVREWEDDDPTXFVMTIAARLQGEFQVTNGYGPTKAPQVMKEHWSTFIVENDFKFIASNGLNAARIPVGWWIASDPNPPWPYVGGSLHALDNAFLWAQKYGLKIIIDLHAAPGSQNGFQHGGSRDGSQEWGKTNKNILQTVRVIEFLTARFITLYIGLKLFCTSSTPFKFNMLLYI

SEQ ID NO: 185308 - protein, 111 aa, Glycine max
  Clone ID: PAT_MRT3847_138347C.1.pep
SLTRGWSNTLHGNYHSSNGKIYPYNSSYPCWPNQGSVFTDSSSISFADSPAAKPAYSSNNIVPRFRRQQSCSIEFNFSDVTQKKPSSTALDSLKGMEGYNSEVKITLALGN

SEQ ID NO: 185309 - protein, 104 aa, Glycine max
  Clone ID: PAT_MRT3847_138348C.1.pep
MALGVMAARPGELLLQPEVTLLAWASKSDTTLVDIKLWGWSLFLLTLSPSLFLLVLVPRQHNNLRARMRRRTTNIRGNNNDVSRSDANLLAHGRKIERIHPDRA

SEQ ID NO: 185310 - protein, 95 aa, Glycine max
  unsure (1)..(95): unsure at all Xaa locations
  Clone ID: PAT_MRT3847_138349C.1.pep
KGEGSSPKLLHGSPELWYSXRHQILSLSSLGYRACASDLRGYYDTEAPPXISRYDCVYIGGCLFALIDSMGLQQVSLAAHDWGAIISWYFLMSHP

SEQ ID NO: 185311 - protein, 87 aa, Glycine max
  Clone ID: PAT_MRT3847_13834C.1.pep
LFIFGCVICLFSMTSVFWNASGDLFVFYDFCVLELKCCLTSLEAVAFVVRSRTIQCLNSKVLVWFSVIYENLGIPRSLLALCRFTRL

SEQ ID NO: 185312 - protein, 68 aa, Glycine max
  Clone ID: PAT_MRT3847_138350C.1.pep
APLSCASSSDRLYTDQAIRDLRTAHALRYLLMAELRVSVTTGTVTANPSQLTWKPLDAPESSTDTIDG

SEQ ID NO: 185313 - protein, 80 aa, Glycine max
  Clone ID: PAT_MRT3847_138351C.1.pep
WILRAAVFTFRFFDHSNSQLHIGPEWALLALTLSSSALPALVADVPLDRRDQVPHWKVRELDHVDLRLLRGHPNGPRVDS

SEQ ID NO: 185314 - protein, 83 aa, Glycine max
  Clone ID: PAT_MRT3847_138352C.1.pep
QARRAQFLARVLAKDYYDKVGETEKEHPPKHEQVSGVRTATCIHPRNSVVHGSSTPVFGGVYLSFGLNALRLPKPLVYGRRFI

SEQ ID NO: 185315 - protein, 73 aa, Glycine max
  Clone ID: PAT_MRT3847_138353C.1.pep
RPRTRALRNPPLFIPNSPPTQNRVKVIIFFSFLYSFPCINCICLFLFIISTCFQMIFLRQSSPNVLLMTNLLP

SEQ ID NO: 185316 - protein, 92 aa, Glycine max
  Clone ID: PAT_MRT3847_138354C.1.pep
SIEQITLADRTRLPQSAAKQRHDNLITYTKPHIPQPRILLHQHPFLLPCNRHQVLKHQQHPKLAEAVMTSFLRRRLFEILNRHSCTTVASTL

SEQ ID NO: 185317 - protein, 279 aa, Glycine max
  Clone ID: PAT_MRT3847_138355C.1.pep
MWKWLFSREPAPPPPPVVLVPPLFDFPPLAARNRMLHSSYDVVFGKLALTSLFEDYFHQARNFTTRIMLKPIEDPHVDLIATVSGPLDHKPKDSIAGDALFRWQSDVNDPHTFMDLYVSTSNPILQMRSCAYYPKYGFGAFGVFPLLLKKRESSQDYGLMGLRYGSGNLSFGVTLLPFAMKDELPKSAWLVSKMGRLTAGVQYEPQQGNAKLSNLMNWSCAMGYGVGSGSPLCPSFNFNLELVKSSQFIASFYQHMVVQRRVKNPLEENSVVGITNYID

SEQ ID NO: 185318 - protein, 95 aa, Glycine max
  Clone ID: PAT_MRT3847_138357C.1.pep
MWKWLFSREPAPPPPPVVLVPPLFDFPPLAARNRMLHSSYDVVFGKLALTSLFEDYFHQARNFTTRIMLKPIEDPHVDLIATVSGPLDHKPKDSI

SEQ ID NO: 185319 - protein, 77 aa, Glycine max
  unsure (1)..(77): unsure at all Xaa locations
  Clone ID: PAT_MRT3847_138358C.1.pep
YXYIXTDNXTSDXLXVXXXXTXTHXSEHKPXPECFCTIFHIXXCLCPVFXGCPXYWVSXNXXTLESTSDHLXVTXXA

SEQ ID NO: 185320 - protein, 116 aa, Glycine max
  Clone ID: PAT_MRT3847_138359C.1.pep
MATSLLSFSISPTTSAFRFKASAMATTIAAPATKVAPAVIVGGGRVGRALQDMGTGQDLLVRRGESVPLNFEGPIFVCTRNDDLESELQSTPSSRWGDLVFFQNGMLEPWLESKGL

SEQ ID NO: 185321 - protein, 56 aa, Glycine max
  Clone ID: PAT_MRT3847_13835C.1.pep
IRGAIIYISFHSLQCLFQSLFTMPKPEGLPCGVQGFHANNQGQAHQATKASIPTKV

SEQ ID NO: 185322 - protein, 297 aa, Glycine max
  Clone ID: PAT_MRT3847_138360C.1.pep
MATSLSFSISPKTTATTSAFRFKVSAMATTIAAPSTKVAPAVIVGGGRVGRALQDMGTGQDLLVRRGESVPPNFEGPIFVCTRNDDLESVLQSTPSSRWRDLVFFQNGMMEPWLESKGLEDANQVLAYFAVSKIGESPIDGRTDTNPEGLTAAYGKWASVVAARLNAGGLSCKVLDKEAFQKQMLEKLIWICSVMLVGARHGGVSVGVVEKEFRTELSSLITELASAAASEKGLTFEEAMEERLCAYSRAVAHFPTAVKEFKWRNGWFCSLSEKANAQGKPDPCPLHSQWLKELRIV

SEQ ID NO: 185323 - protein, 120 aa, Glycine max
  Clone ID: PAT_MRT3847_138361C.1.pep
HIVASLSGPWDLFFVFMGTIKLTPRLSKDAYSEMKRAYKSYVRALPLLKKMGINSILLRKSIGALEVACGIVMTLVPGRPKDVANFFLLLLVLAVLFFHQLVGDPLKRYAHALVFGILLT

SEQ ID NO: 185324 - protein, 76 aa, Glycine max
  Clone ID: PAT_MRT3847_138362C.1.pep
ELVHSLSYVYQRSTTAISVVAPICYAHLAATQMGQFMKFEDKSETSSSHGGSGMPAPPVPQLPRLQENVSSSMFFC

SEQ ID NO: 185325 - protein, 80 aa, Glycine max
  Clone ID: PAT_MRT3847_138363C.1.pep
APKGPPLKKRSRSLHPQTNFKGKEPRETPRLEKKRPKNPHSRGGKTGKPPGARQKGGVGPIPRGARSPGGRGPPRGEGGA

SEQ ID NO: 185326 - protein, 58 aa, Glycine max
  Clone ID: PAT_MRT3847_138364C.1.pep
EVMHLRVYEIHSLEMGPTWQGLNLFCMDYVRYIHPSRLLGAKTRHQLLQTISEPCMCP

SEQ ID NO: 185327 - protein, 119 aa, Glycine max
  Clone ID: PAT_MRT3847_138365C.1.pep
MSKLIFVFLSLIPRLCTSFSRERPSDRRVLVLLDDFAIKSSHSLFFNSLKSRGFDLQFHLADDPQIALQRYGQYLYDALILLSASIEREFSTSHPPIDMFFLFPFFLKTMEIVICVKLF

SEQ ID NO: 185328 - protein, 54 aa, Glycine max
  Clone ID: PAT_MRT3847_138366C.1.pep
NPHQNYNHTKKKKKPALNRKNTTMHHHHITSVKERRTSITNNSFQKSNLTIFAT

SEQ ID NO: 185329 - protein, 73 aa, Glycine max
  unsure (1)..(73): unsure at all Xaa locations
  Clone ID: PAT_MRT3847_138367C.1.pep
PGNDLLRRTPAGCSCSXPCRNREDPGGFSLCSAQALVPMHLVWNGGFYLSSRFPFSQKNLSRGQTHDIGYRWI

SEQ ID NO: 185330 - protein, 65 aa, Glycine max
  Clone ID: PAT_MRT3847_138368C.1.pep
LVGKIRKHKNQPHATKHCFIVDHLKSQFQPRSHLYILGLCQKTIAFDILGDVCLVENDWKLNYII

SEQ ID NO: 185331 - protein, 1342 aa, Glycine max
  Clone ID: PAT_MRT3847_138369C.1.pep
MATNSHFPAIFPILDGRNYDQWSRKMKAILGYQDVWDLVQNGLIPLPENANAAQQTVYRESKKEDWKGLCILHQCVNPAIFEKIARSETSKEAWDILANSYAGDQKLKKVRLQTLRRQYELLGMEESESIAAYFTRVQTMTNQMLYCGETLSDESIVEKILRSVSSRFDHITVAIEQAKDLSTMTIEELQGSLEAHEQRMNEKKTVKPSTEQALAAQTGNKSGGNQRGRGRGRNNYRGGRGRGNYNNSNSAKVNSSENSSNNKQGNNHTENYRGRGGRGFRGRGRKFDKSYIQCYNCGRYGHFADECYSNVNGNDAKMAEEEEETEETLLMAIEEKKSSDETVQMVSIKKEGENGEYWVLDTGCSTHMTGRREWFVELDFTIKSRVRFADDRTMKVEGVGKVMIRKKDGSLCYITGVLYVPGMKSNLLSIGQLLEKGYRMVLEDKAMKVYDTEHNLLMKGILSNNRIFKIELGMLLQQCLATAVDKEEWLWHFRYGHLNFGDLNRMQSKAIVKGLPHIHVPKDVCAECMESKMSRGAFNPNVPSRSKRKLQRKNEVLGVFKKFKVLVEKQSGQNIEILRTDGGGEYVSTEFDEYCENEGITHEVTPPYTPQHNGVAERKNRTLLNMVRSMLKSKNMPKMWWGEAVNTAAYIINRSPTKKMENITPEEAWTGVKPNVSHFRVFGSVCYRHVPDQLRTKLDDKGEVMIMVGYHSTGGYKLVNPVNNKIVISRDIVFDEGKAWKWSEKRESSTGVEQNLFDVPAGETESDIEGETGPVEDNDDEGGSPEMPRRSLRQRQVPARLNDYEIMPDGAIDDEGNLVHFALLAETEPVTLQEAMKNSKWLEAMKEELRSIEKNLTWELVELPKGKKAIGVKWVYKVKVNPKGEVVKYKARLVARGFLQRHGVDYEEVFAPVARIETVRVVVAHASMQRWKVHQLDVKSAFLNGELEEEVYVEQPAGFVKQGSEKKVLKLRKALYGLKQAPRAWNKKIDKSLINMGYVRCISEHGVYVKSGGGDIVILCLYVDDLLVTGNNETKVTEFKRKMMSTFEMTDLGEISYFLGIEFQNTSDGVLLSQKKYVSDVLKRFNMQHCNGAATPAEAGLWLDKNVDEPEVDATEFRQVVGALRYLCNTRPDIAFSVGLISRVMDRPRTSHLAAAKRILRYVKDTMAYGILLPSKCRENEKGLYGFTDADWGGDKTDRKSTAGSVFLLGSGPISWSSKKESVVALSSCEAEYIAASMGGCQAIWLDNLMQELMIKKESVVELFVDNKSAISLAKHPVAHGRSKHIETRYHFLRDQVTKGRLKLSYCRTDMQVADIFTKAVKRETFKKLRNILNVVDCNEFV

SEQ ID NO: 185332 - protein, 307 aa, Glycine max
  Clone ID: PAT_MRT3847_13836C.1.pep
MGEVAVMHSEPLQFDCNDMKHITEKDVYNLLSNEEHILGEESSQSSNDKKINDLRERGYMKYGCQHYRRRCRIRAPCCDEIFDCRHCHNEAKNNINIDQKHRHDIPRHQVKQVICSLCETEQEVQQNCINCGVCMGKYFCGTCKLFDDDVSKQQYHCSGCGICRTGGCENFFHCHKGGWCYSTQLKNSHPCVEGAMHHDCPVCFEYLFESRNDVTVMPCGHTIHKSCLNEMREHFQYACPLCSKSVCDMSKVWEKFDLEIAATRMPEQYQNKMVWILCNDCGKTSHVQFHFVAQKCPNCKSYNTRQT

SEQ ID NO: 185333 - protein, 1380 aa, Glycine max
  Clone ID: PAT_MRT3847_138370C.1.pep
MATNSHFPAIFPILDGRNYDQWSRKMKAILGYQDVWDLVQNGLIPLPENANAAQQTVYRESKKEDWKGLCILHQCVNPAIFEKIARSETSKEAWDILANSYAGDQKLKKVRLQTLRRQYELLGMEESESIAAYFTRVQTMTNQMLYCGETLSDESIVEKILRSVSSRFDHITVAIEQAKDLSTMTIEELQGSLEAHEQRMNEKKTVKPSTEQALAAQTGNKSGGNQRGRGRGRNNYRGGRGRGNYNNSNSAKVNSSENSSNNKQGNNHTENYRGRGGRGFRGRGRKFDKSYIQCYNCGRYGHFADECYSNVNGNDAKMAEEEEETEETLLMAIEEKKSSDETVQMVSIKKEGENGEYWVLDTGCSTHMTGRREWFVELDFTIKSRVRFADDRTMKVEGVGKVMIRKKDGSLCYITGVLYVPGMKSNLLSIGQLLEKGYRMVLEDKAMKVYDTEHNLLMKGILSNNRIFKIELGMLLQQCLATAVDKEEWLWHFRYGHLNFGDLNRMQSKAIVKGLPHIHVPKDVCAECMESKMSRGAFNPNVPSRSKRKLQVIFSDVCGPIQHETPAGNKYFVTFIDDFTRKLWIYLIKRKNEVLGVFKKFKVLVEKQSGQNIEILRTDGGGEYVSTEFDEYCENEGITHEVTPPYTPQHNGVAERKNRTLLNMVRSMLKSKNMPKMWWGEAVNTAAYIINRSPTKKMENITPEEAWTGVKPNVSHFRVFGSVCYRHVPDQLRTKLDDKGEVMIMVGYHSTGGYKLVNPVNNKIVISRDIVFDEGKAWKWSEKRESSTGVEQNLFDVPAGETESDIEGETGPVEDNDDEGGSPEMPRRSLRQRQVPARLNDYEIMPDGAIDDEGNLVHFALLAETEPVTLQEAMKNSKWLEAMKEELRSIEKNLTWELVELPKGKKAIGVKWVYKVKVNPKGEVVKYKARLVARGFLQRHGVDYEEVFAPVARIETVRVVVAHASMQRWKVHQLDVKSAFLNGELEEEVYVEQPAGFVKQGSEKKVLKLRKALYGLKQAPRAWNKKIDKSLINMGYVRCISEHGVYVKSGGGDIVILCLYVDDLLVTGNNETKVTEFKRKMMSTFEMTDLGEISYFLGIEFQNTSDGVLLSQKKYVSDVLKRFNMQHCNGAATPAEAGLWLDKNVDEPEVDATEFRQVVGALRYLCNTRPDIAFSVGLISRVMDRPRTSHLAAAKRILRYVKDTMAYGILLPSKCRENEKGLYGFTDADWGGDKTDRKSTAGSVFLLGSGPISWSSKKESVVALSSCEAEYIAASMGGCQAIWLDNLMQELMIKKESVVELFVDNKSAISLAKHPVAHGRSKHIETRYHFLRDQVTKGRLKLSYCRTDMQVADIFTKAVKRETFKKLRNILNVVDCNEFV

SEQ ID NO: 185334 - protein, 99 aa, Glycine max
  Clone ID: PAT_MRT3847_138371C.1.pep
CSWTTITCAMCSISHTTLVCFGNRPLTVGCIFSLNGKFPAIKATIILCNPVKISFCTMNSHRYVIVIGQQILPQSMSYRVCTSSITTTVKTSRTRIYQP

SEQ ID NO: 185335 - protein, 174 aa, Glycine max
  Clone ID: PAT_MRT3847_138372C.1.pep
MSDEGERTCPLCAEEMDLTDQQLKPCKCGYEICVWCWHHIMDMAEKDDTEGRCPACRSPYDKEKIVGTAANCERLMKTQKAKSKSSDGRKQLSSVRVIQRNLVYIVGLPLNLADEDLLQRREYFAQYGKVLKVSMSRTAAGVIQQFPNDTCRVYITYSKEEEAVCCIQNVHGIC

SEQ ID NO: 185336 - protein, 163 aa, Glycine max
  Clone ID: PAT_MRT3847_138373C.1.pep
GSSDEGERTCPLCAEEMDLTDQQLKPCKCGYEICVWCWHHIMDMAEKDDTEGRCPACRSPYDKEKIVGTAANCDRLVNGVNIEKRMKTQKTKSKSTDGRKQLSSVRVIQRNLVYIVGLPLNLADEDLLQRREYFSQYGKVLKVSMSRTAAGAIQQFPNDTCSV

SEQ ID NO: 185337 - protein, 672 aa, Glycine max
  Clone ID: PAT_MRT3847_138374C.1.pep
PTRPFDFASGYFQIFMSSSAPAVLVMLYVSPYAGNKDCADSSVRHFLSSCRNILSKALHGQCARVVLEFCKLLRRVGSHDPLYLFCRSTFGSLLETAGVSYGSGSDNVKGLVLIQDIFPFVCELANSLLRDLDLSIVSPSAAGPLSNDVGDFSAFLLSLRTGMKEQQAVKDSMAQDKHHKLTEEIEYLHGLYVQLLNKIDQCLQKMDQSLAGQEMMEGDNLYPAWSHYLSILKELYQISKLYDGAEEKLWGVLTRQRSVLCLLIVRYAKRTDEHQWILEHRYVTNFESRRHLAMMMFPEVKEDYEELHEMLIDRSQLLTESFEYIARAEPDSLHAGLFMEFKNEEATGPTGPGVLREWFLLVCQAIFNPQNALFVACPNDQRRFFPNPASKVHPLHLEYFSFAGRVIALALMHRVQVGIVFDRGFFLQLAGNYIAIEDIRDADPYLYTSCKQILDMDADFIDSDALGLTFVREVEELGQRKVVELCPGGKNLAVNSKNRDKYVDLLIQDHFVTSISEQVSHFAKGFADILSNSKLQQYFFQSLDLEDLDTMLHGSEDTISVEDWKAHTEYNGYKETDIHISWFWEIVGRMTADQRKVLLFFWTSVKYLPVEGFRGLASRLYIYRSLEPGDRLPSSHTCFFRLCFPAYSSMAVMKDRLEVITQEHIGCSFGTW

SEQ ID NO: 185338 - protein, 142 aa, Glycine max
  unsure (1)..(142): unsure at all Xaa locations
  Clone ID: PAT_MRT3847_138375C.1.pep
MSPRCTKWGERPRPTHPPSLLGGGGXXXXXPPPPKXPXXLGGPGGAPLPSPPAPPPXPPPRARPPPXSPPPPPPPTPARRLLSPPPPAPLAPPPPAPPQPPPPRPPPPPPXPPPPPPPPPPPPPPPAPPPPRAPRPPPPPPP

SEQ ID NO: 185339 - protein, 98 aa, Glycine max
  Clone ID: PAT_MRT3847_138376C.1.pep
GVRGYGLVSRTSASRRREGKRELIAEIHSYDAVCAVMVWFRGPLPPGVGLLVLDEIRNRDSCLPCYQQQSCSIILQDQDYQTESLRSKKSSLLSCSLH

SEQ ID NO: 185340 - protein, 56 aa, Glycine max
  Clone ID: PAT_MRT3847_138377C.1.pep
GPDGELGELLAGVPIAHGGGLPTINPVLLPKKTEGASKEPKPPPKATKPPKKASVI

SEQ ID NO: 185341 - protein, 46 aa, Glycine max
  Clone ID: PAT_MRT3847_138378C.1.pep
GKGVQAVANATQQLQKTESKDEVVGNEQLQNNLHSILFQSLSFVIF

SEQ ID NO: 185342 - protein, 261 aa, Glycine max
  Clone ID: PAT_MRT3847_138379C.1.pep
PVSVHQLVENTDETYCIDNEALYDICFRTLKLSTPTYGDLNHLVSLTMSGVTTCLRFPGQLNADLRKLAVNMVPFPRLHFFMPGFAPLTARGSQQYRALTVPELTQQMFDAKNMMAACDPRHGRYLTVAAIFRGRMSMKEVDEQMLNIQNKNSSYFVEWIPNNVKTAVCDIPARGLKMSATFIGNSTAIQELFKRISEQFTAMFRRKAFLHWYTGEGMDEMEFTEAESNMNDLVSEYQQYQEATADEDAEFDEDQEEVEQD

SEQ ID NO: 185343 - protein, 118 aa, Glycine max
  Clone ID: PAT_MRT3847_13837C.1.pep
DRWVRLTEDDTRIQGEGEQQKGARCEKTTEGRIIVRVCEKTDNCVYISTVASTCDHMVITGDVLTNNYTMDECAISSADILTTNTAGGTPTRGGVCSNSCSGGGATIAFSSGSTTFFS

SEQ ID NO: 185344 - protein, 136 aa, Glycine max
  unsure (1)..(136): unsure at all Xaa locations
  Clone ID: PAT_MRT3847_138380C.1.pep
MTHDRPWAPAPHSSLLLLLLLLHLAIAAHGISISYGTLGDNLLPPAAVANFLKMRRIIYGVTIYDVNPDILQAFAGSCISMTVSWAIGEIATLWTIDSARQWVATQIKPFQAGTGVXYILVRSEVXHWGDTDMIRG

SEQ ID NO: 185345 - protein, 63 aa, Glycine max
  Clone ID: PAT_MRT3847_138381C.1.pep
MQGDLCIGSGREVNVKSGLPATTSTERLEQLDDDEHILGIRIIGRDHRLRNYFGIITVHPEVI

SEQ ID NO: 185346 - protein, 65 aa, Glycine max
  Clone ID: PAT_MRT3847_138382C.1.pep
DDIPKHKHIHCSITCVSELVRLSYGKLKGCMCGFDVPGCDECTNDGATRVMQCSFCESSTVPNLP

SEQ ID NO: 185347 - protein, 102 aa, Glycine max
  Clone ID: PAT_MRT3847_138383C.1.pep
RSIYSYTYVHKALRLDLINSAMDNYDRDLESANTDNHTLAPTDTQRYIEYRQADGHEQLTGYTEIEERDLRDTGEPCHDQPRHMLAHHSRTSRGDSDLDGSL

SEQ ID NO: 185348 - protein, 187 aa, Glycine max
  Clone ID: PAT_MRT3847_138384C.1.pep
TMWEVLTGRRDGTVSNSNEALANIPAPFFNFTQLKESFAGKGLTLHDLVVLSGAHTIGIGHCNLFSNRLYNFTGKGDQDPSLNTTYAEFLKTKCQSLSDTTTTVEMDPGSSTKFDSDYYPNLLQNKGLFQSDAALLTQEQSEDIAKELVDQNKFFTEFAQSMKRMGAIEVLTGSAGEIRNKCSVVNS

SEQ ID NO: 185349 - protein, 48 aa, Glycine max
  Clone ID: PAT_MRT3847_138385C.1.pep
TTCISLLAYERVTSEICTQKLNDVHFRSKKKKRKTKKKKKKKKKNIKV

SEQ ID NO: 185350 - protein, 65 aa, Glycine max
  Clone ID: PAT_MRT3847_138386C.1.pep
FLGFDKNEPTSRSGGKAVAVQQIKKANGFKTLTMVGDGATDFEVRKILCKFPCNFMIRLVFIVLI

SEQ ID NO: 185351 - protein, 318 aa, Glycine max
  unsure (1)..(318): unsure at all Xaa locations
  Clone ID: PAT_MRT3847_138387C.1.pep
MNFNCTANKEQKKTVDQSILLCCKFFVSESRNNATLNAIERAARSNPETVIVNMFHDRAYNRARYDLVSYVLHDCTGNPIYSPLHQTVIAMAEATFNAVNLEFHEGAHPRLGAVDDIVFHPLGHASLDEAAWLAKAVAADIGNRFSVPVFLYAAAHPTGKELDAIRRELGYYRPNSRGXNWAGWAMPETLPLSPDEGPNVVSRAKGITMIGARPWVTLYNVPILCTDVSVARRIARKVSARGGGLPTVQTIALVHEDSTEIACMLLDSKQVGADRVQNRVEMLAAQEGLDIEQGYFTDISPEMIVEKYMKLINSANKS

SEQ ID NO: 185352 - protein, 88 aa, Glycine max
  Clone ID: PAT_MRT3847_138388C.1.pep
AEFAALQPWLLLSSSRTEPPAQPSPHSIVSINQPTPGECVCSMAKAGTATTAVVYCHTYQHISIICWTLMLTAAVPTAVSTAGGFCSM

SEQ ID NO: 185353 - protein, 219 aa, Glycine max
  unsure (1)..(219): unsure at all Xaa locations
  Clone ID: PAT_MRT3847_138389C.1.pep
MDFNKEQKKTIDQSILLCCKFFVSESRNNATLNAIERVARSNPETVIVNMFHDRSYNRARYDLVSYVLHDCTGNPIYSPLHQTVIAMAEATFNAINLEFHEGAHPRLGALDDIIFHPLGHASLDEAAWLAKAVAADIGNRFSVPVFLYAAAHPTGKEVDAIRRELGYYRPNSGGSQWXGWAMPETLPLSPDEGPNVVSRAKGITVIGARPWIHXYNVPI

SEQ ID NO: 185354 - protein, 63 aa, Glycine max
  Clone ID: PAT_MRT3847_13838C.1.pep
FCNNMNLRIGHRVLCGVTNRVDLDTASYNHTVIDNHDEYERLMLLTQMSYLKTFFLYTVITDI

SEQ ID NO: 185355 - protein, 125 aa, Glycine max
  Clone ID: PAT_MRT3847_138390C.1.pep
PEQRVASGGAAHQHISGGKQLSPQLCRGGAHCRALRAPGAAAASSRAAASASELPLADAAPPASVRVPVTYYLARVNCLLSVPRVQLSDTDSIGWLLLIVRAAGVTPFVVAGVEFGKRIVSATRG

SEQ ID NO: 185356 - protein, 163 aa, Glycine max
  unsure (1)..(163): unsure at all Xaa locations
  Clone ID: PAT_MRT3847_138391C.1.pep
VEHYDWDKLTGSLRVATDGKSTERHRSTSFQADDDRTGGYRRLELRRDCEMRYVMTDGSVNNVHLXDERCRRTPWILDRSLMQLQRTGHRGLLHSTMTXLLDVLDDYLNRRRLVYRTIDGTTSLDDRESGIMDCNSPDXHCVMSVLSSRAAGRGLDLESADTV

SEQ ID NO: 185357 - protein, 91 aa, Glycine max
  unsure (1)..(91): unsure at all Xaa locations
  Clone ID: PAT_MRT3847_138392C.1.pep
ATTIICKMSLPDGIGTFLDSGSFMAFTGSSDASVSGHRLPWCNIHSSTFSLESNFAPGSSTLLEDMGNSPFTFAKPTSLSXWVLFPCSISS

SEQ ID NO: 185358 - protein, 289 aa, Glycine max
  Clone ID: PAT_MRT3847_138393C.1.pep
PRASPHIALLKLTSIFIVIASAPELCGSSKTFTLVNYCKETIWPGITRSDNHSGDGFALKSGHSTVYTAPDGWSGRIWARTGCNFDNNGHGKCQTGGCGTSINCTVPGSPPATSADFTLGEPDFYDVSLVDGFNLPIVVKAINGTGNCSTVGCDGDLRQNCPSELASKDNDKVIACQFGWSVFNTDDYCCRGTYGNPATCLASNYSKIFKQVCPAAYSFALDDPTSLITCSKADFVVIFCGSRNQTACSYQDKQVVCNRPNKAYKAIPQSWWVLMLLPLTYVFNLRITP

SEQ ID NO: 185359 - protein, 44 aa, Glycine max
  unsure (1)..(44): unsure at all Xaa locations
  Clone ID: PAT_MRT3847_138394C.1.pep
QLVQQSLQNNMRKMVKRANXPQDIVPSDHFKSLPLSSTTKSLPF

SEQ ID NO: 185360 - protein, 72 aa, Glycine max
  Clone ID: PAT_MRT3847_138395C.1.pep
QINMLLLKNIKKIKSEPENKITKKCKRGLIERNRRVCYSAMRIRVGEKWKLTSAMSQTRSTIATKKKMQLSE

SEQ ID NO: 185361 - protein, 77 aa, Glycine max
  Clone ID: PAT_MRT3847_138396C.1.pep
IPPPYLRIAKSLWAMGYEVLYGGAIGNNGVFIWRNFDLPPSAIKNTDCDSQMLKSVSNYFNQMLIKKYNNNQMVHKL

SEQ ID NO: 185362 - protein, 70 aa, Glycine max
  Clone ID: PAT_MRT3847_138397C.1.pep
ERKFLLFYDYYNNLELWRIKLISNTTRTEGILDSAGHAGIAVLENHNACSQLGKHVNHRALRCLIIQNAK

SEQ ID NO: 185363 - protein, 66 aa, Glycine max
  Clone ID: PAT_MRT3847_138398C.1.pep
QFLKKNFRKNHFFSMNSSLDPFVGSLHNPLICDNALNTGHSIPRTLSHQLGHSSNPSNKSHLQSPF

SEQ ID NO: 185364 - protein, 72 aa, Glycine max
  Clone ID: PAT_MRT3847_138399C.1.pep
NKFQAYRIQNTLLRLKICDNIPSCYHYRFSKHKMCDIEDPIIFLHNVFQEVETCLNGAMCENFLHTTTEADI

SEQ ID NO: 185365 - protein, 223 aa, Glycine max
  Clone ID: PAT_MRT3847_13839C.1.pep
MEETPSSVPATASCWSNVVKKQPPPPPQQHTERVLVETSDSPNAISVAVVDANAVIESGEKLHGLADKFISIPEVMEEIRDPVSRHKLSFLPFTIQTMEPSSESINKVVKFARATGDLQTLSDVDIKLIALTYTLEGQIHGTKHIRDAPPPVQMVNVKRLPEKDLPGWGSNVPNLDEWEALEHAEDASNSNSRILPLQDLSLNIDSQDEHSVDGSVEPVSEAD

SEQ ID NO: 185366 - protein, 133 aa, Glycine max
  unsure (1)..(133): unsure at all Xaa locations
  Clone ID: PAT_MRT3847_1383C.1.pep
MEHPQINKVHKLLLTAFVLFFLASLGLSFPLEPPGNNRQWHMTSDVKQVAGKSYDYIIVGGGTCGCPLAATLSQDFSVLLIERGSSPYGNPLVIDRRYYGFPLIKTDQYMSVAQSFTSXDGVGNVRGRVLGGS

SEQ ID NO: 185367 - protein, 73 aa, Glycine max
  unsure (1)..(73): unsure at all Xaa locations
  Clone ID: PAT_MRT3847_138400C.1.pep
EERLFLXVQMHQLPYKLAITQPTTHSEAQLKEKYQLRLKVLQENLRETSNSINLCTLNLQYFNNWPYQLQSLC

SEQ ID NO: 185368 - protein, 486 aa, Glycine max
  Clone ID: PAT_MRT3847_138401C.1.pep
MAHMNVSSEFGSRFRMYTFKVKPCSRAYSHDWTECPFVHPGENARRRDPRKYHYSCVPCPEFRKGSCSKGDACEYAHGIFECWLHPAQYRTRLCKDEGGCTRRVCFFAHKLEELRPLYASTGSAIPSPRSYSASASALEMGSVSPIALGSPSVLMPPTSTPPLTPSGASSPIAGSMWSQSNVSVPTLQLPKSRLKTASTARDIDLDIELLGLESAASAHWRRQQLMMDEISALSSPNWKNSMPNSPSFRVPLNDHTGELNRLSGVKPANLEDMFGSLDPSILSKYHGISLDVAGPQLQSPTGIQMRQNVNQQLGGYSSSLSTLNVIGSRSFRLDQSGEAASVALNPRVAAFAKRSQSFIERGVVNHHSELPSPKPSTFSNWGSPVGKLDWAVNGEELNKLRKSASFGFRGSDTPLTKTSTKMSANVDDEPDVSWVNSLVKDAPPESGESGEYSVEDQRKLLQCHNGTDAIPAWLEQLYLDQEQMVA

SEQ ID NO: 185369 - protein, 58 aa, Glycine max
  Clone ID: PAT_MRT3847_138402C.1.pep
RAERDTWREMGSGMREGWSGVSVAVGGRVFVIAEYGDAPVKVYDEEFDTWRYVKGGRF

SEQ ID NO: 185370 - protein, 147 aa, Glycine max
  Clone ID: PAT_MRT3847_138403C.1.pep
GEAATVALNPRAAAFAKRSQSFIERSVVNHHSEIPSPNPSTFSNWGSPGGKLDWAINGEELNKLRKSASFGFRSSSSPLTKASNKISANVDDEPDVSWVNSLVKDAPPESGEYSVEDHRKLLQCHNGTDAIPAWLEQLYLDQVQMVA

SEQ ID NO: 185371 - protein, 41 aa, Glycine max
  Clone ID: PAT_MRT3847_138404C.1.pep
RRAVHSPNPSRDPLAACEMGSTSTMRRSRLFANQVMRILMV

SEQ ID NO: 185372 - protein, 67 aa, Glycine max
  Clone ID: PAT_MRT3847_138405C.1.pep
YEPLRSYLANVDSTFLPLAYAFKNLSHIYYKFLMGLGGLISHSLCISQFKATVSSLLFGSSIKNYTK

SEQ ID NO: 185373 - protein, 80 aa, Glycine max
  Clone ID: PAT_MRT3847_138406C.1.pep
RHGARPTTSGNRMNLIIWCRSSAFRELKKYRKDFSSWCGECRRKKKEKERLLVMATQQELMNRGMQSASGTCTHKLSLYS

SEQ ID NO: 185374 - protein, 58 aa, Glycine max
  Clone ID: PAT_MRT3847_138407C.1.pep
EEFTSGNLVYQRIVRCGGAVDDDMSNIIVAQLLYRAACGPCRGCVVDLHSRPASGACG

SEQ ID NO: 185375 - protein, 76 aa, Glycine max
  Clone ID: PAT_MRT3847_138408C.1.pep
TQQRNDEHATYAYDTYIMHAIRTIILVSTLLSAVIATCDFSGYISSAIGTRICSGSNSFSLQGTNCPGYEHDAISF

SEQ ID NO: 185376 - protein, 48 aa, Glycine max
  Clone ID: PAT_MRT3847_138409C.1.pep
PELPYNIQPTNCCPSIPTHIIDYKYLTSNQPLRILTATHLVNKDYLAK

SEQ ID NO: 185377 - protein, 116 aa, Glycine max
  unsure (1)..(116): unsure at all Xaa locations
  Clone ID: PAT_MRT3847_13840C.1.pep
AHATAKKDNPESAKTPENPQGATDTGPDAAPTEPRRRKGFFSGDVFXGQAGIQERNASWGGDWLEHYIQXEGQMPSDKTGGGGDDAFNTFFRETGAGKHVPRAISXDLEPTAIGES

SEQ ID NO: 185378 - protein, 468 aa, Glycine max
  unsure (1)..(468): unsure at all Xaa locations
  Clone ID: PAT_MRT3847_138410C.1.pep
SLGVVGLLNLHLLLWLVHLAWFDLNGGLLPLTFRTPPVRTPRPSHVTRAAGAAAAGFSLHADDSPHARXIHTLSNDVRASVTSDRSFLPQSTIYSWSCGHFSKPLLTAADDSEEVSARREEREKFALEHIAKCQHSAVSRLANPIAKWDIKGTQTALLQPFSPIVIAADENERIRIWNHEEATLLNSFDNHDFPDKGISKLCLVNELDESLLLAASSDGNIRIWKDYTLKGKQKLVTAFSSIHGHKPGVRNLNAVVDWQQQCGYLYASGEISSIMLWDVDKEQLVNSKSSSSDCSVSALAASQVHGGQFTAGFIDGSVRLYDVRTPDMLVCGLRPHTQRVEKVVGIGFQPGLDQGKIVSASQAGDIQFLDIRNHSSAYLTIEAHRGSLTALAVHRHAPIIASGSAKQLIKVFSLEGDQLGTIRYYPTLMAQKIGSVSCLNFHPYQVLLAAGAADACVCIYADDNTQAR

SEQ ID NO: 185379 - protein, 90 aa, Glycine max
  Clone ID: PAT_MRT3847_138411C.1.pep
FSRGSAPSAAVASVRQSLSIKLRVHVSSVAVSETPLVLIHDTTSAASVDTVVPFPGRHSPSHSIRSVSSDTVFSMHLLLPHLHLLLASLS

SEQ ID NO: 185380 - protein, 140 aa, Glycine max
  unsure (1)..(140): unsure at all Xaa locations
  Clone ID: PAT_MRT3847_138412C.1.pep
TGSKKGITVLGKELEGPALNRSSPSSNTHWTLKFNVNPIVYYWLFLPQLNLCPALYGQLSSIDTCHGQTPPDSPTRRSFSRAPYAGARLPDLALLLDRRGHSDMVRETERRELQERRADXPYSKPVAALDMTRNMGFVVR

SEQ ID NO: 185381 - protein, 116 aa, Glycine max
  Clone ID: PAT_MRT3847_138413C.1.pep
MNQTYGMSLKNGGMSERFFIARNNKRWGKRYGFVRFKGVKDVTRLERKPDSLVVRGLKMHVNTPKHGRERVTLEEVSRGRRQKKGHEEANGKDKHKMEGNHGIEDKPSRIRATTRH

SEQ ID NO: 185382 - protein, 66 aa, Glycine max
  Clone ID: PAT_MRT3847_138414C.1.pep
VFGVLENCLHQVSEQINGLGICTLMVNVATVSNRSKAKTCAARFRSTKKALLTAASGTIYLDTCCQ

SEQ ID NO: 185383 - protein, 87 aa, Glycine max
  Clone ID: PAT_MRT3847_138415C.1.pep
LWSALAQAVALVHSLHVSMLGPLQIVVHGFGAVQLPTLPHHFQHHSVEFVTAAVDQVDSIQCSTELHNQLRLLYTMNRWDRYCRLTG

SEQ ID NO: 185384 - protein, 82 aa, Glycine max
  unsure (1)..(82): unsure at all Xaa locations
  Clone ID: PAT_MRT3847_138416C.1.pep
TIAIADRPAKYRARTTRSTTHHFSKGFFQXQQRRRFRLGVGIHEPGGARSESPQRARVPRYEAGPKDSTADFIGGHPRPVSP

SEQ ID NO: 185385 - protein, 69 aa, Glycine max
  Clone ID: PAT_MRT3847_138417C.1.pep
NLVLTFLQLMGSEIIDHMIKRGVVAEFCSLLETSNSFLLLQVLLIKWNNNNKEIQLVIGLEKSVKEHGK

SEQ ID NO: 185386 - protein, 97 aa, Glycine max
  Clone ID: PAT_MRT3847_138418C.1.pep
PERFTASLSHHQTPLSRLASFNLFPSASFSSPHCIYFLLDFSTHAPSYPLYLTPLIFFLSTYSHTPLYSIHHPFFLLPPLFVLPPSPFQSFLQPWLA

SEQ ID NO: 185387 - protein, 72 aa, Glycine max
  Clone ID: PAT_MRT3847_138419C.1.pep
FPAILLFPKHSSHPVKFPSQKIHVDSFAAVVNPFRSGSSQYLAPCSFEPYRQLNLVSDLGISLKMGMAVFDS

SEQ ID NO: 185388 - protein, 78 aa, Glycine max
  Clone ID: PAT_MRT3847_13841C.1.pep
NLLFFKTNGLKIKEIRKERLQTQPPKPTFFLKSNFNLFHLNMRDTHVVFDNCNTSLNIMPMCLKHTKTPLLFEDPPPP

SEQ ID NO: 185389 - protein, 95 aa, Glycine max
  Clone ID: PAT_MRT3847_138420C.1.pep
EGCFVCSTIGSAQLKNTAATPAATSPVGHYTKMSYGIAKSANTGKLKDAVLHNNNDKAKKKMKLSERTTPSANAAPSSIHKLKKLCELIKGSIYA

SEQ ID NO: 185390 - protein, 119 aa, Glycine max
  Clone ID: PAT_MRT3847_138421C.1.pep
LTRPLRVGTTDVVGDNNNNNTFHSRGESGWVPWRRSWRNCTKRQNKADVADICGDGKHYESLCIDALEQLKKFAGDYRILRDTLVGQHIQVVTKHPKLKIKASAICLIEIWQGIVINVT

SEQ ID NO: 185391 - protein, 66 aa, Glycine max
  Clone ID: PAT_MRT3847_138422C.1.pep
GGTGSPRGIPHSRPLGWWTRVRGNKKWRLIYEHGGVQTYGTREHGIAPTYPQRLSLGLGRSGRITS

SEQ ID NO: 185392 - protein, 42 aa, Glycine max
  Clone ID: PAT_MRT3847_138423C.1.pep
IFPLHNILFVYQIFDNKSIYFKIKFKVKNIYCSLKSEWLPPN

SEQ ID NO: 185393 - protein, 80 aa, Glycine max
  Clone ID: PAT_MRT3847_138424C.1.pep
FPDDPFALGFFARFFSISDLTIPLIEILDWILYCVKQLSSTIVSLSPRLFSRSQCSLMDQNVFVFTFQCDLLIIYPPNLR

SEQ ID NO: 185394 - protein, 56 aa, Glycine max
  unsure (1)..(56): unsure at all Xaa locations
  Clone ID: PAT_MRT3847_138425C.1.pep
MIITYITYLNICSNLLTNSLKEPYMDXYLSREKLHSALSKWVDAKPENPTIRSDTP

SEQ ID NO: 185395 - protein, 108 aa, Glycine max
  Clone ID: PAT_MRT3847_138426C.1.pep
EYYSRRSTSIGEKSKNRDRGRTQEYYKRRSTSTGEKSKNWHKEKVQENDTRITCDDDEERSSLKASRGYSRSSTCQVCSTCYCEGCIKCRFEDCNCQECRDFMLYAKP

SEQ ID NO: 185396 - protein, 47 aa, Glycine max
  Clone ID: PAT_MRT3847_138427C.1.pep
KGILVLFFLTIYRPCVFHGFSVVQMRNNFLSPLYPGESVKLNISPPC

SEQ ID NO: 185397 - protein, 100 aa, Glycine max
  unsure (1)..(100): unsure at all Xaa locations
  Clone ID: PAT_MRT3847_138428C.1.pep
PTANKAFRTQTVPRGRGGGAPHPGALVAKGGELSSPSPARGGKVFSPNFVWGPVFSSGYARHRAQSPPFFLAFRPVKAMAVDLFPHPPXCELVVFLRGRS

SEQ ID NO: 185398 - protein, 59 aa, Glycine max
  Clone ID: PAT_MRT3847_138429C.1.pep
KYRLHHSGVWLFPSLNNKTPICFLSLQLTRARINTFFLLSYSLLFHYPSLQSSFTQTYP

SEQ ID NO: 185399 - protein, 80 aa, Glycine max
  Clone ID: PAT_MRT3847_13842C.1.pep
LASLALSSSDFSQCLRSNTKPCTANKTCTTTTYDSQEDEEYEEDDDEENVPSPSSAFVFTVGRPGSAVSNGGGGSPIWKP

SEQ ID NO: 185400 - protein, 75 aa, Glycine max
  unsure (1)..(75): unsure at all Xaa locations
  Clone ID: PAT_MRT3847_138430C.1.pep
NEILFVPPHPESSILLRIWRRALHKFSLSGFIGFDVPPPKGXLCILADVFMRAYHAVFAYGNLQVGFSPVSLITL

SEQ ID NO: 185401 - protein, 66 aa, Glycine max
  unsure (1)..(66): unsure at all Xaa locations
  Clone ID: PAT_MRT3847_138431C.1.pep
PMXSXXENHSRSLWPAQRXIFCPLRNRAQXXRRKLRXSXXXSXXIXFCVRFVRIXXPVIXVYXNFX

SEQ ID NO: 185402 - protein, 239 aa, Glycine max
  Clone ID: PAT_MRT3847_138432C.1.pep
MCSKIVPPRFSFSHDVPELQKQQDVPRKDTMLLESNHDFEFSTIRRSLEFESSSADELFSNGVILPIQMQKKRNTTRKHTLCGEAPYMRLPPLPCTPSSVDKIKKESTREVLDKKAHSTSFWGFSRSKSLSCDTKKSLMCYSPPLSRSNSTGSVPQPKRVSSTRQHSAAKPLSSSSSSTLNLYPIQRSRSGKSYGGSYANGLWISPVLNLPTPCISKGSGSLFGLGSFLRVGKAKKSKK

SEQ ID NO: 185403 - protein, 53 aa, Glycine max
  Clone ID: PAT_MRT3847_138433C.1.pep
MGETFLFNSKSVNEGNPDKLCEQISDAVLDACLEQEPNSKVACETCTKNNLVM

SEQ ID NO: 185404 - protein, 59 aa, Glycine max
  Clone ID: PAT_MRT3847_138434C.1.pep
KFGEILEPSQPFSDLQELPEPQFTTEQTLFRLEKKAWVVPICKRMCSSSNNKQAHTRTP

SEQ ID NO: 185405 - protein, 46 aa, Glycine max
  Clone ID: PAT_MRT3847_138435C.1.pep
FYVDEVLLALEYLHMLGFVYRDLKPKNILIREDGHIMLTDFDWSLR

SEQ ID NO: 185406 - protein, 53 aa, Glycine max
  Clone ID: PAT_MRT3847_138436C.1.pep
YPFAGAFFGGEKKKRRGGTFPPNFKAQSVSFRLSGLKPNLFPANYKLIFWAKE

SEQ ID NO: 185407 - protein, 92 aa, Glycine max
  unsure (1)..(92): unsure at all Xaa locations
  Clone ID: PAT_MRT3847_138437C.1.pep
IIIRATRTQPALSENGRKIRELTSVAHKTFNFPETAXELYADKVNTRGGGGYXHAEDLQYNLLEGLPVHSACCDILNLFMETETKVFEYYRI

SEQ ID NO: 185408 - protein, 148 aa, Glycine max
  Clone ID: PAT_MRT3847_138438C.1.pep
LFRELGGRKVIRGAQSFYRGGGTHLTGARGKRPSKMLMKAWGPWKNLIPWFFRHQKKILKPQSNQRRQKSILPWGVWAGDLGRFWCFFGPKKPFCLGGKFFLGANQLGGFLETRWKGSKIFFFLREKKKRRGGGGGGGGGGGGGGGGG

SEQ ID NO: 185409 - protein, 49 aa, Glycine max
  unsure (1)..(49): unsure at all Xaa locations
  Clone ID: PAT_MRT3847_138439C.1.pep
VCSGYLKMDTPLLIVVMMCEVCVILKKKEQXQKMHYLRGAIHKGMWLPR

SEQ ID NO: 185410 - protein, 65 aa, Glycine max
  unsure (1)..(65): unsure at all Xaa locations
  Clone ID: PAT_MRT3847_13843C.1.pep
PTRPRSDNIIMFFLDXSYAWLLCYIYTTHSSLHATSIIIKYFFLHIFINITFFNFYIILFNHYIL

SEQ ID NO: 185411 - protein, 45 aa, Glycine max
  Clone ID: PAT_MRT3847_138440C.1.pep
DEPILLWGIWGCGCPKLDSNVTVPDVNEDHFLIKLVSAAFNPVDP

SEQ ID NO: 185412 - protein, 57 aa, Glycine max
  Clone ID: PAT_MRT3847_138441C.1.pep
MHLMLVPVPQDAAKRIYTLKKVMDGEISMSAHPARMWPDDKYSRHKVTIHKRYRLLL

SEQ ID NO: 185413 - protein, 191 aa, Glycine max
  unsure (1)..(191): unsure at all Xaa locations
  Clone ID: PAT_MRT3847_138442C.1.pep
FMILLYRGISGQDSEKIPFGFFDRNGEFIETYITANKRIDTGGNMLGCFCFLQIVMPDLNQPSEEHKPRGRESISESKELAYILQEMKKPLNGIRFTRKLLENTAVSENQKQFLDTSDACERQILAIIEDTNLXSINEGTLQLNMEEXVLGNILDAIVSQVMMLIREKNLQLFHEIPDEIKMLSLYGDXIK

SEQ ID NO: 185414 - protein, 64 aa, Glycine max
  Clone ID: PAT_MRT3847_138443C.1.pep
GGFPMLLTPLQSNYKARTVPYIFPSENPRKTTPSEIARIGLFHNSVPSSQKRADSDTTVPDASI

SEQ ID NO: 185415 - protein, 105 aa, Glycine max
  Clone ID: PAT_MRT3847_138444C.1.pep
RNLVGTLHQAILRYQAPDQLLCTFPKRRSLYYTQWYHPFTRAPPAYASLLPYWRFSSFAPSSLLAAQTYSECLIRYLDFDCSYIAVFPLLFGQSPPPPPPPPPPS

SEQ ID NO: 185416 - protein, 79 aa, Glycine max
  Clone ID: PAT_MRT3847_138445C.1.pep
MAVQSSTSSESQASENVMHRHFFLWREFLWGAVAGAFGEGMMHPVDTVKTRLQSQAILNGIQNQRNILQMVRYVWQVDG

SEQ ID NO: 185417 - protein, 84 aa, Glycine max
  unsure (1)..(84): unsure at all Xaa locations
  Clone ID: PAT_MRT3847_138446C.1.pep
EGTLYVGFXAXNQSDKRXLFTEVGYKGDVFVSPIRLXHFQQNVXYGNALAISALIIQNPGVITNSNSVFGSIPPISFLFFSKSF

SEQ ID NO: 185418 - protein, 71 aa, Glycine max
  unsure (1)..(71): unsure at all Xaa locations
  Clone ID: PAT_MRT3847_138447C.1.pep
QATHKEQRRQTQQHKEQGAKKCDPPLTNNNTNXERTTSKDRLLYEQENARKCTITTKNQVPMMITAXXPKR

SEQ ID NO: 185419 - protein, 257 aa, Glycine max
  Clone ID: PAT_MRT3847_138448C.1.pep
MAQKYLHELLEEDQEPFFLNKYISDRRTQMKRPSPKTSLQVKKRKSTNPNTNFPRNLCKSACLFSLTDTPDLRKSPLFEFTSPVKSPCKSPNAIFLHIPSRTAALLLEAALRIQKHSSHVTSKPKTKAHSFGLFGSLYKRLTQRNQKKHEIESGGGVKISVKDVLKWDSSVGRRKVSKANGKCKEQEETVNVNVNVNTCSYNGSSALWSESNEDNKSLDMETSSSGYYSEEIHFVTNHKQYSTCFCESPFRFVLQTS

SEQ ID NO: 185420 - protein, 57 aa, Glycine max
  Clone ID: PAT_MRT3847_138449C.1.pep
HITGSGDFRLRAQGSNINNTQKGKKYANENPNNYDAIHNYTNSTTPHLRGGGKLGKQ

SEQ ID NO: 185421 - protein, 35 aa, Glycine max
  Clone ID: PAT_MRT3847_13844C.1.pep
HIFRVDKELYNTTARVDNLGDCYTLAWPGRFICPL

SEQ ID NO: 185422 - protein, 35 aa, Glycine max
  Clone ID: PAT_MRT3847_138450C.1.pep
NTIENLLMESKTCTIEYKYPAISFFTKKEGAQNYE

SEQ ID NO: 185423 - protein, 44 aa, Glycine max
  Clone ID: PAT_MRT3847_138451C.1.pep
MKMKVLAFFVATILVPWQCHAYNMFPLELNTGNGALIPEVNSPI

SEQ ID NO: 185424 - protein, 301 aa, Glycine max
  Clone ID: PAT_MRT3847_138452C.1.pep
MNMSDIISCFNENAVNVSHSSCSSYSNNACISPSVTPSSQNSVSSVYKTTLSNQKQLLITVTWCKSHSNQGLNVTFGEENNNPLAPSFRLNTNSRFFRKKKGSKMLESEDSKVEVFWDLSKAKYDTGPEPVEGFYVAILVDAEIGLILGEDVAKKFKTRTLLGNVSLLSRREHCSGNAVYATKAQFCDTGTWHDILIRCSGENEGLKAPVLSVCIDKKTVIRVKRLQWNFRGNQTIFVDGLLVDLLWDVHNWFFNPASGNAVFMFRTRSGLDSRLWLEEKIAQKDKDRVEFSLLIYAYKNT

SEQ ID NO: 185425 - protein, 100 aa, Glycine max
  Clone ID: PAT_MRT3847_138453C.1.pep
ENEGLKAPALSVCIDKKTVIRVKRLQWNFRGNHTIFVDGLLVDLLWDVHNWFFNPASGYAVFMFRTRSGLDSRLWLEEKIAQKDKDRVEFSLLIYACKNT

SEQ ID NO: 185426 - protein, 47 aa, Glycine max
  Clone ID: PAT_MRT3847_138454C.1.pep
HQVFNSSHVNESCSMKEKETREMKTPYSPGTSPVKYSGISDRSKRPS

SEQ ID NO: 185427 - protein, 63 aa, Glycine max
  Clone ID: PAT_MRT3847_138455C.1.pep
VCSPEHGPIKEGHASIYIINSHDDREPNLGLAILESIDHASATCNDNGIVLARGADTIQNIRC

SEQ ID NO: 185428 - protein, 251 aa, Glycine max
  Clone ID: PAT_MRT3847_138456C.1.pep
EDVEVQEPLEESVDANQEVGGFDLSPRRDKAIPKRNSQLKHKHSAFRASHRGRGVEISSPKEVKATKSWSKHDPVPSAEVKKVRESLKSSSLELRALVKDPLPHALHISDVVRSKLATSDTKTEPLIENQHEDVEVQDPDVCQSIVPFQPNDVNLGKKSFVHCSNIHQPSLMERNRSARTFEWEDSIDNSQQARQPRRRKRKWSSLEEETLRAGVKMFGEGNWATIRSFYSNIFENRSGVDLKDKWRNMIR

SEQ ID NO: 185429 - protein, 104 aa, Glycine max
  Clone ID: PAT_MRT3847_138457C.1.pep
SRLLMNRMLISNRSQRLGYMIKCFNRNRIFVRACETKRNRYQELPLTATITLDVICMTKRVLRVNILVVVVTVGLPKSSKRYGNGGLIITATKIGVFSNTSKVM

SEQ ID NO: 185430 - protein, 56 aa, Glycine max
  unsure (1)..(56): unsure at all Xaa locations
  Clone ID: PAT_MRT3847_138458C.1.pep
MDQPCVISLKHXIFFTACYDELFLTLVMEYGPEALYRVXKHCATMNQRMPLIYKKL

SEQ ID NO: 185431 - protein, 63 aa, Glycine max
  Clone ID: PAT_MRT3847_138459C.1.pep
KIALCCIPPPRVLTHKPPHIACHGGHTHVSRADDPIGPASHSPPPTDPQWVSQQQLCKSPPRD

SEQ ID NO: 185432 - protein, 42 aa, Glycine max
  Clone ID: PAT_MRT3847_13845C.1.pep
SLKDYNFLCLIKLKSISLQIIVKKSIRRSYRTFEIVLYIIYP

SEQ ID NO: 185433 - protein, 51 aa, Glycine max
  Clone ID: PAT_MRT3847_138460C.1.pep
IGQGFFFTGLAQSSMKRLHFYYYINPTPRNRLRAIYLLRKFWVAGNTWGLT

SEQ ID NO: 185434 - protein, 88 aa, Glycine max
  Clone ID: PAT_MRT3847_138461C.1.pep
AREDDRRGGRKMVNALTHSQSQFVLVLLNSNCRGSKSSSNTVFRKPFAKFSSLTTKICHASYHRFADTKHTTLLVETYHLHHSLRALL

SEQ ID NO: 185435 - protein, 61 aa, Glycine max
  Clone ID: PAT_MRT3847_138462C.1.pep
LRTEHTRKTTTTYSSSLRLPPRPEMIDDLDLRLFADFLGVFIFVLVILHLFVLADPKLEGN

SEQ ID NO: 185436 - protein, 107 aa, Glycine max
  unsure (1)..(107): unsure at all Xaa locations
  Clone ID: PAT_MRT3847_138463C.1.pep
EGITESHVTFAKAFVEGGVQESLDDACILCLEDFCKIYPATVTNXKHEFHLHCILEWCQISFQCPMCWQPIXLEGYYIXELLEAIYLERSYMDTPFKTAASFLHPTL

SEQ ID NO: 185437 - protein, 61 aa, Glycine max
  Clone ID: PAT_MRT3847_138464C.1.pep
KRKGKIFKPLRKDGKFFNIPYNSNGLIIAFKITIFAQKSHLCGLLRLCSPSSLATFLVGFV

SEQ ID NO: 185438 - protein, 42 aa, Glycine max
  Clone ID: PAT_MRT3847_138465C.1.pep
GQECAKTITLRPLLMECYHTTRKRHTRSLFTNITPPTRLNQI

SEQ ID NO: 185439 - protein, 82 aa, Glycine max
  Clone ID: PAT_MRT3847_138466C.1.pep
FGSSSSRIGSSKDPLIHLDQMGVYRFRTKIQRKTLTPKWHEEFKVPIITWESDNVLVIAVRDKDHFYDDILGFVSFYKLRIL

SEQ ID NO: 185440 - protein, 98 aa, Glycine max
  Clone ID: PAT_MRT3847_138467C.1.pep
LLDHNYIFVYIPCVSEMTNCYLTISFLFYCTAKFDLYYVQVHFSWFHQRIRTIMATTLYVAYIRGSLIQKRIFNLHGLIYVGCMSFDAIVQISFDVII

SEQ ID NO: 185441 - protein, 398 aa, Glycine max
  unsure (1)..(398): unsure at all Xaa locations
  Clone ID: PAT_MRT3847_138468C.1.pep
SGYSDELLWAATWLHLATGNEYYIKYVVDNAVYMGGTGWAVKEFSWDNKYAGVQILLSKVLLEGKAGAYSATLKQYQAKAEYFTCACLQKNDDYNVQKTPGGLLYVREWNNMQYVSSAAFLLAVYSNYLSATKSQLNCPDGQTQPQELLNFVKSQADYILGKNPADVSYLVGYGAKYPPHVHHRGASIASIFALHYEVGCTQGFETWYNRAEPNPNVICGGLVGGPDKNDDFSDERSNYEQTEPTIXGSAPLVGIFAKLQRLCGIHNIGEGYNHNESPVPQQITPSTNPGKATVSKTSSESEGAPVEFLHSISSSWTVGGATYYHHRVIIKNTSSKPISDLKLVIKDLSGSLWGLSPTEEKDTYELPQWNKVLNPGSECIFVYVQGGPQATVSIKSLH

SEQ ID NO: 185442 - protein, 53 aa, Glycine max
  unsure (1)..(53): unsure at all Xaa locations
  Clone ID: PAT_MRT3847_138469C.1.pep
NCRYIAGALGAYPDEWLPKNGNHFCFALMFSISVVXVIACSCALWFGNTTAVM

SEQ ID NO: 185443 - protein, 63 aa, Glycine max
  Clone ID: PAT_MRT3847_13846C.1.pep
RCSSSGGCVIKLFMGGLRPVPLRHGVLVPHLRGRLWVALVVGAHHGFWLVLFLPPAERDVHGP

SEQ ID NO: 185444 - protein, 67 aa, Glycine max
  unsure (1)..(67): unsure at all Xaa locations
  Clone ID: PAT_MRT3847_138470C.1.pep
PPLSGDHAATEGPGAATVCAPVXPAWPPGRALPCPAPRGSFRAVVCXSCSSAEPFLFLFKKXLCSSR

SEQ ID NO: 185445 - protein, 94 aa, Glycine max
  unsure (1)..(94): unsure at all Xaa locations
  Clone ID: PAT_MRT3847_138471C.1.pep
HSSGHSSEEHAGDVSSFGRMQNHAALMMPIDEGTLSKVAHDMVEEXYERSEQEAYFEEESLSASRNGGWGLDYMERNSLANIKGFTHVLRRMTG

SEQ ID NO: 185446 - protein, 75 aa, Glycine max
  Clone ID: PAT_MRT3847_138472C.1.pep
GFSITKFPSLLIIGQEIEVLVKAVVGRSHIVYLNSWCATYISVGQLHLILIGFKMKSNMVLKPTIYLGKSPNFLF

SEQ ID NO: 185447 - protein, 134 aa, Glycine max
  unsure (1)..(134): unsure at all Xaa locations
  Clone ID: PAT_MRT3847_138473C.1.pep
RKKKPGPGFGGPLVPPDPPPFFVWGPPQGLTKKNGKFFGGKPLKPRGIFLTKKGKTPPPPGGGGASKVGPKKGKKIPGGKNLPGRLENLKARGKTPPPTPKKGGGIIPPEKGXLGKKSAKRPRGGPFGPPFWIK

SEQ ID NO: 185448 - protein, 64 aa, Glycine max
  Clone ID: PAT_MRT3847_138474C.1.pep
LAAWGSSSNKGQERSSASYLKGQSLSYHMVRMFGWLQLVACVFQRIRSIIHVDIMVGTYPSYIL

SEQ ID NO: 185449 - protein, 68 aa, Glycine max
  Clone ID: PAT_MRT3847_138475C.1.pep
LKMKFLNLLKGRLVNPAPVLHHGAWPSCHQPKTFFFKVTATITTITKTTIDVSPTLGTHYLTVSVPNS

SEQ ID NO: 185450 - protein, 110 aa, Glycine max
  unsure (1)..(110): unsure at all Xaa locations
  Clone ID: PAT_MRT3847_138476C.1.pep
DNGTTVFDDVLRAGQLLIVPXGYLVATKAQGEGFQYHRLREQPLTPMVSXHVAGKNSVLSDLPAAVIASSYAISMEEAAELKNGRKHELAVLTPAGSGSYQQGQAGSAQQ

SEQ ID NO: 185451 - protein, 51 aa, Glycine max
  Clone ID: PAT_MRT3847_138477C.1.pep
QFCKLNYSPNNFVPKKSGLQFWHYQFRLICVLFIYLLVKTLLLLSYFLNYG

SEQ ID NO: 185452 - protein, 76 aa, Glycine max
  unsure (1)..(76): unsure at all Xaa locations
  Clone ID: PAT_MRT3847_138478C.1.pep
SRVLKITRNKNHHLVAIHLPPVSTPNTDFGTGPXPGPNITLPSGPFGEAFFFAAAGASPGPMTLVFSFFGSDAGGD

SEQ ID NO: 185453 - protein, 84 aa, Glycine max
  Clone ID: PAT_MRT3847_138479C.1.pep
TTPILDKYRQQFGVSVRDVQADKFINAYAAFLKRQGKLPIPGWSDTVKTGHLKELPPQSIDWYYIRAAVVARHIYMRKTGSIGR

SEQ ID NO: 185454 - protein, 55 aa, Glycine max
  Clone ID: PAT_MRT3847_13847C.1.pep
SPPRFEPDKLVKLILPKNKIKQLWKYRKVISIVNNIIYTKCFPLKKQIKRQTFLR

SEQ ID NO: 185455 - protein, 45 aa, Glycine max
  Clone ID: PAT_MRT3847_138480C.1.pep
PGCARFLSSFNMRNSGFEKHWELDLELDLDLQRHAWVEPGNYRYR

SEQ ID NO: 185456 - protein, 101 aa, Glycine max
  Clone ID: PAT_MRT3847_138481C.1.pep
GPQYPPKVCCEAFKQFACPFSNEVNDMTTDCATVMFSYINIYGKYPPGLFANQCKEGNQGLDFFLVTPTNTSSNTIHVAAPPHFFSLATISAFLGFLFHLF

SEQ ID NO: 185457 - protein, 171 aa, Glycine max
  unsure (1)..(171): unsure at all Xaa locations
  Clone ID: PAT_MRT3847_138482C.1.pep
MLRKTLFPKIVTKVWDRIRCEALCEGFIIFNPSQGASSDIFYLVNIXCIIFXSLLVQMTSVLQGIVNTARRDKALLSGWKRKEDEEAVIHLYEMCEKMEGGHPSIEKFLDHVKGVRPDLLPVAVSMTGQSEDVSAQAKTATQLQLEKIVAFMALLTMCIDNERSEYSLPMD

SEQ ID NO: 185458 - protein, 70 aa, Glycine max
  Clone ID: PAT_MRT3847_138483C.1.pep
NLDIDQASAMVTSTSTPGSTRHYEKCSLTCGELYRDTLSLRDHNKMIDLCWSPHDGKHITSITIKTWCGK

SEQ ID NO: 185459 - protein, 335 aa, Glycine max
  unsure (1)..(335): unsure at all Xaa locations
  Clone ID: PAT_MRT3847_138484C.1.pep
MSLSKKGSQTDTKLSSLNKATYLNPNAAEFVPFALRSSPSGSTSSVDAAARFTTAGSLGKAVLDRSESSISNNSDDEAHQYWRCQLPDDITPDFKVMGEDESQGLNNLSLAGLSINDDNESSMFPSSKGSRYILNEQLELSPQHLNGNTFADKLRFSNSTYREEPSSGSILNSSAKPWDRQIGNTDLHVTSGQEELVYDENSGHGFLNDVFAGNSLVNDTDLNPLEFLASLFPGFASESLAEVFFANACDLHLTIEMLTQLEIQVDGGFNQNPSPKTLSSPNLSAMDXPALTSSNGQNTSKYAADNVQQSGIPYISSDKDMLMFKSCSSIPSRGS

SEQ ID NO: 185460 - protein, 95 aa, Glycine max
  Clone ID: PAT_MRT3847_138485C.1.pep
SHAYRVRSHVYLAIKKKLIGESLLPCLEILLRRKKSCLECRSHNYEMWKSRSRYGTKCWTQYLTGIGFLLRLQRHLSNVETNSMSLRKNTRPMKN

SEQ ID NO: 185461 - protein, 92 aa, Glycine max
  Clone ID: PAT_MRT3847_138486C.1.pep
MSLSKKGSQTDTKLSSLNKATYLNPNAAEFVPFALRSSPSGSTSSVDAAARFTTAGSLGKAALDRSESSISNNSDDEAHQYWACQLPDDITP

SEQ ID NO: 185462 - protein, 93 aa, Glycine max
  Clone ID: PAT_MRT3847_138487C.1.pep
FVLPSPLLCGGLGGSPPSAVCLGFAPFFLSGGMLVGACHVGACAGFVRVSLCCVGGSLASLPVPTCCFFRGLLLSSALPPVLCRGLRNESLVL

SEQ ID NO: 185463 - protein, 129 aa, Glycine max
  Clone ID: PAT_MRT3847_138488C.1.pep
MSLSKKGSQTDTKLSSLNKATYLNPNAAEFVPFALRSSPSGSTSSVDAAARFTTAGSLGKAVLDRSESSISNNSDDEAHQYWRCQLPDDITPDFKVMGEDESPSLNNLSLAGLSINDDNESSCFLLLRK

SEQ ID NO: 185464 - protein, 367 aa, Glycine max
  unsure (1)..(367): unsure at all Xaa locations
  Clone ID: PAT_MRT3847_138489C.1.pep
MSLSKKGSQTDAKLSSLNKATYLNPNAAEFVPFALRSSPSGSTSLVDATARFAAAGSLGKAVLDRAESSISNNSDDEAHQYWRCQLPDDITPDFKVMGEDESQGLNNLSLAGLSINDDNESSMFPSSKGFRYILNEQQELSQQHLNGNTFADKLRFSNSTYRDEPSSASILNSSAKPWDRQIRNTDLHVSKELVNDDNAGHGFLNDVFAGNSLVNDTDLNPLEFLASLFPGFASESLAEVFFANACDLHLTIEMLTXLEIQVDGGFNQNQSQKTLSSHNLSAMDFPALTSSNGLNTSKYAADNVQQSGIPYISSDKDMLIFKSASSKPFLISVERCSHPVRRLASQDSGIWKYDKNGSGDAFTGSSR

SEQ ID NO: 185465 - protein, 59 aa, Glycine max
  unsure (1)..(59): unsure at all Xaa locations
  Clone ID: PAT_MRT3847_13848C.1.pep
FDRILCDPFLWFSIIYSMTKRLIEIWKAMLPPIVFITNSTFSFVFFSYNLDNGLVRXYP

SEQ ID NO: 185466 - protein, 113 aa, Glycine max
  unsure (1)..(113): unsure at all Xaa locations
  Clone ID: PAT_MRT3847_138490C.1.pep
GNHVIFVHVVHSIEVVIPSGRGFREALGLGTGPLFGFVKAYDLXVGRPAQLGFVLSAMEEMIPGKGALPHFYIYQGVPINEIXPIVLFNVLLLFIAALYPETGILGSDDGEDD

SEQ ID NO: 185467 - protein, 117 aa, Glycine max
  Clone ID: PAT_MRT3847_138491C.1.pep
MPEEDEISLMTRVNSLCCLLQKDPAGLQSSHDKESAVAEGPDDEKRIQLSHDLESMQNNKIKMDVKPAEEDFRDAFGSKQTLGMSRKDFFAELLHQLPRIASLSKFLFDISEEDSDS

SEQ ID NO: 185468 - protein, 97 aa, Glycine max
  Clone ID: PAT_MRT3847_138492C.1.pep
MPLPLMHVSSKSVIILKIKGLLNLRKLFYSITLLLLEFLRCFQMHQEIVNQPFQEKVTLQYYSFTSEVSISAMENACQWAQIIKSIITLCIIHYSKH

SEQ ID NO: 185469 - protein, 47 aa, Glycine max
  Clone ID: PAT_MRT3847_138493C.1.pep
GPTHAVRPRSPPTRTGVFKKHTEIRRWKPVAITTCPLWRSGCSHCFY

SEQ ID NO: 185470 - protein, 343 aa, Glycine max
  Clone ID: PAT_MRT3847_138494C.1.pep
MMELKEIQRLEGHTDKVWSLAWNPTTGHAGIPLVFASCSGDKTVRIWEQNLSSGLWACTAVLDETHTRTVRSCAWSPSGKLLATASFDATTAIWENVGGDFECVSTLEGHENEVKCVSWNAAGTLLATCSRDKSVWIWEVLPGNEFECVSVLQGHSQDVKMVKWHPTEDILFSCSYDNSVKVWADEGDSDDWQCVQTLGEPNNGHTSTVWALSFNVSGDKMVTCSDDLTLKVWETESVGTQSGGGFAPWTHLCTLSGYHDRTIFSVHWSREGIFASGAADNAIRLFVDDNESQVGGPLYKLLLKKEKAHDMDINSVQWSPGEKPVLASASDDGTIKVWELTSY

SEQ ID NO: 185471 - protein, 88 aa, Glycine max
  unsure (1)..(88): unsure at all Xaa locations
  Clone ID: PAT_MRT3847_138495C.1.pep
PLCFSYGXSLPSIGXXSQSDPDDSSMXXYLQKFTGXXCFQIXXCPXQXXXFXTLINFHYGMVXRXPNRQXKYPCXXLXKPXQQXSSXY

SEQ ID NO: 185472 - protein, 167 aa, Glycine max
  Clone ID: PAT_MRT3847_138496C.1.pep
MLSSLHHLNNLHSLKVIEDLELPSDTNAFPSNLIKITLILAAFSNPHPLMKTLGRLTNLQILKLNSGIDDILLDIGSGEFPQLQLLHMRQIYVRQWRLEKDAMPRLRHLVIDNCYKLSKLPEELWSLTALRVVHVLWPLEELANSLKDVEPRNGCKLIVSNASQLLE

SEQ ID NO: 185473 - protein, 143 aa, Glycine max
  Clone ID: PAT_MRT3847_138497C.1.pep
GCFRRRTAFAADHRAARHRQRRSRRDDPADRALRLRGSVYPANRTRRRRRPRGRARQISRHDGRLDRGRDAMKLELDDRVALVTGASRGIGLAIAVALAAEGAKVALAARGSDALNAARATVGGDSSIHIADVTDPAAAAALV

SEQ ID NO: 185474 - protein, 69 aa, Glycine max
  unsure (1)..(69): unsure at all Xaa locations
  Clone ID: PAT_MRT3847_138498C.1.pep
GTNIPINKPILHKYADEDVSLGAWLIDREAERIDERSMCXERPPDCEWNAHAGNVCVGSVDWSGXGICK

SEQ ID NO: 185475 - protein, 64 aa, Glycine max
  Clone ID: PAT_MRT3847_138499C.1.pep
RHWVSTSFNTLLLRKLCCWSVFAGTFHFHHHNLTSRFLLISKRSKYSGLTNDFGATRSAILYPK

SEQ ID NO: 185476 - protein, 59 aa, Glycine max
  Clone ID: PAT_MRT3847_13849C.1.pep
TAEIALRKIFFFFFSKGSRPPPYHFLSSSFQCTKLYILVQISTFEQHAWRSVRVSERVV

SEQ ID NO: 185477 - protein, 186 aa, Glycine max
  Clone ID: PAT_MRT3847_1384C.1.pep
PRVRPRVRPPSSSSPSSVVGQMPNLADPEMLASMTRAISDVSQTRSVLKLIGARPTHEQVDDAKARLADLEAHLSRQLQEIVGLPRPPEIDEPRWRAHVAEKENAIKESTEKEKRVLKSLIQLDQMHDSYEKLLKDAEKRLVKIYEGDGESDNDNNNDNEGEVKEEVEEILHEAHGKGIERVDLSG

SEQ ID NO: 185478 - protein, 108 aa, Glycine max
  unsure (1)..(108): unsure at all Xaa locations
  Clone ID: PAT_MRT3847_138500C.1.pep
MSLKNNMGVLNVXCCFFSLVVVTASLIELIFFNSDHSSSYDDHDYSKPCCDLCMCTXSMPIQCTCXDIRLNSCHSDCKSCMCTLSQPGQCRCLDTNYFCYKPCKSKHD

SEQ ID NO: 185479 - protein, 47 aa, Glycine max
  Clone ID: PAT_MRT3847_138501C.1.pep
IKSVISCYKCRKRWFQEERKRNPCGIRMLERWVKKLTKNDIWEFTSQ

SEQ ID NO: 185480 - protein, 49 aa, Glycine max
  Clone ID: PAT_MRT3847_138502C.1.pep
FHNILTSTNNFITLHNTQITHRRFLMKNVIYRWLYEAHVSPNHEEITFM

SEQ ID NO: 185481 - protein, 166 aa, Glycine max
  Clone ID: PAT_MRT3847_138503C.1.pep
VCSFIFKILSHANIIVFNVSELFYKNIGGVSYKADVYSFGMLLMEMASRRRNSNPHAEHSSQHYFPFWIYDQFKEEKNINMNDASEEDNILSKKMFMVALWCIQLNPSDRPSMSRVVEMLEGKIESLELPPRPSFHKNQTYVHDDDDIVSDQTSFTNSTYSDSYLG

SEQ ID NO: 185482 - protein, 250 aa, Glycine max
  unsure (1)..(250): unsure at all Xaa locations
  Clone ID: PAT_MRT3847_138504C.1.pep
ITSAHNISSHFLDSFFLLHKFFIHLTQLEVDPIRVVQRGSLESKVVLARGLQFVLCDAEAKISIAEKESVVAELLKSAAPEKDAALIEAALASLVAISAPKRNKLKLVNLGAVKAMTRLLTEEDLGPAAVEQVLKIVESVSXRREGRSEILGEATAACVAAVLSKVLKVSSAATEHAVTTLWSLCYLFRDRKAQEAVTQNNGLTKILLLMQSNCAPHVRQMCTDLLKIFLANSKSCLSCYDTKTTHIMPF

SEQ ID NO: 185483 - protein, 165 aa, Glycine max
  Clone ID: PAT_MRT3847_138505C.1.pep
GSDISNRARVLLSKWSKLFARNHVIKKPNGVKTSSDGHKEMMLSRSIGQLMGSESWHSNIDVPEDILALSSECSNNFRKIGSSQGVKLLPPSLDDSNKKSTLGVSSSQSRERRKVQLVEQPGQKSVSRSSQVTIAWPVSQGRPMSADDIQKTKMRALFMQSKYGK

SEQ ID NO: 185484 - protein, 282 aa, Glycine max
  Clone ID: PAT_MRT3847_138506C.1.pep
MLISMETSNRVSMSSTTFSLSQMQQLHASARLRSSFLKKLPEPLRRAVADCLSSPLTSALEPSRTLRDYLADPATRDLAYNAILGHTIAERERSPAVVSRCVTLFKRYLLRYKPSEETLLQIDHFCSTIIAECDINLNRPWSRSLNHQTGALAISTNTSPLPVSSFTSEAILKSLSYVRSLVAQHIPKRHFQPASFAGPPSALGQSLPTLSSLLSKSFNSQLCPASVTESVEKDSVTSSISKLSKIEKIDEKDKLGFIAHDILQWRWLEKQQSSSMKADSST

SEQ ID NO: 185485 - protein, 130 aa, Glycine max
  Clone ID: PAT_MRT3847_138507C.1.pep
LAGQETTSVLLVWTMVLLSRYPDWQARAREEVFQVFGYQKPDFDGLSRLKIVTMILYEVLRLYPPVAGMTRSIEKDVKLGTLTLPAGVHVLLPTILIHHDRKFWGEDAKQFNPERFSEGVLKATNGRVSF

SEQ ID NO: 185486 - protein, 53 aa, Glycine max
  Clone ID: PAT_MRT3847_138508C.1.pep
QLVVGKLTALQESPEEGGQQYLCTFHFHIKYVTRILRIEFTIFIFQENRENCR

SEQ ID NO: 185487 - protein, 61 aa, Glycine max
  Clone ID: PAT_MRT3847_138509C.1.pep
ASNYFINGTVRSYCNSIMLKSVFGKFSQVKLDALFLAISFLFLFLFFTCKLRYISRPKTKE

SEQ ID NO: 185488 - protein, 85 aa, Glycine max
  unsure (1)..(85): unsure at all Xaa locations
  Clone ID: PAT_MRT3847_13850C.1.pep
QKHVQXVXAXLXXXTRMRALKXCXFASXSQAXSKSWXMELXLQXNXHDLQRVWDCDRRTXKMLIXIQMKRLXAXLKXFMRMXTQX

SEQ ID NO: 185489 - protein, 175 aa, Glycine max
  Clone ID: PAT_MRT3847_138510C.1.pep
MGTASSMLTQYDIEEVQEHCNNLFSQQEIVSLYQRFCQLDRNAKGFISADEFLSVPEFAMNPLSQRLLKMADGLNFKDFVALLSAFSAKASAQQKIELIFKVYDSDRNGKVSFKDMLEVLKDLSGPFMSDEQREEVLSQVLREAGYTKDSYLTLDDFIKVLGQSDLKMDVEVPVD

SEQ ID NO: 185490 - protein, 41 aa, Glycine max
  Clone ID: PAT_MRT3847_138511C.1.pep
MGKEKAQINIVVVGHADPDEVTIINELKKPAVEKEAPGHAI

SEQ ID NO: 185491 - protein, 82 aa, Glycine max
  unsure (1)..(82): unsure at all Xaa locations
  Clone ID: PAT_MRT3847_138512C.1.pep
ESTKGQTXQXRQXXEXGEAXEXKEXXPXXPXXXSXXGXHQXRLFYLRGGGPRPHDXGRKEAQDKRGQRSRXXTGDXEEXEXN

SEQ ID NO: 185492 - protein, 31 aa, Glycine max
  Clone ID: PAT_MRT3847_138513C.1.pep
FRIMPSMSLLESYIFQSLLNNSMSLVNTSRI

SEQ ID NO: 185493 - protein, 45 aa, Glycine max
  Clone ID: PAT_MRT3847_138514C.1.pep
KLNFNAILVKNKKKSEITGKFKTKLNPSVILVTYLNQVQQIIIVI

SEQ ID NO: 185494 - protein, 59 aa, Glycine max
  Clone ID: PAT_MRT3847_138515C.1.pep
VCFTSLGGLNPHNDYPHSWEQNPLNHNTHLVMGETIQVFLSPFQATQVFFHSSLFRLPS

SEQ ID NO: 185495 - protein, 191 aa, Glycine max
  Clone ID: PAT_MRT3847_138516C.1.pep
ASADDEDALVDSSDVMPDEEVDPEEAELKKEALKAAQEAVSKQRMLTSAFDTECLRLRQAGETDSLPPDVAGASNIDLQTPSTMPVASTVRTPELFKGVLKEYQLKGLQWLVNCYEQGLNGILADEMGLGKTIHAMAFLAHLAEEENIWGPFLVVAPASVLNNWNEELERFWPALKRLPYWGGLSDRTGLW

SEQ ID NO: 185496 - protein, 71 aa, Glycine max
  Clone ID: PAT_MRT3847_138517C.1.pep
PNSNLISKHNSTLSSTQPCGHSRKNYTPISNGLHADSCSSSYQAYDVVVVRAGVISLSIGRHFLVSCDLSV

SEQ ID NO: 185497 - protein, 46 aa, Glycine max
  Clone ID: PAT_MRT3847_138518C.1.pep
FLLSLSHSFLIVSSTFHTFLYPKPFFPCFKTFHTQPIMSILLLCPY

SEQ ID NO: 185498 - protein, 54 aa, Glycine max
  Clone ID: PAT_MRT3847_138519C.1.pep
ISETTIHNRNSLHLSHIMRTISNVLPSLRLRLSLKQQHSFQPLNPQQLRQVLLQ

SEQ ID NO: 185499 - protein, 468 aa, Glycine max
  unsure (1)..(468): unsure at all Xaa locations
  Clone ID: PAT_MRT3847_13851C.1.pep
EFPRRPTRPGAQVCQICGDGVGKTVDGEPFVACDVCAFPVCRPCYEYERKDGNQSCPQCKTRYKRHKGSPAILGDMEEDGAAAADASDFNYDSENQNQNQNQKQKISERMLSWQLTYPRGEEVGAPNYDKDVSHNHIPLLTSGQEVSGXELSAASPERLSMASPAVGGGKRVHNIPYSSDINQSPNIRAGDPGLGNVAWKERVDGWKMKQEKNVVPMSTGQAASERGAGDIDASTDVLVDDSLLNDEARQPLSRKVSIPSSRINPYRMVIMLRLVILCIFLHYRITNPVPNAYPLWLVSVICEIWFAISWILDQFPKWLPVNRETYLDRLALRYDREGEPSQLAAVDIFVSTVDPLKEPPLVTANTVLSILAVDYPVDKVSCYVSDDGAAMLTFEALAETSEFARKWVPFSKKYSIEPRAPEWYFSQKIDYLKDKVHPSFVKDRRAMKREYEEFKVRINGLVSKAQKV

SEQ ID NO: 185500 - protein, 95 aa, Glycine max
  Clone ID: PAT_MRT3847_138520C.1.pep
ALTAVATPAGLDSDFIFLFHSLCVFCTGQRRENKAQLLFTFVLLPIFLCFEIASRDYVVWSICVKFTHSVVLRVRLVLIEGVMLSFNLCFVWSDC

SEQ ID NO: 185501 - protein, 88 aa, Glycine max
  unsure (1)..(88): unsure at all Xaa locations
  Clone ID: PAT_MRT3847_138521C.1.pep
RAQDITMLCEHMYTRCHIVWKFFESSECVRSECELINMQCCYKVLFTITGQGLWHSRFTIISLKYDSYLLASFHFNPMSWQTYXXFFG

SEQ ID NO: 185502 - protein, 39 aa, Glycine max
  Clone ID: PAT_MRT3847_138522C.1.pep
VEMGIGYLDSYSSFLVEPQAALCQYMHQRPSLRLEGSMA

SEQ ID NO: 185503 - protein, 114 aa, Glycine max
  Clone ID: PAT_MRT3847_138523C.1.pep
VNFFIYKTELLSNRKEDTIIPSSGLQNEICLTSREKPTAISLTIIIVVTVDTQSKLTQKFGCTHEIPITTRAQIDLNLPFSSWRVFEAQSALFEFSVEVTKDGFEPVTAISKRA

SEQ ID NO: 185504 - protein, 157 aa, Glycine max
  Clone ID: PAT_MRT3847_138524C.1.pep
MPFLPSSLFGPQYDHPPHHYIAKPFQTHPTPPNHYIAKPLQFGPTQKTFHLPISGGTSPIVVNAYVEWKETPTAHVYKAHVPGLRHNEVRVEVENGRELCIIGEKWVERETRNGRGQLLERARGRFIQTLMLPENSNVHRMKAYMENGALVINVPKY

SEQ ID NO: 185505 - protein, 89 aa, Glycine max
  Clone ID: PAT_MRT3847_138525C.1.pep
GWGANMKRLFYETNPFVCTLVSPKTIEFRIRSWNMGSPLSHDFRGGGLSPLKIYLRGRGRPLGGKIFKPEAIYSFVFKGWGNHLLYWKV

SEQ ID NO: 185506 - protein, 43 aa, Glycine max
  Clone ID: PAT_MRT3847_138526C.1.pep
DVIGSHQRIIYKMMIHARTCTSKPMLSCRHEYHMVYVAALHDC

SEQ ID NO: 185507 - protein, 80 aa, Glycine max
  Clone ID: PAT_MRT3847_138527C.1.pep
RVWCVRCTTPSASCFRQHNIACAIGTLILIGSVIAVFTALAALAALGFNATICYKYHSSRVGVLFLPLPTGLLLAGGFAY

SEQ ID NO: 185508 - protein, 59 aa, Glycine max
  Clone ID: PAT_MRT3847_138528C.1.pep
PAIGELVLITTAPLFFFLISISQNKQMQPEYQETGKLPPEFSPIQGILCYRMCLPYLGE

SEQ ID NO: 185509 - protein, 79 aa, Glycine max
  unsure (1)..(79): unsure at all Xaa locations
  Clone ID: PAT_MRT3847_138529C.1.pep
NKPGSDGGDKAQLVQIYGPKIKYETCAAAGYQCIRTGCTGLINPXIVLKPAEKEXISLGLGYLIHIHILDNSRHQRGAT

SEQ ID NO: 185510 - protein, 52 aa, Glycine max
  unsure (1)..(52): unsure at all Xaa locations
  Clone ID: PAT_MRT3847_13852C.1.pep
FLSXXXFXLPFXDINPQPLVCGKMQRQKKQSETLLPFSPCLSGDYTLHRVLS

SEQ ID NO: 185511 - protein, 75 aa, Glycine max
  Clone ID: PAT_MRT3847_138530C.1.pep
RMPPFGVWKGLTLKKGEGFQRLKKPLKFQKMSTWWPSSGKIQNGLKGTFKGKKKPQLGFKGFFNHFLAFFNPILG

SEQ ID NO: 185512 - protein, 157 aa, Glycine max
  Clone ID: PAT_MRT3847_138531C.1.pep
CHIKRTDILFDEIFNKFVDVQQRETFLELLEPYILKDMLGSLPPEIMQELVEYYSTKGWLQRVEQCVLHMDISSLDFNQVVRLCREHGLYSALVYVFNKGLDDFRAPLEELFAVLQNSQKESATALGYRMLVYLKYCFTGLPFHQAVEVFLPHVYHL

SEQ ID NO: 185513 - protein, 110 aa, Glycine max
  Clone ID: PAT_MRT3847_138532C.1.pep
STLALKLRLAQNWIYSSVQMNGSCGCAQSKAIFIFRLLHTKHKTIWSLYLIKRHSNPYRLHWTPSHIEMRAHSPCQSGTYLSRFLIDSPRQEKLVWNAIQQQPSHTLRLT

SEQ ID NO: 185514 - protein, 51 aa, Glycine max
  Clone ID: PAT_MRT3847_138533C.1.pep
QEKNKYNKISKSTSQARNDFLLKPAKFILFQKYNRCVSVVFPKTAFFFMIF

SEQ ID NO: 185515 - protein, 423 aa, Glycine max
  Clone ID: PAT_MRT3847_138534C.1.pep
MDRLNGSANLMIVSDLDFTMVDHDDPENLALLRFNALWEAYYRHNSLLVFSTGRSPTIYGELRKQKPLLTPDITIMSVGTEITYGESMVPDDGWKQYLDHKWNRDIVMEETAKFPELTLQSETEQRPHKVSFYLEKGKAPNVTQTLSKRLENRGLDVKIIYSNGIALDVLPQAAGKGQALAFLLEKLKADEQGPINTLVCGDSGNDAELFTVPEVNGVLVSNAQEELLQWYAENARGNPRIIHATERCAAAIVQAIGNFSLGPNVSPRDIGDLMSNRKVHSPSHEVVMFYIFYERWRRGEVENPEQYIQKLKSVFHSTGNFVHPSGIDQPMHQTIDTLAKAFGDKTGKDFRVWVDCISLAEVSLGSWLVKFDKWELSGNESRGCSTKALMNAKVDVPDEYTWMHLHHTWLDDVGGQDDVSWLL

SEQ ID NO: 185516 - protein, 44 aa, Glycine max
  Clone ID: PAT_MRT3847_138535C.1.pep
CVSCKSTICSLFLNFHRSPLIAPQCGTLLQIQCMHKSICADVLN

SEQ ID NO: 185517 - protein, 241 aa, Glycine max
  unsure (1)..(241): unsure at all Xaa locations
  Clone ID: PAT_MRT3847_138536C.1.pep
MELSFKHHFGLACVLLLLAALCSSQDSFTDSRATYYGSPDCYGNPRGACGFGEYGRTVNDGSVAGVSRLWRNGSGCGACYQARCKIPQYCDENGAYVVVTDYGEGDRTDFIMSPRAFSRLGGNADASAELFKYGVVDIEYRRVPCSYTGYNXVFKVHEHSSNPDYFADVTAVEVXQQDCQEWKPMRRAFGAMFDYSNPPNGEIYLRFQVSGSAGLYWVQSKNAISGDWKAGATYDTNVQLN

SEQ ID NO: 185518 - protein, 103 aa, Glycine max
  unsure (1)..(103): unsure at all Xaa locations
  Clone ID: PAT_MRT3847_138537C.1.pep
VXXGXFSFPXFFFPXGXXXVXLPVVFFLPLASFWFCWXLCCXPVXSPGLYKKVVXVXVCLSLFLLXXFCMXXXXXCXXLVGXPAXXXXSXXXCCXPLLSXXXG

SEQ ID NO: 185519 - protein, 162 aa, Glycine max
  Clone ID: PAT_MRT3847_138538C.1.pep
QRFTFDNACCMAFGYDPNCLPNKFSTKLSHFAYQKALIVLEDVAFHRHITPRCLWKLQEWLQIGKEKKFKEAIEAFDKFLFERIASKREEQSRCNNHTKKEDDNTHSDLIRVLMEEGAEKGKIMDDKYLRDTAFTLVSAGSGTVSAGLSWFFWLVSTHPDVE

SEQ ID NO: 185520 - protein, 131 aa, Glycine max
  unsure (1)..(131): unsure at all Xaa locations
  Clone ID: PAT_MRT3847_138539C.1.pep
YNVTRWNRAPXLLLNSVDYTALIDVWARXVFLMELMDRKPLFXGKDHCHQLRLLMELIGTSLKADLRXLNENANRYIRQLPIYRCQSIQEKCTHVHPEAIYLVRXMVTFDPQQRITVEDALAHLYSTSLHD

SEQ ID NO: 185521 - protein, 120 aa, Glycine max
  Clone ID: PAT_MRT3847_13853C.1.pep
ERGRATGWKPDPITFSVLGKMFGEAGDYDGIRYVFQEMESVGVQPNLVVYNTLLEAMGKAGKPVFARGLFEEMIELGIVPNEKTLTAVIKIYGKARWSRDALELWQRMKENGWPMDFILY

SEQ ID NO: 185522 - protein, 75 aa, Glycine max
  Clone ID: PAT_MRT3847_138540C.1.pep
MLEFNCMQHILYRQREQLGEGIGYGWIDGLKTHAEKHATDLMLLIAAYMFPFNTPTSREAYYYRMKLERNFRQVH

SEQ ID NO: 185523 - protein, 47 aa, Glycine max
  Clone ID: PAT_MRT3847_138541C.1.pep
FFFFFYFLAKTTQRVGPILSVTNTYKYFKQLNILNKSITTLYSNQNG

SEQ ID NO: 185524 - protein, 252 aa, Glycine max
  unsure (1)..(252): unsure at all Xaa locations
  Clone ID: PAT_MRT3847_138542C.1.pep
MSGLYNPNFSPARAASPQIRSNPEVDSQYLSELLAEHQKLGPFMQVLPICSRLLNQEILRVSGMLSNQGFGDFDRLRHRSPSPMASSNLMSNVSGTGLGGWNSLQQERLCGAPGMTMDWQSAPASPSSFTVKRILRLEIPVDTYPNFNXMGELLGLKXDLRGRPGYEHLNEQLHILIEADLPANIVDIRLRQAQEIIEELLKPVEESEDYIKRQQLRELAMLNSNFREESPGPSGSVSPFNSSGMKRAKTGR

SEQ ID NO: 185525 - protein, 73 aa, Glycine max
  Clone ID: PAT_MRT3847_138543C.1.pep
AVICLRCSFIWLVGGARATRTPSLLTRSPLMGIRILETTHDVLSCRCIIQNACHGPWMTHGTHLACNLWRGTC

SEQ ID NO: 185526 - protein, 74 aa, Glycine max
  Clone ID: PAT_MRT3847_138544C.1.pep
VILTFRTFLRVWVFYNMAKVCIGDPTSMGLFENFCKVQNKFFQGFARAPQKIIFVNEQIGRKRAPLGAGGLNNN

SEQ ID NO: 185527 - protein, 67 aa, Glycine max
  unsure (1)..(67): unsure at all Xaa locations
  Clone ID: PAT_MRT3847_138545C.1.pep
RDVGCGYDACPIPNEXGGLVVVQGGHYKHIGGFHVVGIQGRQGYGXLIPXSVPVLQAQRGGVYFDFF

SEQ ID NO: 185528 - protein, 39 aa, Glycine max
  unsure (1)..(39): unsure at all Xaa locations
  Clone ID: PAT_MRT3847_138546C.1.pep
PERNDLAVAPFMFALSSTERTRHYVFKRXVHCLKLSVYL

SEQ ID NO: 185529 - protein, 94 aa, Glycine max
  Clone ID: PAT_MRT3847_138547C.1.pep
SRDKHGDCLRYTRHHLFVVPPHFKILNHTLLSLAEGASCCFPSLGFQAFLPFDLKELLLAGGSAMLPLYNDLEIANDPKRATQMSTFVLLRARK

SEQ ID NO: 185530 - protein, 58 aa, Glycine max
  Clone ID: PAT_MRT3847_138548C.1.pep
QQQPLTLEAQNSFQFNTVPPSFNNPAFAATDGATAAANTAGVSDYSAAPKAKSATVGF

SEQ ID NO: 185531 - protein, 103 aa, Glycine max
  Clone ID: PAT_MRT3847_138549C.1.pep
RVNECRVETRDGIRDLQPTVVTWTTLIAAYCKHRGIDDSFSLYEQMIMSGIMPDVVTCSSILYGLCRHGKLAEAAMLPREMHNMGLDPNHVSYTTIISVGLQV

SEQ ID NO: 185532 - protein, 195 aa, Glycine max
  unsure (1)..(195): unsure at all Xaa locations
  Clone ID: PAT_MRT3847_13854C.1.pep
CSXVPXCCXPLXXGVXCPGXXALPXCLXAXPPLXXCXXXVCXXXXCXXCPSXSXXXAXXXXXXXXVFXXXPXPAFLXVXGCLXXXLXPXXPXPXXXLXLXAAXXXFXFXXXRGFSLFPPSXLVXXXXXXLKKKRSSPPRFXGFVGXXXFPRXFXXSLXFXCVXFFXCAXCAXXXLXFVPFXXPVFLPPGXFGRPL

SEQ ID NO: 185533 - protein, 71 aa, Glycine max
  Clone ID: PAT_MRT3847_138550C.1.pep
MFPIHSIPHSDIGTRLIDIYTSKLLPNLTYSMGFTLYQWLCLCYLQVVHKMVDLFPPLFKKRPALYSGWFL

SEQ ID NO: 185534 - protein, 47 aa, Glycine max
  unsure (1)..(47): unsure at all Xaa locations
  Clone ID: PAT_MRT3847_138551C.1.pep
LGPEKLSLLITEAYKDAHQKSVQAMKERMNDLAQSLXMPPGLSEGLK

SEQ ID NO: 185535 - protein, 103 aa, Glycine max
  unsure (1)..(103): unsure at all Xaa locations
  Clone ID: PAT_MRT3847_138552C.1.pep
HPLAGTSPPNPTLPLAPHPSPPHPPPAPLLPPPPPFPPPLSPPPXPSPPFPPPPSPSSPPPPPLPHPPFSLSPLPPTPSCPPTHHTLPHPPPPPPPHSYIPPP

SEQ ID NO: 185536 - protein, 65 aa, Glycine max
  Clone ID: PAT_MRT3847_138553C.1.pep
PQIRYFAHHLQSLYIRTPIGSIQATGDGYKITEIAAPAYSKLNPRKIQSLATKTTANPTRPPTRP

SEQ ID NO: 185537 - protein, 43 aa, Glycine max
  Clone ID: PAT_MRT3847_138554C.1.pep
KAPAVGEKILKFQRHSIVGILLQGVPLQVSAPVIPTVDLENVF

SEQ ID NO: 185538 - protein, 33 aa, Glycine max
  Clone ID: PAT_MRT3847_138555C.1.pep
SFITMGKYLPGAAGFFLTLGISFILAWKTPSLD

SEQ ID NO: 185539 - protein, 174 aa, Glycine max
  unsure (1)..(174): unsure at all Xaa locations
  Clone ID: PAT_MRT3847_138556C.1.pep
VWYPVTSAMGKASFDGPECIKXIQVKAQGNTSISMFFSKKGDESKDSKPEQKASCPEVVKTEHTEDLTESKDTKPEQKTSSHEFVKTEPTEDLRERAKTEEGGNDLKFHGSSHSQNVSMLPIKREYETFSAADSKPALANHDQISPNPAKKKEKAKTANDKQPTLFSYFGKSNH

SEQ ID NO: 185540 - protein, 83 aa, Glycine max
  unsure (1)..(83): unsure at all Xaa locations
  Clone ID: PAT_MRT3847_138557C.1.pep
MTAVVLHIFHATNTVSEKTNNTIVQIIKILMDGIVLGGLFHSAVHVFADDEWXHLLFCEQGTAVFXCPCPWNPLFTYMESIVL

SEQ ID NO: 185541 - protein, 84 aa, Glycine max
  Clone ID: PAT_MRT3847_138558C.1.pep
RLQEDDRRGAYSHIINARSQCCQPRCTTAKLIELLDSNPLTITNFITVHIPYYIASITSILHYLPNTSTPLIPRFVLNHKIYDF

SEQ ID NO: 185542 - protein, 65 aa, Glycine max
  Clone ID: PAT_MRT3847_138559C.1.pep
FKIFIDSLERFQMRRCSLCKLFLDRKKLDQVPEKFAVVPWIYKGLGLGKNLSSRPKDLQKYSTTF

SEQ ID NO: 185543 - protein, 51 aa, Glycine max
  Clone ID: PAT_MRT3847_13855C.1.pep
PFDPQDTHQSRFYLSKKKWVMVPMMSLHHLTIPYFRDEELSCTVVELKYTG

SEQ ID NO: 185544 - protein, 72 aa, Glycine max
  unsure (1)..(72): unsure at all Xaa locations
  Clone ID: PAT_MRT3847_138560C.1.pep
PFPYILRSKXXIKKPILLTSERETNRMTGVVMVTNGGRXHGSGKLTKSARTDEEGEEHQNQLSLVAHLLAAI

SEQ ID NO: 185545 - protein, 235 aa, Glycine max
  unsure (1)..(235): unsure at all Xaa locations
  Clone ID: PAT_MRT3847_138561C.1.pep
EKPPRVRLTEQSPSSSHLPENWVEAMDETTGHKYYYNTKTHVSQWERPNLVQEVVSNHSDLSAGGGYDQSSNFPQCMGCGGWGVGLVQAWGYCNHCTRVLNLPQCQYLSSSLNNQQSSAAHPCESLDKKTSKQRSSSKPPFDKGGRKGGKKRTYAEDDELDPMDPSSYSDAPRGGWVVGLKGVRARAADTTATGPLFXQRPYPSPGAVLRKNAENASHKRKPHSNFTXISKRGNG

SEQ ID NO: 185546 - protein, 84 aa, Glycine max
  unsure (1)..(84): unsure at all Xaa locations
  Clone ID: PAT_MRT3847_138562C.1.pep
METQSDGNEDTIAAIKDMRQQLEARIESQHKAHMEMLASMQTVIPNLVSSLDLSLKXVSSFNHRPFAPTPSLPQPDPKLNQKTG

SEQ ID NO: 185547 - protein, 761 aa, Glycine max
  Clone ID: PAT_MRT3847_138563C.1.pep
METQSDGNEDNIAAIKNMRQQLETRIESQHKAHMEMLASMQTVIPNLVSSLDLSLKVVSSFNRRPFAPTPSLPQPDPKLSPKKPVELTHRFNAETCADGSIEANLTNPKNQKPKTSMHSNSAFQVESEKVSPLAVVRSMVTVCLLGRVPFSPIDSSTVSRKLENDQMVTPTEKAALQELGGDSGATLAVEIALRAMADDNGGVEVEEFVVSGKARIMVLNVDRTRLLRELPESVQYQQLESSSGDGNANQNQVQQITHSGPNVNGSLLGMGRPVLRPMSDMWIPHGDPHMSALQPMFSGGPRGAPRLMGMMGAHRGISIPSMHRLPLGPNAPGSSPNAMPQKPRSFDDDMKDLEALLNKKSFREMQKSKTGEELLDLIHRPTAKETAVAAKFKTKGGSQVRQYCDLLTKEDCRRQSGSFIACEKVHFRRIIAPHTDINLGDCSFLDTCRHMKTCKYVHYEYDPTPDVSPTMMGAPPPPKPLKPQRAEYCSEVELGEPQWINCDIRNFRMDILGQFGVIMADPPWDIHMELPYGTMADDEMRSLNVPALQTDGLIFLWVTGRAMELGRECLDLWGYKRVEEIIWVKTNQLQRIIRTGRTGHWLNHSKEHCLVGIKGNPEVNRNIDTDVIVAEVRETSRKPDEMYPLLERISPRTRKLELFARMHNTHAGWMSLGNQLSGVRLVDEGLRARFKAAYPDVEVQPLSPPRASAMEVDTSIAPHTRSPFAATESESTSAQFAEPAAAPESNFVSEEKSMAIDVDIG

SEQ ID NO: 185548 - protein, 360 aa, Glycine max
  Clone ID: PAT_MRT3847_138564C.1.pep
MILTLLPPPKSPFLNTLLLLCTTLLLPPCYLALPDPDADAVQPIIPNPSSSTGTIPAFPEQADAAGCPLSLSDEHYEGIKSACGSNKHAADDDDDLHRSRCCPVLAAWLYSAYSATALSGGMQHERASKGHTTSYDMPLLPDDSETCVSDLGKALKIRGIQLFQPNETCDLVYCYCGIRLHPLTCPESFSVTPSGTLVVNQSVKRLERDCFSSSTNVNKFPGLGGCSKCLHSLYSLRKNSSNSSKSEDRTTKIHNKDCELMGLTWLLAKNRTAYIHTVSGVLRALMLSTEGSDPQSCTLNSDGMPLAVDSSEMSDESSSTNLQAPIFLSLLLFLHYFTLLWHLTENECKEIDPHSPTWHL

SEQ ID NO: 185549 - protein, 51 aa, Glycine max
  Clone ID: PAT_MRT3847_138565C.1.pep
AKLRIQLNGEVKYLSNPHLLVNDSQKIVNFMFYAVHFVTDCPQFLFFERNA

SEQ ID NO: 185550 - protein, 62 aa, Glycine max
  Clone ID: PAT_MRT3847_138566C.1.pep
GMLLVKVITTVVIKDHNHIPQRIQAPLYGVQINVCLLGPHCIMIHQVHQIVRVTNIWSMSVL

SEQ ID NO: 185551 - protein, 47 aa, Glycine max
  Clone ID: PAT_MRT3847_138567C.1.pep
IMQTTKHFYPSLLKPLYFTSKGKALLSKAIYICNRMLDLNNLSNSLG

SEQ ID NO: 185552 - protein, 84 aa, Glycine max
  Clone ID: PAT_MRT3847_138568C.1.pep
KRPQKGVPSKNLILIPGVGVPTLFPFNNGNRNNTPIAKQNWPKLKGLLSGLKRKVPTPSPNQFFPPQSCILLCGPKPPGCVLQW

SEQ ID NO: 185553 - protein, 88 aa, Glycine max
  Clone ID: PAT_MRT3847_138569C.1.pep
SFHFTCHQCVSLILTSGPTKINLHSVSTTMTLLCYHINQHTFYFSLPLFTSATLHSAQTNRTNKSSICEKYCTRYGSYSADTDSHYRI

SEQ ID NO: 185554 - protein, 178 aa, Glycine max
  Clone ID: PAT_MRT3847_13856C.1.pep
TLSDCHEEEDRAPTTSKTLKFLKAVAQAMVPATPASCKAHERNLKHTRRNFRGKPSRFKLEALNKPQASSYSSSDTSTYWDFQQSLWDSYELVTVSRFNETGLTLDHPFDASRDTPTIYRKRQQALWDSYELVTVSRRIETGLTLDNPFDELCGSASIQHKRKPESKNSLRNLFNLMS

SEQ ID NO: 185555 - protein, 375 aa, Glycine max
  Clone ID: PAT_MRT3847_138570C.1.pep
MQGKEMEGLSSSSAIAQKTWELENNIIPMDTPGGAAISSTATTTTSADDSIFYYDEAGQNEFQRDKPWANDPHYFKRVKISALALLKMVVHARSGGTIEVMGLMQGKTDADAIIVMDAFALPVEGTETRVNAQADAYEYMVDYSQTNKQAGRLENVVGWYHSHPGYGCWLSGIDVSTQMLNQQFQEPFLAVVIDPTRTVSAGKVEIGAFRTYPEGYKPPDEPISEYQTIPLNKIEDFGVHCKQYYALDITYFKSSLDSHLLDLLWNKYWVNTLSSSPLLGNGDYVAGQISDLAEKLEQAENQLAHSRFGPLIAPTPRKKEEESPLAKITRDSAKITVEQVHGLMSQVIKDILFNSVHQANRTRTEPSGPEPMIES

SEQ ID NO: 185556 - protein, 142 aa, Glycine max
  Clone ID: PAT_MRT3847_138571C.1.pep
HTGHPTATTLTEWAARRPKPRAQGVRASLLNKPNWQKTLPKPTRQRTHSKKKMLGSRHTSPYWRKSWRTSRSLCRPMNYLLREHHILPILLGMIRAYTLFMHQNNVYAAGAPSRGENTGFLAPNWTRPRGPPRAPARPPFLS

SEQ ID NO: 185557 - protein, 36 aa, Glycine max
  Clone ID: PAT_MRT3847_138572C.1.pep
QVVVLRVSLHCKGCEGKVRKHLSRMQAGVTSFNIDF

SEQ ID NO: 185558 - protein, 55 aa, Glycine max
  Clone ID: PAT_MRT3847_138573C.1.pep
HTYFQGATVRSSSLSIGVQMPLALVLHPIVSGGGSLLWWHQNINTSRKNNKKSNK

SEQ ID NO: 185559 - protein, 275 aa, Glycine max
  Clone ID: PAT_MRT3847_138574C.1.pep
MGMAVQARLGACNPIRIPQCSGDRDDGGRPPAEEFAPLATKFQRRLLVGVGSASLVAVGANFGGITSFLLGLSPQSGRNLKLDVLYPIGGYSRCVDTKEGFEFIYPANWVGDQTLLYRAAKKREMERSLDPPPLNERRRSNINEPVVAFGPPGSTGELNVSVIVSSVAPEFSIEAFGGPDEVGEAVVRSITGSGQRPDVKGTLIKSSLREDSVTNVKYYELEFRVESPSFRRHNVSVCCARDGRLFTLNAQAPESEWPGLKSEFYRIANSFSLTI

SEQ ID NO: 185560 - protein, 46 aa, Glycine max
  unsure (1)..(46): unsure at all Xaa locations
  Clone ID: PAT_MRT3847_138575C.1.pep
MRSRFKDSPIGKKKKKKKNKKXTNTLKDDKKTYADKKKSNFLGGPL

SEQ ID NO: 185561 - protein, 64 aa, Glycine max
  Clone ID: PAT_MRT3847_138576C.1.pep
MQHSLKSGIKKRKPEELRVWSCGGRNFPHLNCSFCHLTSFYPISETKYLNNRGNPMNCVILNWM

SEQ ID NO: 185562 - protein, 97 aa, Glycine max
  Clone ID: PAT_MRT3847_138577C.1.pep
WRYSAIALRNSLDPRLQLWSTIVAAIGVVVAACVLHPLVISVKFPANWTFELILCQFLFILFLFAYNFLFYSYIIDMYHIFQPLCDFCYLATMLSAI

SEQ ID NO: 185563 - protein, 100 aa, Glycine max
  Clone ID: PAT_MRT3847_138578C.1.pep
GGFLAWLLSGVSPRFSHSHRCIHQAIDLNLHDPNRLRHFHWPGYESLYSRWGTNIIRSINAIIFAAPVRICISRIARTPFIFLVFVPSIPMVYCKVSNCY

SEQ ID NO: 185564 - protein, 76 aa, Glycine max
  unsure (1)..(76): unsure at all Xaa locations
  Clone ID: PAT_MRT3847_138579C.1.pep
QSFQRSSFXYLXSKXKXHALAEXXLRFXLXLXXRXGXVRXXTTSYRHGXVGWFXGXAHPXVXXRVSXRAHISFPGQ

SEQ ID NO: 185565 - protein, 65 aa, Glycine max
  Clone ID: PAT_MRT3847_13857C.1.pep
MSNRVCIKKGLLTLMGAKFVGKQGHPTRFSMCLRSKTTSAQYVATRFRDPTFEKLMDNYKNLVKV

SEQ ID NO: 185566 - protein, 150 aa, Glycine max
  Clone ID: PAT_MRT3847_138580C.1.pep
MLLNHIGAGFYWIDPPRPDPKRQTRILSSSLNRRRASPPFPARHAAFHGVRMEKKGDKRRSICTADELHRVAVSNSDWKLALWRYRPSPEAPSRNHPLLLLSGVATNAIGYDLSPESSFARYMSAQGFDTWILEVRGAGLSTLGDSLEGR

SEQ ID NO: 185567 - protein, 109 aa, Glycine max
  Clone ID: PAT_MRT3847_138581C.1.pep
PVSDSSVVSLDEEQISAHLVKNGPLSVATNAVFMLTYVGGVSCPYICGKHLDPGVLLVGYGQGAYFPFRFKTELFWVIKNSWGDSWGDNGFCKFFRGSNVCAVDSMVSY

SEQ ID NO: 185568 - protein, 79 aa, Glycine max
  Clone ID: PAT_MRT3847_138582C.1.pep
SVHSPLVALAWLARPTMHRSLMWFRSDTPSPRPNFVPSPKLWRAFRLIARQALWLLDTRTEPALWLSDCFHRHVVNKSA

SEQ ID NO: 185569 - protein, 484 aa, Glycine max
  unsure (1)..(484): unsure at all Xaa locations
  Clone ID: PAT_MRT3847_138583C.1.pep
MASSFQSSPMASNYRSHNKKSHDNDMFHPTQVVVVVVPFPAQGHLNQLLNLSRLILAHNIPVHFVGSPTHNRQVIVRAQGWDPNFIYNIQIHDFNVSPFVSPAPNPNAETRFPSHLLPSFEASTSLRVPVYALLQSLSSVARRVVVIYDSLMASVVQDAIHVPNCESYTFHSVSAFTMFLYFWDAMGRPPVEKVSHVIPEVPSLEGCFTTQFIDFITSQYEFHKFSKGTIYNTTRVIESPYLELIKRIISSKTHWALGPFNPLSIEKGVYNTKHFSVEWLDKQEAXSVLYVSFGTTTCFSDEQIKEVANGLEKSKQKFIWVVRDADKGDVFIEDGVRTSELPKGFEERVKGTGLVVRDWAPQLEILSHSSTGGFMSHCGWNSCMESITMGVPIAAWPMHSDQPRNRVLVTEVLKIGVVVKDWDHRDELVTASDVENAVRRLMATKKGDEMSQRAMTLKNAIRRSRDEGGVSRVELDDFIAHITR

SEQ ID NO: 185570 - protein, 105 aa, Glycine max
  Clone ID: PAT_MRT3847_138584C.1.pep
YLIATNCPGPFLFSYSPNLKTPKAEPHRFIAFSILNPSCQGQISNKDENKTYFRSRDENLQKEDLRFSASTEDLRYWEAMENTVLVNCDGGSSIELTTIENCSNA

SEQ ID NO: 185571 - protein, 66 aa, Glycine max
  Clone ID: PAT_MRT3847_138585C.1.pep
MAQNSMTLWLCASIAFTGIRNHEISRDHAITCLGPLLASRSSYTLSHVFPLSPTVITPLKGRNTDI

SEQ ID NO: 185572 - protein, 107 aa, Glycine max
  unsure (1)..(107): unsure at all Xaa locations
  Clone ID: PAT_MRT3847_138586C.1.pep
PQRALDPGAEGSPAGLGSHVHPFLAQGGLKAANPXWRPIVFPARGMDQGSPANQLPSTGFSPCPKAATGFSVLGPPSRAFEAIPWECLGVQFSPPHIAQSKPGFAMP

SEQ ID NO: 185573 - protein, 41 aa, Glycine max
  Clone ID: PAT_MRT3847_138587C.1.pep
RDLHKRMLNLCFYARGLQIPFKTTVSDSALDVVLRVLNFNF

SEQ ID NO: 185574 - protein, 83 aa, Glycine max
  Clone ID: PAT_MRT3847_138588C.1.pep
DPPIPYDQFAHFLLTVLQCPISFSHFFTVARTWSSAPPRCATWRPCPRGCCRTILSTCLGRRSRLIPCTRARSQPWSWLRSML

SEQ ID NO: 185575 - protein, 59 aa, Glycine max
  unsure (1)..(59): unsure at all Xaa locations
  Clone ID: PAT_MRT3847_138589C.1.pep
EITTCCDNGVASRXALYAIIDTCSALDNITQAAXKYRNVFNQEHVEPRISRVALYGCAA

SEQ ID NO: 185576 - protein, 64 aa, Glycine max
  Clone ID: PAT_MRT3847_13858C.1.pep
VRHSADKCTIVNINRIRRYRKRLEVHQHCSMLPPQYAIETDEGEIFNYKISYSPYDYHRMRSGQ

SEQ ID NO: 185577 - protein, 290 aa, Glycine max
  unsure (1)..(290): unsure at all Xaa locations
  Clone ID: PAT_MRT3847_138590C.1.pep
MAGVVVAEHKPQKRVRHNLSLNPQESLPFWLSLSKTIMSSTAAPVLPISNPQTTAAGGGAIEAPANNPAFRAFINNLSASLRHGLDQRRPWSELADRSAFSKPESFSEATLRVRKNFSYFRVNYYAVVSLILAVSLLTNPFSLILLVGLLASWTFLYLXFRPSDQPLVILGRTFSDFETLALLSAFTVFVVFLTSVGSVLVSALMLGXSPVVCLHGAFRVPEDLFLDDQENSQATGFLSFLRGPCRRRRRCSHRCLTRLGKKKKISVKSSDLVMFLPDLMSFDAWRKNES

SEQ ID NO: 185578 - protein, 143 aa, Glycine max
  Clone ID: PAT_MRT3847_138591C.1.pep
MSSTAPPVLPISNPQTTAGTTGAGGGAIEAPANNPAFRAFINNLSNSLRHGLDQRRPWSELADRSAFSKPESFSEATLRVRKNFSYFRVNYYAVVSLILAVSLLTNPFSLILLVGLLASWTFLSFLRGPAASATAVPTVAARV

SEQ ID NO: 185579 - protein, 268 aa, Glycine max
  Clone ID: PAT_MRT3847_138592C.1.pep
EEKGKLFDHNMSSNGVDLSRLRKKKGHTAQCVCLVDDLGNRTMRPCLSNAVKVQAEELTKEDFKGSKWLVLRYAILNLEVIKAAILLANQEGLLVSLDLASFEMVRNFNHPLLKLLESGNIDLCFANEDEATGLARGEQNADPVRGEQNADPATDVEFLAKYCQWAVVTLGPNGCIAKHGNEIARVPAIGEAKAIDATGAGDLFASGFLYGVIKGLSLEECCKVGACSGGSVIRSLGGQVTLENRHWMYKQMQIKDLPTPDTIQITNE

SEQ ID NO: 185580 - protein, 45 aa, Glycine max
  Clone ID: PAT_MRT3847_138593C.1.pep
YYNLKLFYSPLTISIITYLYIFKIYPLNIPIILIFFNFTHHTLSI

SEQ ID NO: 185581 - protein, 66 aa, Glycine max
  unsure (1)..(66): unsure at all Xaa locations
  Clone ID: PAT_MRT3847_138594C.1.pep
TKVGSYDPREHHQSNAVSYRTVLTXPLLRQGYNIVGIMGDQWSALLAVHRGVCRTXKLPHPLYRTQ

SEQ ID NO: 185582 - protein, 36 aa, Glycine max
  unsure (1)..(36): unsure at all Xaa locations
  Clone ID: PAT_MRT3847_138595C.1.pep
AFYYDGMAMMSNVEYDDLNEXLMKKGSSAVMLCTDE

SEQ ID NO: 185583 - protein, 146 aa, Glycine max
  unsure (1)..(146): unsure at all Xaa locations
  Clone ID: PAT_MRT3847_138596C.1.pep
TEKTPYSNGKTGAQTGPGHTETKEPPTPTRAGKPXRETPRAEDSAGPXPRTTDNGSSQRAGXRGTRKQGRAPRRAAEQATNPKEKQEAASPHPSRRNEPRGSQRTAPTATPGRTGQDRPQRKRRGATRADGPRERXTQPGQEQSRQ

SEQ ID NO: 185584 - protein, 102 aa, Glycine max
  Clone ID: PAT_MRT3847_138597C.1.pep
MQRVSPTSTIWRTIVSKARKNVFFINDPFAARSFSAVPVVAAAKKLHQPEIPSDFQKWGSVGFCRTSKFASGFNPLQPKPLDSIVDVHRLKDRYPEDIASVW

SEQ ID NO: 185585 - protein, 63 aa, Glycine max
  Clone ID: PAT_MRT3847_138598C.1.pep
YGACDTLFWMKIENRTCHNATTIVLFFPLSISFGYQVPTKTYRKKTLNLSQLNSNMLSKEFIS

SEQ ID NO: 185586 - protein, 51 aa, Glycine max
  Clone ID: PAT_MRT3847_138599C.1.pep
SHKRISQWKCGSPRITYTLEVLFILTTPTETGNTKQTTPHITQRCLKLLVL

SEQ ID NO: 185587 - protein, 73 aa, Glycine max
  Clone ID: PAT_MRT3847_13859C.1.pep
RTTTDRVFYTGSLNPCITISTLSTRWMALLFPGPGFSHLPGSVRTPTSTLRDRYSTWKLTNALTQVERYETVT

SEQ ID NO: 185588 - protein, 350 aa, Glycine max
  Clone ID: PAT_MRT3847_1385C.1.pep
MMLGEHHRGNPTVLVPPWPAHDDPTAEMYSAFLTNDVNAGEYSPYHLQEALTALQRFLPSNETDADSDSSEAAQPDAAVDAYTCDHFRMYEFKVRRCARGRSHDWTECPYAHPGEKARRRDPRRFHYSGVACPEFRKGNCRKGDACEFAHGVFECWLHPARYRTQPCKDGTSCRRRVCFFAHTPEQLRVLPMQSPRSVANSSESYDGSPMRQVSLSSAAAAAFMSSPAASLSPPESPPSVNEMVASLRNLQLGKMKSMPHNRNVSVGSPRGSVLRPGFLSLPTTPTQQPVRSGVKCFDVWDESFEEEPVMERVESGRGIRAKMFEKLSKENSLDASASPPDLGWVSELVK

SEQ ID NO: 185589 - protein, 89 aa, Glycine max
  Clone ID: PAT_MRT3847_138600C.1.pep
TRPKKSRVLNNKIPSSFFVFFLFQLFPSHQTHTIPAPPFFHSKKVRIQLFSDWQQLRGVLPDLLILRRRCLERGKGRQRECYNKSQISN

SEQ ID NO: 185590 - protein, 110 aa, Glycine max
  unsure (1)..(110): unsure at all Xaa locations
  Clone ID: PAT_MRT3847_138601C.1.pep
KRGKPKGGFLGAIVFLNQLXKGPKIGGVGFFFLGPPPKSPSEFPDXGGPPLGEFPRGGFGPCPPKNIALGYVKFGLPKAAPKVKIFFGGNPHXGVVPKMPFGPPKYYNPS

SEQ ID NO: 185591 - protein, 151 aa, Glycine max
  Clone ID: PAT_MRT3847_138602C.1.pep
MASEVAPSSGDLLKCCNCGCGCSLVAHSSGTWMRSVKRKLDEFKMDGQLPIPAIARIEVENECVALREMVSMQQRTIQDLNAELEEERNSSSTAANEAMSMILRLQREKAEVQMEARQFKRFAEEKMTHDQEELLSLEDLLYKREQIIQSL

SEQ ID NO: 185592 - protein, 90 aa, Glycine max
  unsure (1)..(90): unsure at all Xaa locations
  Clone ID: PAT_MRT3847_138603C.1.pep
MAFAGTTQTCMACDKTDYLVDQLTPDNRAFHKACLRRHYCIGTLRLSNYNCFDGVLYCKPHSDQLFKRAGSXLDKSCQGAPRIAKPHKNL

SEQ ID NO: 185593 - protein, 30 aa, Glycine max
  Clone ID: PAT_MRT3847_138604C.1.pep
KFHFYIHVNCMEAMCLFIRTNSIVKKSIHL

SEQ ID NO: 185594 - protein, 182 aa, Glycine max
  Clone ID: PAT_MRT3847_138605C.1.pep
EQGSNLDRDLVAISSPDMVAWMIKEALSKDFSTKESSLALSKNPASMRNRKFASDVKFDSKCLQATKVVDQECTLGSSEDPSNLASSKVVGDTKINLEIQLRMKLSHGKTSNASSSKLPLALPSPKAPSESWLKRTLPTVPSKSISLRSNLATYFHAPVKTSEVNHGHLQFAQELLPPIPEA

SEQ ID NO: 185595 - protein, 83 aa, Glycine max
  Clone ID: PAT_MRT3847_138606C.1.pep
FHSFSSIYTTLAGPASLQLLAGLVLSRCKNSVVHVIYATNLSVLFQVIDKNCTLGSDRKSQLLHSIMDSPHIGDPSVVLSQPS

SEQ ID NO: 185596 - protein, 39 aa, Glycine max
  Clone ID: PAT_MRT3847_138607C.1.pep
KGISFPVMLLFQASQHSSPPFCYVAKTIYTIASRVCARA

SEQ ID NO: 185597 - protein, 98 aa, Glycine max
  Clone ID: PAT_MRT3847_138608C.1.pep
TFAYMGQSLILSDLVLLSCGNLNGRLSGFDVHDCAMCTSDDASSDMQTAICKHLTTPNLRDAGCTYCKLALIRIDQRQRIIHYLVGETDSERLTADAD

SEQ ID NO: 185598 - protein, 128 aa, Glycine max
  Clone ID: PAT_MRT3847_138609C.1.pep
SSSRGTRLVASLNNVSFVMHQTALLQAHYFSIWGVFRTDFPDRPPSPFNFTGAPLTANLATLTGTRVSKIAFNSTVELVLQDTNLLSVESHPFHLHGYNFFVVGTGIGHFDPSKNPAKNNLIDPIERN

SEQ ID NO: 185599 - protein, 125 aa, Glycine max
  Clone ID: PAT_MRT3847_13860C.1.pep
MASSLLVMKVTSCMVAVLMVSFGHIIPLAEAEIPCGRVQITVAPCIGYLRGPGGGVPAACCNGVRSINKEAKTTPDRQGVCRCLKTTALSLPGLNLATLAALPSKCGVNLPYKISPTIDCNTVKH

SEQ ID NO: 185600 - protein, 76 aa, Glycine max
  Clone ID: PAT_MRT3847_138610C.1.pep
KSIFIKISTKDAQVVSKCTICILRHITVEKSATTTSQFFSIVFLINSTIFTQLNSTFLPTLLLSFVKIVLLSERQF

SEQ ID NO: 185601 - protein, 91 aa, Glycine max
  Clone ID: PAT_MRT3847_138611C.1.pep
MGSPTSRIVFRIVVVALLLLLLFYIGRPLYWKISATVHDIRNNKQTVRQGLSQIVIEAQKSVGWYHDESDSGVRANYRKLLLHKPISTVFA

SEQ ID NO: 185602 - protein, 64 aa, Glycine max
  unsure (1)..(64): unsure at all Xaa locations
  Clone ID: PAT_MRT3847_138612C.1.pep
MLSGSGEWRWSGEDWAAXAAXTFXSLSYGVWQERNEMGRQGQWRKWRKRMLRRGSPSSTSSFTV

SEQ ID NO: 185603 - protein, 80 aa, Glycine max
  unsure (1)..(80): unsure at all Xaa locations
  Clone ID: PAT_MRT3847_138613C.1.pep
FLPLLPAPWLSVRVLLPLPLIRPLGLVGRLFSPGVGGFGGDSPLGAGSCRSSPFTXPPRVCPPGVRNMPGRVGRPGLRPV

SEQ ID NO: 185604 - protein, 56 aa, Glycine max
  Clone ID: PAT_MRT3847_138614C.1.pep
KSKGLKKFEPQSEINCLSCGHIFHKLCMDKWLDYWNITYPLCRTSLMPEDDASCFC

SEQ ID NO: 185605 - protein, 59 aa, Glycine max
  Clone ID: PAT_MRT3847_138615C.1.pep
FLQFLLGFQSSSIFWLSGNRFSIITVAAFNFNLHSAESVQFMESTSWSENLCPPSKKPN

SEQ ID NO: 185606 - protein, 59 aa, Glycine max
  Clone ID: PAT_MRT3847_138616C.1.pep
RKNSLYILFICLQFPLSFCINMNVKITHSIQSNDALNIHNCTGLLTDFFFPYPSTTISI

SEQ ID NO: 185607 - protein, 74 aa, Glycine max
  Clone ID: PAT_MRT3847_138617C.1.pep
PGDPPRHSTLGPYTSFSASIHIHSLPARQSLQYSLGILLPLTIYSSQMEPIRDMLFHGIRQLIWPRTLSSASLE

SEQ ID NO: 185608 - protein, 46 aa, Glycine max
  Clone ID: PAT_MRT3847_138618C.1.pep
RFCRVIGWKDICYGKELVEDNSLKSFNDRIFVCERSFRKSTKVYFV

SEQ ID NO: 185609 - protein, 107 aa, Glycine max
  Clone ID: PAT_MRT3847_138619C.1.pep
LILTFFALLSFQIFALKPAVHQAFLNFVPRKMNEVDFWNKYFKAEYLHSTKNAVAAAAEAAEDEDLAVFLKDDEILEIEARKKVRRVDPTLDMEADQGDDYTHLPVW

SEQ ID NO: 185610 - protein, 78 aa, Glycine max
  Clone ID: PAT_MRT3847_13861C.1.pep
KNFGFFRNWGPQMSKKKVGLFIMGVPHPSNQGGGVPPNPHSPKFLNNQRERLFQFRLLTSDLEQQLTPKVIGVKASLA

SEQ ID NO: 185611 - protein, 125 aa, Glycine max
  Clone ID: PAT_MRT3847_138620C.1.pep
MLLNEGISPSNILAMTFTTAAASEMRERIGAIAGKATAKELTISTFHSFSLQLCRSHGEKLGRTSEFLIYGQGQQRNAIIEAIRLLEIGKSENKDGALLIGELSNSLNNPKQFKDKAKKWQKFVA

SEQ ID NO: 185612 - protein, 99 aa, Glycine max
  unsure (1)..(99): unsure at all Xaa locations
  Clone ID: PAT_MRT3847_138621C.1.pep
ASGYGNLYSQCYGTNTASLTTALFNNGVNCGSCYEMKCDTDPIWCLSGSIIVTATNLCPPNFALASNNCGWCTPPLQHFELAESAVLHIAXYKAGMVPV

SEQ ID NO: 185613 - protein, 31 aa, Glycine max
  Clone ID: PAT_MRT3847_138622C.1.pep
GASYINNISVNNDAHAVGHIHGIIGPRSSSC

SEQ ID NO: 185614 - protein, 49 aa, Glycine max
  Clone ID: PAT_MRT3847_138623C.1.pep
GPFKCFILLDQGRCFYPILKSETCRISEHVHFFTRVLWTYGIQESSNST

SEQ ID NO: 185615 - protein, 480 aa, Glycine max
  Clone ID: PAT_MRT3847_138624C.1.pep
MNSRSQDQRSRPAKPATIHGCALSGDLVGLQRLLRDNPSLLNERNPVMAQTPLHVSAGHNRTEIVKFLLDWQGTDKVEMEAKNMYGETPLHMAAKNGCNEAAQLLLACGATVEARANNGMTPLHLAVWYSLRAEEFLTVKTLLEYNADCSAKDDEGMTPLNHLSQGPGTEKLRELLLWHLEEQRKQRAIEACSETKAKMDELEKELSNIVGLNDLKVQLRKWAKGMLLDEKRRSLGLHVGRRRPPHMAFLGNPGTGKTMVARILGKLLHMVGILPTDKVTEVQRTDLVGEFVGHTGPKTRRKIKEAEGGILFVDEAYRLIPMQKSDDKDYGLEALEEIMSVMDSGKIVVIFAGYSKPMKRVIASNEGFCRRVTKFFQFNDFNSEELAQILHIKMNNLAEDSLLYGFMLHPDCCIKALAALIERETTEKQRKETNGGLVDTMLVNARENLDLRLSFDCMDTEELLTITLVDLEAGLQQLTQ

SEQ ID NO: 185616 - protein, 426 aa, Glycine max
  Clone ID: PAT_MRT3847_138625C.1.pep
RLEGHNRTEIVKFLLDWQGADKVEMEAKNMYGETPLHMAAKNGCNKAAQLLLARGAIVEARANNGMTPLHLAVWYSLRAEEFLTVKTLLEYNADCSAKDDEGMTPLNHLSQGPGTEKLRELLLWHLEEQRKQRAIEACSETKAKMDELEKQLSNIVGLNDLKVQLRKWAKGMLLDEKRRSLGLHVGRRRPPHMAFLGNPGTGKTMVARILGKLLHTVGILPTDKVTEVQRTDLVGEFVGHTGPKTRRKIKEAEGGILFVDEAYRLIPMQKSDDKDYGLEALEEIMSVMDSGKIVVIFAGYSKPMKRVITSNEGFCRRVTKFFQFNDFNSEELAQILHIKMNNLAEDSLLYGFKLHTDCSIKSLAALIERETTEKQRQETNGGLVDTMLVNARENLDLRLSFDCMDTEELLTITLVDLEAGLQLLTQ

SEQ ID NO: 185617 - protein, 94 aa, Glycine max
  Clone ID: PAT_MRT3847_138626C.1.pep
DNMRMRVSELEKECSNMRQEIEKLGRVKGSSAWGTVSKKLGFKLKSQMCSAQEGSVSNQNNANNTVEKLKERHVKHKRSSSISDKASVSSIVHS

SEQ ID NO: 185618 - protein, 335 aa, Glycine max
  Clone ID: PAT_MRT3847_138627C.1.pep
MGQAPSTPVSSTDLSHRDIFTTDESIGRDYTADIPDECLAGIFQFLSSVDRKTCSAVCRRWLRVDGENRQRLSLNAKASLVDFVPSLFSRFDSVTKLALRCDRKSTSVNDDALVLISLRCRNLVRLKLRGCREVTEHGMAGVAKNCTNLKKLSCGSCAFGAKGVYAFVNNSIVLEEVSIKRLRGVEKDNNDGVDGAESLPLSVTSSSLRSICLKELVNGHCFAPLIVNSKKLETLKLIRCLGDWDVTLESVGKLNSGLVEIHLEKVQVSDVGLLGVSKCLKLESLHLVKTPECSDVGLCEVAERCKMLKKLHIDGWKTNRIGDCRLMSVAKQMVH

SEQ ID NO: 185619 - protein, 53 aa, Glycine max
  Clone ID: PAT_MRT3847_138628C.1.pep
SSHFPCSVLALYRISTPADSECNKIIPMNAFRLLKSPSLSPAIVFKKGTNLFF

SEQ ID NO: 185620 - protein, 54 aa, Glycine max
  Clone ID: PAT_MRT3847_138629C.1.pep
GRFSIASSDSGWLQSSSLHHGMAMLLVLMMLHSSLSGPYSPHHRQTEPVNRRIT

SEQ ID NO: 185621 - protein, 46 aa, Glycine max
  unsure (1)..(46): unsure at all Xaa locations
  Clone ID: PAT_MRT3847_13862C.1.pep
FVFIHLLWSSNEFSTCAEISRVRRRTEQLGNYSGXTHAXSSGSIXX

SEQ ID NO: 185622 - protein, 51 aa, Glycine max
  Clone ID: PAT_MRT3847_138630C.1.pep
MKEITNVMNIIYRGLCRPNTRGRPVYRRPAHVRVPATAYTCVSIGNLGCKS

SEQ ID NO: 185623 - protein, 133 aa, Glycine max
  unsure (1)..(133): unsure at all Xaa locations
  Clone ID: PAT_MRT3847_138631C.1.pep
SPLFELGWQKDRGXIVEYIAWMSYIAHHRNHLHYKYFPEGHFSCDINSCSILEKVSSTLPHAVIGMTFKYDLIGAGTHSSHDSPEKEYHDEPLKIVARLRQRIEXQYFVVHAYMETNXFKLSLDDVESSIGSM

SEQ ID NO: 185624 - protein, 58 aa, Glycine max
  Clone ID: PAT_MRT3847_138632C.1.pep
FNPFLKNCRISQFISYYIPISYISYSGPSFLQIGTCFSPIKKKNKKGGRSRSRTSPAR

SEQ ID NO: 185625 - protein, 63 aa, Glycine max
  Clone ID: PAT_MRT3847_138633C.1.pep
PAPPFILCVQHSTAYNVLKSAPLGANMSPFYKSSMSAADSLASRQSFCVLTSALHNIFASRKV

SEQ ID NO: 185626 - protein, 50 aa, Glycine max
  Clone ID: PAT_MRT3847_138634C.1.pep
IHRILLSFVISLRGSRGTGPPKPSCQRGWGYLRMDLPKRARGSTRDSRPG

SEQ ID NO: 185627 - protein, 78 aa, Glycine max
  unsure (1)..(78): unsure at all Xaa locations
  Clone ID: PAT_MRT3847_138635C.1.pep
MHDHVLDIRGVTSFGGIVHQGLCLIGSGVDALTFYGTKIYIQSISGTKADGGXGRIGMSTNLRGQIAFTTLGAGEHEY

SEQ ID NO: 185628 - protein, 51 aa, Glycine max
  Clone ID: PAT_MRT3847_138636C.1.pep
YIYMNKLFINIIHEHYLLHLFFVAWPIPNMTSIFFMMTSIFFINSKYDLYK

SEQ ID NO: 185629 - protein, 125 aa, Glycine max
  unsure (1)..(125): unsure at all Xaa locations
  Clone ID: PAT_MRT3847_138637C.1.pep
RCLGWGPSLGVLVGAIHSLGMTCRCISVLGLGLRVLILLYGGGGISVLFFEGASYAFSLWRVQCGSVRVVYGPAFSFALAFGLGWCRIFVMVVFIFSLGPGHPGRPFVXFXXXFAGPKDXXXRAA

SEQ ID NO: 185630 - protein, 96 aa, Glycine max
  unsure (1)..(96): unsure at all Xaa locations
  Clone ID: PAT_MRT3847_138638C.1.pep
ARNVGFTVVKQRXSCKPPALPWWSXLNMGRIANXRSHIVVTVLAVLGIALKGPVNVHKMLFKATEALTRRGDCRLFSPMHMILCRKPHHKQDQNSG

SEQ ID NO: 185631 - protein, 115 aa, Glycine max
  Clone ID: PAT_MRT3847_138639C.1.pep
HAYGHIYRFTGFDVRSIFSLPAKFYYHGARPSATMYFYNSILNVSFGTFYTTTVPDSSCSYQRLLRRHFHLQIPLPLLHHLLDLEEEVEVELEKVVVAQALEQAHEVLVVAYMEV

SEQ ID NO: 185632 - protein, 38 aa, Glycine max
  Clone ID: PAT_MRT3847_13863C.1.pep
LINLKVILAVGTKLQGIITRMALDISKRHAVVQGIPLV

SEQ ID NO: 185633 - protein, 71 aa, Glycine max
  Clone ID: PAT_MRT3847_138640C.1.pep
CVEGVSVQNVMHKSGRSKGSMLRCAWMRGHNSSTLSHEISSLLFLLELHTWEKLGVTQQNHVVSDHPFPIW

SEQ ID NO: 185634 - protein, 132 aa, Glycine max
  unsure (1)..(132): unsure at all Xaa locations
  Clone ID: PAT_MRT3847_138641C.1.pep
MHPEQRVMYGPTLCVMISSXFFIKLLAEHVTNCMKPKEQKAILGRLLKDPSYAEDSYVAAHNPLGREXIFHILGXITECCERPVIDXFLGSMYSYLNISLGKXIWGDEIKGRESHYSFPMTVFEFHTNTLDH

SEQ ID NO: 185635 - protein, 58 aa, Glycine max
  Clone ID: PAT_MRT3847_138642C.1.pep
SIEQLDVVRFGVFLWDIATLRQCWGNSNSPQVVTFVGFLGKILEIPGYVCPHLLAIIN

SEQ ID NO: 185636 - protein, 38 aa, Glycine max
  Clone ID: PAT_MRT3847_138643C.1.pep
VLDRAVRADLRSKKRVSAPLPIHGISKIALKVVVFLYR

SEQ ID NO: 185637 - protein, 69 aa, Glycine max
  Clone ID: PAT_MRT3847_138644C.1.pep
TKDFDESFKIFKNLNDQRDQAPVDYLKKKAIMGADDGKDHKDYNRRAKIFDKSSKMFKNIKEQREQSPE

SEQ ID NO: 185638 - protein, 52 aa, Glycine max
  Clone ID: PAT_MRT3847_138645C.1.pep
IDCLFWHNYFFKQNLFWVPKRKLVITFQLKCIVLHAHLLCEQISLFFVHAWF

SEQ ID NO: 185639 - protein, 89 aa, Glycine max
  unsure (1)..(89): unsure at all Xaa locations
  Clone ID: PAT_MRT3847_138646C.1.pep
YHYLAYLCPWPPRAKLNLYVASELSWGPMSRATYAQDAAXDPFTPPVHATVYTYWLSSPTPTRATKPLLYGYGQRLTPTDPLWYQHLYS

SEQ ID NO: 185640 - protein, 57 aa, Glycine max
  Clone ID: PAT_MRT3847_138647C.1.pep
HLQDINNEINADGNGPFDFPDFLNLMAIKMNDTDSEDDLKEALPVLDKDPNGIISAA

SEQ ID NO: 185641 - protein, 250 aa, Glycine max
  Clone ID: PAT_MRT3847_138648C.1.pep
MLYQTPYPQPFQFHHPLPSSFSPLLAVPTTPPPLYLPFPQAEKEMECVEAALKSNYRKEMTLKLSPQTFTEEVSVQNGTTCDDFFVNDLLDFSHVEEEPEQQEDTPCVSLQHENPSHEPCTFKDDYASVPTSELSVLADDLADLEWLSHFVEDSFSEFSAAFPTVTENPTACLKEAEPEPEIPVFSFKTPVQTKARSKRTRNGLRVWPFGSPSFTDSSSSSTTSSSSSSSPSSPLLIYTQSLDHLCSEPP

SEQ ID NO: 185642 - protein, 83 aa, Glycine max
  Clone ID: PAT_MRT3847_138649C.1.pep
MAPKGLIFLAVLICVSALSLSPSVTGEWQNHGLVMNYYKESCPQAEDLLTEQVMLLYKRHKNTAFSWYRYILYDCAVPSCDAS

SEQ ID NO: 185643 - protein, 388 aa, Glycine max
  unsure (1)..(388): unsure at all Xaa locations
  Clone ID: PAT_MRT3847_13864C.1.pep
MLQNPRVLRYSAQPFNPPTRTAASSLSPFQLIPTSPSFPILKQQCRFSRRELTIFSNSCLLLLLGSQAVDGSRARAEEDVGNTSNIDQLEENLAFAEEDAANISSSDQPEEDLTLAEDDVGNTRNSDQLEENLILRNVVANSRSDKPEENVATTPSCTERKPTKQAFLDVSIDGEPVGRVTIGLYGDDVPAGVDRFSKIASGAAGISYRRKEFVKIMPNYVQHGGLRSYGVDVELASKTGSNLGASRLVEEWEREYERCPGTKNVAGSVGIIVRNPSKPPPKLKLIAKQGKLEIDQEEVGTDPNGTEFVIATKDSPELDASTLVIGRVIGGMEVVQRIGLVKTXVQENTGSPYFRVAKLIGDKRAVVAERGFNRPYSKVIVTNCGLME

SEQ ID NO: 185644 - protein, 70 aa, Glycine max
  unsure (1)..(70): unsure at all Xaa locations
  Clone ID: PAT_MRT3847_138650C.1.pep
KQYLVXXRXPYTXFTNRVXEXXYGNSYFFRPIRKSDLQKVDPRKACEFFSTCFXDPSXHLXVVIVXXIDP

SEQ ID NO: 185645 - protein, 43 aa, Glycine max
  Clone ID: PAT_MRT3847_138651C.1.pep
FLLQICKNMIIRYKVIILQLSFNIGLYLCFILLLLWLLLNKIK

SEQ ID NO: 185646 - protein, 112 aa, Glycine max
  Clone ID: PAT_MRT3847_138652C.1.pep
MVDLEIQVPSAFDPFAEARESDAPGAKEYVHIRIQQRNGKKSLTTVQGLKKEFSYEKILKDLKKDFCCNGTVVQDKELGKIIQLQGDQRKNVSHFLVQAGLVRKDQVKIHGF

SEQ ID NO: 185647 - protein, 382 aa, Glycine max
  unsure (1)..(382): unsure at all Xaa locations
  Clone ID: PAT_MRT3847_138653C.1.pep
GKKTEKVCSDEVEGLLQDLLPLVVPVALDCNNIGLFILFKAATLQGMSNHVFVTHAHSVALLVPPPVTFFLXRRSRVVPPLTFSILSKIALLGVIGCSSQILGYAGIRYSSPTLSSAISNLTPAFTFVLAVICRHILIAVKRRTTQAKILGSIISVLGAFVVTFYKGQSVIIADNSPSIQLPQSNGILTSVDRNWVIGGLLLTACNILLTVWFVYQVEILKEFPDELSMVFFYNLCAAIVASIVGLLGEKNSSAWKIRPDISLISIVCTGIFNKFLSSAIYAWGIHLKGPVYVAMFKPLSIVIAVAMGVMFLGDSLYVGSIIGATIISIGFYTVMWGKATEQKEEEGEEENVGSQESSITENVPLLQSYITVNSTKKIDGSV

SEQ ID NO: 185648 - protein, 165 aa, Glycine max
  Clone ID: PAT_MRT3847_138654C.1.pep
MIHWFPNMVDDYSQFMNSLISSCIVKLTWNFGGLFLCRSYLCLVLLSLQQAKYMVDLEIQVPTPFDPFAEARESDAPGAKEYVHIRIQQRNGKKSLTTVQGLKKEFSYEKILKDLKKEFCCNGTVVQDKELGKIIQLQGDQRKNVSHFLVQAGLVRKDQIKIHGF

SEQ ID NO: 185649 - protein, 117 aa, Glycine max
  Clone ID: PAT_MRT3847_138655C.1.pep
QRGNQKFSNYAIAIVVVVWFSVAVCFFIALHSQSWLWLISIFNTIQAVMILIKYFPQVSIFYDSILMCQHYVMYPDNKKGLTSKNSEEINRPLVCESPIDQQTKGSVKCSYQSPAEV

SEQ ID NO: 185650 - protein, 56 aa, Glycine max
  Clone ID: PAT_MRT3847_138656C.1.pep
RGTLLGILISTSTSSINLSNMHIVPLCIHCIQRLKMNSLLIAMLLFSAKFCTCNMF

SEQ ID NO: 185651 - protein, 146 aa, Glycine max
  unsure (1)..(146): unsure at all Xaa locations
  Clone ID: PAT_MRT3847_138657C.1.pep
CSAWRIVRYSMTALHEKESLDTLDLLSPFLCSDHSDEQFDMDLIIRFMIAKRDSTYAALTXVFWLIXKHPKLEEEVVMEVMQKYASYTHVYDEVKDMVYTHVXVSDSMKLDPAEPHDTNEAGEDYSFPDGTXVKRRLRVSVHIYTM

SEQ ID NO: 185652 - protein, 50 aa, Glycine max
  Clone ID: PAT_MRT3847_138658C.1.pep
MKFDLSTQSTVFDILLGISQDFEIAGDTLMPAFFVSQASARSFENAEFFA

SEQ ID NO: 185653 - protein, 76 aa, Glycine max
  Clone ID: PAT_MRT3847_138659C.1.pep
VEIPLRNLVFVGVQNGLRRKRGLRRVLKCVKMIFLPIYGQSKFVESPFLYFESGKQKVVKGRKFVICLCWNLESLQ

SEQ ID NO: 185654 - protein, 86 aa, Glycine max
  Clone ID: PAT_MRT3847_13865C.1.pep
GFFFRVKPFNLCAIFIMNSFMLCFPFFLLCSCVHITFCDAFSCSCFTYYMHVYKYLFIHTWLIHLCTHDELLGPYIQVHGSIGSGD

SEQ ID NO: 185655 - protein, 89 aa, Glycine max
  Clone ID: PAT_MRT3847_138660C.1.pep
CWVFSPQKKGVSPPLMGEKFSPILFFPPPGKKFYKILLSPPGAKGFTKISYPPPPLFKRSPPGPLTVFYSPQNPRGFKSPEPFIKPRGV

SEQ ID NO: 185656 - protein, 67 aa, Glycine max
  unsure (1)..(67): unsure at all Xaa locations
  Clone ID: PAT_MRT3847_138661C.1.pep
MDNIGSRRGRTLQIAGSRLPDCMHACGSCSPCRLVTVSFACASLTDESESCPMXXRCMCDNKSYPIP

SEQ ID NO: 185657 - protein, 40 aa, Glycine max
  Clone ID: PAT_MRT3847_138662C.1.pep
NSGNQLRRQSDFVPPKIARNRPQAFLLVCQEFSKVKSDPS

SEQ ID NO: 185658 - protein, 113 aa, Glycine max
  Clone ID: PAT_MRT3847_138663C.1.pep
PRVRDNASYVNWGSKAKYISPIAGGLKTKGFPVGCPVKLVALPSWWGLEPNNYSYFAMPPGVVYGFEISWMPPICAPPCPSKPGCYYSKVCFFASVTPEVPFWNWETSWGWSE

SEQ ID NO: 185659 - protein, 59 aa, Glycine max
  Clone ID: PAT_MRT3847_138664C.1.pep
LLNQKQILGPLSHSPYHPFSSLNPWKLNLPKRTPWKINKVPFWGVHPPNKNGRVVGRVG

SEQ ID NO: 185660 - protein, 37 aa, Glycine max
  Clone ID: PAT_MRT3847_138665C.1.pep
GREGCGSYKLDKKFKIKSGPKLQKLLNQLADERFFKV

SEQ ID NO: 185661 - protein, 60 aa, Glycine max
  Clone ID: PAT_MRT3847_138666C.1.pep
IFNKGGKDEETDAHNLKALLMNQLLKSDGVMADGEVKLPRKKPVMMETSGPFTKSRVITY

SEQ ID NO: 185662 - protein, 105 aa, Glycine max
  Clone ID: PAT_MRT3847_138667C.1.pep
LELPGGFMQSQRAIGVSMSATVTASVSPTPASVQCSMIISYLWSLSKILYLEYYDRVNYVLVSLFVTKTKRQGQGCVTNLYIIPKRTIFLLLIKCFGVGPYVTQN

SEQ ID NO: 185663 - protein, 56 aa, Glycine max
  unsure (1)..(56): unsure at all Xaa locations
  Clone ID: PAT_MRT3847_138668C.1.pep
LILVVWGGRGQGPSFQCELAFVYIGINPILISAGXLETGLAREPAELIMLTYRDAA

SEQ ID NO: 185664 - protein, 144 aa, Glycine max
  Clone ID: PAT_MRT3847_138669C.1.pep
AAGIFIDDNFHVSAIISKLPPSWKDFCIKLMREEYLPYGKLMERIQIEEEYRYGVKRVVEYSYSMGGYHQAYKGGHRRADYKPALGMCRNRPEIIARSVPCTVCGKRGHLSKHCWRRNDRQTNERKSEEDVRIPTEVDTQGATQ

SEQ ID NO: 185665 - protein, 99 aa, Glycine max
  Clone ID: PAT_MRT3847_13866C.1.pep
HTPAQGALKSYDHTLWDLNVYALQYGNGFLRISAQIPYQESGYRLSIAHLSYPYRLHTSIHLREKPCSLPVSAIELDCVCIRSHDHIKVNSETACNGHG

SEQ ID NO: 185666 - protein, 182 aa, Glycine max
  Clone ID: PAT_MRT3847_138670C.1.pep
HLAHAICAINPAALCLLFVPPRHPLSVRLTPPCRSYFTLTTPLPAPSFHMAPWSRSPLAPHQPCPFSSSRLAQSLVPRPYTPSYLQHIVSVCAPRSFPSNRARYFPMVHILRPFTRLCPGLLRLTRQPVASSTPHTPHHASPPRSLPPYPYFKTRLIVPHVLLLHSGDRTLDSSIEIARRCS

SEQ ID NO: 185667 - protein, 95 aa, Glycine max
  unsure (1)..(95): unsure at all Xaa locations
  Clone ID: PAT_MRT3847_138671C.1.pep
LGLPXAVRTTPRRLGGGTGXDXXDPPGDXXPPAGEIAXXLREXEELPPPLEDLXDLLFREPSPIRARVQLWDTHAARWCWNSLERPVRSALPDEW

SEQ ID NO: 185668 - protein, 78 aa, Glycine max
  Clone ID: PAT_MRT3847_138672C.1.pep
GHTIVRCCSSFRIQHMPHNQLPFLPLVKCLAQSCTLRSSSHFFSRLFHPSLPMLQSWSALFPLSCRSLCSLAPTESAL

SEQ ID NO: 185669 - protein, 69 aa, Glycine max
  Clone ID: PAT_MRT3847_138673C.1.pep
MEKASTECSGLRNSSGFLSFTTKAWDDLLSVVAPHTYAVAITAGCWKGGTETPLPVGINPFGWIARHFF

SEQ ID NO: 185670 - protein, 93 aa, Glycine max
  unsure (1)..(93): unsure at all Xaa locations
  Clone ID: PAT_MRT3847_138674C.1.pep
MGVEKQLFRSGAGPKPMFGHNVTVHCTGVCNNGGLSHSFXSSKNSVQKPFTFQIGRGYVIKGXHQGVLGXQIGEVASLRCSPDYDYGGGGFHV

SEQ ID NO: 185671 - protein, 43 aa, Glycine max
  unsure (1)..(43): unsure at all Xaa locations
  Clone ID: PAT_MRT3847_138675C.1.pep
XXXXSYVXWXIKLVLLRSQCIYLTLRIXARIXLQXRXXEYXCX

SEQ ID NO: 185672 - protein, 71 aa, Glycine max
  Clone ID: PAT_MRT3847_138676C.1.pep
QTHKKHFPKKKKGTRRPWLKPSKSKNPPLFLLTGLNLRKENFKNHLQKPEILKKTGVPKKKDRKTIGGALI

SEQ ID NO: 185673 - protein, 95 aa, Glycine max
  unsure (1)..(95): unsure at all Xaa locations
  Clone ID: PAT_MRT3847_138677C.1.pep
FKVDPEFPQEMVQSPASLKKVFGLPISPGIRTPGMWARFAYFYPHRRARVPANLVQAQRXLFGXPPYXRVVSPGAFYSQWTKLAPQSGAGVGAPH

SEQ ID NO: 185674 - protein, 102 aa, Glycine max
  Clone ID: PAT_MRT3847_138678C.1.pep
PPCRPFFFFLVLHFDPEGLRSCVPGYQNLASLPVNGKMGELNFYRYIIHGLQLVKNHMAHPLDRLRRNTLRPTTGEIGSFNISCMIHYYFLTNILPKGRCEE

SEQ ID NO: 185675 - protein, 136 aa, Glycine max; identical to SEQ ID NO: 150528
  Clone ID: PAT_MRT3847_138679C.1.pep

SEQ ID NO: 185676 - protein, 83 aa, Glycine max
  Clone ID: PAT_MRT3847_13867C.1.pep
VSVMGSIPFDQFVCFELSFITTMNSMHFGHHTDRLISSHISHRATPRESMPTPSSIMPPNPVVVSVTDDLPSLLDQLTKPPQF

SEQ ID NO: 185677 - protein, 156 aa, Glycine max
  unsure (1)..(156): unsure at all Xaa locations
  Clone ID: PAT_MRT3847_138680C.1.pep
LGANGKGGGGPVFVGQVFSMCDLSGTGLMAVSTHFDIPFISKRTPEWLKKVFAAITKSERNGPVFRFFIDLGDAVSYVKKLNIPSGVVGACRLDLAYEHFKEKPHLFQFVPNEKQVKAANKLLKTISEHGEXEKVDGVPVFSAQXLDIAIATTDGI

SEQ ID NO: 185678 - protein, 526 aa, Glycine max
  Clone ID: PAT_MRT3847_138681C.1.pep
MALPSEPHRRRRHNHISTFLQSTASNFASLFNPPNPPSLALPHPPSSFSLPLFFAPPLSSSSAVDSATAEPAHPPAKSVRIARLGANGKGGGGPVFLGEVFSLCDLSGTGLIAASKHFGIPFISERTPEWLKKIFAPITKSERNGPVFRFFIDLEDAVSYVEKLNIPSCVVGAFRLDLAYKQFKEKPHLFQFVPNEKQVKAANKLLKTISEHGDKKKVDGVPVFGAQNLDIAIATTDGIKWYTPYFFDKNMLDNILEDAVDQHFHNLIQTRHMQRRRDVVDDNLAAEVIEEMSDRLGEPPEVQELLDEMGHPSIPLSVISKAAELQFQYTVDKVFLGNRWLRKATGIQPIFPYMVDSFERRSEASLLRATESSSCLENSKVEDDRQNAECLDSSNCSLDGNTEAIKQSSPSLSLPFGNWFHHLWPKQCREKASSSRKGVNKEEMKPRPILPKVTMVGLSTEEAGQTSKANLKKTMDDLTRELEKTELDIMTDGGSKECKVEDRDPLFVANGGNYYSSMRRKPGSGR

SEQ ID NO: 185679 - protein, 75 aa, Glycine max
  Clone ID: PAT_MRT3847_138682C.1.pep
THLLSPSNLTYPHFSPIITTNTTSSTTFNIISTTSTLTSPTSSPHSSKPNTHNDNLLHNNSFLFNTFKKHTLNFS

SEQ ID NO: 185680 - protein, 73 aa, Glycine max
  Clone ID: PAT_MRT3847_138683C.1.pep
MTLKFPLKKKKKKKKKKKKKKKKKKKKKKKKKKKKRKKQKKKRLAKKKNFKKIKKKKGGALSKKTILTAGQPE

SEQ ID NO: 185681 - protein, 255 aa, Glycine max
  Clone ID: PAT_MRT3847_138684C.1.pep
MDSKFRKKNRNVNSYTSEQDQDTDIAQENLAESPPSSTVFNIDGLVPSPTSSSKRRRAIQKRVVQIPMKETEGCRLKGESNTPPSDSWAWRKYGQKPIKGSPYPRGYYRCSSSKGCPARKQVERSCVDPTMLVVTYSSDHNHPWPPSRNHARPTKKPEPVPDPVEPEEKFADESMITTAEELGWLGEMEATSSTVLESPFMATTYHADVALIPMREEDESLFADLGELPECSVVFRQGLLAERRRYTAPWCGTTS

SEQ ID NO: 185682 - protein, 111 aa, Glycine max
  unsure (1)..(111): unsure at all Xaa locations
  Clone ID: PAT_MRT3847_138685C.1.pep
RMRPTLPAGKAKCTHEXVIHEYGTRAGALIMAIVRAACRDPTHWACPXDMRAEQCPLTMAEGXTLTFVLTERHYILLPLGSXKCTCPGDYLPTFAMATLPAYIIQSVPCKG

SEQ ID NO: 185683 - protein, 270 aa, Glycine max
  unsure (1)..(270): unsure at all Xaa locations
  Clone ID: PAT_MRT3847_138686C.1.pep
MDQPQNQRPATSTTTPSRSFQFHPLRVPIFDLFNLYLGLGRNSRQKPDDSLRDPPNKTQKRVHALNRELPPPNEQFILDFEQLQSQCADQDQLRSVTEAILISLVVQCSGHGPRADFLLFVLRSLCGIGCINWDSLLPSLLSSVSSAELPVGQLSQAVPTVSSSSLSQTGMLPPPSTIANSSNFQSSNPASPLTSVHTIGSPAQSTMEPLSCAAMSPVKSSDISSAGQTSKLRGSPSVRTNDISNSSLRQLCCKIXLTGLEFSLKQLLML

SEQ ID NO: 185684 - protein, 53 aa, Glycine max
  unsure (1)..(53): unsure at all Xaa locations
  Clone ID: PAT_MRT3847_138687C.1.pep
IYVSTRSLVCGEXFFFFSXVPLPVLKIAVXCCXYEYRIAXFGSSSSRIGLSSS

SEQ ID NO: 185685 - protein, 82 aa, Glycine max
  unsure (1)..(82): unsure at all Xaa locations
  Clone ID: PAT_MRT3847_138688C.1.pep
GDXQVPILAPLSFGFAAPLGQLATIAVARTIFPPARILFAPIIFQHXQTFYDHWIICFGHFIEASLALLHHYIMILAHSLHF

SEQ ID NO: 185686 - protein, 80 aa, Glycine max
  Clone ID: PAT_MRT3847_138689C.1.pep
GKSALVSHFQNSSLMNEDKRCRPILFHSEGSEVGDLIVQEHLSSNSNNLNIQAPRPSEFYSSDFAGSPPKAGPSASLDTN

SEQ ID NO: 185687 - protein, 237 aa, Glycine max
  unsure (1)..(237): unsure at all Xaa locations
  Clone ID: PAT_MRT3847_13868C.1.pep
IDRGVCQALWGDTDLSWEIYPAINSAGGLLCIWNDGMFKVKRRITGRGFILLEGMWIQEMQKLFIVNIYAPCEAAAKRELWLSIKQIKQLHTDGKWCIVGDFNSIKHPDERLTMSQREGDSNSISEFNEWISDLEVEEVPSVGRRFTWXDRTGLQKVNWTGXLVSDDWVTKWPGSTQYILDRNFSDHCPILLRAKMADWGPKPFRVLDCWLRDNTFQHTVKEIWLNTQLRGWGGYSL

SEQ ID NO: 185688 - protein, 42 aa, Glycine max
  Clone ID: PAT_MRT3847_138690C.1.pep
NSRPYASKKRAFNHGSPQQATIKLLLSRDFVVKYHEGPYSPR

SEQ ID NO: 185689 - protein, 47 aa, Glycine max
  Clone ID: PAT_MRT3847_138691C.1.pep
IPFCLNLPDGSQKKNCISMFLNNSLVLYCSRVLLSPPAFSGYVVNCN

SEQ ID NO: 185690 - protein, 36 aa, Glycine max
  Clone ID: PAT_MRT3847_138692C.1.pep
LVLSALIKFQPRKQILLFSPVSEMNCLQISAPPVNG

SEQ ID NO: 185691 - protein, 83 aa, Glycine max
  Clone ID: PAT_MRT3847_138693C.1.pep
FLIRPFSLTISIRRNFLCFIPIARFQKIRSRKCGYTNGEYLVTNKTYLQAKINAIGMLVEIPIPHFQVIGRQKCSYMNWNYVS

SEQ ID NO: 185692 - protein, 118 aa, Glycine max
  Clone ID: PAT_MRT3847_138694C.1.pep
PYYIITGAGTHASYYFPAKEDQEKPKKIDARLRQRIDPEYNEVQAQMETNLFKLSLDDVVTPKGSMLDLKIPQCKIALAKNTDGGTILRGDLLADFFTNGKHRASVDVHRTHGSQGLT

SEQ ID NO: 185693 - protein, 120 aa, Glycine max
  unsure (1)..(120): unsure at all Xaa locations
  Clone ID: PAT_MRT3847_138695C.1.pep
KAPKGLFFLXVMLYPVLILCLAEDNGLVFNFSWNXCPYAEDSLNXQVKFFYMPSLXTFFXWRRNXXXDRAVQSCDASLLLDSTRRSLSEKETDRSFGLRNFRYIETIKEALERECPRVGS

SEQ ID NO: 185694 - protein, 69 aa, Glycine max
  Clone ID: PAT_MRT3847_138696C.1.pep
LGAGFFLDLGGRDNFPQKKQLAGIQPKSINALKKKKWGPPGRGPENISGGRRNQISGPPPYHTGNMLFP

SEQ ID NO: 185695 - protein, 77 aa, Glycine max
  Clone ID: PAT_MRT3847_138697C.1.pep
KKDRPTPPVRSYNTTYRFSNTATISHARFFFYSSSIALHCGCSLPYYLYEATGWGLEIPVLNKQLEAPKSNGINFIA

SEQ ID NO: 185696 - protein, 282 aa, Glycine max
  Clone ID: PAT_MRT3847_138698C.1.pep
MYREAAVKKEEYQVLEELGRGRFGTVFRCFHRTSNKFYAAKLIEKRRLLNEDRRCIEMEAKAMSFLSPHPNILQIMDAFEDADSCSIVLELCQPHTLLDRIAAQGPLTEPHAASLLKQLLEAVAHCHAQGLAHRDIKPENILFDEGNKLKLSDFGSAEWLGEGSSMSGVVGTPYYVAPEVIMGREYDEKVDVWSSGVILYAMLAGFPPFYGESAPEIFESVLRANLRFPSLIFSSVSAPAKDLLRKMISRDPSNRISAHQALRHPWILTGALTTATISNFLT

SEQ ID NO: 185697 - protein, 48 aa, Glycine max
  Clone ID: PAT_MRT3847_138699C.1.pep
SCLYFQATLWQDRRNKVSHHLSNGACPNPVCTGSFSRGPDIGQKPASI

SEQ ID NO: 185698 - protein, 35 aa, Glycine max
  Clone ID: PAT_MRT3847_13869C.1.pep
MLCGPSINLMHIILQLHLIVKGQPVFSKGHSKCTT

SEQ ID NO: 185699 - protein, 77 aa, Glycine max
  Clone ID: PAT_MRT3847_1386C.1.pep
LVLIDRFYFFDLCVFLRPKKIQNNQMGTGFGNPFFSPSGHFWAPGPLKFVRGEHIKTHFCFFETGLFFVGTEIKNQF

SEQ ID NO: 185700 - protein, 45 aa, Glycine max
  Clone ID: PAT_MRT3847_138700C.1.pep
GNRVRLCFKIKIKIKIKNFKKTYTLTSKENLQDGVAKRKIVYPVK

SEQ ID NO: 185701 - protein, 93 aa, Glycine max
  unsure (1)..(93): unsure at all Xaa locations
  Clone ID: PAT_MRT3847_138701C.1.pep
MGTRYETRILCTVGVVDGEYFFMGIQTLGGSGHRITKEHALAVEHLAPSXAALRMELCPGYMSDGNFWKIYFVLVHPRLSKIDAAILSTPQVS

SEQ ID NO: 185702 - protein, 63 aa, Glycine max
  Clone ID: PAT_MRT3847_138702C.1.pep
PRVRGYRGPDSPEHLISSVSTLAHRVLNGLLRNDESTPESSMIQEVMLQDVTAHVTDTNDHDA

SEQ ID NO: 185703 - protein, 92 aa, Glycine max
  unsure (1)..(92): unsure at all Xaa locations
  Clone ID: PAT_MRT3847_138703C.1.pep
THGWILDLDLTKFTTQKQGSSLFQLWKSEHGPVYHNHQEXGQRLEIVKNNLNYVMDMNANRRSPHSHRLGLNKLGGITPQEFSKKYLQAPKD

SEQ ID NO: 185704 - protein, 68 aa, Glycine max
  Clone ID: PAT_MRT3847_138704C.1.pep
MTLTTKADTSLHVIFFRESVNKLKMLCSLLCHVEFVHRLQDNLIERPYHNDYRHNASLLAYGSGKKNC

SEQ ID NO: 185705 - protein, 253 aa, Glycine max
  Clone ID: PAT_MRT3847_138705C.1.pep
RNEAIASRLFCPAGADDLSSSPNNLKNIHQRSLLIHPSLSKKIRFDFFIFVLLLIHHGGAEFLGCPSQTADAAESDLESWIERLLKQLQQVNTQMQAWVSSGGSEMVSHTLTRHQEILQDLTQEFYRLRSSLKAKQEHASLLEDFKEFDRTRLDLEQVDSEQHALLKERTSISRSAGHMDNVISQAQATLGALVFQRSTFGGINSKLGNVSSRLPTVNNILSAIKRKKSMDPIILSLVFAVCTFLIFMYWLSK

SEQ ID NO: 185706 - protein, 223 aa, Glycine max
  Clone ID: PAT_MRT3847_138706C.1.pep
MEVPSSWDALRKQARKLEAQLDEQMNSYRKLVSNNVSTKADAAESDLESWIERLLKQLQQVNTQMQAWVSSGGSEMVSHTLTRHQEILQDLTQEFYRLRSSLKAKQEHASLLEDFKEFDRTRLDLEQVDSEQHALLKERTSISRNTGHMDNVISQAQATLGALVFQRSTFGGINSKLGNVSSRLPTVNSILSAIKRKKSMDTIILSLVAAVCTFLIFIYWLSK

SEQ ID NO: 185707 - protein, 262 aa, Glycine max
  unsure (1)..(262): unsure at all Xaa locations
  Clone ID: PAT_MRT3847_138707C.1.pep
KQWPYEVFSSTFYLSLSFFISVLLLFKLARRTKPETXFETAHLPPQFSYIGNIHQFGTLPHRSLRDLSLKYGEMMMLQLGQMQTPTLVVSSVDVAMEIIKTYDLAFSDRPHNTAAKILLYGCADVGFASYGEKWRQKRKICVLELLSMKRVQSFRVIREEEAAKLVNKLREASSSDASYVNLSEMLMSTSNNIVCKCAIGRNFTRDGNNSGKVLAREAMIHLTAFTVRDYFPWLGWMDVLTGKIQKYKATAGAMDALFDTAI

SEQ ID NO: 185708 - protein, 154 aa, Glycine max
  Clone ID: PAT_MRT3847_138708C.1.pep
MALLKQWPYEVFSSTFYISLSFFISVLLLFKLTKRTKPKTNLNLPPSLPKLPIIGNIHQFGTLPHRSLRDLSLKYGDMMMLQLGQMQTPTLVVSSVDVAMEIIKTHDLAFSDRPHNTAAKILLYGCTVAGFASYGKKWRQKRKICVLELLSMKR

SEQ ID NO: 185709 - protein, 159 aa, Glycine max
  unsure (1)..(159): unsure at all Xaa locations
  Clone ID: PAT_MRT3847_138709C.1.pep
GVGGGPGFPTPTKAPPPLTFARILQNGLVNSSVKGPLSGKAPILDVVMLSLRTAQGIDLKSFQESFGSFVVLFLLEAFNPFFXSGLLVCLAEHRRPLKIDALNFFLSKTNPKGRVAYLRLSDPKGFLFSNEFIALAFGVFASWKDMPPSKEAKASLKHE

SEQ ID NO: 185710 - protein, 86 aa, Glycine max
  Clone ID: PAT_MRT3847_13870C.1.pep
WRKKERKGEKPVKKSRGKNLRKIDWKKEINREKDSYKNDRVRGEKSRCSDLNNPREIIHKVKRIEEKKKQLREKNKRQPAKKNKIK

SEQ ID NO: 185711 - protein, 181 aa, Glycine max
  Clone ID: PAT_MRT3847_138710C.1.pep
IRSSDNGSNNSAFADPFAFGSGHVNPERASDPGLVYDITTKDYLNYLCSLKYTSSQIAILSKGNFKCDKKSALHAGDLNYPSFAVLFGTSARNASVAYKRVVTNVGKPSSSYAVKVEEPKGVSVSVEPRNISFRKIGDKLSYKVTFVSYGRTAIAGSSSFGSLTWVSDKYTVRSPIAVTWQ

SEQ ID NO: 185712 - protein, 79 aa, Glycine max
  Clone ID: PAT_MRT3847_138711C.1.pep
LSWECSFSSVIFCHSHRRWVSLLVFVGFRTPAILFLFSPCVLNHFLFVGARLLYPFFASPLPKYQVLSIVQNNLKGEVN

SEQ ID NO: 185713 - protein, 50 aa, Glycine max
  Clone ID: PAT_MRT3847_138712C.1.pep
AKAFGSYITKNQHKQGVQTIALLSIIRVEKHHITLSLGTPPIIPSPTTIF

SEQ ID NO: 185714 - protein, 97 aa, Glycine max
  unsure (1)..(97): unsure at all Xaa locations
  Clone ID: PAT_MRT3847_138713C.1.pep
XXATXEDPXHXQEGXXGNGRXNPREPPSRQPGTXMGSRGQRHQXPGWXLGXSPEXEFGRTXGSSQXRIQXXGPGPTXXQXANLXXSRXPSXRTRXCD

SEQ ID NO: 185715 - protein, 81 aa, Glycine max
  Clone ID: PAT_MRT3847_138714C.1.pep
RLHYTFFFFHQFNLPLWWPIPPLLGDNANYQRKLVCHSLSLKKKEPDFDCEKRLHFNNAWCEYLIKNPKSCLAFNTLPFDR

SEQ ID NO: 185716 - protein, 124 aa, Glycine max
  Clone ID: PAT_MRT3847_138715C.1.pep
VGLNYLMTLQVTWAKPPSTNKKPMECNCQVSSRGSWSHRRHQRLEGQIHLEGSHKQPNIIQQNSSRNNSRSETRDINRDLEQEPNEDTIQAQEAFKMWEMIQQLGVTTGNKEDDQPLLSSSRSR

SEQ ID NO: 185717 - protein, 52 aa, Glycine max
  Clone ID: PAT_MRT3847_138716C.1.pep
LETKKSPAHACLAAMIRELAPSRALSSYGMFLEAASSIALISRVSGQKKKKE

SEQ ID NO: 185718 - protein, 60 aa, Glycine max
  Clone ID: PAT_MRT3847_138717C.1.pep
QLLEKATNYGAGKGTSMPNPLASVFDTDFECVSRNRVEDLDKVSVENPYATYIPIYEIKY

SEQ ID NO: 185719 - protein, 89 aa, Glycine max
  Clone ID: PAT_MRT3847_138718C.1.pep
KLKEDPISVKKAYYSVQHKKCNSMHEAPTKWCIREGGGRYSQPYPANTGCFHNLNLGLPSHNATTILYHQVLNKIKPFHLSLTSQQATI

SEQ ID NO: 185720 - protein, 398 aa, Glycine max
  unsure (1)..(398): unsure at all Xaa locations
  Clone ID: PAT_MRT3847_138719C.1.pep
MQVTSSSTRRVPTHNRHFRFAVPAKLSPSDFQDFQSYARPSHLLPASARAESARVRLREDDRRGKEDGSKSLFRVKLVTSNAYGSAISDLSAGLLLCLIDENGNSILQRIPVSLMMGRSTESGDMTNIDMLHFQRGSLDEFIFEGPKIARLEALWVSVESGQVXWRLGSVSLMVISCEGKPSGLEDGVTSYTGFQYDFQIDDVLLGEGTDLSMLELRPSLVTELEGIDPISIFNKGLNDPTLFSSPKISNEESMKEYADLKFSLLFYDAMLTLFGTSVASLSAGENAGIAFLIGGIGGFLYLLLLQRSVDELPASELITNEREELMHCSXGVKGPIASVALALGLAVIASRYSSGDLELMLTPKDLIVGMMGFLACKVSVVLAAFKPITLGPKLPSDM

SEQ ID NO: 185721 - protein, 77 aa, Glycine max
  Clone ID: PAT_MRT3847_13871C.1.pep
KLKLNSEAFGNNNDERKKWIEKKTTHLMTNAFYVNLNPQLCQYKFKPLFFLVEREASEMEAEAIEMDERENVKERER

SEQ ID NO: 185722 - protein, 111 aa, Glycine max
  Clone ID: PAT_MRT3847_138720C.1.pep
NPPKVSFLLWRIFLDRIPTKVNLQKRQIQLHGQYLLCAFCKEVPEDLSRLFFACPISHNIWKRWYHIMRLNSTLPHLAIDHSWQHAHRLVGRKANGWWVVYHHLDLMELMQ

SEQ ID NO: 185723 - protein, 138 aa, Glycine max
  unsure (1)..(138): unsure at all Xaa locations
  Clone ID: PAT_MRT3847_138721C.1.pep
IVKSLYGLKQAPKQXHEKFDQVILSYVFQINNNDKCVYLKQFDDNGCVILCLYLDDILIFSSNMHFINDVKFFLSRNFDMKDLGRVDMILDIELIKKNDDIAFTQSYYVEKLVKKFNYFDLKQAATPYDTVRYELISK

SEQ ID NO: 185724 - protein, 61 aa, Glycine max
  Clone ID: PAT_MRT3847_138722C.1.pep
ARARAATKKAANPAAKKAMKMAKKPAAKKILVQKVLAKKPKPSKKKVVKKSAAKKAKPAKK

SEQ ID NO: 185725 - protein, 287 aa, Glycine max
  Clone ID: PAT_MRT3847_138723C.1.pep
WASGWEATPHQSFGYNRLEVLGALVSVQLIWLISGFLIYEAVGRILVRNGSVNEKLMLAIAALGFVLNFIMVAWIGHDHSHHHHYHHHHHHHHHHHHDGCESSGHDHSHHQYQTDHDHGKEEQSKITDEENVTLVSSSQTNTNVLNINLQGAYLHVMADMIQSIGVMIAGAIIWAKPEWFMVDLVCTLIFSVLSVSTTLPLLRNIYGILMERTPSEIDISKLESGLRNIKGVQDVHDLHVWAITVGKCVLSCHVVAEPGISSIDLLGTIKNYCEKKYQIQHVTIQIE

SEQ ID NO: 185726 - protein, 80 aa, Glycine max
  unsure (1)..(80): unsure at all Xaa locations
  Clone ID: PAT_MRT3847_138724C.1.pep
LAVFSCAATDLGAWAFHGASYQRCPLRMKTGYGERILEVKCPSSRLAVEAHIIPAFXTIPEEWVEPTEGYLNGAQFRADC

SEQ ID NO: 185727 - protein, 140 aa, Glycine max
  Clone ID: PAT_MRT3847_138725C.1.pep
MILEEGCAKMQFFQPSKEREDENAKIEEAGVDLKVMIEEMESIDVPSVFICPISLEPMQDPVTLCTGQTYDRSNILKWFSLGHKTCSTTMQELWDDVVTPNSTLSHLMITRFSHKYLAMKKKLRMFRTSLEILTCSRGKG

SEQ ID NO: 185728 - protein, 126 aa, Glycine max
  unsure (1)..(126): unsure at all Xaa locations
  Clone ID: PAT_MRT3847_138726C.1.pep
VNFNETFSPIIKHASIRIILILALTXNGLFFSWMLTRFLLNGFLEEVYMAQPXGVEATDTSLVCMPHKVIYGLKQAPRAWFERLKTALLQFGFKDRKYAPSLFIYYHNFCIXLFTDDIIITGNSSA

SEQ ID NO: 185729 - protein, 68 aa, Glycine max
  Clone ID: PAT_MRT3847_138727C.1.pep
VKNFLFLKNFFFFVHCLCAFFFVACKNFWGSCFKIMAWWGGWIMEIPNSLNHNQFRLNLGIKLNAGLS

SEQ ID NO: 185730 - protein, 82 aa, Glycine max
  Clone ID: PAT_MRT3847_138728C.1.pep
LHFTEYQYPFIVKSSRSLHHVSSQLKNIAVKIWQRKNPITLKERDKNQAKCKEFCSYEVKNLKGYLDYLRTTSDGGACMCGC

SEQ ID NO: 185731 - protein, 128 aa, Glycine max
  unsure (1)..(128): unsure at all Xaa locations
  Clone ID: PAT_MRT3847_138729C.1.pep
IPDSGRSRAHIISVNNCDHVYHANFAYLASDNVPLTGHAKLIKESSEEERXHAYKSMAYHLTRDLEVKLHSIAMPITEFDHEENVDALYAMXLDLSMETLTNVKLFNXHKVPSMNIDVQLSHFIESEF

SEQ ID NO: 185732 - protein, 51 aa, Glycine max
  Clone ID: PAT_MRT3847_13872C.1.pep
IDYMFWLHTHSAFELLAHHIPINFRMRLCVHVCACEFSFSFDGPRFLSYMI

SEQ ID NO: 185733 - protein, 63 aa, Glycine max
  Clone ID: PAT_MRT3847_138730C.1.pep
SGHYSLLTPPLPTQPPSLDQALITILITFSLYTPLLFSLNPLLKIPPIFILNVSIQFPSFHHK

SEQ ID NO: 185734 - protein, 67 aa, Glycine max
  Clone ID: PAT_MRT3847_138731C.1.pep
GRISLEDKAFWLHFMLEETTCLYKCMCGYKGFWFMDEGEKGLPDHVMGDERRVFQVILHMDGNLLEH

SEQ ID NO: 185735 - protein, 73 aa, Glycine max
  unsure (1)..(73): unsure at all Xaa locations
  Clone ID: PAT_MRT3847_138732C.1.pep
ADCXLXVRLHSVCFRILRXHXHERDSEVSLLXCITRYASSSXSANGRSGPGDSFLVLDLALTLSMVSDFPPQG

SEQ ID NO: 185736 - protein, 103 aa, Glycine max
  unsure (1)..(103): unsure at all Xaa locations
  Clone ID: PAT_MRT3847_138733C.1.pep
LASAHAYADAWADAWYQIPAVDKSYSTKVNKFAKIMNLKQSXVVGDLKLFTDGKLYEGKHFPVSNIIARENYVFKIPNKXQEEILTSSRSDFRIAMVSKDIKS

SEQ ID NO: 185737 - protein, 334 aa, Glycine max
  Clone ID: PAT_MRT3847_138734C.1.pep
MGRPPCCDKEGVKKGPWTPEEDIILVSYIQEHGPGNWRAVPAKTGLSRCSKSCRLRWTNYLRPGIKRGNFTEQEEKMIIHLQDLLGNRWAAIASYLPQRTDNDIKNYWNTHLRKKLKKMQVGCEGGSFGEGFSASRQIPRGQWERRLQTDIQMAKRALSEALSPEKPSCNLSASNSNPSDSSSSFSSTKPTTTQTVCYASSADNIARMLKGWMKNPPKSSRTNSSSVTQNSFNNFAAAGADTASSIGAKGPPSSAELSENNFESLFDFDQSLESSNSDEFSRSLSPEATVLQDESKPDVIGAEIMPFSLLEKWLLDEAGCQEKLVGCGDDAKFF

SEQ ID NO: 185738 - protein, 331 aa, Glycine max
  Clone ID: PAT_MRT3847_138735C.1.pep
GRPPCCDKEGVKKGPWTPEEDIILVSYIQEHGPGNWRAVPAKTGLSRCSKSCRLRWTNYLRPGIKRGNFTEQEEKMIIHLQDLLGNRWAAIASYLPQRTDNDIKNYWNTHLRKKLKKMQAGCEGGSFGEGFSASRQIPRGQWERRLQTDIQMAKRALSEALSPEKKPSCLSASNSNPSDSSSSFSSTKPTTTQSVCYASSADNIARMLKGWMKNPPKSSRTNSSMTQNSFNNLAGADTACSSGAKGPLSSAELSENNFESLFDFDQSLESSNSDQFSQSLSPEATVLQDESKPDINIAAEIMPFSLLEKWLLDEAGCQEKLVGCCGDAKFF

SEQ ID NO: 185739 - protein, 55 aa, Glycine max
  unsure (1)..(55): unsure at all Xaa locations
  Clone ID: PAT_MRT3847_138736C.1.pep
RSDTSPRPGERKGLSQYHFISCAPQELDEAPHDCWGCEFIPVSSAGGLGLAYFXX

SEQ ID NO: 185740 - protein, 80 aa, Glycine max
  unsure (1)..(80): unsure at all Xaa locations
  Clone ID: PAT_MRT3847_138737C.1.pep
XYPCNTHCLXXKIFHTXXXXXXTLKHSXSXSFPSXNLQPXLKPKRVIPKAXILXXLKFKATTKPRAXXAXLFXXXCQNLV

SEQ ID NO: 185741 - protein, 56 aa, Glycine max
  Clone ID: PAT_MRT3847_138738C.1.pep
HALIGEVCETIQSRHGPSGSLQPVNYRGLFEPSLKALACAPGGTACWHGFRRTLRK

SEQ ID NO: 185742 - protein, 91 aa, Glycine max
  unsure (1)..(91): unsure at all Xaa locations
  Clone ID: PAT_MRT3847_138739C.1.pep
MNRARTEGLTFTKEPFMVDTGPGKIKNMKFCTLSELEIRXFGAVQVWNGSYYDFFKKPCHGGLLDPGMGPASKSLVCATCEGNFNDCSGLY

SEQ ID NO: 185743 - protein, 122 aa, Glycine max
  Clone ID: PAT_MRT3847_13873C.1.pep
PQKKKKWGFFVFRPSPQNCLGARKSCTFFPFDPLLPNLFLLVFIERTSDLLNLIMVSEFSPPLTLFILFWLKVTILFILQGPPPFKGGDFFFHLFPLSWYLWQTSIFFFHPPGFWPVFLPEL

SEQ ID NO: 185744 - protein, 120 aa, Glycine max
  Clone ID: PAT_MRT3847_138740C.1.pep
VTLYNFLISTCGKCKNSNKAIQILEEMKCMEVKPNIQTYICLLNACAADGRIDRVYAIVRDMTAAGLGLNEFCYAGLIVAHKNKTPLPDDFAAKVIEFVERSKMWSSVETNSANAENVMM

SEQ ID NO: 185745 - protein, 378 aa, Glycine max
  unsure (1)..(378): unsure at all Xaa locations
  Clone ID: PAT_MRT3847_138741C.1.pep
MEEANKGIAPATTTTQQQQQQQQPILLQQQQQQQHQQHYLLLQQLQKQQQQHQQQAAAISRFPSNIDAHLRPIRPLNLQQNPNPNPNLNPAPNPNPNPILNLHQNPNSNHLPPQQQPPQQQQQQQQKIVRPGNQMELQMAYQDAWRVCHPDFKRPFSSLEDACERLLPYHVVADYEEEEDDRILDSDTTGQMLSRSQQWDNNITAKIAEFTASLEXPALAVCIITQMRSLGEFRSHLRLMIEQALLQEEKXATSELRAEIESREKAGREAHEAKLRMAAMFQAEQARADLQSHAEMMSRAPMRGSALGSQGNDIVIGHDMGEQDQAGNPGEMINGWGNNTQRDEKEPSEDFLNDEAENGDTGTQDGWREVGEFDLNAR

SEQ ID NO: 185746 - protein, 46 aa, Glycine max
  Clone ID: PAT_MRT3847_138742C.1.pep
NVPISFFVCMFIEMTEVWFLLATYVQASQREIKHLGIHTALLPKLT

SEQ ID NO: 185747 - protein, 126 aa, Glycine max
  Clone ID: PAT_MRT3847_138743C.1.pep
ITVGCHFGPFLSAKCANSQIGGNPRSRLSIQAGRQHILRLREEKPSLSAGQVQQMLVERGICSRQNVPSASRTIVCFKRPTATPTKGEAKKGRPFCGHTGRGRRKKAIESFHGKHSRQRRRHKSVG

SEQ ID NO: 185748 - protein, 421 aa, Glycine max
  Clone ID: PAT_MRT3847_138744C.1.pep
PDQRGPKSWSNLKKLILLKRFVKALEKVRNINPQRPRHFPSDANLEMEKVFLKHQTAEEKKNAEEWMLDYALQKVVSKLAPAQRQKVTLLVKAFETILPFQVAENSPRFSPTMEPQANPVQPLDNSSNHSEEETSFSHDSSMELTENTSDDPMPELHNPTTLKERCLESLDFPGTETVKNMPAFGATEEDLSGKQSLAGSYDNEEKISSDSDNIYLVEIKDTTSSSLNEPVEIIRSSHEEAPTNETVNDVPEDLLSSVNTENPDMKSESPGRDVETKSLKGDNGRQFSMSKSLVLEGLVRSLRSNLIGSGAPANEATTERKEEIENVNMGIETLEEFPTEEQSVAPTSAVEEPETPVEKQSNTGLWYLVYKHMVSNVAENNSESLIDGADEKESGLDDIRTGVTFNAYGNTPMKDHEMQFR

SEQ ID NO: 185749 - protein, 269 aa, Glycine max
  Clone ID: PAT_MRT3847_138745C.1.pep
MGRQPCCDKLGVKKGPWTAEEDKKLINFILSNGQCCWRAVPKLAGLRRCGKSCRLRWTNYLRPDLKRGLLTQAEEQLVIDLHARLGNRWSKIAARLPGRTDNEIKNHWNTHIKKKLLKMGIDPVTHEPLNKQVSSKDSSSPAEHFSQVNNINIHQVEQNDGVLNSEENSTSSPAENSSGEESLLVDSICSDVSLINSMWLDETPLMDTLWDNTPKVENANNNMGLPIGEDNCAWLLDCQDFGIHDFGFNCFSEVETNVLQAIGMDRKGL

SEQ ID NO: 185750 - protein, 74 aa, Glycine max
  unsure (1)..(74): unsure at all Xaa locations
  Clone ID: PAT_MRT3847_138746C.1.pep
KRLSVGIATLFFSIITMLIAFGATFFIVFGHQLAWIVIPTTLVACFPAILFALXQFPLLVDTLSCTYGAGVFSR

SEQ ID NO: 185751 - protein, 82 aa, Glycine max
  unsure (1)..(82): unsure at all Xaa locations
  Clone ID: PAT_MRT3847_138747C.1.pep
MEPGLPRCRPVRRVAVPRQSRSGTRISRCAACLASAPCKPRASSLGPEPEELGRGPSVRALRPPAPGGWXPDGLKHLWAPTG

SEQ ID NO: 185752 - protein, 101 aa, Glycine max
  unsure (1)..(101): unsure at all Xaa locations
  Clone ID: PAT_MRT3847_138748C.1.pep
LLHMAIEELGKMISARARERFQRGLTRKPMAVIKKLRKAKREAPPGEKPEPVRTHLRNMIIVPEMIGSIIGVYKGKTFNKVXIQPGRIGTILAESSSSYKP

SEQ ID NO: 185753 - protein, 126 aa, Glycine max
  unsure (1)..(126): unsure at all Xaa locations
  Clone ID: PAT_MRT3847_138749C.1.pep
MLYMSLPVLNPNSALLNISWVLHMNINAAQGLNDVLINNLGALGTIIMLVGGAXDVKLTKDGHTLSIEMHIQNPTDIMIARTGVAHDDASRDRTTSTVIIIGALMKQSDRSIDESMHTGVLIDGLD

SEQ ID NO: 185754 - protein, 54 aa, Glycine max
  Clone ID: PAT_MRT3847_13874C.1.pep
RAVKRGVLFNNQDEKMVGRGKGRGLIDNKAIGEKGMLKKGIKMGKERGLTETKV

SEQ ID NO: 185755 - protein, 96 aa, Glycine max
  unsure (1)..(96): unsure at all Xaa locations
  Clone ID: PAT_MRT3847_138750C.1.pep
VPCSTAEKEAVADAAAWVFNDAASVGIIIANMAGMATXGFSGGTTLTGMHLGSPTLVTGVLRMLXVGQSAYLPESEVCEGEGIANCAIGGMNGRSM

SEQ ID NO: 185756 - protein, 120 aa, Glycine max
  Clone ID: PAT_MRT3847_138751C.1.pep
MSRHCDCCCGGIPPGLLLIRGKQWNLQTYRYMVLLTTFIAYACYHASRKPTGIVKSVLCPEHKGTNQGWSPFNGHDGTSKLGEIDVAVLACYSMGMYVAGHLGDSLDLRLVLTTGMVGSG

SEQ ID NO: 185757 - protein, 108 aa, Glycine max
  Clone ID: PAT_MRT3847_138752C.1.pep
LVLFFTLIFCIFLFVVRALSIFNLKSWTRRYCIFEKPRTFSRTPRQKQWGRQSRSQMPTAEGTANSGRRRTLGTTKICITTWYAPSRLVTRRAPHKKTGPPHFKRPTR

SEQ ID NO: 185758 - protein, 68 aa, Glycine max
  unsure (1)..(68): unsure at all Xaa locations
  Clone ID: PAT_MRT3847_138753C.1.pep
RRPSSAGTPRSYSLDEIAARAMVSXHVSELFGRKKPRMLAQSDFIRCKWHNEIHSRAXSLCNLIDIHC

SEQ ID NO: 185759 - protein, 96 aa, Glycine max
  Clone ID: PAT_MRT3847_138754C.1.pep
SDLGMFDCCGSYPLPTELRILPFFLSLHPGKMWCYCRMVYMPMSYMDGKKWTGPITPFLAAYIDQLFIKPYDENCRKIARHICANEYLYYTHHCIQ

SEQ ID NO: 185760 - protein, 74 aa, Glycine max
  Clone ID: PAT_MRT3847_138755C.1.pep
FSVALVFGSFAINLSPLKHLNSASFSVARDSNWLTTYGLSELSSLLFATCIYRSRSFPLIRYAATVQSAKASSE

SEQ ID NO: 185761 - protein, 92 aa, Glycine max
  Clone ID: PAT_MRT3847_138756C.1.pep
CFFFGPPNIRGLEFLGGGTGSPFICGISPPRWCPSFFPPQFKKVDVDGFPPFFPPDFLEFVEGKTGKGQKGGIYSFYKWGGPPFKKRKRFPG

SEQ ID NO: 185762 - protein, 88 aa, Glycine max
  Clone ID: PAT_MRT3847_138757C.1.pep
KQNGTPTLQAGRLARLKNSRFGPSLLWFSPPQKNKETKNRLKAPYEILRLILNQKLVLNKLKSLGPVFTTSIFSRGAGLDFFDQPPPF

SEQ ID NO: 185763 - protein, 63 aa, Glycine max
  Clone ID: PAT_MRT3847_138758C.1.pep
TGGVSISQVLSSSSIYCFLGSRVGIFQFLIGCNLVACSNGLCSSRDSINPRPRIQGLLDRSWI

SEQ ID NO: 185764 - protein, 39 aa, Glycine max
  Clone ID: PAT_MRT3847_138759C.1.pep
FLHQLLSTLHTLLSKIHLIALITYFVIFYSYSLVKFKIK

SEQ ID NO: 185765 - protein, 49 aa, Glycine max
  unsure (1)..(49): unsure at all Xaa locations
  Clone ID: PAT_MRT3847_13875C.1.pep
SDDDNXSRMRXSEXSXEXVRXLLXMLWRWRXXSKXNAXSCGXXSLFTXS

SEQ ID NO: 185766 - protein, 63 aa, Glycine max
  Clone ID: PAT_MRT3847_138760C.1.pep
LLDSFLTPSIGDRVQSSDSATGFADSSPPSAQDYSRRTVQTSLPIRRNTLSRIELLHQVMCLP

SEQ ID NO: 185767 - protein, 84 aa, Glycine max
  Clone ID: PAT_MRT3847_138761C.1.pep
NGEFSMAVIQANNLLEDQSQLESGPLSLTEGNPQGTFVGIYDGHGGPEAARFVNDRLFNNIKSKFFFFLHPATQIAISGNNFRN

SEQ ID NO: 185768 - protein, 85 aa, Glycine max
  Clone ID: PAT_MRT3847_138762C.1.pep
SALFLFLQGWTYKTFPANELWKNYGLFCMALCDLGSLRPFKIVFGSQGGKTLSWKWTSLPVTVFGVIFFPFCMLLEIKLSLRAPV

SEQ ID NO: 185769 - protein, 103 aa, Glycine max
  unsure (1)..(103): unsure at all Xaa locations
  Clone ID: PAT_MRT3847_138763C.1.pep
GVQNLGNRATMCHRLNCTTAVWYCHEVRETTTFMDPLVVGDXTKTDALAICHSNTSGMNHLMLHQLMGVDPATNPVCHLLGSKALLWVPNXSVDTAYQTNFVA

SEQ ID NO: 185770 - protein, 147 aa, Glycine max
  Clone ID: PAT_MRT3847_138764C.1.pep
RLEEAFSHMDLLESLNLSRNHLKGEIPEILAELDRLSSLDLSQNDLKGTIPEGFANLSNLVHLNLSFNQLEGHVPKTGIFAHINASSIVGNRDLCGAKFLPPCRETKHSLSKKSISIIASLGSLAMLLPFPIPLNRSTKFCNSKERE

SEQ ID NO: 185771 - protein, 119 aa, Glycine max
  Clone ID: PAT_MRT3847_138765C.1.pep
MEYSNGFPRKRDVSLQELSKRLAEFAEVRGWDQYHSPRNLLLALVGEVGELSEIFQWKGEVAKGLPNWSSDDKEHLEEELSDVLLYLVRLADVCGLDLGQAALTKIVKNAQKYPVTSTN

SEQ ID NO: 185772 - protein, 67 aa, Glycine max
  Clone ID: PAT_MRT3847_138766C.1.pep
TKHIYILLISKVWRSFILKNHNVLYFLQTVSLCNGPVSKHISWTSPSLCHFDIKSMWLKVKYGSNKS

SEQ ID NO: 185773 - protein, 70 aa, Glycine max
  Clone ID: PAT_MRT3847_138767C.1.pep
LNKMAKKQMLSDILNVISLMFWSPNCMLKCLIDTILSGVGCWKVVCSSNFCLKFVFPSNLCGQSVNFLFF

SEQ ID NO: 185774 - protein, 69 aa, Glycine max
  Clone ID: PAT_MRT3847_138768C.1.pep
TKLPLDITLEATELSFHGKAIRTIPCRERCLYATNCLQKYFTIPNKYEIVFTKKCECKDKSNIRKATQY

SEQ ID NO: 185775 - protein, 169 aa, Glycine max
  Clone ID: PAT_MRT3847_138769C.1.pep
MKQSILPSVFLGILACWGVLPVTAEDRYQYFTWEITNGTIYPLGVPQQGILINGQFPGPTVEAITNDNILVNVINKLDEKFLITWSGIKQRRTSWQDGVLGTNCPIPPKSNWTYKFQVKDQIGTYTYFPSTKIHKAAGGFGGFNVAQRSVISIPYPAPDGEFTLLIGDW

SEQ ID NO: 185776 - protein, 79 aa, Glycine max
  unsure (1)..(79): unsure at all Xaa locations
  Clone ID: PAT_MRT3847_13876C.1.pep
MSCCGGNCGCGSSCKCSNSCRGCNMYPHLIYTKSTTTKTLVIEMTPIKAQFKDTKMDIPTKNNSYKYKPNYSYNPYTYX

SEQ ID NO: 185777 - protein, 33 aa, Glycine max
  Clone ID: PAT_MRT3847_138770C.1.pep
FYNIFCSLILGCRTSRPVQIHDVENRLFSICCC

SEQ ID NO: 185778 - protein, 234 aa, Glycine max
  unsure (1)..(234): unsure at all Xaa locations
  Clone ID: PAT_MRT3847_138771C.1.pep
HASAETRLPVKPENWPDKSLIEVEHSRSDALNGLSDSKSATNAREDSNQKNKKFGTTKDDYLKDAGVEPGIRNHQKSGTTLDSEVNGISTETRGSGKTENWLEKNFHEVEPIVKQIXAGFRNNYMAAKERVNQTLDIPTEMESLGGVEDDGELDWMQDDHLRDIVFRVRENELAGRDPFYLMNDEDRDHFLEVLXEKVEKENKKLSDIHEWLLSNIENLDYGXDGIRYYEPTGR

SEQ ID NO: 185779 - protein, 44 aa, Glycine max
  Clone ID: PAT_MRT3847_138772C.1.pep
PGTRKTILLLLLLLKRRMRRCQQSSSTNHHLPPAYNNNYNKHKT

SEQ ID NO: 185780 - protein, 55 aa, Glycine max
  Clone ID: PAT_MRT3847_138773C.1.pep
SVFCAMVALLAIVKFSVSYAKLWFHVPMQLIVVYYRFLRKKKKKVFFCSVWLIHQ

SEQ ID NO: 185781 - protein, 255 aa, Glycine max
  unsure (1)..(255): unsure at all Xaa locations
  Clone ID: PAT_MRT3847_138774C.1.pep
MARKKIREYDSKRLLKEHFKRLSGQDLPIKSAQVTESTDFNELTEKEPWLLSSKLVVKPDMLFGKRGKSGLVALNLDLAEVDSFVKERLGKEVEMGGCKGPITTFIVEPFIPHNEEFYLNIVSERLGNSISFSECGGIEIEENWDKVKTVFMPTGVSLTSESIAPLVATLPLEIKGEIEEFLKVIFTLFQDLDFTFLEMNPFTLVNGKPYPLDMXRGELDDTAAFKNFKKWGNIEFPLPFGRVMSTTEAFIHGLD

SEQ ID NO: 185782 - protein, 192 aa, Glycine max
  Clone ID: PAT_MRT3847_138775C.1.pep
MMQGSLRNANKSGKASSRERKLALQQDVDRLKKKLRHEENIHRALERAFNRPLGALPRLPPYLPPYILALLAEVAVLEEEIVRLEEQVVHFRQDLYQEAVYMSSSMRKLENSVSAPPNKSNPTLDSPKLDKLKSLTQTAGNSTATSETKPTTTLTEDRQGKENQSCTNSSKSRQQSSNQMNKTSIKNIDSQS

SEQ ID NO: 185783 - protein, 58 aa, Glycine max
  Clone ID: PAT_MRT3847_138776C.1.pep
KLFHFYLHFSSFPASSPFSFNAEQVRIHQRNKIKYKTKYQIKSKRLTKGETMEFRFNH

SEQ ID NO: 185784 - protein, 106 aa, Glycine max
  unsure (1)..(106): unsure at all Xaa locations
  Clone ID: PAT_MRT3847_138777C.1.pep
VLRENYGWPVPDNVAKVKAPHHPVHFRGVFXGYHSGGYADLVSSPXAPPFEPVPDVVESFLGQVAQRQKEGPLKARAQIVDQPLQPQGLDFSLGFKAGSCSAGWDF

SEQ ID NO: 185785 - protein, 74 aa, Glycine max
  Clone ID: PAT_MRT3847_138778C.1.pep
FYHASSPLVTALNEGRDVIMDGTLSWEPFVEQTIAIARNVHKHRYRMGVWYKVPEHGTVTENYWEQVHDAEDHQ

SEQ ID NO: 185786 - protein, 241 aa, Glycine max
  unsure (1)..(241): unsure at all Xaa locations
  Clone ID: PAT_MRT3847_138779C.1.pep
MMHGSLRNANKSRKASSRERKLALQQDVDTLKKKLRHEENIHRALERAFNRPLGALPRLXLMLKTXIPALLAEVAVLEEEIVRLEEQVVHFRQDLYQEAVYMSSSMRKLENSVSAPPNKSNPTMDSPKLDKLKSLTQTTGNSTATSATKPTTTLPDDNRQGKENQSCTNSSKSRKQSFNQTNKTPIKKINNQSLQKKLDHPKRKKEPKVKNQQVADVRNHSPHKNSPEAQSPNIISENILK

SEQ ID NO: 185787 - protein, 43 aa, Glycine max
  unsure (1)..(43): unsure at all Xaa locations
  Clone ID: PAT_MRT3847_13877C.1.pep
KRFSHLPGQAWRATRYVTGPPRTGTVSTXSALASLYSWSVLSX

SEQ ID NO: 185788 - protein, 51 aa, Glycine max
  Clone ID: PAT_MRT3847_138780C.1.pep
CATLMSAHVSWALYSKSDTHKGQRKHPVHPSQITRCTLNIETRPLRCSARP

SEQ ID NO: 185789 - protein, 389 aa, Glycine max
  Clone ID: PAT_MRT3847_138781C.1.pep
MEIHSEEENGVANESQALEQKEKRKGKHDKPKPWDDDPNIDHWKIEKFDPSWNDGGMLEVSSFSTLFPQYREKYLQEAWPMVKSALKEFGVACELNLVEGSMTVSTTRKTRDPYIIIKARDLIKLLSRSLPAPQAIKILDDEMQCDIIKISGMVRNKERFVKRRQHLVGPNSSTLKALEILTGCYILVQGNTVAAMGSFKGLKQVRRIVEECMLNKMHPVYNIKVLMMKKELEKDPALAQENWDRFLPKFKKKNVKQKKVNTKQKKPYTPFPPPQQPSKIDIQLETGEYFLSNKRKSAKIWQEKQEKQAEKTAENKRKREEAFIPPKEPANLVDKSEDANSNVADMAMSLKKKTKKFGKRKSEENINAETYIIGSSEQASGKKSKKQRS

SEQ ID NO: 185790 - protein, 115 aa, Glycine max
  Clone ID: PAT_MRT3847_138782C.1.pep
VSEVSKMTLSCIKCTGSIFIAFGNLADETINMEAFPHKLLHFGEMHDKVGLKIVHKEFLTGWATQGRPAPTLMAEGSPYLPATVHDHSVSTIPCDFVICGKLTTINIMSAYGRNP

SEQ ID NO: 185791 - protein, 71 aa, Glycine max
  Clone ID: PAT_MRT3847_138783C.1.pep
GPRANAPNHAPVFTDNGQCILNDAPSWIATQGLDILGIAANPEVWISAAIVGVSYISGIVIPIGHRSITVW

SEQ ID NO: 185792 - protein, 72 aa, Glycine max
  Clone ID: PAT_MRT3847_138784C.1.pep
FSFLLSSSFFLFFSFGGGFYNYNLIKERTLQRRGGLIWGGKKKKKTQKTEPWVKNDGYNYHKFLAKKKGEPT

SEQ ID NO: 185793 - protein, 66 aa, Glycine max
  Clone ID: PAT_MRT3847_138785C.1.pep
FYKTTESYFYFKTTDQYYCENTSEIVRLQHYHQCVHLPYDYIQLHIPQHYNTLHSMKHFNKYLTTH

SEQ ID NO: 185794 - protein, 129 aa, Glycine max
  unsure (1)..(129): unsure at all Xaa locations
  Clone ID: PAT_MRT3847_138786C.1.pep
AIFPFCDTSLCYEDRADDLESRLTLQEATQRVLNPSAXLSRLAGPAYXWWEEALYGVSNSGPVSRFDKKVRCALSCAAVLLSAAGRCACSGHNMGQVVPAGAGSLSIVDFAGLTFWSPSVIVLPDPMWG

SEQ ID NO: 185795 - protein, 45 aa, Glycine max
  Clone ID: PAT_MRT3847_138787C.1.pep
RIRALHSQTEGSIHLTNPLSLSNSQLLLLLLLTRCYIKKKNHHLL

SEQ ID NO: 185796 - protein, 76 aa, Glycine max
  unsure (1)..(76): unsure at all Xaa locations
  Clone ID: PAT_MRT3847_138788C.1.pep
XXXSTRTXARNXXRXTLXYTTQYXHXXXXGFHPPLLXSXXRFXXXXXSXXPXQSPXQNQXTXLXYPXKMMVPHSXR

SEQ ID NO: 185797 - protein, 47 aa, Glycine max
  Clone ID: PAT_MRT3847_138789C.1.pep
FHSLLSIIYDYYIPINMLNIPFFLTNNFMLLTTFHLSQTCTHLNLHQ

SEQ ID NO: 185798 - protein, 96 aa, Glycine max
  Clone ID: PAT_MRT3847_13878C.1.pep
LSCHVHDHVSKALLVHTIEVCALIFSLSRPLYGFRLSFVYDPLISQRNEITIVRANLVVNMRLTSVRIGVFATALPGVCQHGDHPKEIPPFCDLQH

SEQ ID NO: 185799 - protein, 187 aa, Glycine max
  Clone ID: PAT_MRT3847_138790C.1.pep
MERGAYRGRGRNGNGGRNSYGGGRGSYGGGRDGNGDHNSYGGGRGGRSSYGDRSSPSQSQWQPRSNPSFSSPKPNNSHSQVQTQTQAHPDIGSSKIPEKKMDTITPVRRPDNGGTVAVRKCYLRVNHFPVSFNPQSIIMHYNVEVKAKAPPLKNNRPPKKISKYDLSLIRDKLFSDNSLAASAYDGE

SEQ ID NO: 185800 - protein, 268 aa, Glycine max
  Clone ID: PAT_MRT3847_138791C.1.pep
MVCTVVASVCLSLRRTCILAIMQRTFFSAAIHLLPQVWCCNLLLGWGLGNLEMLLGVDLFVERSNLYASLPFRAGLVFSEYLLSGQAPPVKEVNDERPLFPAVPILNATFASKAQSFALSSEAKDAAAEIEHRLQLGSKLSEIVNSKEDVLALFGLYKNEGYILSEHMGKYSVVLKEKCSQLDMLKALFQVNYLYWLEKNAGIEGRGTLNDSKPGGRLHISLDYVEREFNHVKNDGELVGWVTDGLIARPLPNRICIGDTAPSNSVSS

SEQ ID NO: 185801 - protein, 104 aa, Glycine max
  unsure (1)..(104): unsure at all Xaa locations
  Clone ID: PAT_MRT3847_138792C.1.pep
SLVSPFCGGVYTFSVLLRAFLLSPRRGRPLVGCXSPWWPLCLGSPFVLCRRWLCACLVGVCRRVAAWVSLAFCPAGFXCRRVCAFLLSSPSGANTRXRRCCSSA

SEQ ID NO: 185802 - protein, 191 aa, Glycine max
  unsure (1)..(191): unsure at all Xaa locations
  Clone ID: PAT_MRT3847_138793C.1.pep
SCRQVDHGRPSPLVRVIRRGLRREVHDASHGEXNWPMXVKTPVERLLQQMREAGLPHTAAEEHVTDSEKQSLLTHLKSSHKAKVEEPRKITLQRKTTSTLRVAGSKSISVEVRKKKVFVQRSPEEIEAEHKHELEERRAVENAARQKAEEEAKRRAEEEARRQPAAAPGNAAVVEAVAQAPVVAAEPVREV

SEQ ID NO: 185803 - protein, 109 aa, Glycine max
  unsure (1)..(109): unsure at all Xaa locations
  Clone ID: PAT_MRT3847_138794C.1.pep
LAFAHAYAHAYDWKKGCLMDKIVMSGNAAXKRSDWASLEQVFLTNSNSSEHFDSCKGTKYXPHSWELNFPHXVCGPNYGYEMWRSARANQTXWNVRYLIDNTKQFTVVD

SEQ ID NO: 185804 - protein, 118 aa, Glycine max
  Clone ID: PAT_MRT3847_138795C.1.pep
MPQRMAVTHADLEPSRSKTDLSSKTGAFLMVLTILIGLFCFILCLIAEATRSEVTWMDTGGKENGAKSECVYSGSGKVPLLCAASAFVGLAFAMVMEHAYMLIAVSKSSPSLLTWDPD

SEQ ID NO: 185805 - protein, 138 aa, Glycine max
  Clone ID: PAT_MRT3847_138796C.1.pep
KGREKKKTKRTQKKTNKKTQKKTTHKKKQKKKEKKKKTKKKGEKAKKPQKTNGPPAPPDGKNDPGRAREKGNLKGPALRGTRGAPEQGGGPGAKKGGCNAAFKGGGVPSPPPGGKGEDTSFSTKGGGRAPTGRTGPLP

SEQ ID NO: 185806 - protein, 51 aa, Glycine max
  Clone ID: PAT_MRT3847_138797C.1.pep
TKSRKGVPSGERAFNDYSDGAPALLCYIALLAMINFFRSLIFNYTHIILFP

SEQ ID NO: 185807 - protein, 83 aa, Glycine max
  unsure (1)..(83): unsure at all Xaa locations
  Clone ID: PAT_MRT3847_138798C.1.pep
KSPCPIIPKLLGITPPLMGDSAKAMVYTTVSEXFDGHPASIPYLSMRTNTMDRTILCRDTKNPVSAQPETPLPVNKFSPTSAK

SEQ ID NO: 185808 - protein, 81 aa, Glycine max
  Clone ID: PAT_MRT3847_138799C.1.pep
IKGPFQELREVSFAVDRLRLNRPMVCPLFRAAFPMSFSYLCPGRTNYFLSLRAYWQTAVYLPRHWLVVKIFDGMVLQLSHN

SEQ ID NO: 185809 - protein, 77 aa, Glycine max
  Clone ID: PAT_MRT3847_13879C.1.pep
PWFYKPGARPHWAGFTFKGGFNPFAPFLRGRGFRPKKGFPVSGGGLIFKRLETGQTPPLKKGIFPFLSKNYSNIFHL

SEQ ID NO: 185810 - protein, 58 aa, Glycine max
  Clone ID: PAT_MRT3847_1387C.1.pep
SQGFSFRADVKPPPDSDGDRQLQQGFNHAHVAGLNLQKSAGPWFPAMFSGQCVGLLVS

SEQ ID NO: 185811 - protein, 143 aa, Glycine max
  Clone ID: PAT_MRT3847_138800C.1.pep
KAEVQIDARRFKRFAEEKMTHDQEELLSLEDLLYKREQIIQSLTCEVQAYKHRLMSFGLGGDEAEGDQYELPTYEYPPLKCNVMHDAMDADNDDTDIEKYVVDETPSDRVWNLENRIGKMGKTWTDSLMDGGGTGKNVFEKVF

SEQ ID NO: 185812 - protein, 34 aa, Glycine max
  Clone ID: PAT_MRT3847_138801C.1.pep
PSFLLMDDSIILMLRINQCTSTFGLRNVFRLTKS

SEQ ID NO: 185813 - protein, 159 aa, Glycine max
  Clone ID: PAT_MRT3847_138802C.1.pep
KLLTQILVSGNHDSWFLLHQDLQGSQLLQLSASLHSQRKGEVNFWEAECVKIDYSNKKVFCRSNIDNLVGSNEFSLDYDFLVVAVGAQVNTFNTPGVKENCHFLKDVEDAQKIRLSVIDCFEKAVLPSLSDDERRSNLHFVVVGGGPTGVEFAAELHDY

SEQ ID NO: 185814 - protein, 334 aa, Glycine max
  unsure (1)..(334): unsure at all Xaa locations
  Clone ID: PAT_MRT3847_138803C.1.pep
MTVGSFFIRTSRVLNSSNFLLLCTLSGGGVVAYSESQSGAERPSIEANEPAKKKVVVLGTGWAATSFLKDLDASLYDVQVVSPRNYFAFTPLLPSVTCGTVEARSIVEPVRNIIKKRKGEVNFWEAECVKIDYSNKKVFCRSNIDNLVGSNEFSLDYDFLVVAVGAQVNTFNTPGVKENCHFLKDVEDAQKIRLSVIDCFEKAVLPSLSDDERRSNLHFVVVGGGPTGVEFAAELHDYVQEDLIKLYPTVKDKVKITLIQSGDHILNMFDERISSFAEQKFTRDGVEVQTGCRVVAVNDKDITVKVKSTGDVCSVPHGLIVWSTGISTLXVIRD

SEQ ID NO: 185815 - protein, 47 aa, Glycine max
  unsure (1)..(47): unsure at all Xaa locations
  Clone ID: PAT_MRT3847_138804C.1.pep
HYFSSDSFPPTFVXTXXTFTIXLNNVFXLFLXQLXKPMLTSXPXXLP

SEQ ID NO: 185816 - protein, 57 aa, Glycine max
  Clone ID: PAT_MRT3847_138805C.1.pep
SYLFTLPAVQYGIADNRQAQDPTLMGRAGLRCLIVNDSQKGCWCIQMGLRQFHPSTG

SEQ ID NO: 185817 - protein, 96 aa, Glycine max
  Clone ID: PAT_MRT3847_138806C.1.pep
SRAESARAFSRRSCMNKTPSSAKKPSNNGVIRSVRFYPVSVILGEDSEPQSNSHSHNKKCNNIYESESNLTVRKITRSSSIKELKKNTVRGKENAT

SEQ ID NO: 185818 - protein, 98 aa, Glycine max
  unsure (1)..(98): unsure at all Xaa locations
  Clone ID: PAT_MRT3847_138807C.1.pep
LGPKKTTLFKGGKIHPPCPVKLNQKRNPPPGGGKNSFPPQTGKGYPPLXPPQNGGGSNFPPKQNPIVCRIKRGKTMGGRNRGGKFFSPPNDPPNAPNQ

SEQ ID NO: 185819 - protein, 79 aa, Glycine max
  Clone ID: PAT_MRT3847_138808C.1.pep
GRSCSGYSCICSSSGYISLPTPWTVAVSLCDSSVLPYAEPYVSPVPYVLSVLLRLHVVLVARSAVGADFPAGPDYPCGP

SEQ ID NO: 185820 - protein, 102 aa, Glycine max
  Clone ID: PAT_MRT3847_138809C.1.pep
PTRPPTRPGLSALPDQRRSDGMLLTPCGTPAYVAPEVLKKKGYDGSKADIWSCGVILFALLSGYLPFQGENVMRIYSKSFRADYAFPEWISPGAKNLISNLL

SEQ ID NO: 185821 - protein, 71 aa, Glycine max
  Clone ID: PAT_MRT3847_13880C.1.pep
GARNIRPPLNSKKGPLNLKVSRPFKNPGPIKGPSYFFSHLKKQDGFSLVFFPKTGGDFFFRETNLGPSSGR

SEQ ID NO: 185822 - protein, 68 aa, Glycine max
  unsure (1)..(68): unsure at all Xaa locations
  Clone ID: PAT_MRT3847_138810C.1.pep
RLRLLRPHALSASSLTVTRRSDNVDASHAXASRRNLLQAKNTCPVHFEILNYIVSTSXCKGAQYPPKQ

SEQ ID NO: 185823 - protein, 73 aa, Glycine max
  Clone ID: PAT_MRT3847_138811C.1.pep
ILHLDILQPLLAMPLPQPVPLSYHFLLLPLQPRALADVYKVMSYPNPLITNLDVTFGPPPPPKQAALLHMYHA

SEQ ID NO: 185824 - protein, 72 aa, Glycine max
  Clone ID: PAT_MRT3847_138812C.1.pep
FTYLFIVHTYLFILDTYSLNIALPSNTSSLRVQYSVLIVLYYLRDPVHLPGLTKFLALLLGNFFLFGNLVHS

SEQ ID NO: 185825 - protein, 76 aa, Glycine max
  unsure (1)..(76): unsure at all Xaa locations
  Clone ID: PAT_MRT3847_138813C.1.pep
VTGHTHQFKAYKHEGGVVINPGSATETYSSITYDVNPSFVLMDIDGXRVVVYVYELIDGEVQVDKIDFKKTATMHG

SEQ ID NO: 185826 - protein, 57 aa, Glycine max
  Clone ID: PAT_MRT3847_138814C.1.pep
GEFLQIMEQDLDASVKESSPLQQGFIFRLRVQQHVDLKFLFFSLAFNVFYRRLCPSM

SEQ ID NO: 185827 - protein, 62 aa, Glycine max
  Clone ID: PAT_MRT3847_138815C.1.pep
LKTDPYLNAKLSDIIIGTSAAPTVLPPYNFTNDDVEFNLIDGAATADNPAMVRASKVMPHEE

SEQ ID NO: 185828 - protein, 144 aa, Glycine max
  unsure (1)..(144): unsure at all Xaa locations
  Clone ID: PAT_MRT3847_138816C.1.pep
AYAACADVGLTSGDTATTLLESGLQKDSGLIEDCFVRKCYDVHSANEXQEKDLLAGNFSFDIKSGSRLEKVSSTKAHFVSGKTFKYDIXGDCVHMNSEDDLCXDDQDRPMTIDARLRQRIDPECNEVHAEMETNLFKLIIDDDE

SEQ ID NO: 185829 - protein, 179 aa, Glycine max
  unsure (1)..(179): unsure at all Xaa locations
  Clone ID: PAT_MRT3847_138817C.1.pep
NKRKLIESGDLKDKAPCKTLKPVREASRSYLDLNMPLEEVEEGNNXRLELEPQYESDAWLNDLCDQVDEKVVFKPFNFDSIAEQVIKSIDTQFQKMLGSEFILEIEYEVMTQILAAAWLSDKKKSLEDWVEHVLGRSFGEAHQKYHFAPEFVMKLVNCERFFLEEQSPGVCLPARINLN

SEQ ID NO: 185830 - protein, 88 aa, Glycine max
  unsure (1)..(88): unsure at all Xaa locations
  Clone ID: PAT_MRT3847_138818C.1.pep
HGRTYLHATTIHPLSINAFGDADCASDIDDRRPTSGTRIFCAPNLVSXWSKKQTLVAKFSAEAEYRSLAHAGSEVLWLQSLLHELKVP

SEQ ID NO: 185831 - protein, 127 aa, Glycine max
  Clone ID: PAT_MRT3847_138819C.1.pep
GVGPHFHCFKPKIEPNWKDPICANGGKWPMPFQGGRSHSRWLYTMLAMIEQQFDLADEISDLVVNVKSRQDKIAICAKGASNTLAQVSIGTQCTEFLHPNGPFGFIVHEDQKKPPRGAQNKYVVSSV

SEQ ID NO: 185832 - protein, 108 aa, Glycine max
  unsure (1)..(108): unsure at all Xaa locations
  Clone ID: PAT_MRT3847_13881C.1.pep
MPKTEKNGYRGATAGPPQLVQVFSSQHQQQFVPYSQIPHPFQARGPNFGGPANYGFDYGGPGHGQKXYFQPMGPPMPSPPPPIIMQEGLVQHPSDRVKQQQIKTSPPF

SEQ ID NO: 185833 - protein, 89 aa, Glycine max
  unsure (1)..(89): unsure at all Xaa locations
  Clone ID: PAT_MRT3847_138820C.1.pep
SPTVARLIKSQREIRLFPPSTPQEPXENGFPPQTPRIIPPSGEGSTVPMWHKTTTPDPKRAPMRGIRGAPAPPPRFGEVGSFGRVVPPG

SEQ ID NO: 185834 - protein, 274 aa, Glycine max
  unsure (1)..(274): unsure at all Xaa locations
  Clone ID: PAT_MRT3847_138821C.1.pep
MLSSKPPRRKVVPANGDDSADKLDQLLLSSAISNNEDLGPFIRKAFTSGKPETLHHHLRHFARSKESEIEEVCKAHYQDFILAVDDLRSLLSDVDSLKSLXSLSTSNSRLQHVARPLLSSLDAFVETRNVSKNVNLAIDSVRTCVKLMEVCTRANRHLADDNFYMALMCLDPIEREFLYQTASSTLMRMLEKKIPEILSYIERKVNNEFGDWLVEIRVWSRYLGQLAIGQAXAARLTEEDLRIKQRRADEQSMLTVRDCIYSLDEDDEDSIIGG

SEQ ID NO: 185835 - protein, 98 aa, Glycine max
  Clone ID: PAT_MRT3847_138822C.1.pep
LFFCVCFTSVRDPASVATAAESDTKHHETMEGSYSQTMQIDPHRARFPCTVVWSPHPVITWIIPCIGHIGISIHDGVILAFARPNFVCVDKFAFGAAN

SEQ ID NO: 185836 - protein, 165 aa, Glycine max
  unsure (1)..(165): unsure at all Xaa locations
  Clone ID: PAT_MRT3847_138823C.1.pep
LCNGPPLASFSVTERYVDDTDLLYLTGYDHTXVSNIPXYEKHGCGVEDFXETLYDEWANKGDEPVLAETVNYYNKRATLVFKXMAFSERRHLDRKGGTEADLKKVGLHTWEQLSVKDPHLNTPTALSYLXAMTENLLREGYRIVGIIGTPTERSACRPQRRKQDL

SEQ ID NO: 185837 - protein, 689 aa, Glycine max
  unsure (1)..(689): unsure at all Xaa locations
  Clone ID: PAT_MRT3847_138824C.1.pep
IRLEGNLSNLDTLDLSSNNMLPPSKLHGDWTRLNKLKVFFMFQSNLVGEIPQTIGNMVALERLDLSQNNLSGPIPSGLFMLENLSIMFLSRNNLSGEIPDVVEALNLTIIDLTRNVISGKIPDGFGKLQKLTGLALSMNNLQGEIPASIGLLPSLVDFKVFFNNLSGILPPDFGRYSKLETFLVANNSFRGNLPENLCYNGHLLNISAYINYLSGELPQSLGNCSSLMELKIYSNEFSGSIPSGLWTLSLSNFMVSYNKFTGELPERLSPSISRLEISHNRFFGRIPTDVSSWTNVVVFIASENNLNGSVPKGLTSLPKLTTLLLDHNQLTGPLPSDIISWQSLVTLNVSDKKLAGPSTAXYGLFPVIGVLDLSXNLCSGEVPSKLPRITNLNLSSNYLTGRVPSQFENLAYNTSFLDNSGLCADTPALNLRLCNSSPQRQSKDSSLSLALIISLVAVACFLALLTSLLIIRFNRKRKHGLVNSWKLISFERLSFTESNIVSSLTENNIIGSGGYGAVYRVAVDGLGYIAVKKIWENKKLDKNLESSFHTEVKILSNIRHRNIVKLMCCISNEDSMLLVYEYVENRSLDRWLHRKNKSSAVSGSVHHVVLDWPKRLHIAIGAAQGLSYMHHDCSPPIVHRDVKTSNILLDSQFNAKVADFGLARMLMKPGELATMSSVIGSFGYIAPGE

SEQ ID NO: 185838 - protein, 98 aa, Glycine max
  Clone ID: PAT_MRT3847_138825C.1.pep
WHQMADHLVIRYYSANRDPDSGRDLGQPTWLGWSTNLVVGLGLIRAANGTQSTHMCPLVLGRNKACSYVSCWRISQPSNPMLINVGNKTRQANVTRHT

SEQ ID NO: 185839 - protein, 48 aa, Glycine max
  unsure (1)..(48): unsure at all Xaa locations
  Clone ID: PAT_MRT3847_138826C.1.pep
QLXXFSEYSEXSVXPIXIRHLDLSFVRFTTNSSLRNLALHVLYSLATS

SEQ ID NO: 185840 - protein, 60 aa, Glycine max
  Clone ID: PAT_MRT3847_138827C.1.pep
FPFFLIKTKQIPLFFLSACGVTHLLLKLRTFHATHIFLSIPTLSILTSIRNNTHRYLQII

SEQ ID NO: 185841 - protein, 83 aa, Glycine max
  Clone ID: PAT_MRT3847_138828C.1.pep
TIYSHLSTTCQVSIEAAIDSLISQLNNAGPYNQENAPGFAHDVSHGTQSLASVLINMLYRIGHLYTRGHNHCRIFRACLTKSI

SEQ ID NO: 185842 - protein, 76 aa, Glycine max
  Clone ID: PAT_MRT3847_138829C.1.pep
SSPNDPSILWTGTPGSLGSPGIRWLPGARLVTANVYMVLYNSPIKGAGVSYSYPKSEKETRDHTSHSESIHVCVRL

SEQ ID NO: 185843 - protein, 217 aa, Glycine max
  Clone ID: PAT_MRT3847_13882C.1.pep
PPSTAARRRQKGSFKKATGQKPLRIIFYRDGVSEGQFYQVLLYELDAIRRACASLEPSYQPPVTFVVVQKRHHARLFANNHDDRNSTDKSGNILPGTVVDSKICHPSEFDFYLCSHAGIQGTSRPAHYHVLWDENNFTADEIQSLTNNLCYTYARCTRSVSVVPPAYYAHLAAYRARFYMEPNVHEIAKSRGARSKDESVRPLPALKEKVKNVMFYC

SEQ ID NO: 185844 - protein, 83 aa, Glycine max
  Clone ID: PAT_MRT3847_138830C.1.pep
CFRAVTVVLFFFSNKMVIVDSDYEGAAIEALGSLFKVTQVFLWDDGLQVSSSAERWILDEADDNHGSDPVPDLIDLITPEDLE

SEQ ID NO: 185845 - protein, 74 aa, Glycine max
  Clone ID: PAT_MRT3847_138831C.1.pep
NKKLLAPLLYRIIQLKHSHKLHISPLHFLYSILSFRPSFSVTETFLLSSNSSFSSTNTSLFFLLTNPFFSFFLF

SEQ ID NO: 185846 - protein, 66 aa, Glycine max
  Clone ID: PAT_MRT3847_138832C.1.pep
FILSHLPYFNSITVVSSSTTIMGFIYYGGAYQSSIHITFQIKYYNILTNLIIPSSPTFIFFNSLKT

SEQ ID NO: 185847 - protein, 221 aa, Glycine max
  unsure (1)..(221): unsure at all Xaa locations
  Clone ID: PAT_MRT3847_138833C.1.pep
MSPSSLHALLIILFLGSAHALKVPFRVNDVLPVLPHGISWPLLNNLHSAVDLLPSFVAAVPPDNDSVQWRAACFYDNQASLEFTAPGHDDADGLGGAVLRLKTEAAHSWTCMDLYVFATPYRITWDYYFSAREHTLKFDSWEDPAELEYVKRHGVSVFLMPSGMLGTLLSLVDVLPLFSNTAWGQNANLDFLXKHMXATFEKRIQPWRATVDPADVHSGDF

SEQ ID NO: 185848 - protein, 166 aa, Glycine max
  Clone ID: PAT_MRT3847_138834C.1.pep
MARSSLHALSTILFLLRLLLSPSTHALKLPFRVNDVLPVLPHGISWPLLNNLHSAVDLLPSFVGAVTPDNGSLQWKGACFYDNQASLEFTAPGGAVLHLKTEAAHSWTCMDLYVFATPYRITWDYYFSAREHTLQFDSWEEPAELEYVKLHGGSVFLMPSGMLGTL

SEQ ID NO: 185849 - protein, 88 aa, Glycine max
  unsure (1)..(88): unsure at all Xaa locations
  Clone ID: PAT_MRT3847_138835C.1.pep
PEPMTYQIHRLRDGKSCVSRKVDRIQEGSGIFTLMALFQNEESRLVHQQVCIPTDRATDXLMAMVELLERRSTDPGLPVTYRSRAPTA

SEQ ID NO: 185850 - protein, 59 aa, Glycine max
  Clone ID: PAT_MRT3847_138836C.1.pep
PKDGGGFFKRIFLLFPTREERVSMAGTNMQDKSWGATGKKRFMILPEGKGAFWKHWNTT

SEQ ID NO: 185851 - protein, 80 aa, Glycine max
  Clone ID: PAT_MRT3847_138837C.1.pep
MESVTTRLSPKVVGGANSQHGMEWCRHFQMPLHYPRYTQADYEAMPEWRLDCLLKEYGLPIFGDVENKRNFAMGAFLWIK

SEQ ID NO: 185852 - protein, 73 aa, Glycine max
  Clone ID: PAT_MRT3847_138838C.1.pep
VCQPHPWGRKVGLHMFFERKSGGIVNPQGKMKGLAIPGPLGKKGDDLGPRIARAPKEKGGVGILLKLLLRLSL

SEQ ID NO: 185853 - protein, 105 aa, Glycine max
  Clone ID: PAT_MRT3847_138839C.1.pep
HYFIPTWLRVVQLCSINHQCSCQLLVFFLVANQSFSMLRLMQHIQSLPTRAIFLALSRPPIKKVRARRNKSRHKGNCIGLVSVMLELRSVELVNSCTVLKRDFNQ

SEQ ID NO: 185854 - protein, 289 aa, Glycine max
  Clone ID: PAT_MRT3847_13883C.1.pep
LSAATYFWPGSEVPKGPWTCPKAFCQPYNESVPFQDRVDTVLSYFDLPSHQVPSFITLYFEDPDHQGHQVGPDDSQITQAVAEIDAIVGRLIQGLEQRGVFQDVHLIMVGDHGMVGTCDKKLVFLDDLAPWIQIPRDWVQYFTPILSIRPPPSVDPAHVVAKMNEGLNSGKVENGAKLKVYLKEDLPERLHYSDSDRIPPIIGLADEGFKVEQNRTGKKECGGAHGYDNAFFSMRTIFIGHGPRFARGKKIPSFENVQIYNLVTSILDIKGAPNNGSDSFPDSVLLPPA

SEQ ID NO: 185855 - protein, 84 aa, Glycine max
  Clone ID: PAT_MRT3847_138840C.1.pep
LTLWDFSTMRVLNIILVLFVLLTIVHVKQNMAARVLNMENIPLRLQSLNKGPVPPSGPSGCTYIPGSGSTHCPAKKMNGTGRQR

SEQ ID NO: 185856 - protein, 51 aa, Glycine max
  unsure (1)..(51): unsure at all Xaa locations
  Clone ID: PAT_MRT3847_138841C.1.pep
MSSCGCGSSCNCGSNCGCNKXSFFFFFXEKTTTETXILCVGPAKAXGEGGE

SEQ ID NO: 185857 - protein, 77 aa, Glycine max
  Clone ID: PAT_MRT3847_138842C.1.pep
VCRLSFCGSKSHSQPSFLRLLAFRVTRTLPERRNKVLLCSLFSRLPPSRLSLFGCHLLAWCVAACSSRFSSNRWHTL

SEQ ID NO: 185858 - protein, 216 aa, Glycine max
  Clone ID: PAT_MRT3847_138843C.1.pep
MSMDMKMNMLFFLVLFASAISSSLAKGSLQQTLLPSEEFNDGSNASSARHLLEDESQAQTSVDLAQGFMSNDELEWAIQEFGQRCSNISRVYRDSWNVSIGKSVNGFPLWVIEISDKPGEEETEPAFKYIGNVHGDEPVGRELLIFLANYICDNHLKDHLAFGSRENVHLHLLPSMNPDGFSLKKRGNANNIDLNRDFPDQVYIYIYFNSNLYKVC

SEQ ID NO: 185859 - protein, 209 aa, Glycine max
  Clone ID: PAT_MRT3847_138844C.1.pep
MEMEASPSPSPSPKQVVARKLWNIVRIVFLMLRKGISKSKLAADFNLNLSFKRGKLAATKAIANTILHRSQNDDAVYPRDYEFSCSNSPALFHVIKRSTNKHRHHHHRCTTTTKFPHHDDVSTVQKVLEILNNNKVEASPLPGFGKSPIGRKLIRITDSPFPLKDEEGGDDNQVDVAAEEFIKRFYKDLNLQQKMAAIDSPYHYNLWDR

SEQ ID NO: 185860 - protein, 52 aa, Glycine max
  Clone ID: PAT_MRT3847_138845C.1.pep
YTLISHHHGQSSCVPMLSAYQWLLHRFQFQRVFAVRRVTGSKYSMPSNRITV

SEQ ID NO: 185861 - protein, 65 aa, Glycine max
  unsure (1)..(65): unsure at all Xaa locations
  Clone ID: PAT_MRT3847_138846C.1.pep
ATPGRFIYHLQQCNTSLSRNSFDDLNDAYXMLYMTFEPHIRDVMKNLSKKHQTLTFTATMPWSIE

SEQ ID NO: 185862 - protein, 80 aa, Glycine max
  unsure (1)..(80): unsure at all Xaa locations
  Clone ID: PAT_MRT3847_138847C.1.pep
MDDEVVQRVFHEGGRDYFQQPPWTSCLSSSSILQSLPLHGSGDHGYYSLDKSIPERRXTKDGLVTDGIDGPCGSGNTRLT

SEQ ID NO: 185863 - protein, 102 aa, Glycine max
  Clone ID: PAT_MRT3847_138848C.1.pep
QLIFPTRRTYNVAPIQALSGHVRRQLRRATRRLRLLRLTPSTTAHQSSTVYISQKLTWSMTPTTGATPVSELHHVHITTTMTALLTEAAAPITTHVTTTHGE

SEQ ID NO: 185864 - protein, 73 aa, Glycine max
  unsure (1)..(73): unsure at all Xaa locations
  Clone ID: PAT_MRT3847_138849C.1.pep
RAXSALXXLIXXDHRLSHLKXGXXSNRLXDFKXLSXSSYXCVYDFXXXXKITSLCGPQTSXXHXXCXHXIXXL

SEQ ID NO: 185865 - protein, 459 aa, Glycine max
  Clone ID: PAT_MRT3847_13884C.1.pep
SKCKWIYASIAGLGSMLSSSITSSTSISLMSTMATSLLSVKTFSLSELEKATDKFSSKRVLGEGGFGRVYSGTLEDGAEIAVKMLTRDNHQNGDREFIAEVEMLSRLHHRNLVKLIGICIEGRRRCLVYELVRNGSVESHLHGDDKIKGMLDWEARMKIALGAARGLAYLHEDSNPRVIHRDFKASNVLLEDDFTPKVSDFGLAREATEGSNHISTRVMGTFGYVAPEYAMTGHLLVKSDVYSYGVVLLELLTGRKPVDMSQPQGQENLVTWARPMLTSREGVEQLVDPSLAGSYNFDDMAKVAAIASMCVHSEVTQRPFMGEVVQALKLIYNDTDETCGDYCSQKDSSAQESDFRGDLAPSDSSWWNAGGLTPRITYGQASSFITMEYSSGPLEEMENRPFSTSSLIGDEISLPIRHGNRSGPLRTVRNKLSLYRFTGSRSEHGGPSSKPNWNDGYWV

SEQ ID NO: 185866 - protein, 43 aa, Glycine max
  Clone ID: PAT_MRT3847_138850C.1.pep
YFLASIPSELESNGSVQDSSELGLATFIGVFLRTIHYIPSFEN

SEQ ID NO: 185867 - protein, 85 aa, Glycine max
  Clone ID: PAT_MRT3847_138851C.1.pep
GGPTRAHGSEGASATSPPPPPPVASLEHGEGAHHVGARPVEVGYIRTSSRVASWFSLRPIVGRVEGIGGWCSLVFMIQAWLFCWL

SEQ ID NO: 185868 - protein, 54 aa, Glycine max
  Clone ID: PAT_MRT3847_138852C.1.pep
QLQSIACIDPWLDTFILYFWGIVFVLASLARADAQRAFFVFGESPGDHGNNNFL

SEQ ID NO: 185869 - protein, 127 aa, Glycine max
  unsure (1)..(127): unsure at all Xaa locations
  Clone ID: PAT_MRT3847_138853C.1.pep
QTYSAFIVDVWVTQRMIGAGMNPLREMGVQVISPDRDSSSVILRXHKTPTPITXACRWSSAQGKYDVMLEVLITPGYCTVIKPXIMTRDHTEYMLNGFDDNLTMQTAADGVRTIRLEGSRKIIIQII

SEQ ID NO: 185870 - protein, 82 aa, Glycine max
  unsure (1)..(82): unsure at all Xaa locations
  Clone ID: PAT_MRT3847_138854C.1.pep
FVRFIKRLNKNLTPKPDAELQELSKKHVXGAAEYLLFKIKNFQLFVCESMGDYACSVYAXSKDGXVDPTFLYLAYALKQVQW

SEQ ID NO: 185871 - protein, 43 aa, Glycine max
  Clone ID: PAT_MRT3847_138855C.1.pep
TLNKRVFYVLIIAIGVNCFIEISACFNPCTKVATFFLFFCFSC

SEQ ID NO: 185872 - protein, 92 aa, Glycine max
  Clone ID: PAT_MRT3847_138856C.1.pep
KMQLELDPIRLENYSKLILTHSSDPSVSNQISSLDQSSSCPQRFINAPIFLCRTIYNSIFHVNLIVLALLEKLWRSWNLGSKKTSVMGCGHY

SEQ ID NO: 185873 - protein, 103 aa, Glycine max
  unsure (1)..(103): unsure at all Xaa locations
  Clone ID: PAT_MRT3847_138857C.1.pep
RRXHAYXSXEFGSRLKXQXXQRXXXTKXWXXXRXQGQXXRXXXXXXKXSXXXXXNXXHXRXXXEXXINPXLXXXXXRXXXIGXXXRQFWRXXKXXSSVSKXRX

SEQ ID NO: 185874 - protein, 89 aa, Glycine max
  Clone ID: PAT_MRT3847_138858C.1.pep
GLIYRAMGFPPEYFTVLFAIPRMAGYLAHWRESLDDPDTKILRPQQVYVGEWFRHYTQVNVRTTSSDADKLGEVAISNASKRRLAGSGV

SEQ ID NO: 185875 - protein, 132 aa, Glycine max
  Clone ID: PAT_MRT3847_138859C.1.pep
MYKEDILHMIDIGNDYFLVYFSHKEDMMKAQIEGPWLIYDHYLVVREWMPNFHPSSEALEKVVVRVRFFGLPIECYDSKIWNAIRDRIGRTMRVDQNTLTRERGKYEKQGEVLPLVIKERITRWSKKLGSLN

SEQ ID NO: 185876 - protein, 123 aa, Glycine max
  Clone ID: PAT_MRT3847_13885C.1.pep
LNSGKVENGAKLRVYLKEDLPRRLHYSASDRIPPIIGLADEGFKVEQNRTGEKECGGAHGYDNAFFSMRTIFIGHGPRFARGKKIPSFENVEIYNLVTSILDIKGAPNNGSTSFPDSVLLPVA

SEQ ID NO: 185877 - protein, 80 aa, Glycine max
  Clone ID: PAT_MRT3847_138860C.1.pep
IHTFNVYKPTSFFVGFFLLHHPPRSARRGQTLYISGLTPAQILSNLLSQGSFTQNGDLSSKAPPPFSLIEQKGTEEESLS

SEQ ID NO: 185878 - protein, 60 aa, Glycine max
  unsure (1)..(60): unsure at all Xaa locations
  Clone ID: PAT_MRT3847_138861C.1.pep
MASYHEEEVRLLGKWASPFNNRVDLGLKLKGVPYKFSGGGLCNQDGDLLKXNPVKKRVRV

SEQ ID NO: 185879 - protein, 124 aa, Glycine max
  unsure (1)..(124): unsure at all Xaa locations
  Clone ID: PAT_MRT3847_138862C.1.pep
MAAPDVEYHXFVGGLAWATDDRSLEAAFYTYGEILECKIINDRETGRSGGDGLTTYLSEQAMRDAIDGMNGKELDGRNITVNDAHASRSRGRGGGGYRRWAEARGYGGGGYRGGGGGGGYRQWR

SEQ ID NO: 185880 - protein, 46 aa, Glycine max
  Clone ID: PAT_MRT3847_138863C.1.pep
CTVKHHSTPVQALLRSCLIFGVLVQLLMRFFFHLALILNNEGSRAS

SEQ ID NO: 185881 - protein, 128 aa, Glycine max
  unsure (1)..(128): unsure at all Xaa locations
  Clone ID: PAT_MRT3847_138864C.1.pep
MNDANVSKHIQHMAQFIRQEAXDKANEISVSAEHEFNIXENLQVVEPNWNKIMPXFQRIERQVXIRKKTEYSMQLTAPRIXKVLQAQYDVISSMTXAASKELMNESHHHHVNLLSHHHHDYRHLLKDL

SEQ ID NO: 185882 - protein, 196 aa, Glycine max
  Clone ID: PAT_MRT3847_138865C.1.pep
MENEASCRWCSCSARTLVSIFAAILLLFQPNCIAKQQHQPCPPSSCGIIGNISFPFRLKDDPSHCGDTRYQLDCVNNATLLTLFSGKYHVQDIDYKRYKIKVSDAGAVEDSNCFIPRNFLWDGNFRPTGLVGPDDFGSQPFVLDLDFTRIGYFNCANPVTGDPRYVKVDTTHTSRCATQGQGHVYALLDHRILSIV

SEQ ID NO: 185883 - protein, 47 aa, Glycine max
  Clone ID: PAT_MRT3847_138866C.1.pep
WECSPNRAVNFVQRLLLSRDLYRTSAAMEKRCGEIMYSFTWEIMGIT

SEQ ID NO: 185884 - protein, 115 aa, Glycine max
  unsure (1)..(115): unsure at all Xaa locations
  Clone ID: PAT_MRT3847_138867C.1.pep
FVAAPSVAAVGLSHGVAVVNALVLEXIVMTFGVVYTVSSTAFVPKKGVLAIFAPIAKGFTVGGSLLLGGAFSGAPLIPPVTFGPAXVSCTWSILWFYWAGPLIGGGLSGLESRLS

SEQ ID NO: 185885 - protein, 118 aa, Glycine max
  unsure (1)..(118): unsure at all Xaa locations
  Clone ID: PAT_MRT3847_138868C.1.pep
MASKSRPNLSENSNKGSIATPRVSKTSKLASKPESESPSPLQNSRLSVERSPRSVNSKPTVERKSPRPSATPPDKQPPRAAKGSELQNQLNLAQQDLKKAXEQLIQAENEKLKAVDDL

SEQ ID NO: 185886 - protein, 439 aa, Glycine max
  Clone ID: PAT_MRT3847_138869C.1.pep
MKFTPSSKFLGFSNHFHSLLAPSFSPTPKFSSSFSATMSTLSTQNDTVTHKTQQPLQIAKRLEKFQTTIFTQMSLLAIKHGAINLGQGFPNFDGPEFVKEAAIQAIRDGKNQYARGYGVPDLNIAIAERFKKDTGLVVDPEKEITVTSGCTEAIAATMIGLINPGDEVIMFAPFYDSYEATLSMAGAKVKGITLRPPDFAVPLEELKSTISKNTRAILINTPHNPTGKMFTREELNCIASLCIENDVLVFTDEVYDKLAFDMEHISMASLPGMFERTVTLNSLGKTFSLTGWKIGWAIAPPHLSWGVRQAHAFLTFATAHPFQCAAAAALRAPDSYYVELKRDYMAKRAILIEGLKAVGFKVFPSSGTYFVVVDHTPFGLENDVAFCEYLVKEVGVVAIPTSVFYLNPEEGKNLVRFTFCKDEETIRSAVERMKAKLRK

SEQ ID NO: 185887 - protein, 134 aa, Glycine max
  unsure (1)..(134): unsure at all Xaa locations
  Clone ID: PAT_MRT3847_13886C.1.pep
EYMKLHVFSIGGIFLLXWPIHSTCYQMFSFXMKTCLSKHPTAEKCTPIKLATEAHNIXPLKPFSNXCDEPTMDYINYQQFISYSKTVYLQTFFYSSEHQVHYNYIFIFDIYNTVLYNFHTLKTFFLIKEFNETL

SEQ ID NO: 185888 - protein, 167 aa, Glycine max
  unsure (1)..(167): unsure at all Xaa locations
  Clone ID: PAT_MRT3847_138870C.1.pep
LERIVKEALDVVHISKGDQENVFAMLAAVLWLGNISFTVVDNENHVQAXEDEGLLTVAKLIGCEIEDLKLTLSTRKMKVGNDIIVQKLTLSQAIDARDALAKSIYACLFDWLVEQINKSLAVGKRRTGRSISILDIYGFESFNRNSFEQFCINYANERLQQHFNRHL

SEQ ID NO: 185889 - protein, 74 aa, Glycine max
  Clone ID: PAT_MRT3847_138871C.1.pep
NTPKFFTRGFFSLKIRLKKIPNTLCNFFLKRGTLCFYTWGKFWFPRKHSVAPIFPAILGKKHPCFFFLRHSSPF

SEQ ID NO: 185890 - protein, 40 aa, Glycine max
  Clone ID: PAT_MRT3847_138872C.1.pep
EGGAVGEGMKKKRNMMSVVTYKIYIFKVLKQAHLDIGILG

SEQ ID NO: 185891 - protein, 47 aa, Glycine max
  Clone ID: PAT_MRT3847_138873C.1.pep
NILDLATRNVIALFGGPSYTVELGRCDGLVSTAPDVNGRLTQPTNNL

SEQ ID NO: 185892 - protein, 71 aa, Glycine max
  Clone ID: PAT_MRT3847_138874C.1.pep
ISGVGVDGIGNKLENSKDGPPTLEQPKMTLEKLLTYGNMLDQEQDNVKRVQLADKYLNEAALVNANEDAIN

SEQ ID NO: 185893 - protein, 55 aa, Glycine max
  Clone ID: PAT_MRT3847_138875C.1.pep
VADIICRDSEHHGLEQQVPSSIETRNVGVIGSEFIDPQHMWNILHPQHISSCQYK

SEQ ID NO: 185894 - protein, 39 aa, Glycine max
  Clone ID: PAT_MRT3847_138876C.1.pep
MQCRKRPSALYLYVHCVLESRSFLCVDCVEEESLSFVAV

SEQ ID NO: 185895 - protein, 68 aa, Glycine max
  Clone ID: PAT_MRT3847_138877C.1.pep
NNKRAQLSNTATFTWNRTINTCAGLINYNSLTLYYYSKTTPYPPSHFSQPNIYTFPKYKTLTHSLLQI

SEQ ID NO: 185896 - protein, 122 aa, Glycine max
  Clone ID: PAT_MRT3847_138878C.1.pep
TSFYFVLSLESLIEIPNQNPRFFCLGLQVFQEVSRQVFLNLLRETIHPLEKKDMIIILYLHTCMDIIVKSRENVKVNWIIPHYHQHPFSIPTITFVVNHKRVFQTSNILHTISLTIRFFCLH

SEQ ID NO: 185897 - protein, 35 aa, Glycine max
  Clone ID: PAT_MRT3847_138879C.1.pep
VDFECVGDQELVNFEIKCNFVGFYLLSRQLFLCWL

SEQ ID NO: 185898 - protein, 62 aa, Glycine max
  Clone ID: PAT_MRT3847_13887C.1.pep
CDKNHLVGCPDLTSSWKSMTFCQILFPKLPLQETIGLLLHLRCVTIGVNFNPNAPLLTNVCT

SEQ ID NO: 185899 - protein, 88 aa, Glycine max
  Clone ID: PAT_MRT3847_138880C.1.pep
LHADFIFSTLKEKCNKVAVIAEVDRILRPEGYLVIRDNVETIGEIESLAKSLQWDIRLTYSKNGEGLLCIQKTFWRPTKVETVASAIA

SEQ ID NO: 185900 - protein, 51 aa, Glycine max
  Clone ID: PAT_MRT3847_138881C.1.pep
NKSLALINTETILPLQGDGSTISGPHNDSESCYDNSYILISFLLPCHPHLN

SEQ ID NO: 185901 - protein, 50 aa, Glycine max
  Clone ID: PAT_MRT3847_138882C.1.pep
TIQHSPLFADPFKPHSPPKNSNTPPLYKPPIPIKTPIITSPNQKHISFLY

SEQ ID NO: 185902 - protein, 158 aa, Glycine max
  unsure (1)..(158): unsure at all Xaa locations
  Clone ID: PAT_MRT3847_138883C.1.pep
TRTNTPWGERVSFLFNPHSDLVAKALIGSPXMDMLGRSSIKANAYIXTKKLSISVHHPLHGNHFAASFKYRNEHHQSVSELIYDCSLQYINLPQSCFLQAIKLWWKNVRFVQHPRYNIPSYKDEALMRDNKLQCCGCLAEASPQNRWFRWRDAKWPWS

SEQ ID NO: 185903 - protein, 91 aa, Glycine max
  Clone ID: PAT_MRT3847_138884C.1.pep
KKIRSSFSSRDRVNPGDIYVFYLDYPSYTRLSSVRVTITIIPLLRQLGNSMDYFEYAFQHDMVLTVDPGCVIDTRIFMHIRFLQWVGVYFT

SEQ ID NO: 185904 - protein, 50 aa, Glycine max
  Clone ID: PAT_MRT3847_138885C.1.pep
GPFTATLYENSIIGDGGKLSAYIDRIFAVIALKTPSTGFVATTYVYRPIQ

SEQ ID NO: 185905 - protein, 136 aa, Glycine max
  Clone ID: PAT_MRT3847_138886C.1.pep
LFETLVQILLSGWLRICKCQRREQEMVEYDVVEEVIYGLESGILFGMSSVISKMGFLFLEQGFPKLLVPMCIMISGCCSGTGFYYLTRGLKHGRAIVVSTCAAVASILTGVLAGMLALGERLPSAPKARLLLLLGW

SEQ ID NO: 185906 - protein, 84 aa, Glycine max
  Clone ID: PAT_MRT3847_138887C.1.pep
RQTATTEISFTRMRTLRKLEKVQNQRQEYEGRNGCRIGCFFRHENSQRRNWEVKTKGEVTRPKKKTIGEVAYAYALDFAPSIFL

SEQ ID NO: 185907 - protein, 118 aa, Glycine max
  unsure (1)..(118): unsure at all Xaa locations
  Clone ID: PAT_MRT3847_138888C.1.pep
KCPTKAVQDKTPIEAWSGQNSSAKHLRVYGSICYIHHKRHELQDKSTREIFMGYNMQSKGYRVYXLTNKKRIISRDVEVDENISWMGKQKKFKKWQKKQVCFCLLYNKILHQSLLQDE

SEQ ID NO: 185908 - protein, 90 aa, Glycine max
  Clone ID: PAT_MRT3847_138889C.1.pep
SLKVSRHHCMTSSFFGGGGGGLPGGWSQLEASRTVSWYGDRGAIMTKAAAVYGRVKRANNEEFLGMRQLSQKEWKEIKVTQPHNKTQNCQ

SEQ ID NO: 185909 - protein, 53 aa, Glycine max
  Clone ID: PAT_MRT3847_13888C.1.pep
FRSFPGCYDTRNPIYLPVITTSSNDLRGTSHPDIIYTCTNSAIIITFFTKRKL

SEQ ID NO: 185910 - protein, 59 aa, Glycine max
  unsure (1)..(59): unsure at all Xaa locations
  Clone ID: PAT_MRT3847_138890C.1.pep
PLXLAVESRRXXAKRRRXXSSXGPVDETXSXSVQXQKAMRQVLXGXXVGXPGFSVXXDY

SEQ ID NO: 185911 - protein, 88 aa, Glycine max
  Clone ID: PAT_MRT3847_138891C.1.pep
KAKLYRIISHIKKMKIPFYFPILVLVVFIASGKQVQMTVVPNCVVESLSVHCEIFKNPCELLCQQHFGSPAAHGACGIKFHVCVCYLC

SEQ ID NO: 185912 - protein, 329 aa, Glycine max
  unsure (1)..(329): unsure at all Xaa locations
  Clone ID: PAT_MRT3847_138892C.1.pep
TEKNVDCSDSALFAGTGKGRAAMGFQKSPAAAHTTPPPQKKQPPPPSPSTAKSSSHKSSFSRSFGAYFPRSSAQVQPRPPDVAELLRLVEELRESESRLKTELLEHKLLKESIAIVPVLENEITARETEIERSRRRAEEAESENERLRKELQELKVXSRRREMRKRESNLGAGNVNSEVXKLRKGPCSSVGSXEELVDCSDSSLSGLVITRAPRVPNPPPKPSTSSPSSGSSGETERRIPPPPPPPPMKALPPPPPPPPKKLVSKAAAPPPPPXPPPKAGREXPAKVRXVPEVVEFYHSLMRRDSHSRRDSASAAEVLANANACDMIGE

SEQ ID NO: 185913 - protein, 65 aa, Glycine max
  Clone ID: PAT_MRT3847_138893C.1.pep
GPAWSTRPEPRGRFFRAFSGAGGNPARRVGAAGMYNQQRAGDDHGNSGGGPYIGGASAAGYHQEM

SEQ ID NO: 185914 - protein, 203 aa, Glycine max
  Clone ID: PAT_MRT3847_138894C.1.pep
DLRESESRLKTELLEHKLLKESIAIVPVLENEITARESEIERSRRRAEEAESENERLRKELQELKVKAEEEKNENERKIKALEEEIIEFKKTASFIGSNSSSNRTEALESHEQEEATQKLVEVSFRSNLMRSLKKTASDLGSGNLKREVSEISERPLHSRCNSEELGDCSDSVLSGSVRSRAPRVPNPPPKPSTSSSSGSSGE

SEQ ID NO: 185915 - protein, 70 aa, Glycine max
  Clone ID: PAT_MRT3847_138895C.1.pep
MVVREKGEQTQMKHWSCPLHLRTLLHIGSRCSIYFFNFQFKYLVLVFCSMNVYTSLFSMLFLSIHENKNV

SEQ ID NO: 185916 - protein, 73 aa, Glycine max
  Clone ID: PAT_MRT3847_138896C.1.pep
GIHLERTDKHCCDARDCAACDMTSCTHELPGDLQNYEHSRIYDSIVCLTVIIESAYYVAMIHMFGVQSVNTPL

SEQ ID NO: 185917 - protein, 165 aa, Glycine max
  unsure (1)..(165): unsure at all Xaa locations
  Clone ID: PAT_MRT3847_138897C.1.pep
SXCSRIPVFTLLFAFSMRVLTFVSSSLAIFSILLVLSIYVADAWVRSRVLAIRVTFLKSLGCNFALGLRVIRGHGQAIALGRLAWLSCVTLWLTLRFLSISWGAWRCLLRSIDEVFYRLYNGRSGATWSDGSFGLSGDAYGALLIPFLFLRFQVSLDREAQVFLR

SEQ ID NO: 185918 - protein, 269 aa, Glycine max
  Clone ID: PAT_MRT3847_138898C.1.pep
LNWSMQRESLLSLLLGSRKINYKSLMKYFMAILCQLSQLQSELSKQPELQESSESKLSKNCHTGLSLALHGVLKDTCVSMEKLLVMIMDLDMARKIADIEGHTTRGDSPRTPLMDIILDELSYNKDSVPVFLKIFSESKWKLEIVVQYLWKYITKPSVRTRKSNGHTEDATFGGALKCFSNKTGTKSLIKKIGVDVVQFLLAHGCQAHLSILSKGNAGDKQGGNSALVDLCQAFISAFDSLRSTNEHMEILSMGKEALFTAATIISVKS

SEQ ID NO: 185919 - protein, 64 aa, Glycine max
  Clone ID: PAT_MRT3847_138899C.1.pep
ARTVQQFACSSEATGVLKDDGIIAGAERVNEDSLGSVVYIQVGHSAVWYLVSQGSRSHVWLYVK

SEQ ID NO: 185920 - protein, 341 aa, Glycine max
  Clone ID: PAT_MRT3847_13889C.1.pep
MASSSSGNPNNPEVRKDIVWNRWVIFSPARAKRPSDFKSKSPADPNPNQQCPFCIGHEHECAPEIFRVPTHDPDWKIRVIQNLYPALSRTLPEPQGSASTTGSVLTGFGFHDVVIETPVHPVQLSDLSPSQIGKVFLAYTERTRQLASHESIQYVQVFKNHGASAGASMSHSHSQMMALPVIPPSVSARLTSMKDHFDQTGKCFICEIQCKDLLIDSSTNFFSLVPFAATFPFEIWIVPRYHTAHFHELDAEKAVELGGLLKLMLRKMALQLNNPPFNYMIHTSPLHAKGSELAYNHWFIQIIPQLIGIAGFELGTGCYINPVFPEDAAKVLREVKVPESG

SEQ ID NO: 185921 - protein, 325 aa, Glycine max
  Clone ID: PAT_MRT3847_1388C.1.pep
PDFEVVDKGVEVQETKELYDGEESEKSIEVKSATSEVVKEIMHDQLRLTRLTELDSIAKQIKALESIMVEDNKFTKGEEAESLRLDSDEENVTREFLHMLEDQKARGFKLNQSETPPLQIAEAESKVYLPDLGKGLGCVVQTKDGGYLTSMNPLDNAVARNETPKLAMQMSKPYVLASNQSPNGLELFQKLAGIGLDELSCQVFSMMPLDELIGKTAEQIAFEGIASAIIQGRNKEGASSSAARIVSALKGMANAMSSGRQERISTGLWNVDETPFTAENILAFTMQKIEFMAVEGLKIQADMTEEEAPFDVSPLSTEEGNENEL

SEQ ID NO: 185922 - protein, 47 aa, Glycine max
  unsure (1)..(47): unsure at all Xaa locations
  Clone ID: PAT_MRT3847_138900C.1.pep
NKLTXQTGEFXTXIQPQIXHSXAXGXNGQTSGXPXXYPXKXXPSXFX

SEQ ID NO: 185923 - protein, 116 aa, Glycine max
  unsure (1)..(116): unsure at all Xaa locations
  Clone ID: PAT_MRT3847_138901C.1.pep
HASGDAGAADVGATPAQEVAKHDANERLEAHMTAGDKLXSTTANEDARTXNHLQRVEGDLKLATDGKTYEGTPTPVSKIGARENNGVKVPXMAQEEILAHNASDPKTREVREESKP

SEQ ID NO: 185924 - protein, 50 aa, Glycine max
  Clone ID: PAT_MRT3847_138902C.1.pep
RLELSFCQLFYYFVLNVMLFTITNEIFGNHSYTKCLPIRNIHPVIDQVLV

SEQ ID NO: 185925 - protein, 125 aa, Glycine max
  Clone ID: PAT_MRT3847_138903C.1.pep
MRDKKRGNNLVEKPKTIRMKLKLLVLLVAKFLAPYEGHGANYQNFPLKMKTGFGGQKSIEVAFAIWRLGLKSNTVFNWKTVPAPCGNSKADYFQGNHYNLDSKTFNQQANFNAKSLKFTSKDFFV

SEQ ID NO: 185926 - protein, 62 aa, Glycine max
  Clone ID: PAT_MRT3847_138904C.1.pep
AMDWFGRMKCCMLGKCVPVVRGVANNLRHVQKRLRCSYKWEAVYGYLSLETCINSIFCTARE

SEQ ID NO: 185927 - protein, 51 aa, Glycine max
  Clone ID: PAT_MRT3847_138905C.1.pep
LQRYHVPKHFARLYIKGLNVLSYFIIASTGVLCPPLTILYNGHNCYFNHEW

SEQ ID NO: 185928 - protein, 51 aa, Glycine max
  Clone ID: PAT_MRT3847_138906C.1.pep
HPHPGYLPFAFQPPPPPPPPPPPPPPPLPPPPPPPPSRRYCNDVARQTPRQ

SEQ ID NO: 185929 - protein, 70 aa, Glycine max
  Clone ID: PAT_MRT3847_138907C.1.pep
FCRGVYFFFFFFLGAGKKQFFFFNQGRKKMFWFLTPQLIFFPRPQKSQKNGNHLYFIYGCAFPGLYKKKG

SEQ ID NO: 185930 - protein, 86 aa, Glycine max
  Clone ID: PAT_MRT3847_138908C.1.pep
SRYDQVMSAPQMSLLTLMCQNLVSSSFNCRTYMHIRFLPQQYALFMGYHFMPRSSPPMNAFRYPSLAIQHSQSLIVPFIHRIRPIF

SEQ ID NO: 185931 - protein, 40 aa, Glycine max
  Clone ID: PAT_MRT3847_138909C.1.pep
LPFRMTMTIPIGGGSWTENATLMNKPNADRSMWTYQERNL

SEQ ID NO: 185932 - protein, 63 aa, Glycine max
  Clone ID: PAT_MRT3847_13890C.1.pep
LDRDAHCISLRICSYRSINVRHILYNGKKSPSMGRCGHPRQAGRGKNTPHGGARGAPDLKDPN

SEQ ID NO: 185933 - protein, 52 aa, Glycine max
  Clone ID: PAT_MRT3847_138910C.1.pep
LSGSPKRHVRASPGLPFHEASVPHTAFSSSLLVVATVRGLIPCCHKVPLSAF

SEQ ID NO: 185934 - protein, 44 aa, Glycine max
  Clone ID: PAT_MRT3847_138911C.1.pep
QMLLESHSHPLFSQLVFLGCLNVLKSPFLWVVTAVLSFKWKMVV

SEQ ID NO: 185935 - protein, 38 aa, Glycine max
  unsure (1)..(38): unsure at all Xaa locations
  Clone ID: PAT_MRT3847_138912C.1.pep
APXXTVSFVQARMGLVHNQRLNSCDGVSFTFIAPLRNH

SEQ ID NO: 185936 - protein, 202 aa, Glycine max
  unsure (1)..(202): unsure at all Xaa locations
  Clone ID: PAT_MRT3847_138913C.1.pep
KHSSPICENNQKYYLPSTVQGNIPSSVNFQASPTRSNVDTSVSPICKLDCSIFEDKELVFMSRDEIDRCSPSRKDGIDVLRERHLRYSYCAFLQNLGMWLNLPQTTIGTAMVLCHRFFVRRSHACHDRFLIATAALFLVGKSEETPCPLNNVLQASSEILHEQDFTLLSYLLPVGWFEKYHDRVLEAELLLLTTXKFELNVE

SEQ ID NO: 185937 - protein, 157 aa, Glycine max
  Clone ID: PAT_MRT3847_138914C.1.pep
LVNHKGEVKITDFGVSAMLASSMGQRDTFVGTYNYMSPERISGSTYDYSSDIWSLGMVVLECAIGRFPYIQSEDQQSWPSFYELLAAIVESPPPSAPPDQFSPEFCSFVSSCIQKDPRDRLTSLKLLDHPFIKKFEDKDLDLGILAGSLEPPVNFPR

SEQ ID NO: 185938 - protein, 228 aa, Glycine max
  Clone ID: PAT_MRT3847_138915C.1.pep
MKNSKKTCARKYHKSENPRLRWTPELHEYFVEVVEGLGGKNKATPKSILHMMHVKGLRISHIKSHLQMYRNMKGGTILTSMQQEMEENVHVKDHHPICSNCSSQSIIFRSQGTKFKLKASKYDTGIVNQEIHPLENKGLSQTSETDYDLNQEPESSACLFSESSNEEKSRTMKFLDLSLSFGSSPIPTMDGDQERMRFSSPNTADNHVIDSNSVQSHGSNYINLDLTI

SEQ ID NO: 185939 - protein, 355 aa, Glycine max
  unsure (1)..(355): unsure at all Xaa locations
  Clone ID: PAT_MRT3847_138916C.1.pep
MKTKMPLKQLKLAVPAQETPITSFLTASGTFHDGDLLLNQKGLRLISEEKESRPSDGKELEFDFSLDDLETIKVIGKGSGGXVVQLGRHKWVGRLFALKVIQMNIQEDIRKQIVQELKINQASQCPHVVVCYHSFYHNGVISLVLEYMDRGSLADVIKQVKTILEPYLAVVCKQVLQGLVYLHNERHVIHRDIKPSNLLVNHKGEVKITDFGVSAMLASSMGQRDTFVGTYNYMSREEDSRGTYDYSSDIWSLGMVVLECAIGRFPYIQSEDQQSWPSFYELLAAIVESPPPSAPPDQFSPEFCTFVSSCIQKDPRDRLTSLELLDHPFIKKFEDKDLDLGILVGGLEPPVNFPR

SEQ ID NO: 185940 - protein, 94 aa, Glycine max
  Clone ID: PAT_MRT3847_138917C.1.pep
MSGGTQKSLRKALGALKDTTTVSLAKVNSDYKELDIAIVRATNHVERPAKEKHIRAIFSAISATRPRADVAYCIHALARRLSKTHNWAVALKTL

SEQ ID NO: 185941 - protein, 108 aa, Glycine max
  Clone ID: PAT_MRT3847_138918C.1.pep
MSGGTQKSLRKALGALKDTTTVSLAKVNSDYKELDIAIVRATNHVERPAKEKHIRAIFSAISATRPRADVAYCIHALARRLSKTHNWAVALKTLIVIHRALREVDPTF

SEQ ID NO: 185942 - protein, 152 aa, Glycine max
  Clone ID: PAT_MRT3847_138919C.1.pep
LESNQANGTTGWELALVTAPSSNETATAASKLAGGLDKLTLDSLYDDALRRNNQNVSYNPWEPAPGGNMMQPTMHDPFFASNTVAAPPSVQMAAMSNQQQTFMFQHQQQQQMMMPPQQQSVNPFGNPYGAAAVHPYGSGMPVQSYNPYTGLI

SEQ ID NO: 185943 - protein, 101 aa, Glycine max
  unsure (1)..(101): unsure at all Xaa locations
  Clone ID: PAT_MRT3847_13891C.1.pep
GLTAQKIAAQFGGPPIGAAPKERCGFKGPGTFNPLIFANSYFSKLFSGQKEGFLKNPFDKGIXCDPGCRPLVDKNPAAKNAFFGDXGEAPQKLSELGFAKA

SEQ ID NO: 185944 - protein, 93 aa, Glycine max
  Clone ID: PAT_MRT3847_138920C.1.pep
KQKSGGPWAILESNLPLPFWGGGATNPFSFGGGYPSNPNQTGPGKNLGFFLPFSLNLGTLFLEMGAPKKKMEFFGKSFQLPLVSALEAPPQKD

SEQ ID NO: 185945 - protein, 74 aa, Glycine max
  Clone ID: PAT_MRT3847_138921C.1.pep
YGCEKRQKGSRIDSQSRVLRALTETLNFIPLSLMFLQVKYLGMELFACKKINIVCISQCMRISLCFMYLGDHVL

SEQ ID NO: 185946 - protein, 544 aa, Glycine max
  Clone ID: PAT_MRT3847_138922C.1.pep
MSGGTQKSLRKALGALKDTTTVSLAKVNSDYKELDIAIVRATNHVERPAKEKHIRAIFSAISATRPRADVAYCIHALARRLSKTHNWAVALKTLIVIHRALREVDPTFHEELINYGRSRSHMLNMAHFKDDSSPNAWDYSAWVRTYALFLEERLECFRVLKYDIEADRPRTKDLDTAELLEQLPALQQLLNRVIGCQPHRAAVNNFVIQLALSMVASESIKIYQAISDGTVNMVDKFFEMQRHDALKALDIYRRVGHQAERLSEFYEICRNLDIGRGEKFIKVEQPPSSFLQAMEEYVKDAPQGPIVRKDQAIENKEVLAIEYKKTTEVEEECPPSPSPPPPPPSEPVKVEAPPVQPPPDLLNLEDPVPAAAELEEKNALALAIVPVAVEQQPSAVSNQANGTTGWELALVTAPSSNESATTASKLAGGLDKLTLDSLYDDALRRNNQNVSYNPWEPAPGGNMMQPTMHDPFFASNTVAAPPSVQMASMSNQQQAFMYQQQQQMMMAPQQQSVNPFGNPYGATAVHPYGSGMPVQSYNPYTGLI

SEQ ID NO: 185947 - protein, 314 aa, Glycine max
  Clone ID: PAT_MRT3847_138923C.1.pep
MGDEEEEEVLGSGQSASNNSLPPPDHSTLLQIEPSRTYMLMMLYTHASLAAKKKKRGGQRAGGPDKSGRCLRYFSMKVCEKVESRGRRSYNEVADELVAEFADPINGVSTPDQQQYDEKNIRRRVYDALNVLMAMDIISKDKKEIQWKGLPRTSLSDIEELKSERLGLRNRIEKKAAYLQELEEQYIGLQKLIQRNEQLYSSGNAPNGGVSLPFILVQTRPHATVEVEISEDMQLVHFDYICAPFEMHDDNYVLKAMKFCERSQNDNTTDNSTDGGEGSSIYAQVPTSVSNPPNRPPSSPPLPGILKARVKNEH

SEQ ID NO: 185948 - protein, 55 aa, Glycine max
  unsure (1)..(55): unsure at all Xaa locations
  Clone ID: PAT_MRT3847_138924C.1.pep
DLNCFFTFIFLLVIPQCVLXLNPLPLNYTLFIFFLITSNTKPKHCNSQSHRNTRN

SEQ ID NO: 185949 - protein, 85 aa, Glycine max
  Clone ID: PAT_MRT3847_138925C.1.pep
FGSFSDYVQSVFRHHWYELSYFCTLAPLALLYIYIYIYIPFADQKKKKLYLIHASYLSMSNYHFFVSYTRLLKLMKRIKLLFLEN

SEQ ID NO: 185950 - protein, 84 aa, Glycine max
  Clone ID: PAT_MRT3847_138926C.1.pep
LVQRRLILLMLLLLMMMLLMMLCFPTFLQTLPVYVLWFGFSAPCLLLLQDALLGSRSLHLCFFSSLPLLPLTNSHSLSTLFSSS

SEQ ID NO: 185951 - protein, 68 aa, Glycine max
  Clone ID: PAT_MRT3847_138927C.1.pep
YEPLLLLVKGENSDPFRYTYESMIVVYSRGTKPSCFVASLSRNLIYIFLEIFCVEPKQNLGGIIQYFR

SEQ ID NO: 185952 - protein, 199 aa, Glycine max
  unsure (1)..(199): unsure at all Xaa locations
  Clone ID: PAT_MRT3847_138928C.1.pep
LNFVEPKQNLGRYYTILSMSTAGWSDEECSVIGEKAEIGFLDFEEEKSVCSYIDNEGAPIIVSVPFAFVDGKPQSVSVGDTAVDLITIRNTTDEPVDLWSVHIFASNPQDTFTLSLTEPPSANSNADEDQSCLESFTLEDRVLQPGENLKIWLSCKTKEMGMYSSVVYFDVGDXKIERVVFLLVEDKISKSLASNRPYS

SEQ ID NO: 185953 - protein, 43 aa, Glycine max
  Clone ID: PAT_MRT3847_138929C.1.pep
PDAGGLSEGLLGRETVPFFVRDKVELLVGVHVAWDWSGLGLKS

SEQ ID NO: 185954 - protein, 89 aa, Glycine max
  Clone ID: PAT_MRT3847_13892C.1.pep
RYLNGTLGIRDSSVFVTNPQLTKARASKNDWRDDENLVKVDSPLSTRDSEVRDESKWRRYGVNHANLLIRSVKGLWCYRNGDEELSAIN

SEQ ID NO: 185955 - protein, 118 aa, Glycine max
  unsure (1)..(118): unsure at all Xaa locations
  Clone ID: PAT_MRT3847_138930C.1.pep
MRLVPVNSITCRKALQRSGKDHSILIVLAPGIYHYRFIVDGEERFTPELSNVADEMGHVCNLLDVDDYVPXNPDGVFEFEHQPPRISFGSISAGKICKEPWSVFELIYCLGWESAWFS

SEQ ID NO: 185956 - protein, 200 aa, Glycine max
  Clone ID: PAT_MRT3847_138931C.1.pep
FGSREKTGVLSAKEAFEKLEKVGEGTYGILHRDLKPHNLLMDRKTMMLKIADLGLARAFTVPIKKYTHEILTLWYRAPEVLLGATHYSMAVDMWSVGCIFAELVTKQALFPGDSELQQLLHIFRLLGTPNEDVWPGVSKLMNWHEYPQWNSQSLSTAVPGLEELGLDLLSQMLEYEPSKRISAKKAMEHAYFDDLDKRNL

SEQ ID NO: 185957 - protein, 137 aa, Glycine max
  unsure (1)..(137): unsure at all Xaa locations
  Clone ID: PAT_MRT3847_138932C.1.pep
KKYTPEILTCGYRAPEVLLGATHXSMAVDIWSVGCIFAELVTKQALFAGDSELQQLLHIFRLLGTPNEEVWPGVSKLKDWHEYPQWNPKSLSTAVPGLDELGLDLLSQMLEYEPSKRIFAKKAMEHAYFNDLDKGHF

SEQ ID NO: 185958 - protein, 326 aa, Glycine max
  Clone ID: PAT_MRT3847_138933C.1.pep
MGRCTERKRRREMEKPRGGGVLSAKEAFEKLEKVGEGTYGKVYRAREKATGKIVALKKTRLHEDEEGVPPTTLREVSILRMLSRDPHVVRLMDVKQGQNKEGKTVLYLVFEYMDTDLKKFIRSFRQTGQTVPPQTIKSLMYQLCKGVAFCHGHGILHRDLKPHNLLMDPKTMMLKIADLGLARAFTVPIKKYTHEILTLWYRAPEVLLGATHYSMAVDIWSVGCIFAELVTKQALFPGDSELQQLLHIFRLLGTPNEDVWPGVSKLMNWHEYPQWNPQSLSTAVPSLDELGLDLLSQMLKYEPSKRISAKKAMEHAYFDDLDKRHL

SEQ ID NO: 185959 - protein, 109 aa, Glycine max
  Clone ID: PAT_MRT3847_138934C.1.pep
YSKYIVKMPVRIPRDSPMKIIPDPNRKTGPDDAVIMQKIMGKLREADSNNDGRYDKDELKHALKGLGAILPGWRANRCFGRVDANHDGEISGAEIEALLQYLRSHGYGK

SEQ ID NO: 185960 - protein, 139 aa, Glycine max
  Clone ID: PAT_MRT3847_138935C.1.pep
MEKTGVLSAKEAFEKLEKVGEGTYGKVYRAREKATGKIVALKKTRLHEDEEGVPPTTLREVSILRMLSRDPHVVRLMDVKQGQNKEGKTVLYLVFEYMDTDLKKFIRSFRQSGETIPPHIIKSLMYQLCKGIVSCHDEA

SEQ ID NO: 185961 - protein, 90 aa, Glycine max
  Clone ID: PAT_MRT3847_138936C.1.pep
QRGPLLIAAPVTAFPMHRLSRWPPKAYEYHKFCAARLLLQHSVVRIEPSALASGIVINAGSDAQQNSSVKLRLSGDRLCDRERKRERRTA

SEQ ID NO: 185962 - protein, 125 aa, Glycine max
  Clone ID: PAT_MRT3847_138937C.1.pep
RVLSAKKDSIERERWRSRGGGGVLSAKEAFEKLEKVGEGTYGKVYRAREKATGKIVALKKTRLHEDQDGVPPTTLCEVFILRILSRDPHVVSLMDVKQGQNKEGKTVFYLVFEYMDTDLNKFIRS

SEQ ID NO: 185963 - protein, 243 aa, Glycine max
  Clone ID: PAT_MRT3847_138938C.1.pep
MAMAMAAIASSLGVGLRPLSLSSPSSALFQSRHSFTITTTTPKCCLAPKQDSPLELELVKSTQNTQIILHSFSPFPLLCAAALLPGSEAVTSVFGPFVELVKSWNLPDWLVHWGHPGNMAVVLFAMGGYGTYLGFRIRYSDNLEEKAKAKDLHPKLLAGMFFFFALGATGGITALLTSDKPIFESPHAVTGVIGLALLTIQTILPTLFEGNPGLRNVHGILGSGIMTLFLVHFALGLQLGFSY

SEQ ID NO: 185964 - protein, 93 aa, Glycine max
  Clone ID: PAT_MRT3847_138939C.1.pep
HPPLSHTHPQDTPEPCSRRRRRRPRRRRIRCAGRAGASTASRRALSSPTGPSATPSPSNVRSAVSAIGRRATTCRSSLISASAYCAPLSTMAF

SEQ ID NO: 185965 - protein, 61 aa, Glycine max
  Clone ID: PAT_MRT3847_13893C.1.pep
SPRAHSRANIGGVVNRNGSRQTAYRSGSVRSIYLSCSIGPRTHRRSIFLSRQNQRAIKAMI

SEQ ID NO: 185966 - protein, 169 aa, Glycine max
  unsure (1)..(169): unsure at all Xaa locations
  Clone ID: PAT_MRT3847_138940C.1.pep
MKMNVLVFFVATILVAWQCHAYDMXALRMNTVYGARTQEVKCARWRLDVEAHIIFGFETIPEKCVEATYEYIPGXQFLSDSKTVTPQACYYARDLETHATDTFVLRIDGTVLYYISYYKKHGYGAEKHNYPLYDECANMGNAPTLPVTLNNYTMLVTVAFKNILLTRIT

SEQ ID NO: 185967 - protein, 94 aa, Glycine max
  Clone ID: PAT_MRT3847_138941C.1.pep
AQHQERISTQAYIPLLRVIAASSAPFLTSTQLSARSTRSSRGEIYGHHKGKVKVKLSCHLADDQPSVQEGRFNRTGHKYTSSRIPSSARRAVKS

SEQ ID NO: 185968 - protein, 47 aa, Glycine max
  Clone ID: PAT_MRT3847_138942C.1.pep
NVLPKKEKNISMNQRLGRRLKTHILSRKESDPNLTQIKLNFNFKYRN

SEQ ID NO: 185969 - protein, 77 aa, Glycine max
  Clone ID: PAT_MRT3847_138943C.1.pep
NEKPQLLKRKQEKHKKPHHRSGMTKRKYYQRLFRLNISLNLVNITTQYDIFKQHQHHSRNLTVLDSLFLPLKESFPI

SEQ ID NO: 185970 - protein, 83 aa, Glycine max
  Clone ID: PAT_MRT3847_138944C.1.pep
LSTHSSTEACTPRDAQSDVQDARETASMCLARTTQIGSCLSSSLRFIRFIRYARVGAKVKVSPEKGVMTWIGLGFPSNARTGK

SEQ ID NO: 185971 - protein, 48 aa, Glycine max
  Clone ID: PAT_MRT3847_138945C.1.pep
WNFISLVDDASLDRKAVSFVLGCARQCWNAAIRSRHYKFMALIELKVQ

SEQ ID NO: 185972 - protein, 75 aa, Glycine max
  Clone ID: PAT_MRT3847_138946C.1.pep
TDPDTQENPIMGSTTTNPKVGTQKRDFEPRRTLTRDQVREISPRVCERYIKTRKRAGGSTGPIPEPIPRANKLNL

SEQ ID NO: 185973 - protein, 59 aa, Glycine max
  Clone ID: PAT_MRT3847_138947C.1.pep
KKKGYCILYSHYCIMHLSLHFGKFVLKCEFILWNRLSKMQWKVFNAMVGMQDINAQEKV

SEQ ID NO: 185974 - protein, 43 aa, Glycine max
  Clone ID: PAT_MRT3847_138948C.1.pep
MRSDIDNQFSEHTFEFEHIINEKISIRCKTNSGEAKQDSLKLM

SEQ ID NO: 185975 - protein, 296 aa, Glycine max
  Clone ID: PAT_MRT3847_138949C.1.pep
MGFNIQPYGIQSMLKEGHKHLSGLDEAVLKNIDACKQLSTITRTSLGPNGMNKMVINHLDKLFVTNDAGTIVNELEVQHPAAKVLVLAGKAQQEEIGDGANLTISFAGELLQGAEELIRMGLHPSEIISGYTKAINKTVQILDELVEDGSDNMDVRDKEQVISRMKAAVASKQFGQEDIICSLVADACIQVCPKNPANFNVDNVRVAKLLGGGLHNSTVVRGLVLKSDAVGTIKQAEKAKVAVFASGVDTSATETKGTVLIHTAEQLENYSKSEVPALVDMISRLPYLEIAVLTAF

SEQ ID NO: 185976 - protein, 56 aa, Glycine max
  Clone ID: PAT_MRT3847_13894C.1.pep
KQENGVESHHSLTGENLIFFPFSLFRRGFYQFTFYPPKTEGLFWIKITDIKFFLIP

SEQ ID NO: 185977 - protein, 104 aa, Glycine max
  unsure (1)..(104): unsure at all Xaa locations
  Clone ID: PAT_MRT3847_138950C.1.pep
HFLVETKAIWAPILKFHYGSLDLSNTGSASRTSQWWRDILRIGNCQYQPGWLTSTFCRKIGDRKDTLFWRHRCLNETPLMQSHARLXSLAMDKDISVQGMSAWM

SEQ ID NO: 185978 - protein, 108 aa, Glycine max
  Clone ID: PAT_MRT3847_138951C.1.pep
LRLLWSPLVCLPAVSCLSFVLPWFACSLGPPFSQASLAFSVASFLSSPLCFSWLLCALFVLFCPPRSLFFSLGVSRRFRLFIPPPLWSSRGGSTPWCGHGDSRPVPPP

SEQ ID NO: 185979 - protein, 60 aa, Glycine max
  Clone ID: PAT_MRT3847_138952C.1.pep
FYLVCEQSRVVQCNEGERSYHIFYQICAGAPPSVRGRSSPPPSLLTMHVRESECGQPLPK

SEQ ID NO: 185980 - protein, 49 aa, Glycine max
  Clone ID: PAT_MRT3847_138953C.1.pep
HVSALRPFECVRCFPCHPAPLRWPFRTAFSARCSSTAPSGCPRFPGRET

SEQ ID NO: 185981 - protein, 50 aa, Glycine max
  unsure (1)..(50): unsure at all Xaa locations
  Clone ID: PAT_MRT3847_138954C.1.pep
GPQVDKRQLATILSXSSKYRXESAALLTKGRIMGNNGYYIEPTIFTNVKE

SEQ ID NO: 185982 - protein, 35 aa, Glycine max
  Clone ID: PAT_MRT3847_138955C.1.pep
QACVQMSMERQLVNLGIGTQLVTSNSIFKLILINC

SEQ ID NO: 185983 - protein, 199 aa, Glycine max
  Clone ID: PAT_MRT3847_138956C.1.pep
LERLKDKALITISEDNCISMHDCLQEMAWEIVRREDPESRSWLWDPNDDIYEALENDKCTEAIRSIRIHLPTFKKHKLCRHIFAKMRRLQFLETSGEYRYNFDCFDQHDILAEGLQFLATELKFLCWYYYPLKLLPENFSPEKLILNMPGGRIEKLWHGVKNLVNLKQLDLGWSQMLKELPDLSKARNLEVLLLGSCLC

SEQ ID NO: 185984 - protein, 242 aa, Glycine max
  Clone ID: PAT_MRT3847_138957C.1.pep
YSYVTEYGSGPNGAIIHYKPEPERCSSVDANKLFLLDSGAQYVDGTTDITRTVHFGKPTAREKECFTRVLQGHIALDQSVFPENTPGFVLDAFARSFLWKVGLDYRHGTGHGVGAALNVHEGPQSISHRYGNLTPLVKGMIVSNEPGYYEDHAFGIRIENLLYVRNAETPNRFGGIEYLGFEKLTYVPIQIKLVDLSLLSAAEIDWLNNYHSLVWEKVSPLMDGSARQWLWNNTRPIIHEKI

SEQ ID NO: 185985 - protein, 70 aa, Glycine max
  Clone ID: PAT_MRT3847_138958C.1.pep
LYTTKRQIGAMFQRLDVSTFKCKGRTRSRTCCPCEGFYRTVFFPRSIVRSKLKPCQAHIGPHIYESWGFI

SEQ ID NO: 185986 - protein, 83 aa, Glycine max
  unsure (1)..(83): unsure at all Xaa locations
  Clone ID: PAT_MRT3847_138959C.1.pep
FMCIKLQVQEKXTRQIFESIAPMLGEXVIVDVKATHTCMISRGIEKFGSSPDTIGVIGHFSTDHTERASFMKSIPYRTSSGEQ

SEQ ID NO: 185987 - protein, 70 aa, Glycine max
  Clone ID: PAT_MRT3847_13895C.1.pep
KRPGSAMKRTPSMSEMTLDLNTADDASRCADQQRSRVVPFSVEDQTTKMLASPKILKRHSSDFRDTRHLL

SEQ ID NO: 185988 - protein, 507 aa, Glycine max
  Clone ID: PAT_MRT3847_138960C.1.pep
PPLNDRWIFDSPVHSDVESKLRQLLIEMGNNDKILGIQVCAYKDGEAIIDTAAGVLGKYDPRPVQPDSLFPVFSVTKGITAGMIHWLVDNGQLNLEENVATIWPAFRSNGKDVIKVHHVLNHTSGLHNAMGGIAQEDPLLMLDWDGCLNRICQSIPETEPGKEQFYHYLSFGWLCGGIIEHASGKKFQEILEEAIVRPLHIEGELYVGIPPGVESRLAALTVDTAELSKISALANRADLPSTFQPQQIAQLATTLPVAFNTLNVRRAIIPAANGHVSARALARYYAALADGGKIPPPHSSASKPVLGSHPHIPKLSSSQKPPIKNRKCIGRRTQATSPSVSTTNSYEKVSSHEDFDANEGRNTNSESSSGGDDSSSRIGNNLRTHVARKVYKNPRIIDEFLGTGEYENLALPGESFGLGFKRFSSKDGSSIAFGHSGMGGSTGFCDVTNNFSVAVTLNKMSFGGVTGKIVQLVCSELNIPVPDDFLRFAVEQSGPDEQLSMGRPIIN

SEQ ID NO: 185989 - protein, 215 aa, Glycine max
  unsure (1)..(215): unsure at all Xaa locations
  Clone ID: PAT_MRT3847_138961C.1.pep
ILHNHLKVCAYKDGEAIIDTAAGVLGKYDPRPVQPDSLFPVFSVTKGITAGMIHWLVDNGQLNLEENVATIWPAFRSNGKDVIKVHHVLNHTSGLHNAMGGIAQEDPLLMLDWDGCLNRICQSIPETEPGKEQFYHYLSFGWLCGGIIEHASGKKFQEILEEAIVRPLHIEGELYVGDSTXLESRLATLTFHAAGLVYNTALTLMTAWVHTCTRI

SEQ ID NO: 185990 - protein, 51 aa, Glycine max
  Clone ID: PAT_MRT3847_138962C.1.pep
SSQVICMFQTRALELLGNLAFCVVGQSHKTHARSYVVYQIRRISMLSPCSP

SEQ ID NO: 185991 - protein, 71 aa, Glycine max
  Clone ID: PAT_MRT3847_138963C.1.pep
SPIFENPSALVFPFSMAGSDTNTQYNSKFIFSNEKSYEVKCFFFFLSFSLSLSFTTLSSHCKFVRNIHFVF

SEQ ID NO: 185992 - protein, 292 aa, Glycine max
  Clone ID: PAT_MRT3847_138964C.1.pep
RCVFPQEHWKTFIVEDDFKFIASNGLNAVRIPIGWWIAGDPTPPPPYVGGSLHALDKAFLWAQKYGLKIILDLHAAPGSQNGFEHSSSRDGSQEWGKTDENIQQTVHVIDFLTARYAKCQSFYAVELINEPLSPGVTLEILNKYYKAGYDAVSKHSPTAFVVLSNRIGPSKPKELFPLANGLMRSVIDVHYYNIFHDVFENMSAQQNIDFIYTNRSSQLNNITTSNGPLTFVGEWVAEWQVNGATKEDYQRFAKAQLDVYGRATFGWAYWAFKNVNNHWSLEWMVKNGYIKL

SEQ ID NO: 185993 - protein, 66 aa, Glycine max
  Clone ID: PAT_MRT3847_138965C.1.pep
CTNLLRPEFSKILNSKYVRVTSLFLLETIWLVNVTGLVSESSWERLTLASAELKHDRVEIHSTRSG

SEQ ID NO: 185994 - protein, 159 aa, Glycine max
  unsure (1)..(159): unsure at all Xaa locations
  Clone ID: PAT_MRT3847_138966C.1.pep
MADNMEIDTPSDSQPLKPRDRVVRRLAQFGVPEEQLDQPGLVAFVKDKRALIPELVSVILPTDAEVADAWQAKLSSKKTAVGVIMKKRFNESMAWLQWLIFEGDPGGALRRLSKMSDGQRGVCGSVWXNSDIAYRCRTCEHDPTCAICVPCFENGITGP

SEQ ID NO: 185995 - protein, 87 aa, Glycine max
  unsure (1)..(87): unsure at all Xaa locations
  Clone ID: PAT_MRT3847_138967C.1.pep
LRPRXPSSIITKPSXGGGKTNLPDPKTPLPHRRFFFFTSMSKTSIYPPFPPLRLKTLYHLYVLKLLPATLSPSSIHYLIFLNISLRI

SEQ ID NO: 185996 - protein, 51 aa, Glycine max
  Clone ID: PAT_MRT3847_138968C.1.pep
GFQINLLTKFYGHPPRPYVHAYTWHAMSFLLPQQASQLVEVGSYPRVHKTN

SEQ ID NO: 185997 - protein, 106 aa, Glycine max
  unsure (1)..(106): unsure at all Xaa locations
  Clone ID: PAT_MRT3847_138969C.1.pep
GXKKEXXSXXGXGKQTRXXQXXTEXGEXRXRPKEGEHGGXXNPGKPGEGTSFFFSRRVKEQSTPMLGTPPRPKKEDDPXKRKPGKXRGXRINLGWEPKGELAQGAP

SEQ ID NO: 185998 - protein, 74 aa, Glycine max
  Clone ID: PAT_MRT3847_13896C.1.pep
KKKAFEGGSPRIPPRGGALRIPRLGANFWAREAGNSLTGPVVQRWLANFFYNYGPIFWGRVGKGYDEVFILGQP

SEQ ID NO: 185999 - protein, 106 aa, Glycine max
  Clone ID: PAT_MRT3847_138970C.1.pep
PQNAQKLNKLVIDPTNAKEFERPFNSHARLNDQADKSSVTNQEQKPNKLVIDPIDAKEIESPFNSAPRLNDQPEKSFVNNQGSGFDSPKVNSGPNPFDSPSSEDSS

SEQ ID NO: 186000 - protein, 105 aa, Glycine max
  Clone ID: PAT_MRT3847_138971C.1.pep
SLTMDCIPLRGGQSTNHHTIHIMQMSYSCSVMHMTSTSLSFTPNYIDSNQHLPTYYPLFHFSHRDLYHLISTHNALHLIPLLNLLCDYILWFFSATTSIPNNHSS

SEQ ID NO: 186001 - protein, 52 aa, Glycine max
  Clone ID: PAT_MRT3847_138972C.1.pep
STRQHVPFPGDPRRSAHHVGHVPIVPCSHCDTSRILFNSPCRKINEKIISMS

SEQ ID NO: 186002 - protein, 103 aa, Glycine max
  unsure (1)..(103): unsure at all Xaa locations
  Clone ID: PAT_MRT3847_138973C.1.pep
HRVPLAGLTPITHVLLDEIGFSPDDLQELVHSLSYVYQRSTXAISVVAPICYAHLAATQMGQFMKFEDKSETSSSHGGSGIPAPPVPQLPRLQDKVSSSMFFC

SEQ ID NO: 186003 - protein, 257 aa, Glycine max
  Clone ID: PAT_MRT3847_138974C.1.pep
MASHKELPRTAQIHLVSSHQEVYEPCDDSFALVDALLADRNNLLEHHPTLCMEIGCGSGYVITSLALILGQEVCGINYIATDINPHAVRVTHETLEAHGVGAELIVTDIASGLEDRLAGLVDVMVVNPPYVPTPEDEVGVEGITSSWAGGENGRSVINKILPVADRLLSEKGWLYMVTLTENNPSEICHQMRKKGYASKIVVQRSTEEESLHIIKFWRDFDTEANETDQSASGFIGLLTQIPLLSYWRGTNSDNNKC

SEQ ID NO: 186004 - protein, 916 aa, Glycine max
  unsure (1)..(916): unsure at all Xaa locations
  Clone ID: PAT_MRT3847_138975C.1.pep
MDSFEPDGNGKESLPPPPPVVPSDIVPLKAEEVLCTPTEHNKKKASRLPIARSGLGSKGNKIQLLTNHFKVNVAKNDGHFFHYSVAFTYEDGRPVEGKGVGRKIIDRVQETYHSDLNGKDFAYDGEKSLFTVGSLPQNKLEFEVVLEDVTSNRNNGNCSPDGLGDNESDRKRMRRPYRSKSFKVEISFAAKIPMQAIASALRGQETENFQEAIRVLDIILRQHAAKQGCLLVRQSFFHNNPNNFADVGGGVLGCRGFHSSFRTTQSGLSLNIDVSTTMIISPGPVVDFLISNQNVRDPFQLDWAKAKRTLKNLRIKTSPSNQEFKISGLSELPCREQTFTLKGKGGGDGEDGNEEITVYDYFVKVRKIDLRYSADLPCINVGKPKRPTFFPIEVCXMVSLQRYTKALATLQRAPLVEKSXQVEGRGLQILSDALRTSNYGAEPMLRNCGISISTGYTEVDRXEGRLFTSLHVGNGEGLQRGLLLTFMNXQKFVEPSKIERWAVANFSARCDVRGLVRDLIRIGDMKGITIEQPFDVFDENPQFRRAPPMVRVEKMFEHIQSKLPGAPQFLLCLLPDRKNCDIYGPWKKKNLADFGIINQCMCPLRVNDQYLTNVMLKINAKLGGLNSLLGVEHSPSLPVVSKAPTLILGMDVSHGSPGQTDIPSIAAVVSSRHWPLISKYRACVRTQSAKMEMIDNLFKLVSEKEDEGIIRELLLDFYTTSGRRKPENIIIFRDGVSESQFNQVLNIELDRIIEACKFLDENWEPKFVVIVAQKNHHTRFFQPGSPDNVPPGTVIDNKICHPRNYDFYLCAHAGMIGTSRPTHYHVLLDQVGFSPDDLQELVHSLSYVYQRSTTAISVVAPICYAHLAATQLGQFMKFEDKSETSSSHGGLSGAGAVPVPQLPPLQENVRNTMFFC

SEQ ID NO: 186005 - protein, 304 aa, Glycine max
  unsure (1)..(304): unsure at all Xaa locations
  Clone ID: PAT_MRT3847_138976C.1.pep
LPCREQTFTLKGKGGGDGEDGNEEITVYDYFVKVRKIDLRYSADLPCINVGKPKRPTFFPIEVCELVSLQRYTKALSTLQRASLVEKSRQKPQERMKILSDALRTSNYGAEPMLRNCGISISTGFTEVEGRVLPAPRLKFGNGEDLNPRNGRWNVSRVKFVEPSKIERWAVANFSARCDVRGLVRDLIRIGDMKGITIEQPFDVFDENPQFRRAPPMVRVEKMFEHIQSKLPGAPQFLLCLLPDRKNCDIYGPWKRKNLXDFGIINQCMCPLKVNDQYLTNVMLKINAKLXGGLNSLLGVEHSP

SEQ ID NO: 186006 - protein, 136 aa, Glycine max
  unsure (1)..(136): unsure at all Xaa locations
  Clone ID: PAT_MRT3847_138977C.1.pep
TYSHTGAGIATTGTRKREREVAEVDTQTKNKNITTDIEVDTDTNLYTTITVNEPEPGLEAMASFKVTDQRPGKGEVEDXHEYDGISTSAGVRAKANVNVYGVRGTRAHALGAEADVDTKTEEVTKTNAGVSFTKDD

SEQ ID NO: 186007 - protein, 214 aa, Glycine max
  unsure (1)..(214): unsure at all Xaa locations
  Clone ID: PAT_MRT3847_138978C.1.pep
GSSSSQILESTYDFSVTDSNSLLFLFKHSPEVAKELNITSEFSFESASLSKHNDWMAIFPLSFLFSNSLKFPAKKDDILKQYEFFPKLSVQNPSLNSKKGPRRVHLELYLGSLXRTSDAVLNITGPLSSWSFADNLLPGTETYGDGPQSYICRLSGPSDGNWTFWLEANNSEALRVDLAILDQKLVDPIKRLKNLFPDWVDVVAYSSFMSSYIF

SEQ ID NO: 186008 - protein, 140 aa, Glycine max
  unsure (1)..(140): unsure at all Xaa locations
  Clone ID: PAT_MRT3847_138979C.1.pep
RDDILKQYEFFPKLSVXNPSLNPEKGPRRVHLELYLGSLEEVWVAVLNITGPLSSWSFADNLLPGTETYGGGPQSYICRLSGPSDGNWTFWLEANSSEALRVDLAVLDQKLVDPVKRLKNLFPDWVDVVAYSSFMSSYIF

SEQ ID NO: 186009 - protein, 50 aa, Glycine max
  Clone ID: PAT_MRT3847_13897C.1.pep
IFSTQNFPENSNHLPYQMPLKYLCNWLLSPLILYAPWTGMIFPPPLNFIS

SEQ ID NO: 186010 - protein, 74 aa, Glycine max
  Clone ID: PAT_MRT3847_138980C.1.pep
LEMGSTHPVHKEPLNARRGYPPEGAYAPLPPMPGATPSMFTHSAAFEEELVFHHAWMRRLLADNMRLIDDPMAF

SEQ ID NO: 186011 - protein, 107 aa, Glycine max
  Clone ID: PAT_MRT3847_138981C.1.pep
HIVNSGPIEYGGFMAAAVPFNPLEREENLVSAFSYFDKDGSGFIAIAEIPHACKGSGLDDVHIDAIKRSLLPPLPGGSLLGFLPSWPTPGEGDEKFVRSLSQMLLEL

SEQ ID NO: 186012 - protein, 44 aa, Glycine max
  Clone ID: PAT_MRT3847_138982C.1.pep
SDCTITHYRCYTDIEALKCLLKLPYTLLRQSHSSQKLQERSTCT

SEQ ID NO: 186013 - protein, 84 aa, Glycine max
  Clone ID: PAT_MRT3847_138983C.1.pep
FSDFETLGVLSAFPVFVVFLPSVGSVLVSPLKLGVPVVCPPGAFRVPEVLFFFAQDNFQAPGFFSFLRGPAASAPVVSPVSARV

SEQ ID NO: 186014 - protein, 205 aa, Glycine max
  Clone ID: PAT_MRT3847_138984C.1.pep
TRQGPHSVTHKVVLKLALDIARGMQYLHSQGILHRDLKSENLLLGEDLCVKVADFGISCLESQTGSAKGFTGTYRWMAPEMIKEKRHTKKVDVYSFAIVLWELLTGLTPFDNMTPEQAAYAVTHKNERPPLPCDCPKAFSHLINRCWSSNPDKRPHFNEIVTILESYIEALEQDPEFFSTYKPRPNNIILRCLSKCSNIFASCKA

SEQ ID NO: 186015 - protein, 72 aa, Glycine max
  Clone ID: PAT_MRT3847_138985C.1.pep
SLSVGQTSISTLCTLVANSKSLAPLSRFQLFTKSRSDPIDSFYFFLNCLAHSILYPFLLTSISCFNVDPRLV

SEQ ID NO: 186016 - protein, 63 aa, Glycine max
  Clone ID: PAT_MRT3847_138986C.1.pep
GSVGMKVDPSVFLCDGFDFLEWVSFLCYWGALLLFISWGFFVVLLVCVCFYCCFGCFVLPFIV

SEQ ID NO: 186017 - protein, 54 aa, Glycine max
  Clone ID: PAT_MRT3847_138987C.1.pep
LCAGKREGRRLKAQTEHISLMADHGENPSGHLTQSGSIEDRMTLWRIPSRKIKS

SEQ ID NO: 186018 - protein, 269 aa, Glycine max
  unsure (1)..(269): unsure at all Xaa locations
  Clone ID: PAT_MRT3847_138988C.1.pep
RRRCLSSSEVKSHAPPHDAASFRPFPRREDPSKRCVQWAFLGCPGVGKGTYASRLSNLLXVPHIATGDLVRDELASSDPLSSQLSEIVKQGQLVSDEIIIRLLSKRLVAGEAKGDLGFILDGFPRTIKQAEILEGVTDIDLVINLKLREDVLLEKCLGRRXCNQCGGNFNXVASINIKVENGSPEIIMAPLLPPENCMSKLITRSDDTESVVKERLRIYNEMTQPVEEFYRSRGKLLEFNLPGGIPESWPKLLHALNLDDYEDKRSAAA

SEQ ID NO: 186019 - protein, 110 aa, Glycine max
  Clone ID: PAT_MRT3847_138989C.1.pep
MVAVTRLAKRASTFSPQMRRCLSSSEVKSHAPPHDAASFRPFPRREDLSKRCVQWAFLGCPGVGKGTYASRLSNLLGVPHIATGDLVRDELASSDPLSSQVLFFFLFTLN

SEQ ID NO: 186020 - protein, 88 aa, Glycine max
  Clone ID: PAT_MRT3847_13898C.1.pep
KPTPGKKIKKKRGGNSHVPHGKKLVGSIKKKQEAEKLIFALREGAPTAHKTRKKLRGLQPQNGFIFAKYREFFLKKQHPHCSEKPPFF

SEQ ID NO: 186021 - protein, 218 aa, Glycine max
  unsure (1)..(218): unsure at all Xaa locations
  Clone ID: PAT_MRT3847_138990C.1.pep
MAAITRLAKRAFVVSSLARRCLSSSVVNCHAPPHDATSFRPFPLREDSSKRCVQWVFLGCPGVGKGTYASRLSNLLGVPHIATGDLVRDELTSSGPLSSQLSEIVKQGQLVSDEIIISLLSKRLVAGEAKGDLGFILDGFPRTIKQAEILEGVTDIDLVINLKLREEVLLEKCLGRRICNQCGGNFNVASINIKAENGSPXIIMAPLLPPENCISKLI

SEQ ID NO: 186022 - protein, 58 aa, Glycine max
  Clone ID: PAT_MRT3847_138991C.1.pep
FLGCPGVGKGTYASRLSNLLGVPHIATGDLVRDELTSSGPLSSQVLLFFFFLLFFRSL

SEQ ID NO: 186023 - protein, 86 aa, Glycine max
  Clone ID: PAT_MRT3847_138992C.1.pep
MYNTYSSLSLQCIGFVGPGLCLIGLATAKNPAIGSAWLTLAFGLKSFSHSGFLVNLQEIAPRYSGVLHGMLLSCGDCTCFVVPQRI

SEQ ID NO: 186024 - protein, 128 aa, Glycine max
  Clone ID: PAT_MRT3847_138993C.1.pep
MDSWSGISFDRTGASSLYCCKLNVNELILFNHQSQPVEEFYRSKGKLPPLLPPAHCMSKLITRSDDTEAVVKERLRIYNEKSQPVEEFYRSKGKLLEFDLPGGIPESWPKLLQALNLDDYEEKQSVAA

SEQ ID NO: 186025 - protein, 60 aa, Glycine max
  Clone ID: PAT_MRT3847_138994C.1.pep
ALILAVYLKYLFSALVSPIFLVQFCLKIFPFDNLQLLVSVVQEGVMREVISAKSAIKSNL

SEQ ID NO: 186026 - protein, 99 aa, Glycine max
  Clone ID: PAT_MRT3847_138995C.1.pep
RCVVAYTSDLIFLQVSLNPNRRKGRKARAVSLDHSMWFHRPLRADDWILFVIFSPTANNARGYVTGQMFNQKGELLVSVVQEGVMREVISAKSAIKFNL

SEQ ID NO: 186027 - protein, 293 aa, Glycine max
  unsure (1)..(293): unsure at all Xaa locations
  Clone ID: PAT_MRT3847_138996C.1.pep
MDHRHWRFFIMLFITAAAIGLVSSLGINYGQIANNLPSQDDAVALVKSIGATKVKLYDAXLPRVLKAFANTGVELMVGLGNEYLSRMKDPKQAQAWIKANLQPYLPATKITSIFVGNEVLTFNDTSLTSNLLPAMQSVHAALINLGLDKQITVTTTHSLAVLQTSYPPSAGAFRPDLAPCLAPILSFQAKTGSPFLINAYPYFAYKANPKQVPLEYVLFQPNEGMVDPSSNLHYDNMLFAQIDAVYSALDSLGYGKYRFTVPGRSPRARRKPLESQPLRCAALPDGYELLCPM

SEQ ID NO: 186028 - protein, 45 aa, Glycine max
  Clone ID: PAT_MRT3847_138997C.1.pep
MATHRLALIIQNPSNDDEFLLVKQSRPSKFHDGEYDSFGDSDLWD

SEQ ID NO: 186029 - protein, 80 aa, Glycine max
  Clone ID: PAT_MRT3847_138998C.1.pep
IIKNHTRQNTVSSLGTLLSSIPGMRSPTIIICHIPTASKIIMVYFSRHTRWSCGIQIEQQQLLILPVERGEARFDQVEES

SEQ ID NO: 186030 - protein, 141 aa, Glycine max
  unsure (1)..(141): unsure at all Xaa locations
  Clone ID: PAT_MRT3847_138999C.1.pep
PRVRFDGNFPVDSWLPIFVNWLYPVSQLPSEAAVVNVTCGSGRGGLPTTARIRSAVNIGSSNINKRILTALGKGKKIVFLTRVDPLTVALLAGLFGVKNEILSSNASDPMLTRLPENXKSLTYLVDEXPFAFVNHDASFIT

SEQ ID NO: 186031 - protein, 81 aa, Glycine max
  Clone ID: PAT_MRT3847_13899C.1.pep
AIKLSKSQTSLNNISKLQTAKCFRRSKKMKLKPSLLARRVTLGHQTSPQAVNRCKHEINGQNQRQKIKLKGVPFCRLLAAV

SEQ ID NO: 186032 - protein, 74 aa, Glycine max
  Clone ID: PAT_MRT3847_1389C.1.pep
FGCEIRQKGTQARTSTCSPIKISRETVWKMGSKSFSLILSLNLLFFSMVSSSSSYEPPSPSPSISATLSPFNSL

SEQ ID NO: 186033 - protein, 362 aa, Glycine max
  Clone ID: PAT_MRT3847_138C.1.pep
MSSPGSAAATAILKEEVDIVIPTIRNLDFLDMWRPFFEGYHLIIVQDGDPSKVIKVPEGFDYELYNRNDINRVLGPKAHCISFKDSACRCFGFLLSKKKYIFTIDDDCFVAKDPSGKEINALEQHLKNLLSPSTPFFFNTLYDPYREGADFVRGYPFSLREGVPTAASHGLWLNIPDYDAPTQLVKPLERNNRYVDAVMTIPKGTLFPMCGMNLAFNRELIGPAMYFGLMGDGQPIGRYDDMWAGWCVKVISDHLGLGVKTGLPYIWHSKASNPFVNLKKEYKGIYWQEELIPFFQSVSLPKECTTAQKCYIELSKQVKAKLGKVDEYFNKLADAMVTWIEAWDELNPSGPKSEALPNGSAK

SEQ ID NO: 186034 - protein, 58 aa, Glycine max
  Clone ID: PAT_MRT3847_139000C.1.pep
YSISDNQAGARLAHVCFHTCKSKCSKNKTQLKFIMLDHNSHGFWATAVSPRVHKLLSS

SEQ ID NO: 186035 - protein, 155 aa, Glycine max
  unsure (1)..(155): unsure at all Xaa locations
  Clone ID: PAT_MRT3847_139001C.1.pep
EGEPKRCEGFAFRKTILIGXXDMRPGEVKAVMEELAAKYRGNAYNLITKNCNHFCNDACLRLTGNPIPSWVNRLARIGFMCNCVLPVTLNSTKVRHHKMEEKQCEGEKQALATKAKKLSASNSSSSSPEGLRRGRSRNRRALPPSSPLIIGSSSS

SEQ ID NO: 186036 - protein, 68 aa, Glycine max
  unsure (1)..(68): unsure at all Xaa locations
  Clone ID: PAT_MRT3847_139002C.1.pep
ATGIAKRKXMSQRKTKKTKIGEREESEEREERGPRLEPWCCYIVFFQPQSLQICFKSKSINKIKSNKI

SEQ ID NO: 186037 - protein, 83 aa, Glycine max
  Clone ID: PAT_MRT3847_139003C.1.pep
IQSMHLKSMKNMIRADMTMDTDPHQFSRSLSAYNAVLTQGQVIHEIRILQSWMILPMINPAIVAVGWINDYGYLYTAWGHAVG

SEQ ID NO: 186038 - protein, 30 aa, Glycine max
  Clone ID: PAT_MRT3847_139004C.1.pep
LGPCKCSHSHHAHISTCASGITVDSLTIES

SEQ ID NO: 186039 - protein, 86 aa, Glycine max
  Clone ID: PAT_MRT3847_139005C.1.pep
ARARQGLGPVKSADFKNGAAQVVSYSAFVADHCFEGPDWFGSPDAPSISAGGVNAILQGSAGFFAWHIVQDSNWVLSQAASLAWGM

SEQ ID NO: 186040 - protein, 67 aa, Glycine max
  Clone ID: PAT_MRT3847_139006C.1.pep
NFLWHYWLIIYLIPSADIATSIHPLVFLQKKLQVNSPFFLHIDCMTHIWPMIFPITDTHGNLISMQT

SEQ ID NO: 186041 - protein, 42 aa, Glycine max
  Clone ID: PAT_MRT3847_139007C.1.pep
RFSAAVPIGCLSGKMSAPNDTFALTPPSSYSPGIISYCLRVN

SEQ ID NO: 186042 - protein, 52 aa, Glycine max
  Clone ID: PAT_MRT3847_139008C.1.pep
SWALCVQNCLGTFQRIGVGIKCCPKQIGNLLSIAYINGILTQTHTGCFVVNF

SEQ ID NO: 186043 - protein, 237 aa, Glycine max
  Clone ID: PAT_MRT3847_139009C.1.pep
MIQQSIASKFCEYSLGNCKMDLPNRDKQLTVAVKKTALRDLQNDNKIMVPTSVGSSSFFKDKDLGTDSSRVSGTKRPLSDYPLNHHLQQSPSNNAANGHLVYVRRKSEAELSKGTAFENPTPVESNYVTASSGPTTIGNPKGLKNLHWEERYQQLQMFLRKLDQSDQEEYIQMLRSLSSVELSKHAVELEKRSIQLSLEEAKELQRVAVLNVLGKSVKNFKAPADHDECSDKLKALS

SEQ ID NO: 186044 - protein, 63 aa, Glycine max
  unsure (1)..(63): unsure at all Xaa locations
  Clone ID: PAT_MRT3847_13900C.1.pep
GYHNAPSSCADHNSQFPXRMPSTATNFWLLFXSLLLXTNTITYSHITYLKLWLKKGLKTMCYH

SEQ ID NO: 186045 - protein, 66 aa, Glycine max
  unsure (1)..(66): unsure at all Xaa locations
  Clone ID: PAT_MRT3847_139010C.1.pep
NLPLICIFIRNINVLVDVETVNNSNVYSFLXEKQEFINIVETVYREARKARGPPIAPKDYSTTQLN

SEQ ID NO: 186046 - protein, 98 aa, Glycine max
  Clone ID: PAT_MRT3847_139011C.1.pep
PKGLKILHWDERYQQLQMFLRKLDQSDREEYIQMLHSLSSVELSKHAVELEKRSIQLSLEEAKELQRVAVLNVLGKSVKNFKAPADYDECSDKLKTLS

SEQ ID NO: 186047 - protein, 96 aa, Glycine max
  unsure (1)..(96): unsure at all Xaa locations
  Clone ID: PAT_MRT3847_139012C.1.pep
DPVPPWNWPTSTSNALFTLTTTAPCAPSTLTSTSTNAPFTLPTATPNAPFTLPSTTPACPXTLATRTTNAHSTLPTTNAPGPSTLARASSLSFSRR

SEQ ID NO: 186048 - protein, 319 aa, Glycine max
  unsure (1)..(319): unsure at all Xaa locations
  Clone ID: PAT_MRT3847_139013C.1.pep
MEPDRLNSPTTFEMPLEVMGHELQFSQDPNSKHLGTTVWDASLVFAKFLERNCRKGRFSPAKLKGKRVIELGAGCGVSGIGMAYLGCDVIVTDQKEVLPLLQRNVERNISRIMQKNPDSFGSIKVAELQWGDESHIKAVGPPFDYIIGTDVVYVEHLLEPLLQTISCFIWTKDYNYVGQFLLYLDQGLQLXLGYEIRSTSVHEKMLQMWKRNFDVKTVAKSKMDETFQHPSIQLFIMGFKQSAECTENPGQATVEKVDVETVVEDESSEGNVVVEGSGLVEENVGDHSKPISQNAKLSEWEARRYGAMAARVLKDVKIS

SEQ ID NO: 186049 - protein, 63 aa, Glycine max
  Clone ID: PAT_MRT3847_139014C.1.pep
AYPISKPNPLKSSFAWGLLKLGLPIFFFSNFIDQRVVLIVRAWGGINFRSQFLPFKGFFLFVW

SEQ ID NO: 186050 - protein, 76 aa, Glycine max
  Clone ID: PAT_MRT3847_139015C.1.pep
GGDPIHMLRAYMLEGLIARLESSGSIIYNALKCEQPTRTDLMTYMHILYQICPYWKSAYTSANAVIAEAVLNDSRI

SEQ ID NO: 186051 - protein, 344 aa, Glycine max
  Clone ID: PAT_MRT3847_139016C.1.pep
MYSSIIYCSVYFPLADLLKIVERTVRSEHQRSPNRPIYLVGESLGACLALAVAALNPDIDLVLILANPATSFRRSSLLLLTPLLEALPDPLSPGLSNILRSTGGESLRMVLDNVVQGLPLQNTAGELVKDFTAFSLSLPVLADILPKETLVWKLKMLKSASAYAHSRLYAIKAQTLILCSGNDQLLPSQQEGERLLKLLPKSKCQLRKFDDSGHFLFLEDSIDLVTIIKGTSYYRRGKYHDYASDFIPPTLDEAKNIIESNSLFNLIASAVMLSTLEDGTLVKGLAGIPSEGPVLFVGYHMLLGLEKIPLVSRIFLERNILLRGVAHPMMFMRSKNGRLPDLSS

SEQ ID NO: 186052 - protein, 52 aa, Glycine max
  unsure (1)..(52): unsure at all Xaa locations
  Clone ID: PAT_MRT3847_139017C.1.pep
SIHNQYIFFSSNSTNYQFMTLLVHLVELYFHNKXXHTNSSYLFIASNTKPTL

SEQ ID NO: 186053 - protein, 62 aa, Glycine max
  unsure (1)..(62): unsure at all Xaa locations
  Clone ID: PAT_MRT3847_139018C.1.pep
LKWGPPFFYGGDKLKPLMPPPFAADWIRIXKMFFGKVPKGFPFAPKQKSNASDKAKKGLFWG

SEQ ID NO: 186054 - protein, 122 aa, Glycine max
  Clone ID: PAT_MRT3847_139019C.1.pep
KFPRPTDGPGAPNAHGETLQYNLKAKGGRGFYREQYSDPWMLLQLAPDLSMTVGDGCENAPWETEDSNALTLEYITYAPIWPCGPRRAGQGHDGAWTPQELVCATRLQRAFVAIVRDNPTAE

SEQ ID NO: 186055 - protein, 125 aa, Glycine max
  Clone ID: PAT_MRT3847_13901C.1.pep
GGGTVYCPPHTGGGNLFLFSGEGVQGGFARFPPAWVGAMGLAPLKKGEPPFGKKGFPPVFFFPAHPRGRKGGVSLFFEKKGGGFGPPQGEKKGFAFPGPPGKKGVFFWPRVARAPPAFVWGGIFV

SEQ ID NO: 186056 - protein, 157 aa, Glycine max
  unsure (1)..(157): unsure at all Xaa locations
  Clone ID: PAT_MRT3847_139020C.1.pep
LVGIDRKKRELTNWLTEKEGPVKVVVGPGGIGKTAIVKNVYNMQEQVSLQKKGTSYFEFCAWITMSGPQVDDHNMLIIRQIIENILEKDPGASATLQKETTAIHSLIRKVREYLKDKRYLIVFDDVHSSKFWNVIKHALTPXRSKSSKVIITTRDEN

SEQ ID NO: 186057 - protein, 73 aa, Glycine max
  Clone ID: PAT_MRT3847_139021C.1.pep
SPIHCRDYAMVVCSNLLSTILALLANLIYARKQPACDRLVNISNGIQSPCSNTALVNSLLDQSKLPITFTINL

SEQ ID NO: 186058 - protein, 634 aa, Glycine max
  Clone ID: PAT_MRT3847_139022C.1.pep
MHIHGCLCIISLMTYYDPNFEWSTIYFRLIFLIGTASFQVPTVLDKQGAQLLAVAFLVVSRTWVSDRIASLNGTTVKFVLEQDKASFIRLIGLSVLQSAASSFIAPSIRHLTARLALGWRIRLTQHLLKNYLRNNAFYKVFHMANKNIDADQRITHDLEKLTADLSGLVTGMHLDMFDACSFLLLILLTVVFVKVHMENEAINRTVTPDFGDLISQEQQLEGTFRFMHERLCTHAESVAFFGGGAREKAVSIPSVFNIFSLRMVESRFRELLSHSKYLLKKKWLFGILDDFITKQLPHNVTWLLSLLYAMEHKGDRASISTQGELAHALRFLASVVSQSFLAFGDILELHRKFVELSGGINRIFELEELLDAAQSGDSINSSITSPIWGYHGKDAISFSKVDIVTPTQKMLARELTCDIELGKSLLVTGPNGSGKSSIFRVLRGLWPIASGRLSRPSEDVDQEAGSGCGIFYVPQRPYTCLGTLRDQIIYPLSREEAQFRALKMHGKGEKHPDPRKMLDTHLQVILENVRLNYLLERDNNGWDANLNWEDILSLGEQQRLGMARLFFHKPKFGILDECTNATSVDVEEHLYGLANKMGITVVTSSQRPALIPFHSMELRLIDGEGNWELRSIKQ

SEQ ID NO: 186059 - protein, 100 aa, Glycine max
  Clone ID: PAT_MRT3847_139023C.1.pep
HWSSTKMIANPFTSYAFLMKALVCNENDVKLFRNRGIVIMDNYTEKEVCDLFKRLCGKVEYGEDKFYFAGLIEQIFEYKRTPRSWRKILKFSWLKTRTST

SEQ ID NO: 186060 - protein, 78 aa, Glycine max
  Clone ID: PAT_MRT3847_139024C.1.pep
CCEKTTEGEYNKRSHTHTFLSLFLSLSALHLPFFFSFLSLSFVRFSTCFFLFHWIVQIPSYNSQISISVNLVDLWGVL

SEQ ID NO: 186061 - protein, 82 aa, Glycine max
  Clone ID: PAT_MRT3847_139025C.1.pep
IILYIHINNEITRNIESYFYINTLRLFMNLHSICILMIQSWCLIISIPVLHFDHYHFFISCSMLSLYLVLFTFLSSAFFIIF

SEQ ID NO: 186062 - protein, 94 aa, Glycine max
  Clone ID: PAT_MRT3847_139026C.1.pep
LCRILIVTIRCCQVLNIQNDCKQILGLPWWPFLYFFFLFLFHFGFTVFSKLHFFAPSTCGGKQTKTAPIAKMVDSKISAVYNQFMYRVFASIIS

SEQ ID NO: 186063 - protein, 1357 aa, Glycine max
  unsure (1)..(1357): unsure at all Xaa locations
  Clone ID: PAT_MRT3847_139027C.1.pep
RIGAMLRSLMFKDGEFGYLAKIATAVIRTDLIXNISLIXGLIFSGAILRFLSRFFCTISNNVLLSSFMSRVHYSFNYITGTLSLLFSXIWTNLHVSFYFQNLVFYKISHVDRLIFNREQIIATELARFGSELSEIVQDDLTAVTYGLLYTWRMCSYASPKYVFWILAYVLGAVAVIRNFYSSFGKLMSIVQQLEGEYRQLLARLRTLLESIAFYGXERKEEAHIQQKFKTLVRHMYNVLHDHWWFGMIQDLLLKYLGATVAVILIIDPFFSCHLTPDSSTXGRAEMLDDLRYDTSVIFAFFQSLGTLSISARARLFFHKPKFGILEECTNATSVDVEEHLYGLAKDMGITVVTSSQRPALIPFHSMELQXLMDERTLRVESGSNLLITGPIARGKSSLFXVVGDFSPWXSGHIVKPGIGSDLNKEIFYVPQRPYTAVGTLRDQLIYPLTEDQEIELLTDRGMVELLKNVDLEYLLDRYPPEKEVNWGDELSLGEQQRLGMARLFYHKPKFAILDECTSAVTTDMEERFCAKVRAMGTSCITISHRPALVAFHDVVLSLDGEGGWSVHYKREGSSTEMGIDTMKASEKKRQSDAKAVQRAFSMSKKDSAFSSPKAQSYFAEVISSSPSINHTISPSAVPQLHGLSIKKGSIVVVAVMRVFVGQGGGGYGSDGSGGGQLNGDWAGDNNAGDDGGKWHLVVWQQWPVVGRGGNDNCGGCDGRLRQKQGKHLRNVGVIRNCYLEGRGFLSPDMHVSNKPFMSLNVDDAYTNTDVGISAHFSYRDRFLSGTTVKFVLEQDKASFIRLIGLSVLQSAASSFIAPSIRHLTARLALGWRIRLTQHLLKNYLRNNAFYKRQEHAWDIDAIAGWGWGRVFHMANKNIDADQRITHDLEKLTADLSGLVTGMVKPSVDILWFTWRMKLLTGQRGVAILYAYMLLGLGFLRTVTPDFGDLISQEQQLEGTFRFMHERLCTHAESVAFFGGGAREKAMVESRFRELLSHSKYLLKKKWLFGILDDFITKQLPHNVTWLLSLLYAMEHKGDRASISTQGELAHALRFLASVVSQSFLAFGDILELHRKFVELSGGINRIFELEELLDAAQSGDSINSSITSPIWGYHGKDAISFSKVDIVTPTQKMLARELTCDIELGKSLLVTGPNGSGKSSIFRVLRGLWPIASGRLSRPSEDVDQEAGSGCGIFYVPQRPYTCLGTLRDQIIYPLSREEAQFKALKMYGKGEKHADTRNLLDTRLKVILESVRLNYLLEREGSNWDANLNWEDILSLGEQQRLGMARLFFHKPKFGILDECTNATSVDVEEHLYGLAKDMGITVVTSSQRPALIPFHSMELRLIDGEGNWKLRLIKQ

SEQ ID NO: 186064 - protein, 100 aa, Glycine max
  unsure (1)..(100): unsure at all Xaa locations
  Clone ID: PAT_MRT3847_139028C.1.pep
VGSSQQCVARTFRVLNPQNPFVLNTRLGKLTLPQGTPRCVKRHPLPIRGGARPKNAFLMNMPNAVLERWRYYARELDFEXPTMTWTYIKRAVSLCIPFGK

SEQ ID NO: 186065 - protein, 138 aa, Glycine max
  Clone ID: PAT_MRT3847_139029C.1.pep
KIGPADGGLAFEGIKRPTHWTHNPPTLAFSFSLSLFLKKGKLGVLMVLPAIGKCVWGGGEKKKRRNLDLLGLGWGKGCEGGDGEQCKRESFSFETKRGSRFGIKEEENFVSSRNSDAHRGKTRCWFPPQERVWAHQCR

SEQ ID NO: 186066 - protein, 171 aa, Glycine max
  Clone ID: PAT_MRT3847_13902C.1.pep
METVDPEVSITCMDLTHVKKTFQLALLCTKKNPSERPTMHEVARVLASLLPAPPSKNIFVPSSKTIDYAQFVIQKGKTNTTSPLYKWIGYNLSSSLMINGLFALRMLYQITASRHFMFNVSIIHAKAKCWGEECGDLIDSKENRAYRRFPLYFVQVFLFSGTGMVFCRHNL

SEQ ID NO: 186067 - protein, 88 aa, Glycine max
  Clone ID: PAT_MRT3847_139030C.1.pep
PFAIKVNVDMVNVDVVVVHAVAVHRVQDKVLFALDLNVGLDIQSSLFNFFERNKVGLDLSPWDEQWIGGVMEVVAQATTMLYIIRCWL

SEQ ID NO: 186068 - protein, 137 aa, Glycine max
  unsure (1)..(137): unsure at all Xaa locations
  Clone ID: PAT_MRT3847_139031C.1.pep
RRRGSESKEAAQDYGSDVSDHAQMLHEDKPVNQQDAVTQKSVSNVPSEEGGKFVDDKSKATRDSINGQFKEXDCLKKIQQPTESKLSKQILKLIMWWLNLRYVFGKCKKVFXVNLGFNWIMSTHYCTIYESSKPHYP

SEQ ID NO: 186069 - protein, 58 aa, Glycine max
  Clone ID: PAT_MRT3847_139032C.1.pep
NICQNLYNKSSCAPSVIRFIEGSKIHICSVQIVSHTSRDFLVVPQYMLIIISSILADE

SEQ ID NO: 186070 - protein, 139 aa, Glycine max
  Clone ID: PAT_MRT3847_139033C.1.pep
MSNTGIAVDNECVNEFNAFKLRNTHRYIVFKIENAKEIKIEKKGETTASYDEFLKQLPDNDCRYAVYNFEYNQADGFRSKIVFFLWAPDTAPTKSKMLYAGTKDTLKKNLQGLQVEMQGTDKSEVDQSEVLAKCQSLSK

SEQ ID NO: 186071 - protein, 137 aa, Glycine max
  unsure (1)..(137): unsure at all Xaa locations
  Clone ID: PAT_MRT3847_139034C.1.pep
ELPCFVGGLAWTTDHDALDKAFYNSAETGESNVINDRQTEKYKRFGFVTFCTEQAMRDAFEGMNRHXTSHRCNITVNEAQSPGKGGXGGRGDYERGGADYGGGRGYNRGEGRYGGGRRRRERGYNRNGAGGRYGGYG

SEQ ID NO: 186072 - protein, 76 aa, Glycine max
  Clone ID: PAT_MRT3847_139035C.1.pep
GSFQRATPISLWFALTSGYFFPFFAPLAGPPSSQKIFFPPSKLSKLRDPLLLGSPLMGIKPFLLIFKGTGYSRFQN

SEQ ID NO: 186073 - protein, 161 aa, Glycine max
  Clone ID: PAT_MRT3847_139036C.1.pep
MSMASPSSRNQTSSPRSYSSAFASTSTSTSSTSFSPVRVQEHRPLPSKSERNKGAVSSSSEKRTCMCSPTNHPGSFRCAYHKQLAEKQKQQTTSLSCRRLNLLRPAMKNSVVRIGGVEGDQIVRRALTTTLIRPSSHHLRRRETFQPRPTRLSLMSKAQDH

SEQ ID NO: 186074 - protein, 388 aa, Glycine max
  unsure (1)..(388): unsure at all Xaa locations
  Clone ID: PAT_MRT3847_139037C.1.pep
MSMSIMHAMSIRSSAFFCFQINCSDSKQGRGFGENTNSNRIKTNKSDKGLVSQQSKGSANKQSRPLSSQAPRLSSQLDGKSRNDFLDVDFEERLKAVRRSALEQKKAEEEKEFGAIDYDAPIPSDNTTIGVGTKIGVGVAVAVFGLVFAFGDFLPSGSVSPTEDSAVVNSKLSEEDKATLQSRLKEFEATLSNSSSDATALDGAAITLAELGEYASAASLRDDLVSEKPMMLMFFVCLFIVKYELKDYEGSVAAYKSSASXSENLSKNSDSNPTDSQKLEPVQVAVQLLLAYPEHLHVSGNPTDSHKLNPVQVELLLGKAYSDWGHVRDAVAVYDQLISTHPNDFRGYLAKGIILKENKNIGDAERMFIQARFFAPDKAKALVDRYSR

SEQ ID NO: 186075 - protein, 103 aa, Glycine max
  Clone ID: PAT_MRT3847_139038C.1.pep
WGVSDGLGVRGAVGGVLGEVGRWRVVSPLGGVLGGCGGEVWGVEHPCMDLLTTMAFDDRLTTMPFYDLLTTMPLYDLLTTMTPYDLVPRAPLFLSRGCASIIL

SEQ ID NO: 186076 - protein, 82 aa, Glycine max
  Clone ID: PAT_MRT3847_139039C.1.pep
NCISVASVENIEFKNTARFPNNVEDHQDQIPSVMDAWKIFMSEKYLLNAAGETYSFTLDAKGTCSFYCSPHQGPGMVGKVTV

SEQ ID NO: 186077 - protein, 284 aa, Glycine max
  Clone ID: PAT_MRT3847_13903C.1.pep
MDTRGHDEEEPPKPVVLITGCSTGGIGHALARAFAEKKCRVVATSRSRSSMAELEHDQRFFLEELDVQSDESVRKVVDAVVDKYGRIDVLVNNAGVQCVGPLAEAPLSAIQNTFDTNVFGSLRMVQAVVPHMATKKKGKIVNIGSVAALASGPWSGAYTASKAALHALTDTLRLELGHFGIDVVNIVPGAIKSNIGDSAIASYNRMPEWKLFKPFEAAIRDRAYFSQKSKTTPTDEFAISTVAAVLKEKPPAWFTYGHYSTVMAIMYHLPISVRDFVLKKAMKG

SEQ ID NO: 186078 - protein, 62 aa, Glycine max
  Clone ID: PAT_MRT3847_139040C.1.pep
QLSVGTSFPHKRCSRRPLLPRPQAVPSRTQRIMESVSVSGEVGGAGGAYSYEALKRLDQLWS

SEQ ID NO: 186079 - protein, 42 aa, Glycine max
  Clone ID: PAT_MRT3847_139041C.1.pep
SFPFMEPWRGLIKYSTAQQYIFLFHSFTPLGGKVNSSQHDPY

SEQ ID NO: 186080 - protein, 51 aa, Glycine max
  Clone ID: PAT_MRT3847_139042C.1.pep
LFGIAVHFKFPYVSYRLLSVFRLPTTILIYAPVLLYRTRVSTALSGDRTLV

SEQ ID NO: 186081 - protein, 53 aa, Glycine max
  Clone ID: PAT_MRT3847_139043C.1.pep
RFSHLVRAWGLARWSREFCRPSYSSLVMGLEFQCIGSEMRGQGPGLSGTRTGL

SEQ ID NO: 186082 - protein, 208 aa, Glycine max
  unsure (1)..(208): unsure at all Xaa locations
  Clone ID: PAT_MRT3847_139044C.1.pep
PHTRLMRRYRSAPHAEXYIIVADNIALIISISEYYNESLQIPWRGVXIACAIDIFFTLTSGLINATTNQQPGLDIITEYIIAYMYTDRTVDNMCLKVYSLHXALASTHXLSFCQELLNIATHIVKIPPRTMDIAHVVRTILSAYIYTVSVWRMMRTIPHLCDTTMLDPDRRLTXPRDNVFYEASDIWXLIGPRVTVRDLGEYAKVNSF

SEQ ID NO: 186083 - protein, 86 aa, Glycine max
  unsure (1)..(86): unsure at all Xaa locations
  Clone ID: PAT_MRT3847_139045C.1.pep
YNPENAVRSIFVAPFRGGMPIRVVTFPNSIVQIXEPGMNPRFHLLSTTTNGDFVQGEDLGLVKVNVACXAAVGLTSCYTRTPLWQS

SEQ ID NO: 186084 - protein, 86 aa, Glycine max
  unsure (1)..(86): unsure at all Xaa locations
  Clone ID: PAT_MRT3847_139046C.1.pep
DMYNFFSPLNPVRAHMEIGPDGTVTGEADAELATQGEAVAAMSKDRANMQHRYIXVFLHSTTGASTGAYSSQVMQGMGVSAAQATY

SEQ ID NO: 186085 - protein, 81 aa, Glycine max
  Clone ID: PAT_MRT3847_139047C.1.pep
MGKEKLSFKEVHHSHSPKTTLWWFFLVATCIKVLLFPSYRSTDFEVHRNWLALTHSLPLSQWYFDETSPWTLDYPLIGYIV

SEQ ID NO: 186086 - protein, 63 aa, Glycine max
  Clone ID: PAT_MRT3847_139048C.1.pep
FQYGSQAEMVRKRYWSFNTQIGARIKAGRAHFDLLQYKDKERGDPKVGSSTREVVEMISQSVK

SEQ ID NO: 186087 - protein, 130 aa, Glycine max
  unsure (1)..(130): unsure at all Xaa locations
  Clone ID: PAT_MRT3847_139049C.1.pep
NLLYEKEGQSPWYDNLCRPVTDLLPLIASGVRGVTSNPAIFQKAISSSNAYNDQFRELVQTGKDIESAYWELVVKDIQDACRLFEPIYDQTDGGDGNVSGEVSXRLADDTEGTIEAAKWLHKVXDRPHVI

SEQ ID NO: 186088 - protein, 42 aa, Glycine max
  Clone ID: PAT_MRT3847_13904C.1.pep
YDEHQHMVHEAVYYQAEAEEHMSTVDLKNALENHMYNIMNTI

SEQ ID NO: 186089 - protein, 439 aa, Glycine max
  Clone ID: PAT_MRT3847_139050C.1.pep
MASIFKLSTPSPAASLSEALRPRDSRFLSFNPSSNAINYKINLSASLRSIHSLPLKTSLRIKCSQTDGNGSPAKRTVLHDLYEKEGQSPWYDNLCRPVTDLLPLIASGVRGVTSNPAIFQKAISSSNAYNDQFRELVQAGKDIESAYWELVVKDIQDACKLFEPIYDQTDGGDGYVSVEVSPRLADDTEGTIEAAKWLHKVVDRPNVYIKIPATEACVPSIKEVIANGISVNVTLIFSLARYEAVIDAYLDGLEASGLNDLSRVTSVASFFVSRVDTLIDKALEKIGTPEALNLRGKAAVAQAALAYQLYQRKFSGPRWEALVKKGAKKQRLLWASTSVKNPAYSDTLYVAPLIGPDTVSTMPDQALQAFIDHGTVSRTIDSNASEAEGIYNALQKLGIDWSFVGSQLELEGVDSFKKSFDSLLDSLQEKANSLKLVSH

SEQ ID NO: 186090 - protein, 72 aa, Glycine max
  Clone ID: PAT_MRT3847_139051C.1.pep
LSVFFFTKPKIRACVCAIGALHPAENGSVAPASKISLYCTYLCYSALAREPRDYERRGFHTHSKGVSTGTLT

SEQ ID NO: 186091 - protein, 201 aa, Glycine max
  Clone ID: PAT_MRT3847_139052C.1.pep
MASVSKLSTPNPLASLSEALRPRDSRFLTFKPSSIAFNHKTNLSASLRSIHSLPLKTSLRIKCSQTDGNGSPAKRTVLHDLYEKEGQSPWYDNLCRPVTDLLPLIASGVRGVTSNPAIFQKAISSSNAYNDQFRELVQTGKDIESAYWELVVKDIQDACRLFEPIYDQTDGGDGYGSGEVSPRLADDTEGTIEAAKWLHKG

SEQ ID NO: 186092 - protein, 150 aa, Glycine max
  unsure (1)..(150): unsure at all Xaa locations
  Clone ID: PAT_MRT3847_139053C.1.pep
MRPEYRKVGSCYKIKCSQTDGNGSPAKRTVLHDLYEKEGQSPWYDNLCRPVTDLLPLIASGVRGVTSNPAIFQKAISSSNAYNDQFRELVQAGKDIESAYWELVVKDIQDACKLFEPIYDXTDGGDGYVSGEVSPRLADDTEGTIEAXKW

SEQ ID NO: 186093 - protein, 142 aa, Glycine max
  Clone ID: PAT_MRT3847_139054C.1.pep
VMKQKTPSSPTTARSVLKKQGHKSLQSPPPPPPPPRLRASSKAPKSPPEVVNRESISSTRAESVPPDLKNVSRAKRGVVVNKPKLNEEVLGSQKAEEGKIVIVARPRRRVGDFGSRKSEDDDSHAKKKKELLHEKLEVSENL

SEQ ID NO: 186094 - protein, 37 aa, Glycine max
  Clone ID: PAT_MRT3847_139055C.1.pep
PLVYMLDISSENVVSKNNKSKSYNHTYKVNIFILKKK

SEQ ID NO: 186095 - protein, 145 aa, Glycine max
  Clone ID: PAT_MRT3847_139056C.1.pep
ILQAAVAQAALAYQLYQRKFSGPRWEALVKKGAKKQRLLWASTSVKNPAYSDTLYVAPLIGPDTVSTMPDQALQAFIDHGTVSRTIDSNASEAEGIYNALQKLGIDWSFVGSQLELEGVDSFKKSFDSLLDSLQEKANSLKLVSH

SEQ ID NO: 186096 - protein, 71 aa, Glycine max
  Clone ID: PAT_MRT3847_139057C.1.pep
FKVCFKLRWLRETIKFMNAFSLKTKFKFCKLISLLLISRYYVATIDDSLFLFIHLFIYYYGKQPWIFILSL

SEQ ID NO: 186097 - protein, 48 aa, Glycine max
  Clone ID: PAT_MRT3847_139058C.1.pep
SYWLVLKIRPCSCLYVPNPILTQVLIILICYFDYVLWHTDTLGVGMYG

SEQ ID NO: 186098 - protein, 160 aa, Glycine max
  Clone ID: PAT_MRT3847_139059C.1.pep
FFLNFLFAAMLTWSLPLRIPAYSMLGFSLLYYILALIVAMSGYSVAWGGSAKMSGLLFVFGGATSLVLLLSIIIIVVLYAAWCSSPNEVGGELTEKHSSECIIKFQDNCNHALECKVESGKILLVLVNGGHEHRIMFNKQPIMNENTYGVLLEWFLYIFT

SEQ ID NO: 186099 - protein, 239 aa, Glycine max
  Clone ID: PAT_MRT3847_13905C.1.pep
VRELRIQPINHITAPQENLGKHKQQNKTKAENLNQLYYTQSRRNKHYEMHKEAILNARNTITIVAVLIATVTFAAGINPPGGVYQEGPMGGKSMVGKTTAFKVFAISNNIALFTSLSIVIVLVSIIPFRRKPQIRLLTITHKVMWVAVAFMATGYVAGTWVILPHSPEMQWLSVVLLAVGGGSLGTIFIGLSVMLVDHWLRKSRWKKTMKESVDVAADYQKESENSDFESSYLQGYHSY

SEQ ID NO: 186100 - protein, 106 aa, Glycine max
  Clone ID: PAT_MRT3847_139060C.1.pep
SSSARFPGGLGFSVPFPSFFFQFSPFFFVLQGPSVGRVHSRGKGISSSALPYKRTPSSWLKISSHDVEDNICEFANKGLAPFHIGVILRDSHWFAHGNRGSGGNIP

SEQ ID NO: 186101 - protein, 49 aa, Glycine max
  unsure (1)..(49): unsure at all Xaa locations
  Clone ID: PAT_MRT3847_139061C.1.pep
ISAMXSTRSVFLLXSFNXVLXANLVXRSIXRPTGLTKVHHXGRVKXPVW

SEQ ID NO: 186102 - protein, 440 aa, Glycine max
  Clone ID: PAT_MRT3847_139062C.1.pep
MVETQFSVKFKSIRSVNGPEFAPNNFYGSKGILHQTSCVETPQQNGVVERKHQHLLVVARALLFHDNLPILFWTQAISQVVHIINKLPTKFLNQKSPHKVLFKCIRSITTLKVFGCLCYASTLKANQKKFDARARKCVYLGVRSSVKGHLLFDLKIRELLVSRDDLTPLPPNKKPIGCKWVFKIKFKADGSIDKHKARLVAKGFTQTAGLDYIETFNPVVKMTIVRFVLSLAASQGWHLHQLDVNTAFLHGDLNEKVYMKIPPGLIVNNLALVCKLQRSLYGLKQANIQWNAKLTSTLLDYGFQQSKADYSLFTKRRLVGRLLYLTHTRPDICYAIGKLSQYLKSPTNIHMQVAHHILKYLKGTAGRGLSSSKAEYRALAQASCEAQWLLFLLKDLHIEQPKPVVLYCDNQATLHIAANPIFHERTKHIEIDCHVVRDKV

SEQ ID NO: 186103 - protein, 93 aa, Glycine max
  Clone ID: PAT_MRT3847_139063C.1.pep
EFHNWNPDIMGQKNSPKLIFPILTIKKREKAFPGVFPKKLSKPPFPKGLHILGIKIQFQSLRENQKRKHWGRGPPKKKEKNPPHKVTLEGVFS

SEQ ID NO: 186104 - protein, 49 aa, Glycine max
  Clone ID: PAT_MRT3847_139064C.1.pep
FWDAMQISTTSLDIFIYHVIDTQIYTAIESFFLLSLFMALLHASSFLLN

SEQ ID NO: 186105 - protein, 45 aa, Glycine max
  Clone ID: PAT_MRT3847_139065C.1.pep
LTLYQVVSQLQCKHGHSSFQCASATRSQFHTNIRGAAGIRYHANR

SEQ ID NO: 186106 - protein, 37 aa, Glycine max
  Clone ID: PAT_MRT3847_139066C.1.pep
PLNKLYQFIYATHTPSHLTNILEHLFANSHDPIPTRS

SEQ ID NO: 186107 - protein, 40 aa, Glycine max
  Clone ID: PAT_MRT3847_139067C.1.pep
GCHYNYLFLLGRKLFDHPILFFFLLFKFFFLFLMSFIIIF

SEQ ID NO: 186108 - protein, 49 aa, Glycine max
  Clone ID: PAT_MRT3847_139068C.1.pep
TCSTLPPGGNQGHSLQVQVIQSNRHVQKKSKQGFISTKGSVYLFFLNLN

SEQ ID NO: 186109 - protein, 77 aa, Glycine max
  Clone ID: PAT_MRT3847_139069C.1.pep
VQKSKYKRNGIELYFVNNFHKSFFQSCYGQDIQFATLPSFNQVTSCPSTVPTFDQTSKITNLLTSKPSMSTKSVSVR

SEQ ID NO: 186110 - protein, 339 aa, Glycine max
  Clone ID: PAT_MRT3847_13906C.1.pep
MDNNHDKVFFCFVPMIYFCLLFLFSILVLLFDRPTDDFRFFHFILLALASIKNLKLNKHHYASWMVHLGGESLITGVADRIGVGVHFNPFVTWNGKLFKYGVVRMHDLLQDVQYWEKFYLCGRLQKPVHIVVDNLDVSSTNSVNLRAAVSAALLLLPSEFTEADLYAKVCSLSYTGDIRMLFAEDKSKVFLGCYLSRMWYGNVKKIVTGQFDLFHLMYKPFLEEYEAKKLLRLSSTAKNQIHVSQDCDLSVACSLVSALPSSIRSQISMKEEIRETGRVIPDTKVSTREAAANCLQRILRQRVMVSSARQAISGFLAVGGVNATRYLAKKVNKAWKSWS

SEQ ID NO: 186111 - protein, 53 aa, Glycine max
  Clone ID: PAT_MRT3847_139070C.1.pep
IVPPLPFDYACLLLIWYFRFSHIHIFFRETLSSRLMLYQNPYRRSSFLVTPTI

SEQ ID NO: 186112 - protein, 80 aa, Glycine max
  Clone ID: PAT_MRT3847_139071C.1.pep
TYTNFPITSKKSRKKARHIPVQCDGKHKRFSTDLPHQSQVSCLLLWPKPFPDPKVYFKLVCCLPSGIASYPIGGERRIRG

SEQ ID NO: 186113 - protein, 59 aa, Glycine max
  Clone ID: PAT_MRT3847_139072C.1.pep
NTTSGTHERHYPIIPLHPSGRIHILNEPTPLMEHLQVPVARCEDVLRGPRLWLYQLMAD

SEQ ID NO: 186114 - protein, 67 aa, Glycine max
  Clone ID: PAT_MRT3847_139073C.1.pep
WLKLILYMIKYDISSSRSLYRKHRESMQASSGAGFVEAPSQPSLALYHSQLFSSLMAEYKSRPIRLE

SEQ ID NO: 186115 - protein, 59 aa, Glycine max
  Clone ID: PAT_MRT3847_139074C.1.pep
FQALATPREILLNKVPFPLPVPEILNLDKIQALTTDTVVSENGKFLYLIIRSFFFLETL

SEQ ID NO: 186116 - protein, 172 aa, Glycine max
  Clone ID: PAT_MRT3847_139075C.1.pep
NIFLNSKGYGCLSDIGLAALMNPALRATGYRAPEATDTRKAIPASDVYSFGVLLLELLTGRSPLHAKGGDEVVHLVRWVNSVVREEWTAEVFDVDLLRYPNIEEEMVEMLQIGMACVVRVPDQRPQIGEVVRMVEEIGRVINTENRSPTESRSEGSTPTPHAIETPSSSFAH

SEQ ID NO: 186117 - protein, 82 aa, Glycine max
  unsure (1)..(82): unsure at all Xaa locations
  Clone ID: PAT_MRT3847_139076C.1.pep
PXSXRXLFLLDPPLLFSSLATSTQQPFPSQTHSCLSFCSYCDIYCYLLMIPIQSSMAEEPQKPASDEEVAPAPADTPPTTQF

SEQ ID NO: 186118 - protein, 575 aa, Glycine max
  unsure (1)..(575): unsure at all Xaa locations
  Clone ID: PAT_MRT3847_139077C.1.pep
LEFVSTADPEKEPPLVTANTILSILAADYPVEKLSCYVSDDGGALLTFEAMAEAASFANMWVPFCRKHDIEPRNPESYFNLKRDPYKNKVKPDFVKDRRRVKREYDEFKVRINSLPESIRRRSDAYHAREEIKAMKVQRQNREDDPLETVKIPKATWMADGTHWPGTWLSPTSEHSKGLHAGIIHVMLKPPSDEPLLGSSDDTRLIDLTDIDIRLPLLVYVSREKRPGYDHNKKAGAMNALVRASAIMSNGPFILNLDCDHYIYNSKAMREGMCFMMDRGGDRLCYVQFPQRFEGIDPSDRYANHNTVFFDVNMRALDGLQGPVYVGTGCLFRRVALYGFDPPRSKEHHTGCCNCCFGRQKKHASLASTPEENRSLRMGDSDDEEMNLSLFPKKFGNSTFLIDSIPVAEFQGRPLADHPAVKNGRPPGALTIPRDLLDASTVAEAISVISCWYEDKTEWGNRVGWIYGSVTEDVVTGYRMHNRGWKSVYCVTKRDAFRGTAPINLTDRLHQVLPXKFGNSTFPTDXNSALRASPRMTILQRIAYLSTSIYPSHHSPLTSYCINRALTLLSHLLLV

SEQ ID NO: 186119 - protein, 82 aa, Glycine max
  Clone ID: PAT_MRT3847_139078C.1.pep
HPPPKFWSKSILTPWTFSHITTFVARATGGDKCILRLWSLIPCSTLQFGYGLAGISILRQEHSTLSQHQFPRCLALYHQLFG

SEQ ID NO: 186120 - protein, 69 aa, Glycine max
  Clone ID: PAT_MRT3847_139079C.1.pep
LCRYLVTNKSILHNGIGFIKQSSLFFFNIGIVYTFQLLASLVHSHSNTENLNPLWDHILDGFMPQLVKT

SEQ ID NO: 186121 - protein, 87 aa, Glycine max
  Clone ID: PAT_MRT3847_13907C.1.pep
PQPHTRSLSLASPRPYPSLTPPSLNLYTKGLAGGKIGQLTAGATGNAKGSNAWLRKPARYAICKRVRKIEGTGTLSGRVGGRVGGHI

SEQ ID NO: 186122 - protein, 70 aa, Glycine max
  Clone ID: PAT_MRT3847_139080C.1.pep
IILLFEVVSASQCETFSVVIPGRAADVVGIFSYVITASELELILHPYSLSGCEYRGQHLPIPFFMHPSRY

SEQ ID NO: 186123 - protein, 46 aa, Glycine max
  Clone ID: PAT_MRT3847_139081C.1.pep
TPANEMYLGGPIKKVCFSNHGLLNLDSLERAPPLVYFHSLQDLYCI

SEQ ID NO: 186124 - protein, 59 aa, Glycine max
  Clone ID: PAT_MRT3847_139082C.1.pep
IFLGFMRTEVENEIEEYMYIARLAFHSFHFKFHAVFARLSKRSGSTFPPKTAPTTRPYV

SEQ ID NO: 186125 - protein, 122 aa, Glycine max
  unsure (1)..(122): unsure at all Xaa locations
  Clone ID: PAT_MRT3847_139083C.1.pep
TTPRNPTQFPARKSSSHVAIADALPRREEPYRPSGMATTNTTSLPGARSSPSSSLLHPDKKXTETDITGARTPPTGGSGNNTTHYASQTPSKPNSKPESXTPSLDYYAYPRSPTAIDVSAEK

SEQ ID NO: 186126 - protein, 78 aa, Glycine max
  Clone ID: PAT_MRT3847_139084C.1.pep
KGMCLHLEQTFVAITNLSIAVITRPRIAEILTGGAICDSEPPFVWLRSCRAYHLIGSDRMSRNCYLRLYQCYARPDSG

SEQ ID NO: 186127 - protein, 44 aa, Glycine max
  Clone ID: PAT_MRT3847_139085C.1.pep
VKDAVHEFAPLDVLLKSPQAQVCAEDIAIWVKKYISLRGHEFSY

SEQ ID NO: 186128 - protein, 504 aa, Glycine max
  Clone ID: PAT_MRT3847_139086C.1.pep
MGSAEKEPLLTAEGTRSNSKHESSSHGQLERILSDDTLPFLNRVGPATWIELKLLFFLAAPAVIVYLINYLMSMSTQIFSGHLGNLELAAASLGNTGIQMFAYGLMLGMGSAVETLCGQAFGAQKYGMLGVYMQRSTILLSLAGVVLTVIYVFSEPMLIFLGESPRIASAAALFVYGLIPQIFAYAANFPIQKFLQAQSIVAPSAYISAATLVVHLGMSWVAVYEIGLGLLGASLVLSLSWWIMVIGQYVYIVKSERCRRTWQGFTWEAFSGLYGFFKLSAASAVMLCLETWYFQILVLLAGLLPNPELALDSLSICTTISGWVFMISVGFNAAASVRVSNELGARSPKSASFSVVVVTVISFIISVIAAPTRPPTRPVISYAFTGGEEVAAAVSDLCPLLALSLVLNGIQPVLSGVAVGCGWQAFVAYVNVGCYYGVGIPLGAVLGFYFQFGAKGIWLGMLGGTVMQTIILLWVTFRTDWTKEVEEAAKRLTKWEDKKEPLLN

SEQ ID NO: 186129 - protein, 44 aa, Glycine max
  Clone ID: PAT_MRT3847_139087C.1.pep
HPAPLIALSRTYGTLLPQLASTLISSDSLIISTHVTALPFSSPN

SEQ ID NO: 186130 - protein, 100 aa, Glycine max
  Clone ID: PAT_MRT3847_139088C.1.pep
ETRKYKLNTVNTFVIPSKFDIFQVLIEKKIYKYKIKYIEKFIANHNSYIMKKTRYQVGTGMDPHSSFQHIFVGSMHGLCMGATLNNRPQVNSTRIYCMPR

SEQ ID NO: 186131 - protein, 54 aa, Glycine max
  Clone ID: PAT_MRT3847_139089C.1.pep
PNFIQKRPISKLLKKKKRRLHGLNTPIKRSKNLNLVKGKTWPLYFKDGGLTQNT

SEQ ID NO: 186132 - protein, 209 aa, Glycine max
  unsure (1)..(209): unsure at all Xaa locations
  Clone ID: PAT_MRT3847_13908C.1.pep
MDNATFRSFLQVLPPVEFACVYGSSLHPSNHDKTIMTDYILGVSDPKQWHSENLKLNKHHYASWMVHLGGESLITGVADRIGVGVHFNPFVTWNXRLLFSCMGVVRMHDLLQDVQYWEKFYLCGRLQKPVHIVVDNXLDVSSTNSVNLRAAVSAALLLLPSEFTEVDLYAKVCSLSYTGDIRTLXAEDKNKVFLGCYLSRMWYENVNVF

SEQ ID NO: 186133 - protein, 89 aa, Glycine max
  Clone ID: PAT_MRT3847_139090C.1.pep
DPRVRPRVRNDSHVAEIANYAVSEYDKRSGAKLTLVKVSKGETQVVAGTNYRLVLKVKNGSTTTSYQATVLEKPWLHFRNLTSFKPLRS

SEQ ID NO: 186134 - protein, 46 aa, Glycine max
  Clone ID: PAT_MRT3847_139091C.1.pep
SHWRYSLHASEVVDSTYPHIMSKDCNRYILAAHIIHVDILCIDIEI

SEQ ID NO: 186135 - protein, 101 aa, Glycine max
  Clone ID: PAT_MRT3847_139092C.1.pep
LSANLLRESSMGLMTVDHPPHLLIDLGKRCSWASQTPSRACTSTTLLGCILEDMPNYEPTLQCDESLEPTCQISPSRFAEGCVREMTNWTGLGEGALSSSC

SEQ ID NO: 186136 - protein, 982 aa, Glycine max
  Clone ID: PAT_MRT3847_139093C.1.pep
MGNTNSSGQKPALHGDISESKKLTSDLRAPSASAVGVAHSNEKLRTVSYSTKNQNGFTLPRILDESSGREGNNCDNNKVKRASKGVKSISVEVSGKGNDFIKEDEPISLLPQKRINEASFTKLKSRKKTCVPSANGKSQGLKVTSQVDEPPEVDDYFSIGKDGINNSNTCLVLKPSGSTSNSLAFDELFSRNANPESVQCDNVCQNSPKTAVQSLSESKINGKPDITDSGMQQVDGDEAEQHNVTRNLDCSSLGNKKSCNVESAGCTKLDLITEESNKLVRNSPRKKSVAKRSLGSKPKLGATAKQKKSLSLTKTSLQGEGVTCSSGSKEIATCDAKMHQGCPKIFDVNKTTEQEIVGKNAEDAGDRTEFLDDETEAPDDKCEYELGMALDEDLVHLSKKPYTAKEEKSEAICPATKCEEAMPPKKGTNKTEKQKTSSLPVKHQARKGSAGKVKATVSKYAEDDGDRTELVNDEIEAPDDKCEYELRMALNEESHLSKKSDTATEEKSEVICPATKCEETMPPKKGTKKTEKQKPSSLVVKNQARKCPAGNAKATVAKELSKSNMAVSGEKIPNETGHEPEIETMEEMSLPDDKSDESAVQRNKSENFSEEKENKPIDGEQGRSNGNPTIKSSVRPAKIKSKKSGLNPSITESNTRVKTEAACFILSGHRLQRKEFQQVIKRLKGRVCRDSHQWSYQATHFIAPDPIRRTEKFFAAAASGRWILKTDFLTASSQAGKLLAEEPYEWHQNGLSEDGTINMEAPRKWRLLKERTGHGAFYGMRIVVYGDCIAPPLDTLKRVIKAGDGTILATSPPYTRFLGTGIDYAVVSPGMPRVDTWVQEFLKHEIPCVVADYLVEYVCKPGFSLERHVLYGSHAWAEKSFDKLKSKAEEIVEELVAPEDSRDDDIICKVCGSRDRGDVMLICGDESGSVGCGIGTHIDCCDPPLTAVPEEDWFCPKCSSTRNCSNKPSKRKKTVLSSSKCT

SEQ ID NO: 186137 - protein, 138 aa, Glycine max
  unsure (1)..(138): unsure at all Xaa locations
  Clone ID: PAT_MRT3847_139094C.1.pep
SVNRMPMSISGGGGAKDAPVMNLPSAALXMCLYYDGDHFLEGTETTDAYIKSAGYDCIADVYXGDDTINLEAISDKMMHSAETQEKVGWNLRHEEFITHGTAQVRPGPALCCGACTSXTARRHESTVYTIPGDIEIGG

SEQ ID NO: 186138 - protein, 162 aa, Glycine max
  Clone ID: PAT_MRT3847_139095C.1.pep
NTFKIKFHIHSSRHSQPTIYSANFSDNTFFALMNRSAAELFHACYSFASWIFKAFFAMFCSSTSKAGIILSLAAPLNWAPPVGSAVGPLVTSQYRLLVISRYQVCNPLHPRASNIASRHPPLFLVVWYTNFRSAAFSSLVPSLDPVAVLSRLRISEPILQAA

SEQ ID NO: 186139 - protein, 260 aa, Glycine max
  unsure (1)..(260): unsure at all Xaa locations
  Clone ID: PAT_MRT3847_139096C.1.pep
AGGPFAVFLNVLNCMLGVTPGPVTYALAGPIPVKISVYWSMNMNPYNLGLSGPGSPSYYSSYAANGHLPRMEIDXAEWEYPSTIYHLXEEPATTDSPPRRDGVTNMQTIPEECSPKLHESNRRSQVIWQDNIASDKIAVEKILDPGVAARTYSKTIFXDDIKIFETLLYKFGKVVNRSNGVSRXLIYLLTYRKYKLDIXLTRKTSGKRCVIXQSAYRRGEKCPKLPCSHVYHGECITKWLSINKKCPVCNTEVFGEESTH

SEQ ID NO: 186140 - protein, 61 aa, Glycine max
  Clone ID: PAT_MRT3847_139097C.1.pep
MQILVFDTQLFEEAHDHEYVRVLAFFLSDGKLLPYSSLATAPWRLQADRYYADRIRKPCYE

SEQ ID NO: 186141 - protein, 114 aa, Glycine max
  unsure (1)..(114): unsure at all Xaa locations
  Clone ID: PAT_MRT3847_139098C.1.pep
MWGKLPRSGCGHRLGYLTMSLLSDLINLNLSDITDXVIAEYIWVGGSGMDMRSKARTLSGPHEDPPKLSKRNYDGCSTGQAPGQXSESNLYPQAIVKEASMRGXNILAMCDAYT

SEQ ID NO: 186142 - protein, 171 aa, Glycine max
  Clone ID: PAT_MRT3847_139099C.1.pep
MALRKLLSKRFFDRIKTRSFERSVVSSPTMQQQVITPPSMPGASSADGGFLLRFFLLRRAVYHSGPARFPDFLSLPVGEKLREKLKGINNIAGIGDCCVALAPAPMASDAVFGSGMSVSHARKILRVPQMEKVKAKLRNVSESSVPYSECLRICVETCENHEQRAEYAKIL

SEQ ID NO: 186143 - protein, 110 aa, Glycine max
  Clone ID: PAT_MRT3847_13909C.1.pep
MDNATFRSFLQVLPPVEFACVYGSSLHPSNHDKTTMTDYILGVSDPKQWHSENLKLNKHHYASWMVHLGGESLITGVADRIGVGVHFNPFVTWNGKVLIAYNSLGGVVCE

SEQ ID NO: 186144 - protein, 253 aa, Glycine max
  Clone ID: PAT_MRT3847_1390C.1.pep
MSFECEKEYHVGCLKDHNMENLEELPVGNWFCSGNCSQIHTALMDLVASKEKDVPDPLLNLIKKKHEEKSLDIGAGLDVKWRVINWKLDSDSVETRKLLSKAVAIFHERFDPIVDSTSGRDFIPTMLFGRNIRGQDFSGIYCAVLTVNGDIVSAGVFRVFGSEIAELPLVATTADHQGQGYFQCLFSCIETLLGSLNVKNLVLPAADEAESIWTGKFGFTKLPQDEINKYKKFYRMMIFQGTSVLQKPVPETL

SEQ ID NO: 186145 - protein, 67 aa, Glycine max
  Clone ID: PAT_MRT3847_139100C.1.pep
VWWFKLPGATVRFKHMLSIVRFTSCIPGIFGRSVQCKPVYAFGPRMCIGIRESPKDIRIVTVAYSVL

SEQ ID NO: 186146 - protein, 81 aa, Glycine max
  Clone ID: PAT_MRT3847_139101C.1.pep
NGTGLFETSYRFFEAKIQYNFFVFNHPEREKTKPGSAFNLIINKEAYFRTPFLIQKFMIPTDEKAPFLTPRDIPWNSFSFP

SEQ ID NO: 186147 - protein, 198 aa, Glycine max
  unsure (1)..(198): unsure at all Xaa locations
  Clone ID: PAT_MRT3847_139102C.1.pep
MAPNTEKSSNNDFTLLQVHDSDSPMFPEKQKATSRKQFTWFLLLKLHRVLTCLSWLTNCLKATFALVKKRVSLADMSDEGPKSRGKLYRFIKIFLALSIGGLAIEIIAHFNKWNLHNMIQPWEVQGLLQWCYVAWLSFREDYVAPLVLMVSKFCIVLFLIQXLGDRLXLCLGCFWIKYKKLKPTFEADACDXEDPSTS

SEQ ID NO: 186148 - protein, 93 aa, Glycine max
  Clone ID: PAT_MRT3847_139103C.1.pep
RQPLRQMMRLFGNTTPRAWLHGHSCFGCALVGNRTLAVSRARPPALAPVVPPRVAPLVQEQALLPQKWAQRYPLKDGSEAHFASGSVSCSIGN

SEQ ID NO: 186149 - protein, 96 aa, Glycine max
  Clone ID: PAT_MRT3847_139104C.1.pep
MSNMKLELHVGIFVTCMVILSGTFCVGDTDMVDVAAINSLYVSLGSPPLQGWKPVGGDPCLELWQGVACVFSNITAIHLGGMNLGGQLGSNLNFPS

SEQ ID NO: 186150 - protein, 204 aa, Glycine max
  Clone ID: PAT_MRT3847_139105C.1.pep
MSYAYLFKYIIIGDTGVGKSCLLLQFTDKRFQPVHDLTIGVEFGARMITIDNKPIKLQIWDTAGQESFRSITRSYYRGAAGALLVYDITRRETFNHLASWLEDARQHANANMTIMLIGNKCDLAHRRAVSTEEGEQFAKEHGLIFMEASAKTAHVGIHKNSCQLEVAAVEENLSEPICINVVLYVFSALILGLDMKIYMFYVHS

SEQ ID NO: 186151 - protein, 85 aa, Glycine max
  unsure (1)..(85): unsure at all Xaa locations
  Clone ID: PAT_MRT3847_139106C.1.pep
CKWKVLVFFVASILVAWQCHAYDMFPLRMNTGYGAPTPGGKMPKXRLAVEDHTIFGFETIPEKGVEPPKDYIHGDHFKSDSKTVN

SEQ ID NO: 186152 - protein, 125 aa, Glycine max
  Clone ID: PAT_MRT3847_139107C.1.pep
MAKPEVFFYMTIFVLSARRILMELYVDITPLTDDNVRVLCTDDKVVGQERRVARVQASIFHLCWIPSLMCNGGDYTVGDGSGDEQIYEDRFVFYNFVKKTPVPMYSSMLNDVQRNQRISESSFAR

SEQ ID NO: 186153 - protein, 120 aa, Glycine max
  Clone ID: PAT_MRT3847_139108C.1.pep
GGNGSFEKGKKKERTGQGNKGGFLDMRQVTPATVISLQFSGVFLHLCVPVMCQIHEAFTTHPGKWIIIYLNPRAINFVQVNWNQFCPLTIYVENYAWIPSLKCTQFNTIIEKNINFNSVI

SEQ ID NO: 186154 - protein, 44 aa, Glycine max
  Clone ID: PAT_MRT3847_139109C.1.pep
KPLYSMGWALSKWKGLVIMLKRWISSPSLLHPYEDKKLIVLSVF

SEQ ID NO: 186155 - protein, 97 aa, Glycine max
  Clone ID: PAT_MRT3847_13910C.1.pep
LRGVAVRSRSVYSRTPLVASTKMRFRTMSSISTAREYAHWVASESLSPWSSVQWSAQLYRNRLWRNPAIMRAKRKALPVYNPSRASGFAVRLLTWRC

SEQ ID NO: 186156 - protein, 285 aa, Glycine max
  Clone ID: PAT_MRT3847_139110C.1.pep
MENNNHHAMAAGASSDSNTSDHTTPISSSCVNDNNNNKLYKGVRKRKWGKWVSEIRLPNSRERIWLGSYDSPEKAARAFDAALYCLRGRHANFNFPNTPCNMDTATNAPPNQSLTPPEIQEVAAKFANQVSPLLQKPQEQPQPQRSSDGGGGGANSSSFGSKLLCKSDSIAESSTTSTTTNCTPTTTASSCSATMYECDGTEQVDRGDMMDWTFLNVFDFSNEVVLPAVGSDYNDLYNSELHKMHSDSGELLYSTPFEGYEQLIEADHDDDDPFSHQSFLWNWNF

SEQ ID NO: 186157 - protein, 46 aa, Glycine max
  Clone ID: PAT_MRT3847_139111C.1.pep
FSCISWRSKTVHLPSLDLTRWEACTLVLFYFFAQAATENFISTYSG

SEQ ID NO: 186158 - protein, 88 aa, Glycine max
  Clone ID: PAT_MRT3847_139112C.1.pep
ARGYWTLDAIDYRIARLLDNATSGKVPYKLSGITLNPGRAYRYGKSMLLMNYSGEIQFLKWDEDDRQWDKRWSRPADKCDIYNCCGSF

SEQ ID NO: 186159 - protein, 84 aa, Glycine max
  unsure (1)..(84): unsure at all Xaa locations
  Clone ID: PAT_MRT3847_139113C.1.pep
FYFYSFVKGCDGSMLLDDTPTMLGEKLAHYXINSLRSYEVVDQVKEALPPDCPGVVSCADIIIMASRDTVSLVPSFLQFLFFSP

SEQ ID NO: 186160 - protein, 53 aa, Glycine max
  Clone ID: PAT_MRT3847_139114C.1.pep
EGGFHKPILKLSYLKTHPGPTLTGPLNPSQPLKFISKKTVFDVHIDHSINTIK

SEQ ID NO: 186161 - protein, 105 aa, Glycine max
  unsure (1)..(105): unsure at all Xaa locations
  Clone ID: PAT_MRT3847_139115C.1.pep
RAALPLFVLSSTSQTEINLPFITADASGAKHLDITLREERFEALLNHFFXXTNAPELRLLIYARISMKYVDEVLLVGRMTRVPKVQEVVSEIFGKSPSRGVMPGV

SEQ ID NO: 186162 - protein, 39 aa, Glycine max
  Clone ID: PAT_MRT3847_139116C.1.pep
NHLFSTLELSETTVITNHCIIKINFFHLILSFQIYPTRP

SEQ ID NO: 186163 - protein, 72 aa, Glycine max
  Clone ID: PAT_MRT3847_139117C.1.pep
IESFYIINFGCGRIPPEKKEKGGLFSITTKHQSGLRKKWDRTTKKKDHMIADQKRKKQLLSRVERFLNANDE

SEQ ID NO: 186164 - protein, 82 aa, Glycine max
  Clone ID: PAT_MRT3847_139118C.1.pep
NSAARARERTETDSISRKHFFSTHIEKLLQNFWIHPWTLNLQSNHLNLTLTYTHILTPINPPISSIFILKYLNNFHKYPPTS

SEQ ID NO: 186165 - protein, 65 aa, Glycine max
  Clone ID: PAT_MRT3847_139119C.1.pep
DAADELTFGCLSAAGSNGMSSCETNCQIPDHMRSLSATLHELKIGTVKSGARVKAAEDYLLANPH

SEQ ID NO: 186166 - protein, 53 aa, Glycine max
  Clone ID: PAT_MRT3847_13911C.1.pep
DNEQEVDDVQFSDDKHFSLHGKITHYENLYCRLSSCCVRPHDSMAEESCKGHP

SEQ ID NO: 186167 - protein, 113 aa, Glycine max
  Clone ID: PAT_MRT3847_139120C.1.pep
LHNQPSYHTILLSCKFFSKIYQSHNYYNLHKKLSNFTSNAESEYGCYSQLAVTLSRRGAIPASCSCLIFSSKDQAADLFTKALLPAPFSMVDLHQTIRLRGGLVPPRAEFGTR

SEQ ID NO: 186168 - protein, 53 aa, Glycine max
  unsure (1)..(53): unsure at all Xaa locations
  Clone ID: PAT_MRT3847_139121C.1.pep
XHXXTXTFXXPXISXLPKXCRLALXXNGXVTIGRSSFVTXSXXAIXIFRRXNS

SEQ ID NO: 186169 - protein, 87 aa, Glycine max
  Clone ID: PAT_MRT3847_139122C.1.pep
MATFTPLAVLRTPFRHCATLLLCLLRSICLSLPVLLHSTIRALVFAGPCPLITPTVREDMAKEYEQAIEELQKLLREKSELKATAAE

SEQ ID NO: 186170 - protein, 75 aa, Glycine max
  Clone ID: PAT_MRT3847_139123C.1.pep
SWVEGPFWGPGGVAFFFPGCICGVMFKALIFFLGSMYLSCSARKFIFVIFFYKKMVSCQAESIFMMPDNSRNDIF

SEQ ID NO: 186171 - protein, 46 aa, Glycine max
  Clone ID: PAT_MRT3847_139124C.1.pep
NESTCEKLVVECLGLTTWEYLVPCFMMHLSFSVVLLVIHILDSISS

SEQ ID NO: 186172 - protein, 88 aa, Glycine max
  unsure (1)..(88): unsure at all Xaa locations
  Clone ID: PAT_MRT3847_139125C.1.pep
WVVSVLSAGLVPFLFXAPRSLLVASFGPRCSPPWGVSLCGASCVCLSFFRRGRLSSFALSLPPCVGALSSCSFSRACVSLPPVWIPIA

SEQ ID NO: 186173 - protein, 337 aa, Glycine max
  Clone ID: PAT_MRT3847_139126C.1.pep
AALGGAGFGWRAQVTLPLPAAAFLSTLVPSGRHFGQLFHALPVLLVALFSPGIPPLAGIPYPFLCPLSDSMLPADYAVSKGVSAHVSVDIRYVANVFDANHDTLVWALQKNGFGNMPIIVGEVGWPTDGDRNANLQYAQRFNQGFMSRYIAGKGTPMRPGPMDAYLFSLIDEDFKSIQPGNFERHWGLFYYDGQPKYMLNIGSRANGLVAATGVAYLPKKWCILKTSANLNSDQVAPSVSYACQNADCTSLGYQTSCGGLDARGNLSYAFNSYFQVNDQIDSACKFPGLSVVTDKDPSTGDCKFKIMIQTDSAGLHGNGRIWSLRIVLFVLLFFTLM

SEQ ID NO: 186174 - protein, 60 aa, Glycine max
  Clone ID: PAT_MRT3847_139127C.1.pep
VFKGRGSLFKTLNSLFPGWFYRGRGHQKEKVFFSTKLNKIWFGRNFLGIKKNIAHMGCPG

SEQ ID NO: 186175 - protein, 52 aa, Glycine max
  Clone ID: PAT_MRT3847_139128C.1.pep
RPAVSFPVRRWVIIRNPKPRLYNNFRLLNQNRTISQLALDDPYDIIKSQPFC

SEQ ID NO: 186176 - protein, 77 aa, Glycine max
  Clone ID: PAT_MRT3847_139129C.1.pep
THIQTKNFNKKKIPYSNRFAIYEHIIIPDQIQCRNSILRCGGDGNLICHRSRRPVVLFILPWCVDRGMILNGRFRTL

SEQ ID NO: 186177 - protein, 27 aa, Glycine max
  Clone ID: PAT_MRT3847_13912C.1.pep
FRDMKVLRIIISFFGKVYNKIIFGLSI

SEQ ID NO: 186178 - protein, 93 aa, Glycine max
  Clone ID: PAT_MRT3847_139130C.1.pep
RYRCYNITARYGCHITTYRYRCYKTIEWYSCHEHYITVIAAKLLTLATPDLPPNHAFPASPFLPLERLDAYMPCHLYQNIYLLSPNLYSLAVV

SEQ ID NO: 186179 - protein, 112 aa, Glycine max
  Clone ID: PAT_MRT3847_139131C.1.pep
IETCMVTKLNFPPSTALRVTTRTIYVAVTMLIGICVPFFGSLLGFLGGFAFAPTSYFLPCIIWLKLKKPKKFGLSWTINWICIILGVVLMILSPIGALRNIILSAKNYKFFS

SEQ ID NO: 186180 - protein, 204 aa, Glycine max
  unsure (1)..(204): unsure at all Xaa locations
  Clone ID: PAT_MRT3847_139132C.1.pep
HASAACFAQASSDDACWTSIQILQGALPMGFDCTGGRYLIRQSEILXDFSRDALPATINEIAASIFFGKGPMEALKFFDVLQPFLMESLFAEGFSVSLEEFSISRAIKRIIRRSIGKASSLLYQLRSLYNELVAQQLEKHIQDVELPIINFALKSTKLGDLIDSKSKSTIDKVVQQVGFLGQQLFDRGRFYSKGLVDDVASHFH

SEQ ID NO: 186181 - protein, 129 aa, Glycine max
  Clone ID: PAT_MRT3847_139133C.1.pep
KKIKVSLIQKSLNQDAKTNTPSTFVYIYKKHVYSLNRPRTRGPLETSEYILVLQPTLLLLHKTTTTTTTTSTKSKQLTTSTSVSSHLQLNQQTPRLSPRANSCSWLRRKPACVWSTLSWRARRPSSRRI

SEQ ID NO: 186182 - protein, 47 aa, Glycine max
  Clone ID: PAT_MRT3847_139134C.1.pep
IYHYLRSPSSGYMKTLETLEAFTLITCNGGSPAFSLTAQFKTLGALS

SEQ ID NO: 186183 - protein, 35 aa, Glycine max
  Clone ID: PAT_MRT3847_139135C.1.pep
SPPLAWFFKKKKKKKKKKKKKKKKKKKKKKKKKKK

SEQ ID NO: 186184 - protein, 93 aa, Glycine max
  unsure (1)..(93): unsure at all Xaa locations
  Clone ID: PAT_MRT3847_139136C.1.pep
PAPGITXRRTAYEPLQTGLIAIGSGIPIGRGQRELIIGDRQTGKTAVSTDTIFNQQGQNVICAYVAIGQKASFVAQVVNTLQEKGAIGINYLG

SEQ ID NO: 186185 - protein, 200 aa, Glycine max
  Clone ID: PAT_MRT3847_139137C.1.pep
LAAAGRDVVANIWDIRASRQMHKLSGHTHSSRIGSRVGDTVITGSDDWTARIWSVSRGTMDAVLACHAGPILCVEYSSLDRGIITGSTDGLLRFWENDDGGIRCAKNVTIHNAAILSINAGEHWLGIGAADNSLSLFHRPQERLGGFSGTGSKMAGWQLYRTPQKTVAMVRCVASDLERKRICSGGRNGLIRLWDATINI

SEQ ID NO: 186186 - protein, 56 aa, Glycine max
  unsure (1)..(56): unsure at all Xaa locations
  Clone ID: PAT_MRT3847_139138C.1.pep
KIFPIIGCGSXMTEENNLKKKNVPLNGKTPQMKVQTAPPFMKETLIYTYPQSWKHN

SEQ ID NO: 186187 - protein, 131 aa, Glycine max
  Clone ID: PAT_MRT3847_139139C.1.pep
RPWLGCFFFFIFFFFFFFFLRRGGFYYLPHNLGANHNIAFLAENPKGILKLPLQGGSWGPFVIYDNVGDIFNRNLAHQRIVKKKKKKQIPQTKKDLYCVLPCLNLPQTHCKRPGPITRCNWLYDARAPIPD

SEQ ID NO: 186188 - protein, 118 aa, Glycine max
  Clone ID: PAT_MRT3847_13913C.1.pep
MSFLVTLAGYLTIAIFLQKLFRSLYNVVFPYLFADPQNIKVLEGAEWAVATGCTDGIGKAYALELAKKNFNVVLISRSMDKLNAVAEEIKQKYANVEVKCISFDFTNAYLMDYEQTIF

SEQ ID NO: 186189 - protein, 77 aa, Glycine max
  unsure (1)..(77): unsure at all Xaa locations
  Clone ID: PAT_MRT3847_139140C.1.pep
LGXXSHRXXTNGXPKRFLSPSFGPHYITXHKNLLAQTTHFFSPSNPSNQPLPPPXNFSSHPLQLPPHXXSXSNAPXX

SEQ ID NO: 186190 - protein, 73 aa, Glycine max
  Clone ID: PAT_MRT3847_139141C.1.pep
DSNMMMLRLVYALILGFVALNCLQVFEESNAQRIPRDEVQVSFLVTLMQNRISRFHNIKKFSCTTLMINMLKL

SEQ ID NO: 186191 - protein, 71 aa, Glycine max
  unsure (1)..(71): unsure at all Xaa locations
  Clone ID: PAT_MRT3847_139142C.1.pep
SCIATSSPARRVIRGIDDPLLNGSVSDSGMSRGKKHRRKSGYTSAEGGGETSSEQXFGGYQIKGRRWVTKE

SEQ ID NO: 186192 - protein, 125 aa, Glycine max
  unsure (1)..(125): unsure at all Xaa locations
  Clone ID: PAT_MRT3847_139143C.1.pep
XYXXXXFLXEESPXXXENFXXGRSILLQTKIXPPXIGNRIRXNFXPXSRGXNGPLLXXTQAXXSXXXXIXXRHXXLNXXXXXVAXGAXXXHXSPGXTYPPXXXXGXEXEXQATXRXXXXSVRXRT

SEQ ID NO: 186193 - protein, 84 aa, Glycine max
  unsure (1)..(84): unsure at all Xaa locations
  Clone ID: PAT_MRT3847_139144C.1.pep
PLGSGTMMQGVLLNLFLTKLKLKYAGGQNILFCDTPKALPYDAWGXAREKRSPSYKNSWEKRGLKSLGGKCSVFTTLKPLQKRG

SEQ ID NO: 186194 - protein, 34 aa, Glycine max
  Clone ID: PAT_MRT3847_139145C.1.pep
NQLQITISYHLSIIIPLRISTNINSNLDSSRFLE

SEQ ID NO: 186195 - protein, 47 aa, Glycine max
  Clone ID: PAT_MRT3847_139146C.1.pep
LVGDVCYEEAIRIASAVTPVPGGVGPMTIAMLLQNTLISAKRVHNFE

SEQ ID NO: 186196 - protein, 64 aa, Glycine max
  Clone ID: PAT_MRT3847_139147C.1.pep
TNSRSNLAHSYPIPTFLRSEVPNLFPTQIFPSKQTLKKRVSLFRDKTNFSFKAQILSFRINMEG

SEQ ID NO: 186197 - protein, 349 aa, Glycine max
  Clone ID: PAT_MRT3847_139148C.1.pep
MKNQFPTNLSKWLVSFLYNSQMDYEPPFLETYKTLVLKKFDDSKNEVSSLVERSCELPVIDLGNLNGERDKCMKEIAEAASKWGFFQVVNHGISQELLKSLEFEQKKLFYQPFLNKSEKFNFSSLSAKTYRWGNPYATNLRQLSWSEAFHFYASDISWMDQHQSLRSSLESFATRMFPLAESLAEVLAYKLNTKSNYFRENCLPKSSYIRLNRYPPCPISSKVHGLLPHSDTSFLTIVHQDQVGGLQLMKDGKWVGVKPNPQALVVNIGDFFQAFSNGVYKSIKHRVVAAEKVERFSMAFFYCPSEDALIESHIKPATYRKFTSREFRQQTEKDVKQTGDKEGLSRFLL

SEQ ID NO: 186198 - protein, 39 aa, Glycine max
  unsure (1)..(39): unsure at all Xaa locations
  Clone ID: PAT_MRT3847_139149C.1.pep
VNSTLASRIHSIHGDLSGKTGRAFKDEIHKXIAKWHETP

SEQ ID NO: 186199 - protein, 107 aa, Glycine max
  unsure (1)..(107): unsure at all Xaa locations
  Clone ID: PAT_MRT3847_13914C.1.pep
TPKGSMLDLKIPQSKIALTKNTVGGTNLRSDLLANFLTEGNCRASDDSQRTHRIKGMIKMGATDAIPENTEIALPCAMKSXYKGRASFDIYTICSQDWELXNPGCTK

SEQ ID NO: 186200 - protein, 45 aa, Glycine max
  Clone ID: PAT_MRT3847_139150C.1.pep
TNVRCFTKEAPHKIILTHMVRMLKDTAMICLNRAGGIYSHDHDYL

SEQ ID NO: 186201 - protein, 73 aa, Glycine max
  Clone ID: PAT_MRT3847_139151C.1.pep
LLTPMIPKMSCYTLFSFCLFVLLKVLKEASVWRKGWKITFLLHKLFVCLCDIQRCNAKTCESGQEEIESNGQA

SEQ ID NO: 186202 - protein, 335 aa, Glycine max
  Clone ID: PAT_MRT3847_139153C.1.pep
MADESVVESPVKRQRDDGEENGVSVSMDAEGGKDPLSNGLSSVIPGWFSEISAMWPGEAHSLKVEKILFQGKSEYQNVMVFQSSTYGKVLVLDGVIQLTERDECAYQEMITHLPLCSIPNPKKVLVIGGGDGGVIREVARHSSVEKIDICEIDKMVVDVSKQYFPDVAVGYDDPRVTLHIGDGVAFLKEVPEGTYDAVIVDSSDPIGPAQELFEKPFFASVAKALCPGGVVCTHAQSIWLHMDIIEDIVANCRQIFKGSVNYAWTTVPTYPSGMIGFMLCSTEGPPVDFKHPVNPIDENESQKSVRPLKFYNSEIHTAAFCLPSFAKRKISSKAN

SEQ ID NO: 186203 - protein, 142 aa, Glycine max
  unsure (1)..(142): unsure at all Xaa locations
  Clone ID: PAT_MRT3847_139154C.1.pep
WIEPLFCTFHGQDLIVDSEXELNYGKHYVXLLFNGWGKYTMVTGILCEELTMPNLMDIYDMPRDIAASEVTAXKAVLSWDDDRTNHEIETXAAASQDDRRDGSHARIYEPWPALDDTPADEPATGILHGLGSDMHVQAQRTR

SEQ ID NO: 186204 - protein, 79 aa, Glycine max
  Clone ID: PAT_MRT3847_139155C.1.pep
LNFTPPVRHPSQAIIVIVLSRHTWHLQLIGCYSYISQIRHLLLKGTLIGPFRFVSVSCHLSDGVFHSRFTPQMLFGPQF

SEQ ID NO: 186205 - protein, 62 aa, Glycine max
  Clone ID: PAT_MRT3847_139156C.1.pep
VLTASMQTATGAMHATETRSLYSIKSSRLLVSSSVSPSIYTLSLVIFMWRLSRVRRGQSAGV

SEQ ID NO: 186206 - protein, 623 aa, Glycine max
  unsure (1)..(623): unsure at all Xaa locations
  Clone ID: PAT_MRT3847_139157C.1.pep
TNGFYTPLHPHLQGAASSKAMTEKIERMELEAEFKDKQLVELQELYNSQQLLTDELSVKLEKTEKSLEETEQSLFDLEERHKQANATIKEKEFLISNLLKSEKALVERAIELRAELENAASDVSNLFSKIERKDKIEEGNRILIQKFQSQLAQQLEVLHKTVSASVMHQEQQLKXMEDDVQSFVSTKAEATEDLRQRVGKLKNMYGSGIKALDDLAEELKVNNQLTYDDLKSEVAKHSSALEDLFKGIALEADSLLNDLQSSLHKQEANLTAXAHQQPEPQFGSRETTRAVSKITVNFFXTIDRHASSLTEIVEEAQLVNDQKLCELEKKFEECTAYEEKQLLEKVAEMLASSNARKKQLVQIAVNDLRESANCRTSKLRQEALTMQESTSSVKAEWRVHMEKTEFNYHEDTSAVESGKKDLVEALQICLNKAKVGSQQWRKAQESLLSLEKRNAASVDTIVRGGMEANQALRARFSSAVSTTLEDAGIANKDINSSIDHSLQLDHEACGNLNSMIIPCCGDLRELKGGHFHSIVEITENSGKCLLNEYMVDEPSCSTPRKRLFNLPCVSSIEELRTPSFEELLKSFWDARSPKQANGDVKHIGAYEAAQSVRDSRVPLTAIN

SEQ ID NO: 186207 - protein, 57 aa, Glycine max
  Clone ID: PAT_MRT3847_139158C.1.pep
NQKRAGFHPFLIPIHKIFYKKTFKINMGQLHHLHFLIYSLCQFYPRQPIFYKTNSFL

SEQ ID NO: 186208 - protein, 43 aa, Glycine max
  Clone ID: PAT_MRT3847_139159C.1.pep
FFIFFFFLFIPSLFQKIWHITNHGSSELTTFRVPLLTKLTSQV

SEQ ID NO: 186209 - protein, 113 aa, Glycine max
  Clone ID: PAT_MRT3847_13915C.1.pep
VVASYVSLCSQHGKKLIASLRHHLMCDINVPHKDFLGKQKHKSIRPSWILNHPSKSEQYLRQFLAVPHAPFSSSSRFSLQCFFFSSVKENRTPQVRDNDKASTFLARERVFQY

SEQ ID NO: 186210 - protein, 191 aa, Glycine max
  Clone ID: PAT_MRT3847_139160C.1.pep
RLCSVVSNIHTAKWRVFTDKAREFFLQGKLDEAEKLFLSAIEEAKEGFGEKDPHVASACNNLAELYRVKKAFDKAEPLYLEAINILEESFGPDDVRVGVAVHNLGQFYLGQRKLEEARVSYERALKIKRRVLGYGHSECSDTMYHLGVVLYLQGKERDAEAFIKDSIRMLEVGKGSLLYALEDYDTSHRYI

SEQ ID NO: 186211 - protein, 68 aa, Glycine max
  Clone ID: PAT_MRT3847_139161C.1.pep
VSANKIRSLLVIFLSEKKCFGFSALWGFQFLSCVCVVSVPFFFIYLFVFSLATQRYSNHHISGSIISV

SEQ ID NO: 186212 - protein, 101 aa, Glycine max
  unsure (1)..(101): unsure at all Xaa locations
  Clone ID: PAT_MRT3847_139162C.1.pep
MRGCSCAQIHPSTRYYLARVATMSTTAMKRLIRDYTRLEQDPAAWISGATQDNNIMLRYAVIYSHDDTLWDGGTTHETLQFTDDXYNLPPTVRCVSNKYIQ

SEQ ID NO: 186213 - protein, 57 aa, Glycine max
  unsure (1)..(57): unsure at all Xaa locations
  Clone ID: PAT_MRT3847_139163C.1.pep
VVHVLYQEYKELEEKYXDGSLIPKPKNWGGYRLTPQLFEFXQGQKSRLHDWWLLPRL

SEQ ID NO: 186214 - protein, 49 aa, Glycine max
  Clone ID: PAT_MRT3847_139164C.1.pep
KKSKSIVDLGDEEYKQMLCVDGAAVKKSITLRPGEEWTGRLELSVLPCS

SEQ ID NO: 186215 - protein, 49 aa, Glycine max
  Clone ID: PAT_MRT3847_139165C.1.pep
MYKYVELSNILDLDTHTNDVTSILSDTIQLLKDLTSEVIQLIHEYATLN

SEQ ID NO: 186216 - protein, 68 aa, Glycine max
  Clone ID: PAT_MRT3847_139166C.1.pep
SKKGSNTRTEWSFKSDNRSKLIINPIDVDTLVNRTKGGQSPALLGLHRSQQPLHLPGCSKTCQVVGCC

SEQ ID NO: 186217 - protein, 40 aa, Glycine max
  Clone ID: PAT_MRT3847_139167C.1.pep
APDPFSCDPNNTATKNLPFCMASLATFTMVNDLIGMLTLQ

SEQ ID NO: 186218 - protein, 149 aa, Glycine max
  Clone ID: PAT_MRT3847_139168C.1.pep
MSAPPPLSPPPPPPPSASDKTVEKATADAALVEKSVNTIRFLAIDAVEKANSGHPGLPMGCAPMGHVLYDETMKYNPKNPFWFNRDRFVLSAGHGCMLQYALLHLAGFDSVKEEDLREFRQWGSRTPGHPENFETPGIEVTTGPLGQGI

SEQ ID NO: 186219 - protein, 160 aa, Glycine max
  unsure (1)..(160): unsure at all Xaa locations
  Clone ID: PAT_MRT3847_139169C.1.pep
SRVRPTRPDSFYKRVKGRGWDFIGETLPSERGSNCASLTETVMGLIKKSACVVLVFLCAACLSTARLGRKGASXNDIPDIKGSVATSVTKSTMGAIDEDNLNRPSEKRVMSKCGKGISAPSVEAKRSNARSCLCDEVNEEPVAFTADYRXPVHHPPKNNK

SEQ ID NO: 186220 - protein, 53 aa, Glycine max
  Clone ID: PAT_MRT3847_13916C.1.pep
EELKKMIGAVTYIECSSKTQQNVKTVFDAAIKVALRPPKPKKKPRKKKTCPFL

SEQ ID NO: 186221 - protein, 58 aa, Glycine max
  Clone ID: PAT_MRT3847_139170C.1.pep
IKIVLNMKLPPKIYVYNLNIIVTAILQNFPQQMSAQTSIIMLEELNTTFRPGSQRSSK

SEQ ID NO: 186222 - protein, 67 aa, Glycine max
  unsure (1)..(67): unsure at all Xaa locations
  Clone ID: PAT_MRT3847_139171C.1.pep
DGDMWAQKATLSGSAYSWAFISSLTSVIGNFATLSVNQADFSRYSRVSVKWQIIYVXFLPLVFTFIA

SEQ ID NO: 186223 - protein, 51 aa, Glycine max
  unsure (1)..(51): unsure at all Xaa locations
  Clone ID: PAT_MRT3847_139172C.1.pep
KKKGFALSGFQILWKNYWRWGLRFELDLGFISWVLEWXLVGYWILFYFRQL

SEQ ID NO: 186224 - protein, 83 aa, Glycine max
  unsure (1)..(83): unsure at all Xaa locations
  Clone ID: PAT_MRT3847_139173C.1.pep
GTRSGIIFPLHRHISKGAWTFXRREQDCQVSDCPAKGLKAALLLSQMSPDLIGEKMEDERFYDAADEILSLQSGNGGFPAWEP

SEQ ID NO: 186225 - protein, 130 aa, Glycine max
  Clone ID: PAT_MRT3847_139174C.1.pep
MEQFRHIGEVVGSLKALMVLRDEIQINQRQCCLILDIFGLAMETIAEEIRQNLKLEERNTKWKALEFPLRELCRVLKEGELYIRQCLDSKDWLGKALTLSHNRECVEFHIHNLLCYFPAVIEAIENAGLV

SEQ ID NO: 186226 - protein, 62 aa, Glycine max
  Clone ID: PAT_MRT3847_139175C.1.pep
YQCPSLLKSELIEFSCGLYDINKPAMRFYICTLDIHAAELNSNLESIRVITDILHRYNYAYC

SEQ ID NO: 186227 - protein, 98 aa, Glycine max
  unsure (1)..(98): unsure at all Xaa locations
  Clone ID: PAT_MRT3847_139176C.1.pep
YGCEKTTEGHNYGGISXTSSAHQIQVISPLELRKEERPVXEAPVVDKSNVFPRTKLLGLIFPIFSKAIKPYRIPRSLYNYNALTFPLEVFFLCHHFCL

SEQ ID NO: 186228 - protein, 314 aa, Glycine max
  Clone ID: PAT_MRT3847_139177C.1.pep
RTNSLLVVSIGGLVVNVIGLIFFHEEHHHAHGHVLSGSSCSHSHTHTESHSHHTHHHHDHDHDHDHLHSHGHETTIHGSNQEYISVSSDCRDDSCPGDHGHHHNHNHCSHERKHHGEWADHEDKHSIPSFKHHDAAAHCHDHGEHHDQTGHSCHEDAPLVRKEHDHRHIDHNMEGIFLHVLADTMGSVGVVISTLLIKYKGWLIADPACSIFISILIVSSVIPLLKNSAEVLLQRVPRAHEHELKDALINVSKIRGVYGIQKFHSWNFTNTDVVGTMHLHVSTDTDKTSAKSQVLHLLRNAGIKDVTLQVECVG

SEQ ID NO: 186229 - protein, 43 aa, Glycine max
  Clone ID: PAT_MRT3847_139178C.1.pep
LKLFKSYTLLIDTTRKLDNLGCKSVPIPACVPSFPIGSRITAW

SEQ ID NO: 186230 - protein, 171 aa, Glycine max
  unsure (1)..(171): unsure at all Xaa locations
  Clone ID: PAT_MRT3847_139179C.1.pep
MGLVEVQENGNGNGDGISEIPLGTKTKYIKMTSDPVEEDEVLQSRKYETKKYIFACAVFASLNSVLLGYXVGVMSGAIIFIQEDLKISEVQQEVLVGILSIISLLGSLAGGKTSDAIGRKWTIGLAAVIFQTGGAVMALAPSFKVLMIGRLMAGVGIGFGVMIAPVYIAEI

SEQ ID NO: 186231 - protein, 64 aa, Glycine max
  unsure (1)..(64): unsure at all Xaa locations
  Clone ID: PAT_MRT3847_13917C.1.pep
GGGALYGSSGMPGGPXGGPRGGGGNGLXVGAPNYPQGAPYGGSAAGRGSNMMGGNRNQQYGWQQ

SEQ ID NO: 186232 - protein, 100 aa, Glycine max
  unsure (1)..(100): unsure at all Xaa locations
  Clone ID: PAT_MRT3847_139180C.1.pep
MGLVGVQENGNGNGDGISEIPLGTKTKYIKMTSDPVEEDEEVLQSRKYETKKYIFACAVFASLNSVLLGYDVGVMSGAIIFIQEDLKITEVQXDVLVGIL

SEQ ID NO: 186233 - protein, 28 aa, Glycine max
  Clone ID: PAT_MRT3847_139181C.1.pep
GHYVLPQSASYYFSASDSWVLLIVVCTA

SEQ ID NO: 186234 - protein, 167 aa, Glycine max
  Clone ID: PAT_MRT3847_139182C.1.pep
RISSFFIEPMCKWMGAKLVWALSNFIVFVCMASTAIISLISIRDYSGGIEHVIGANEAIKIASLVVFVLLGFPLAITYSVPFAVTAELTADSGGGQGLAIGVLNLAIVIPQMIISLGSGPWDALFGGGNIPAFVLASLCALAGGVIATLKLPDLSSSSFQSTGFHIG

SEQ ID NO: 186235 - protein, 77 aa, Glycine max
  Clone ID: PAT_MRT3847_139183C.1.pep
HGPLVYNPNTQGARTTYFRSFQIIWDGWVYDAFLHTHNKNLLLEWKTIHTLLFSPITIIQANPSAIEPSTSYTLTIR

SEQ ID NO: 186236 - protein, 91 aa, Glycine max
  Clone ID: PAT_MRT3847_139184C.1.pep
NHRNISCHRVWHLTPLKCMETRYLHTLISWMFKQTVAAPYTKGVFLAGRDPMVHGTQKALQANYILSSRVTALFAGSWSFGSVKTSDKVVL

SEQ ID NO: 186237 - protein, 54 aa, Glycine max
  Clone ID: PAT_MRT3847_139185C.1.pep
KIGKPLVHFPHFLLEIGGPEQVPKLGNPPPPPKKNKDPEDPGVLSNKQVRPPSC

SEQ ID NO: 186238 - protein, 139 aa, Glycine max
  Clone ID: PAT_MRT3847_139186C.1.pep
VFLCEYEYDIHWHSFKRLADIDNETENGEESDSDEDWNVGKESDSDTDEDVEYEEENIKNAQSQPSRSHHLAANLYKGRFFGLQKIGTKTIPQHVRSHKQTDLERAKATLLLASLPKSLPCRNKEMEEITTFIKGAILM

SEQ ID NO: 186239 - protein, 56 aa, Glycine max
  Clone ID: PAT_MRT3847_139187C.1.pep
ILHFTNHSFGSTIMICDSHYINLHSLSTTITLSSYHIYLHNLLHFLYPYSPTLPFI

SEQ ID NO: 186240 - protein, 47 aa, Glycine max
  Clone ID: PAT_MRT3847_139188C.1.pep
ASAGPGNSGTPEDTVGQGGVPLAYCIGCCTDEGIIPRCAASLKLEPL

SEQ ID NO: 186241 - protein, 266 aa, Glycine max
  Clone ID: PAT_MRT3847_139189C.1.pep
ETINHNPHHILTHSHHHNSDDDDDDEAHGTSQPQHHRRRRKYKRPGLIFLPTKEIIRDTYRLATIARDLGLDLYPTPSLSHIIFSNPSSSKPSSLSISFRLALQSDAVPIPFPSLSATPLAHLRCFLTLSPRAFKIVLFNSDHHPDDASGTSGNANNWDCGSFSLHSRAVGVRVDTMEEFCRILAGKGWSFYKTKKAPSSDQRHGGAFYLFRRVDVNRVRVGGVGAPEDGACRVRELRLPHLDFGNAPLRILQYILLMTDDIFCLA

SEQ ID NO: 186242 - protein, 56 aa, Glycine max
  unsure (1)..(56): unsure at all Xaa locations
  Clone ID: PAT_MRT3847_13918C.1.pep
LWRYWRHFNLVDAVPNPSKEQXVDVVRRHFMSQHMAGSRVIVGFVQAAKRLKTVCK

SEQ ID NO: 186243 - protein, 67 aa, Glycine max
  Clone ID: PAT_MRT3847_139190C.1.pep
DNINYYIFINYVFYTLIINERETVVNLMLKSLKCFLTFFVKCLFSSSNRIPFISRDAHKRNQQSSKF

SEQ ID NO: 186244 - protein, 45 aa, Glycine max
  Clone ID: PAT_MRT3847_139191C.1.pep
TDMNHKNKKDNFGRDAPHWERGCLRTNYINCLDRSNCSPSFHFGC

SEQ ID NO: 186245 - protein, 88 aa, Glycine max
  Clone ID: PAT_MRT3847_139192C.1.pep
IGPVPLPGWRSLPATPTHQPVRSWVPAPIFGIRCCEEEPVIDRLESSSGIRSNMFEKMSKHTSLQGQGTGSGQESGVPHAGWVSQLVN

SEQ ID NO: 186246 - protein, 87 aa, Glycine max
  unsure (1)..(87): unsure at all Xaa locations
  Clone ID: PAT_MRT3847_139193C.1.pep
SEPHFWELVFPKEAGGPNKGFKKRDFEWANQITWHWSFRRGNPXQSAGFGILLGICQDFYFAGKTFMPAFSVPQAIPGFCENVEFSA

SEQ ID NO: 186247 - protein, 132 aa, Glycine max
  Clone ID: PAT_MRT3847_139194C.1.pep
ALFPSSIGLARLKTLVPPPNARFFPPNIDFRREEEGPVKQNGAGEKVKEVFSKSLGNSKAPLEDAAKSPAEPVRPFFEFYENRETHHPNELWVIILFSSLTHPPSRDTNLKFFISFLICFLLLLINSTEFFA

SEQ ID NO: 186248 - protein, 68 aa, Glycine max
  Clone ID: PAT_MRT3847_139195C.1.pep
QLLVLVILVLIDFFSSILLPPLYWFCFSTLNIRIQAAITSNNPYLHMHGADAASTPAIKHRILKPAHV

SEQ ID NO: 186249 - protein, 95 aa, Glycine max
  Clone ID: PAT_MRT3847_139196C.1.pep
WYDELKSLFPPLSPIIWTLNSLELQTSWIPWHGQAVPCPSDALVINSLAAKSTAFATKSEPSPLLITTDSFALFFQEFLTTSANISLESLPGFAC

SEQ ID NO: 186250 - protein, 71 aa, Glycine max
  unsure (1)..(71): unsure at all Xaa locations
  Clone ID: PAT_MRT3847_139197C.1.pep
IKPPPPPPKKFFKILXPPLPPXFLPLHTNYIYILPYHSTFPPSILFPSPFISSSTNPQYSNSPILHSPLNL

SEQ ID NO: 186251 - protein, 47 aa, Glycine max
  unsure (1)..(47): unsure at all Xaa locations
  Clone ID: PAT_MRT3847_139198C.1.pep
FAQAVTYGLIVYDMNRVDWDXEPFFWYLFISFVTLLYFTFYGMMAVG

SEQ ID NO: 186252 - protein, 85 aa, Glycine max
  Clone ID: PAT_MRT3847_139199C.1.pep
CRFVPRPMKNRIQPGLTRNRNRPEGLALKAKAQKTKKPGGRKEKNQSPLDLKREDETKAAGTSKRGLPGEPLHQFPKLKSFPPPP

SEQ ID NO: 186253 - protein, 188 aa, Glycine max
  unsure (1)..(188): unsure at all Xaa locations
  Clone ID: PAT_MRT3847_13919C.1.pep
MLEAMESSVNGGFTHLQSCGDSSEEELSVLPRHTKVVVTGNNRTKSVLVGLQGVVKKAVGLGGWHWLVLTNGIEVKLQRNALSVIEAPTGNEEDDDLEFENMPWNGSDMASDDTQKSHKSRHRMHRTLGSSHKTMSRSFSGDSQSKGSVSMPNGSAVDLSKLEMTALXRYCRHXNLVDAVPNPSKSTS

SEQ ID NO: 186254 - protein, 51 aa, Glycine max
  Clone ID: PAT_MRT3847_1391C.1.pep
SRHNSTVTFYPRMELVTNIHNQAHYLNKRRPIPSSPYQNSVWTLPSLQLRL

SEQ ID NO: 186255 - protein, 91 aa, Glycine max
  Clone ID: PAT_MRT3847_139200C.1.pep
VALRRGVLKSLRGASGGPFFVCSTISGGQLEPPGELHSVASVSFHDPKGSGAPPSSRLGKASLPLDASSIVSFSMCSLFSYGVRRTFQYGS

SEQ ID NO: 186256 - protein, 129 aa, Glycine max
  Clone ID: PAT_MRT3847_139201C.1.pep
APPGVGSPARPCIPPTKIILRGPRSYCKKKQNPFFFKGLGGGGTQGPTYSTFQGLPPWGFWTPGKDRGGCFPFVPRGPRNRPLGLFPLNQKTIIVPPQGGSGRTHYFRFLGAEKKKKKKGLFFFPVSPQ

SEQ ID NO: 186257 - protein, 105 aa, Glycine max
  Clone ID: PAT_MRT3847_139202C.1.pep
YSFEEICITKEAFDGEEKFCAKSLGTVVGFAISQLGKNIPVLSCSFDSNQEQYTVEGVPNLGYKAEMCHGLSFKTAIFYCHKVRDTTSFLAPLGGGDGTKTHALA

SEQ ID NO: 186258 - protein, 44 aa, Glycine max
  unsure (1)..(44): unsure at all Xaa locations
  Clone ID: PAT_MRT3847_139203C.1.pep
VENKWAYPXSTGNRXFIVRLXXEMLHXTFVPNRLRRVPXRXPWT

SEQ ID NO: 186259 - protein, 117 aa, Glycine max
  Clone ID: PAT_MRT3847_139204C.1.pep
APTGGFLSLRKGLPPPARLFGFGGVLFALIEGAGIMLNKFLRAPHPMPIIFDKPFPPNGVPGQPVFLAPDLASQYLWLGGWFAHGKKKKAAAGAPGGKGTQVLKCFYAPPGPHFEAK

SEQ ID NO: 186260 - protein, 57 aa, Glycine max
  Clone ID: PAT_MRT3847_139205C.1.pep
TQYLKGIFHFEGFCFFTKKDFFFCIYQEYSCVDSFLYQTIGMRYLLIVLIINFRKKI

SEQ ID NO: 186261 - protein, 134 aa, Glycine max
  unsure (1)..(134): unsure at all Xaa locations
  Clone ID: PAT_MRT3847_139206C.1.pep
MSMYSYSCISTSTMIRRLWCLQSGSPSVPPSSTKKKKPLVLLGAPHVSAIVLEALLNAPTCPDSSFEVAAIVTQPAARRDRGKKLSLSPLASHALQRGFSPDLIFSXLRAGDDTFLSXIKSSSPHLCITAGYGN

SEQ ID NO: 186262 - protein, 82 aa, Glycine max
  unsure (1)..(82): unsure at all Xaa locations
  Clone ID: PAT_MRT3847_139207C.1.pep
GVPAAIKRANPQSEQGLAEFETEIEMLSKFRHRHLVSLIGFCERRXEMILVYEYMLNGTLRSHLFGSDLPPLSWKQRLEVCI

SEQ ID NO: 186263 - protein, 49 aa, Glycine max
  Clone ID: PAT_MRT3847_139208C.1.pep
KWISGKSIKAGHKLKIKEFGYIKKEKVPPAVNPRLVELPPLEIKRLGQT

SEQ ID NO: 186264 - protein, 251 aa, Glycine max
  Clone ID: PAT_MRT3847_139209C.1.pep
VDKLGFDIETFLHAKRSVDLKKYGYSSPKELKEIHPCQQSLDSFPLKEAGSAPQNMAQEDSIDTNFFEPKMANGEGLQNISSRLQANMSRNISYDDNERFFADRKSSERGAGDVGEDNTAILNEETRHDPQESDIPWILRMSSSHRPDILVANSSMSSEGDKVYPESICKEDSCVKSAVTANGSPARLWKSKLSASDFDKSESSTKLPKGVKENTLMAKLLEARLEAQKSRSRASKSTSGSTREAYNENME

SEQ ID NO: 186265 - protein, 212 aa, Glycine max
  unsure (1)..(212): unsure at all Xaa locations
  Clone ID: PAT_MRT3847_13920C.1.pep
MLEAMESSVNGGFSHLQSCGDSSEEELSVLPRHTKVVVTGNNRTKSVLVGLQGVVKKAVGLGGWHWLVLTNGIEVKLQRNALSVIEAPTGNEEDDDLEFENMPWNGSDMASDDTHKSHKSRHRMYRTMGSSPRSISGDSHSKXSPLLCLSNLEGPALWSWTXDFKLENLVENPSKEQLVDVVQRHFMSQQMDELQVIVGFVQAAKRLKTVWK

SEQ ID NO: 186266 - protein, 112 aa, Glycine max
  Clone ID: PAT_MRT3847_139210C.1.pep
RMNTSHKPDILVGNSSLSSVGDKVYPESIFKEDSCVQSAVTANGSPARLWKSKLSVSDFNKSEFSTKLPKGVKENTLMAKLLEARLEAQKSRSRAYKSTFGSTREAYNENME

SEQ ID NO: 186267 - protein, 69 aa, Glycine max
  Clone ID: PAT_MRT3847_139211C.1.pep
GGPKFDLIPKLFETGAICLGDEIFFGGPSNRGQRCSPGQRSPQFGKPFDRGLKFFPFFKQRGVFVHQGV

SEQ ID NO: 186268 - protein, 59 aa, Glycine max
  Clone ID: PAT_MRT3847_139212C.1.pep
QFYRSGCSQLKRHHRCPGVSGTRPASCSRARLFIQYPWTLFSFMQHILRHPPHENGVLV

SEQ ID NO: 186269 - protein, 41 aa, Glycine max
  unsure (1)..(41): unsure at all Xaa locations
  Clone ID: PAT_MRT3847_139213C.1.pep
DXELTIIISLRTIKAMACVLSNLQPSCLAQSRSNKDEANLH

SEQ ID NO: 186270 - protein, 65 aa, Glycine max
  unsure (1)..(65): unsure at all Xaa locations
  Clone ID: PAT_MRT3847_139214C.1.pep
YKTEMCKNWELRGACKFGDKCCFAHGRHELKGKALTHVKYKTKRCXQYHHSGYCPYGLRCQYLHK

SEQ ID NO: 186271 - protein, 52 aa, Glycine max
  Clone ID: PAT_MRT3847_139215C.1.pep
SRCVKNEKNILEWYLECVPPNKVVDCTLFVGLIELSTIMHCFEVYFEGDRFP

SEQ ID NO: 186272 - protein, 73 aa, Glycine max
  Clone ID: PAT_MRT3847_139216C.1.pep
HSLLLFFLSFICNFILDQINPSTFAFLMFSLAAVQLKKGYKIGMCNTCKTSLNSKSCVCLLNLSTSLYLASFK

SEQ ID NO: 186273 - protein, 119 aa, Glycine max
  Clone ID: PAT_MRT3847_139217C.1.pep
RKAIRRTLLIIKHVTSFTSLKNNTRGFIDPKYSFLSRESYSASSCATCAFVNWTQHSGSSARHPREKREEKKGYFFTASVSFHLRYTYGWTRHTSIQIASLVNLHRVNDYTSSSLCGYS

SEQ ID NO: 186274 - protein, 567 aa, Glycine max
  Clone ID: PAT_MRT3847_139218C.1.pep
MTNVSSSLPIVAQDAKAPSYFIRNTANFSPSVWGDYFLYYVPSSVEDDSHIKQAQLTKEEVRKMLIAPIDNNFYFKLEFIDSVQRLGVSYHFEHEIDGALHQIYNISTKDNNIITHDDDLCHVALLFRLLRQQGYHISSNVFYKFKDQTRNFSEKAANDIQGMLSLYEAAELRMHGEDILEEAHNFALVQLTKSLTTQLSPSMIAQVKHSLRRSLRKGLPRLEATYYMSFYEEDSSHDEKLLTFAKLDFNMLQELHQKEVNNVTRWWIKNLNVSTKLPFVRDRIAECYFWILGIYFEPQYSLARRITTKVIALCSVIDDMYDAYGTIDELELFTNAIERWDICCLDDLPEYMKVCYIEILNVYEEIEEEMRKQGKVYCIKYAKKEMKRLIKAHMAEARWLHFNHTPSIEEYMQVRNVSSGYSMVITICFVGMKDTTEEVLIWATSDPIIIGAASIICRLMDDIVGNEFEQERRHVASSIESYMKQHNTSRQDAINKLLEMVKSAWKDINEACLNPTEVPMNFLLRVVNLVRMIDVLYKDEDNYTNAGGLMKDYIKTLLVNKMSARIS

SEQ ID NO: 186275 - protein, 45 aa, Glycine max
  Clone ID: PAT_MRT3847_139219C.1.pep
PKHRLLYFPHHRKFFIAHKNHISVLRCVCIITLLLGINVMLAISF

SEQ ID NO: 186276 - protein, 89 aa, Glycine max
  unsure (1)..(89): unsure at all Xaa locations
  Clone ID: PAT_MRT3847_13921C.1.pep
ATINAAQVEYREYPAVATAPASCNTYHLGGSWERGXTIEGKLLGCTGLRVHSEDKAVPSLPAKWKGTTTEESLHTLHLYTEITSRPMEK

SEQ ID NO: 186277 - protein, 97 aa, Glycine max
  Clone ID: PAT_MRT3847_139220C.1.pep
MREIISIHIGQAGIQVGNSCWELYCLEHGINPDGTMPSDSSVGVAHDAFNTFFSETGSGKHVPRALFVDLEPSVIDEVRTGPYRQLFHPEQLISVVC

SEQ ID NO: 186278 - protein, 208 aa, Glycine max
  unsure (1)..(208): unsure at all Xaa locations
  Clone ID: PAT_MRT3847_139221C.1.pep
LVFILDKLEFSDTSVGIAHDAFNTFFSETGFGKHVPRALFVDLEPSVIDEIRTGPYRQLFXTRPLISGKEDAANNFARGHYTVGREIVELCLDRIRKLADNCTGLQGFLVFNAIGGGTGSGLGSLLLERLSVDYGKKSKLGFTIYPSPQVSTAVVEPYNSVLSTHSLLEHTDVVVLLDNEAIYDICRRSLDIERPTYTNLNRLISQII

SEQ ID NO: 186279 - protein, 116 aa, Glycine max
  unsure (1)..(116): unsure at all Xaa locations
  Clone ID: PAT_MRT3847_139222C.1.pep
PVCXFPLRRWXRCCLXPLFLCWWGXXXCSXXFGXLVCLXFVRXCRAFXXXXFSFRXCXXGLXXLPLXXXCXLFLXPXSAPLARAFGSGLFXXXPXFFSVFLXSLXAFXALLLXFXV

SEQ ID NO: 186280 - protein, 103 aa, Glycine max
  Clone ID: PAT_MRT3847_139223C.1.pep
MSMYLKQKQMIVGVALVVFLLLISVKGQSICNVSLPDLMTCKPAVTPPNPTPPSQQCCSVLSHADLPCLCSYKNSPLLPSLGIDPKLALQLPAKCNLPHPPNC

SEQ ID NO: 186281 - protein, 84 aa, Glycine max
  Clone ID: PAT_MRT3847_139224C.1.pep
CGVFFCFLLFFLQPFFFGYCKWSTIKKLGQTRSKLLRRRKKKDGLYNKIAGLEKQIRQFEEGGINPIGGATKGAHERDGPGPRG

SEQ ID NO: 186282 - protein, 451 aa, Glycine max
  Clone ID: PAT_MRT3847_139225C.1.pep
MREIISIHIGQAGIQVGNSCWELYCLEHGINPDGTMPSDTSVGVAHDAFNTFFSETGSGKHVPRALFVDLEPSVIDEVRTGPYRQLFHPEQLISGKEDAANNFARGHYTVGREIVELCLDRIRKLADNCTGLQGFLVFNAVGGGTGSGLGSLLLERLSVDYGKKSKLGFTIYPSPQVSTAVVEPYNSVLSTHSLLEHTDVVVLLDNEAIYDICRRSLDIERPTYTNLNRLISQIISSLTTSLRFDGAINVDITEFQTNLVPYPRIHFMLSSYAPVISAAKAYHEQLSVPEITSAVFEPSSMMAKCDPRHGKYMACCLMYRGDVVPKDVNAAVSNIKAKRTVQFVDWCPTGFKCGINYQPPTVVPAGDLAKVQRAVCMISNNTAVAEVFSRIDYKFDLMYAKRAFVHWYVGEGMEEGEFSEAREDLAALEKDYEEVGAEGEEEEEEPDDYSK

SEQ ID NO: 186283 - protein, 350 aa, Glycine max
  unsure (1)..(350): unsure at all Xaa locations
  Clone ID: PAT_MRT3847_139226C.1.pep
MREIISIHIGQAGIQVGNSCWELYCLEHGINPDGTMPSDTSVGIAHDAFNTFFSETGFGKHVPRALFVDLEPSVIDEVRTGPYRQLFHPEQLISGKEDAANNFARGHYTVGREIVELCLDRIRKLADNCTGLQGFLVFNAVGGGTGSGLGSLLLERLSVDYGKKSKLGFTIYPSPQVSTAVVEPYNSVLSTHSLLEHTDVVVLLDNEAIYDICRRSLDIERPTYTNLNRLISQIISSLTTSLRFDGAINVDITEFQTNLVPYPRIHFMLSSYAPVISAAKAYHEQLSVPEITSAVFEPSSMMAKCDPRHGKYMACCLMYRGDVVPKDVXAAVSNIKTKRTVQFVDWCPTG

SEQ ID NO: 186284 - protein, 62 aa, Glycine max
  Clone ID: PAT_MRT3847_139227C.1.pep
RKIITCMVNTFSFLIPTPCTAPTKPKAPHNYLLCFPILREKHNYTNTETYGYVYVLSNQKKR

SEQ ID NO: 186285 - protein, 203 aa, Glycine max
  Clone ID: PAT_MRT3847_139228C.1.pep
KGTSCNGSDLSVFYRCRFEGFQDTLYVHSERQFYRECDIYGTVDFIFGNAAAVLQNCNIYARTPPQRTITVTAQGRTDPNQNTGIIIHNSKVTGASGFNPSSVKSYLGRPWQKYSRTVFMKTYLDSLINPAGWMEWDGNFALDTLYYAEYANTGPGSNTANRVTWKGYHVLTSASEASPFTVGNFIAGSNWIPSSGVPFTSGL

SEQ ID NO: 186286 - protein, 345 aa, Glycine max
  unsure (1)..(345): unsure at all Xaa locations
  Clone ID: PAT_MRT3847_139229C.1.pep
IFLVTLTCTDIISTSKSEICKTAAYCITALYSFDCSYNEINQVIRVGSXEWSWQSYQVCKXLAKDLKFQVVVTTCETRLKDDIMRSHKQIHFXLGTRIKILELVLKIVCLLKFCVLPVMNEVDEIICTDSHHLCERGIHCQTKTCQILMFSATFXVTVKDFKDRYLRKFYGIIIMDELTLKVITQFYAFVEERLKVHCLNTLFSKLQINQSIIFCNSVNRVELLAKKITXLGYSCFYIHAKMLQDHRNRVFHDFRNGACRNLVCTDLFTRGIDIQAVNVVINFDFPKNAETYLHRVGRSGRFGHLGLAVNLITYEDRFNLYRIEQELGTEIKQIPPQIDQAIYCR

SEQ ID NO: 186287 - protein, 104 aa, Glycine max
  unsure (1)..(104): unsure at all Xaa locations
  Clone ID: PAT_MRT3847_13922C.1.pep
SYYLIIKKTLIFKFKTPNXKKESNLAHFFFFLIMVHYAYIMYNLNLIIKLMLLFVLSFLGKENHHKQTISMSTYDTHYETSVTFIILIVKKTWIMQKKKKKKLM

SEQ ID NO: 186288 - protein, 72 aa, Glycine max
  Clone ID: PAT_MRT3847_139230C.1.pep
THANFPFSHYALTMQPTLFIWYLELITNSSCIQTGMNLIFKGDRYPYCTQYQCLRVRQIPSHKEGRVDANEQ

SEQ ID NO: 186289 - protein, 106 aa, Glycine max
  Clone ID: PAT_MRT3847_139231C.1.pep
DKKREGGSNKNTKLFIWGPTRKKTAVSRILIGQTSVLLRRLLDSPPPLKFNHARCTCSLRLVSVGSNSTTLLSLRPVPSTRSYCSSFRGRKKPLWEPCKLPAKKDG

SEQ ID NO: 186290 - protein, 44 aa, Glycine max
  unsure (1)..(44): unsure at all Xaa locations
  Clone ID: PAT_MRT3847_139232C.1.pep
XYLVFTXNLKKXYNFDAIRSSFVLCSKXFWFSXXNXIXXDYXVV

SEQ ID NO: 186291 - protein, 87 aa, Glycine max
  unsure (1)..(87): unsure at all Xaa locations
  Clone ID: PAT_MRT3847_139233C.1.pep
SRVRTRVLNCDVIAKRAQDFDIHAALESLMDQTLVVVXTILLRVTELAQIINLRQRVDGELKPLTGGKXPEGQHLPGRNIFVREQPI

SEQ ID NO: 186292 - protein, 150 aa, Glycine max
  unsure (1)..(150): unsure at all Xaa locations
  Clone ID: PAT_MRT3847_139234C.1.pep
IEKRREEVESSLKEREKAFEEEKNTELQYINALKEKATKELEQVSLEMKSLQTARADINLXDRERRNREWAELTNCIEELEVQRDKLRKQRELLHADRIEIYAQTEELKKLEDLKAVSDDNAITEMLKSDMESNQKKISARKNLKHQSLT

SEQ ID NO: 186293 - protein, 48 aa, Glycine max
  unsure (1)..(48): unsure at all Xaa locations
  Clone ID: PAT_MRT3847_139235C.1.pep
VPQAGRLRIVXLLIREMYSAVGLASLVRHPQMVGPLLEPSAEGATENQ

SEQ ID NO: 186294 - protein, 125 aa, Glycine max
  Clone ID: PAT_MRT3847_139236C.1.pep
SRTQGEPARKPRADPRAVPPRVRTKKRGARERGQTGGNTGTRTGKGERARDAQRGGNKTLRTAGRTTARETTSRAQRRRGRKQERKRGKETRDRRRGPPEERGKTTAEKKRKKEKHGTSQARTEP

SEQ ID NO: 186295 - protein, 113 aa, Glycine max
  unsure (1)..(113): unsure at all Xaa locations
  Clone ID: PAT_MRT3847_139237C.1.pep
PANLQYPKFQYINANXSISHNSTIHHCNTTTIQLHNSQLTHTFIHTSNLQNYSILNSNXYASYLHTTHLHNSYITNFTIQIYHLQXSNFNPSKLHKSNLKTSNLQPSYLSKSI

SEQ ID NO: 186296 - protein, 42 aa, Glycine max
  Clone ID: PAT_MRT3847_139238C.1.pep
HYFICFHNYIIIDLMHLSSTTAISYVMNLASITLLMQYNSHY

SEQ ID NO: 186297 - protein, 73 aa, Glycine max
  Clone ID: PAT_MRT3847_139239C.1.pep
GEIKLIYPSSKTQEKNICILRQGQTHTSYQGNNKFFPRYTSCSRGQYRGNSCLTSKTRHANQIRGNFRHTYFF

SEQ ID NO: 186298 - protein, 64 aa, Glycine max
  unsure (1)..(64): unsure at all Xaa locations
  Clone ID: PAT_MRT3847_13923C.1.pep
RFVFKGSRKQNYNLLQSXGQSGIYSFGRTSPLRKDKPKQPQATPEHILPSPFPRAEFRAYVRVQ

SEQ ID NO: 186299 - protein, 58 aa, Glycine max
  Clone ID: PAT_MRT3847_139240C.1.pep
GGFLCMPSEFHPPTTCGTIFTRDFRHRQSRSHIRFTFVKAGASIIIGCSACVQQARDR

SEQ ID NO: 186300 - protein, 186 aa, Glycine max
  Clone ID: PAT_MRT3847_139241C.1.pep
PSRLYPLVYAGSDGYSSSLCLEDSLDPKSVRGKIVVCDRGVNSRAAKGEVVKKAGGVGMILTNGPFDGEGLVADCHVLPATSVGAGGGDELRRYMSLASQLRSPATATIIFKGTRLGIKPAPKVASFSARGPNPESPEILKPDVIAPGLNILAAWPSTLAPSGVPSDERTSEFHLLSRTSMGLPPR

SEQ ID NO: 186301 - protein, 64 aa, Glycine max
  unsure (1)..(64): unsure at all Xaa locations
  Clone ID: PAT_MRT3847_139242C.1.pep
MLPNHCRLQSSICAETSALVDTTFTHXSNACICYPSALRNCKRHTSTRALPAARALDSTHSDLL

SEQ ID NO: 186302 - protein, 66 aa, Glycine max
  Clone ID: PAT_MRT3847_139243C.1.pep
LLTRQMQIFVKNLTGKSITLYVESSDTIVNVKVKIHDKDGIPPDQQCLIFAGKLLCRGRTLAEYNI

SEQ ID NO: 186303 - protein, 98 aa, Glycine max
  Clone ID: PAT_MRT3847_139244C.1.pep
PIGPAPNPQHKLSPTTIFAGPIQTGIQNVEARQKQRKLSRACVLRTGSQHWFSTCRRWGWISIVPCRFMTTGIKILLRREGLLQQRLLRTLRRGGRWS

SEQ ID NO: 186304 - protein, 125 aa, Glycine max
  Clone ID: PAT_MRT3847_139245C.1.pep
PRVRKKKKNLKYKKKKKKKKEKKKKKKKKKKKKKKKKKKKKKKKKIKKKKKKKKGGGLFRGPSFIFPGLGFLVFFLGSLNLIYLAVFLNLWFWKTFGFSNFIPFEIIPLFPGWVILKRARPVGFS

SEQ ID NO: 186305 - protein, 56 aa, Glycine max
  Clone ID: PAT_MRT3847_139246C.1.pep
LLFPNHGPAFFPPHTGTYIDKKCPFTGNVYIQSRILACSCHSAEMTMTIIVWRSFV

SEQ ID NO: 186306 - protein, 223 aa, Glycine max
  Clone ID: PAT_MRT3847_139247C.1.pep
MEANPTHDGDDTSETPPPPMVDPSPSPPPQMKEEVMDAEQGGDTSLPMTVVPAHLPVSKAAAKRPSKDRHTKVEGRGRRIRMPATCAARIFQLTRELGHKSDGETIRWLLEHAEPAIIEATGTGTIPAIAVSVGGTLKIPTSSAARPEGEVDTPKKRRRRASNSEFIDVNENQVSVSSGLAPIAQSAYGSGVGGGLVPLWHGNAAASGPFFMFPNASNPQYWA

SEQ ID NO: 186307 - protein, 154 aa, Glycine max
  unsure (1)..(154): unsure at all Xaa locations
  Clone ID: PAT_MRT3847_139248C.1.pep
CLTSCFPNVSRMDKASLLSDAXAYINEXKAKIEDLESQQPRXSNKKMKTEMXXTLDNQSATTXINRRGSKRAPLDSKVDVRIVGPDAMVRVQSENVNHPGARLMGALRDLEFQVHHASMSCVNDLMLQDVVVKLPNGMRSEESLKSAIIMRLDQ

SEQ ID NO: 186308 - protein, 145 aa, Glycine max
  Clone ID: PAT_MRT3847_139249C.1.pep
METTLESNNEPSFDEFYRIQTNGIVITDWAPQLDILKHPSIGGFVSHCGWNSLIESVSCGVPIIGLPLFAEQMMNATMLMEEVGNAIRVEVSPKGGVIKIMDTDDKEGCVMRERAKELKQLAERAWFHDSPSYLALSKITHSNGV

SEQ ID NO: 186309 - protein, 61 aa, Glycine max
  Clone ID: PAT_MRT3847_13924C.1.pep
YYYHSPPPPVHHHPCPHLRPHPHPHPPPPPKKPYYYHSPPPPVQPHSWPDPLSHSQPQPHA

SEQ ID NO: 186310 - protein, 69 aa, Glycine max
  Clone ID: PAT_MRT3847_139250C.1.pep
VYSKREKKCRNWKPPLIQLMLTSGNLNTMFMNILNYEVSMYICFRSLFILLKAKICLMRQSPSVVFSQP

SEQ ID NO: 186311 - protein, 228 aa, Glycine max
  unsure (1)..(228): unsure at all Xaa locations
  Clone ID: PAT_MRT3847_139251C.1.pep
DAWGDVFEWLDKQEEESVVYVXIGSGYTMSFEEMKEMALGLELSGNKFVWSVRSPVTKAGTGNYFTAGEEGGIGTTLESNNEPSFPDEFYRIQTNGIVITDWAPQLDILKHPSIGGFVSHCGWNSLIESVSCGVPIIGLPLFAEQMMNATMLMEEVGNAIRVEVSPSTNMVGREELSKAIRKIMDTDDKEGCVMRERAKELKQLAERAWFHDSPSYLALSKITHSNGV

SEQ ID NO: 186312 - protein, 244 aa, Glycine max
  Clone ID: PAT_MRT3847_139252C.1.pep
MASISRFCCVHMRASLCNFTAQKGPSPPTTLDLEHHKTTPCLLSSIEEGRAVNRRQLILHTPVAVAAFAVPNALALNDVSEDVRVYTDDENKFKIEIPQEWQVGTGDGESSGFKSITAFYPTVASNSNVSVVITGLGPDFTRMESFGKVDEFAQTLVSGLDRSWRKPPGVAAKLIDCKSSDGIYYIEYSLQNPGESRRYLYSAIGMASNGWYNRLYTVTGQYVEEETDKYASKVQKVVASFRFI

SEQ ID NO: 186313 - protein, 233 aa, Glycine max
  Clone ID: PAT_MRT3847_139253C.1.pep
MRGCTLPLTKFVPPLPHVAIGIKLKPFTFSIDSTHSLSSTPKHPLFLSTHHHSKSNAHFSFSVSAQQQQQQQVEADEEENFQVLTALKTACNDILIVDTPKSRMLLLDSSYSVHSILYKEQKWTGSYWDEFASLPVIVPKGPIAILGLGGGTAAHLMLDLWPSLQLDGWEIDQILIDKARDYFGLSDLEKTTDNGGVLNVHIGDVFITSEDFHQRYAGIIVDLFSDGKVLPQL

SEQ ID NO: 186314 - protein, 69 aa, Glycine max
  Clone ID: PAT_MRT3847_139254C.1.pep
TIIKSQVIHSIFSHDHIIKHYLFLRHTLLAWNMNEIIMILINTESSFHTQYLLLGALAPLCTTRHGKSL

SEQ ID NO: 186315 - protein, 248 aa, Glycine max
  Clone ID: PAT_MRT3847_139255C.1.pep
MAFIWRFCGVSLCNFTASNAQKGPSPSLPITLDLEHHITTPSLLSSIEEEEGRAVNRRQLILHTPVAAAAAFAVPNALALNDVSEDVRVYTDDENKFKIEIPEEWQVGTGDGESSGFKSITAFYPTQASNSNVSVVITGLGPDFTRMESFGKVDEFAQTLVSGLDRSWRKPPGVAAKLIDCKSSNGIYYIEYLLQNPGESRRYLYSAIGMASNGWYNRLYTVTGQYVEEDTDKYASKVQKVVASFRFI

SEQ ID NO: 186316 - protein, 100 aa, Glycine max
  Clone ID: PAT_MRT3847_139256C.1.pep
VFEDQFTFFWQFAQEGLLFYHLWSQPEVSTLSRKFWFFCWSIGAFLSRPWSSFGGFWVGIPSLTLISCKLFFRFCKSKPAPFWQGTNWPPKKNPLAWFVI

SEQ ID NO: 186317 - protein, 49 aa, Glycine max
  Clone ID: PAT_MRT3847_139257C.1.pep
DTSLATHMHDLRIFHGAAMHNSVFQFLRSTIRARHIYSPPSMHVGILCS

SEQ ID NO: 186318 - protein, 50 aa, Glycine max
  Clone ID: PAT_MRT3847_139258C.1.pep
LKTWCTKIYYLDILFKIIQSLEKFSENYRLAKNEEFDIPTKRIIRTFYSP

SEQ ID NO: 186319 - protein, 93 aa, Glycine max
  Clone ID: PAT_MRT3847_139259C.1.pep
PQGNKAIHTLSVSHVCGFSWPCHNLRKCPLASFERPTRTSTNIRINYLVVPTLADPLYSHTDAPLGVPHFVDDCMHDGLPHDPCPYACHGSFI

SEQ ID NO: 186320 - protein, 70 aa, Glycine max
  Clone ID: PAT_MRT3847_13925C.1.pep
GQVVGQVALQQLPRLWQPLTEHILSGQHPGIRDVACDTRRAWIGLEREVDDEVPHWSKGDESPTQKRVSC

SEQ ID NO: 186321 - protein, 71 aa, Glycine max
  unsure (1)..(71): unsure at all Xaa locations
  Clone ID: PAT_MRT3847_139260C.1.pep
MHGGKKAXESIKETATNIGASAKAGMEKTKATGPXKAERMTARDPVQKVVGTPKEEWQRLSRRSWTSMRRV

SEQ ID NO: 186322 - protein, 61 aa, Glycine max
  Clone ID: PAT_MRT3847_139261C.1.pep
PLPVSSKSWVCESLCFLQGCRSSKFSVVLQMDSCRHNCSGHPQKHLKGSTHSSSISIKSHK

SEQ ID NO: 186323 - protein, 235 aa, Glycine max
  unsure (1)..(235): unsure at all Xaa locations
  Clone ID: PAT_MRT3847_139262C.1.pep
PDYHFFDGTSERQNCTEKNHIQWTYNAGIHMSGVAALWNMSETNGDAEAAGRWRERLGGIINGTDIFFNAEGAPGVMIEMACERNGLCDHDQRSFKAYLSRWMGYTMLSAPWTRDRIMPKLRTSAAAAAQQCSAGKGGCGLRWWRGGVNDGEVGVGEQMSALEVMQNLLVDQVSGPVGLDTGGISETDPTAGSDGGNVRIEHDAITTXDKAGAAILTIVVFAVFLGGGGWLIMSE

SEQ ID NO: 186324 - protein, 50 aa, Glycine max
  Clone ID: PAT_MRT3847_139263C.1.pep
ARFVKGALLNHIINYENKINQNHVYLRQNMHLETTNLIEQMQRGTRCELT

SEQ ID NO: 186325 - protein, 141 aa, Glycine max
  unsure (1)..(141): unsure at all Xaa locations
  Clone ID: PAT_MRT3847_139264C.1.pep
IATSQIQISQRNPNSNPNPPKMSSPLTYPAVLDDKDLDDAALWAMIDSATASHSPSKCKSLASAKFPIRQLPSPISNPSPPPKFRKVLRDSGDSGEVVQDPWPYRPPRKIARTCPSEESSPLALVRGVQRTPXPLKGFSSP

SEQ ID NO: 186326 - protein, 77 aa, Glycine max
  unsure (1)..(77): unsure at all Xaa locations
  Clone ID: PAT_MRT3847_139265C.1.pep
SRIVGAFSNIFSSTNDMLFNSCSTSMELPFTMVALPHVTYFFNFIPVITFGPTSPFSXXFTATSPIHDLFPNDXLPW

SEQ ID NO: 186327 - protein, 129 aa, Glycine max
  unsure (1)..(129): unsure at all Xaa locations
  Clone ID: PAT_MRT3847_139266C.1.pep
PPYLGPRGAVFALVFAPATPSRKKTPLAGHGQRREGANPGQPQPKGRARHPPKGGGQNQEGARDDRPPHRRRNRKGDRHAPGPGPSPPAGXRERPPWAAPPPQPQRRRLAGVPPAPGPGHRPPPSSPTP

SEQ ID NO: 186328 - protein, 128 aa, Glycine max
  unsure (1)..(128): unsure at all Xaa locations
  Clone ID: PAT_MRT3847_139267C.1.pep
MASYRPFPPQSSQIPNPIPGGNHQYNNNNNQNQNWGAYGDPSTSSFPQIPPNSNYHQNQHHVPYAPAPSNPHHPPHYPYPPPPPPPPPPEASYQPXXPPPPPAAMYYPSSSQYSNQPPAPXPGLSAPH

SEQ ID NO: 186329 - protein, 243 aa, Glycine max
  unsure (1)..(243): unsure at all Xaa locations
  Clone ID: PAT_MRT3847_139268C.1.pep
YLVPVFVAEIAPKELRGTPTTLNQFDFCSNYLSFTIGNVLSWRALSIIGLIPTVVLLLGLFFIPESPRWLAKRGRQKDFVAALQILRGKDADISEEAEEIQDYITTLERLPKSRLLELFHRRYLRSVTIGIGLMVCQQFGGINGICFYTSSIFELAGFSPTIGTITYACLQIVXTGLGAALIDKAGRKPLLLFHFXISGSXLVVXCMFAAVAFYSQVHEVXXXAVPALAVMGILVSLGIIFNR

SEQ ID NO: 186330 - protein, 56 aa, Glycine max
  Clone ID: PAT_MRT3847_139269C.1.pep
AIREGCWFITMPGGPNHFLCEKQATEVLGLVVELGVSEWSMSPYDARKEVVGWEPI

SEQ ID NO: 186331 - protein, 253 aa, Glycine max
  unsure (1)..(253): unsure at all Xaa locations
  Clone ID: PAT_MRT3847_13926C.1.pep
TRPEGSNAALSKMDQLNKDLRQGSDNSSPSLAMPVMPETTQISAEADCAPVKPLYTKELSTSENIVSQIENSSLTDGVDVEKVCHGVCLNAEQVTIETVAMPMVDNGSELNDPGLQTSSVRTEEENAADRDACRLKLMNEPPPVPRGNGEGCVSDEEKITLSTDMLEDDSYGSDCESDENRAVTIGVDTERYVEDDDYEDGEVREPLDPSTAEDTICEVREVEHPDCSNXVNKQMEKGMVSGDCXTSYQXVEK

SEQ ID NO: 186332 - protein, 74 aa, Glycine max
  Clone ID: PAT_MRT3847_139270C.1.pep
LGTINPGLRWTITYHIKKDKKASHQRQHDAQQRCILMQHGYECHIQGSHLRAQQGRSYREHILGNLKFYVLQPM

SEQ ID NO: 186333 - protein, 213 aa, Glycine max
  Clone ID: PAT_MRT3847_139271C.1.pep
MHHPKHSKYSWACRASAHASVHAYAQPFFPKQKPMSHGQTKKPQADGEPTECGDVFGVSTAAEPHAAPVVSAGIGSAAIDGDPITIGEALEAAAISIGDKPVDQNDADAIGVAEIRATGENKVRSGGVGETAQEAATFNSHVMRVQDMTKLSDILTDAAEKLPVDKAVTKEDAEAVYTAEVQFPWQRDAAEVVAEPGGVAASMATAANLNELS

SEQ ID NO: 186334 - protein, 60 aa, Glycine max
  Clone ID: PAT_MRT3847_139272C.1.pep
GKSELTTVPALPIVRDVPKPPALKTPVRPWALDLPQPALPKILESPKGSQFSKALATSNA

SEQ ID NO: 186335 - protein, 78 aa, Glycine max
  Clone ID: PAT_MRT3847_139273C.1.pep
KGLKFFKTGGGVFTFSIPFFFLEKKIGLLKLGRLKVGTFPKVFGSHQTKSKAFVFKIILRKGAREKGPVERRIRVQSK

SEQ ID NO: 186336 - protein, 84 aa, Glycine max
  Clone ID: PAT_MRT3847_139274C.1.pep
RNPKLYNSNLCQHKHENKHAFTINHRYARENPPVTKKTALKNRAGVNKLPPPKNQNKDRRVPNPPFLTGSPSRPCTYMLCSSPS

SEQ ID NO: 186337 - protein, 147 aa, Glycine max
  Clone ID: PAT_MRT3847_139275C.1.pep
MATTPGLCGSVLLSTSFLRKQAMASVNMRMLKANAGVFGLKGGRGGRVSAMASYNVKLITPEGEQEFECPDDVFILEKAEEFGIDLPYSCKAGACSSCAGKVVSGKVDQSDGSYLDDTQIGNGFVLTCVAYPTSDVVIQTHQEDELF

SEQ ID NO: 186338 - protein, 284 aa, Glycine max
  Clone ID: PAT_MRT3847_139276C.1.pep
RTQRRSTQLNFKEQLASAKKELEEVKLNIEKATAEVNYLKVAAASLKSELENEKSSFASIRQREGMASITVASLEAELDSTRSEMVLVQMKEKEGREKIAELPKKLQQAVEEANQANLLAQAAREELRRIKEEAEQAKAGASTMQSKLLAAQKEIEAARASERLAIAATKALQESESSSRNNNELDSSSWVTLSVEEYYNLSKQAHDAEQQANMRVAAANSEIEIAKESELKTLEKLNDVNREMAARRESLKIAMDKAEKAREGKLGVEQELRKWRAEHEQQRK

SEQ ID NO: 186339 - protein, 63 aa, Glycine max
  Clone ID: PAT_MRT3847_139277C.1.pep
EETLLTVGVAVQLVAEVRRSAPMTIPTTPPAKACGCRTVFPHKNATALNATAATLGLVTQHSS

SEQ ID NO: 186340 - protein, 144 aa, Glycine max
  Clone ID: PAT_MRT3847_139278C.1.pep
MLLFSHSHTTAMEAITEGVNNINISDSYKKNRIQVSNTKKPLFFYVNLAKRYMQQHNEVELSALGMAIATVVTVAEILKNNELAIEKKITTSTVDIKDDSRGRPVQKAKIEILLGKTEKFDELMAAAAAAAEDGENGDVEEHTA

SEQ ID NO: 186341 - protein, 195 aa, Glycine max
  Clone ID: PAT_MRT3847_139279C.1.pep
QTFFSGLESLDDFLTQAATGTGKPALHSFNGKGGEENFVTPASSSINSFGECDTTQVQRCPEYHTPQDSLTFNEAAVFNEDDIHTSNRRLETEEIVDLNPACPGDDVIDYQSMKSGEDPTLGIPVHEELTNAADSPTLVDFLHADVTREKEDSNKRKKDGSTSCSLRKNRRCIAGEEDKGAKTSRQLRKQQLVNL

SEQ ID NO: 186342 - protein, 45 aa, Glycine max
  Clone ID: PAT_MRT3847_13927C.1.pep
PPVSSFSYIWRALTPTFVAHLRRVFTCYITEQFGCMHSLCVGQEL

SEQ ID NO: 186343 - protein, 144 aa, Glycine max
  Clone ID: PAT_MRT3847_139280C.1.pep
MLLFSHSHTAMEAITEGVNNINISDSYKKNRIQVSNTKKPLFFYVNLAKRYMQQHNEVELSALGMAIATVVTVAEILKNNELAVEKKITTSTVDIKDDSRGRPVQKAKIEILLGKTEKFDELMAAAAAAAAEDGENGDVEEHAA

SEQ ID NO: 186344 - protein, 49 aa, Glycine max
  unsure (1)..(49): unsure at all Xaa locations
  Clone ID: PAT_MRT3847_139281C.1.pep
SNVFXFFFNLXIVLNIDIFKFLSLYICNVNLSSFGIXNMSQYYQIIIRL

SEQ ID NO: 186345 - protein, 148 aa, Glycine max
  Clone ID: PAT_MRT3847_139282C.1.pep
VKHTDKVLVFLPQYLQKRTRETNKKEKKKRKKPSSLSLTLTEEPKAKIKQERSVRNRAFIEMLKLGDFTLVGLTHPDRTKHTQTKMQTKCIPNVISPPLYLQFWIKLPDSTLLLNPSPFFLFDGLFVTCTMHPTPTVLFSLSSMISGC

SEQ ID NO: 186346 - protein, 146 aa, Glycine max
  Clone ID: PAT_MRT3847_139283C.1.pep
MEVYGKSMVAGPANVIFLSSILGQEGPIPGHKCDWKCQNEHVCGNMYRCKLTGLTHICDKNCNQRILYDNHSSLCRASGQIFPLTPAEEQAVRGVRRKLDAENLPSESCGFKRRRGDAQFHPSPFERSFSAVSPICSQVGDGMDMS

SEQ ID NO: 186347 - protein, 237 aa, Glycine max
  Clone ID: PAT_MRT3847_139284C.1.pep
MAMRNMIVITVTTTMVMVMISIVGGSASWCVAKIGASEEALQTALDSACEAGGGADCAPIQPDGLCYVPNTLQAHASYAFNSFYQRNTRAPHACLFHGASTIAQTDPSYGSCVYPSSATPSTAGVTNTNTTVTTPAAMPNVAAPTTTTPIHGGDGVGMNPLIPENSTSAPNSNTILTTTSLLVFLLIYVPYPLIGLPVPQCLSVFTVWGNWNIPVWLDATTYYVSGRCRATIVFFII

SEQ ID NO: 186348 - protein, 104 aa, Glycine max
  Clone ID: PAT_MRT3847_139285C.1.pep
YASLTLANKQNKLAKDKSGAMQQKTVTRNGKLQFEPRRRKTIIIVVNILKSKKRNAAVDDITESQSVLVILSRLIGEASTLAEEVREDDGDGEETDGDDERVKS

SEQ ID NO: 186349 - protein, 121 aa, Glycine max
  unsure (1)..(121): unsure at all Xaa locations
  Clone ID: PAT_MRT3847_139286C.1.pep
CILFLNXXRPXGRTDEKKSKRNKSNIHMSGXLYDGGNRHWTKHEKNLALTEEEKMEVIRNRGIAADVLAKRAHEFETHAAHESLKDQIPAGDKQHTTKVHKFAKNMKLRQSVVGELKHPTD

SEQ ID NO: 186350 - protein, 47 aa, Glycine max
  Clone ID: PAT_MRT3847_139287C.1.pep
VVLTTEGGVSNNLSHNRRSHLFYSTSHSVTVRCCTGGHQVKGTISCA

SEQ ID NO: 186351 - protein, 86 aa, Glycine max
  unsure (1)..(86): unsure at all Xaa locations
  Clone ID: PAT_MRT3847_139288C.1.pep
AISEILVRNSLVDMYAKCDKFGEANRIFADLAHQSSVPWXALISGYVQKGLHEDGLKLFVEMQRAKIGADSATYASILRACANLAS

SEQ ID NO: 186352 - protein, 56 aa, Glycine max
  Clone ID: PAT_MRT3847_139289C.1.pep
LMEQLVLEHFHHCQEWEPHNQDLAQKCHHHCQDLGTSSSISIATRKWILRCEVKFR

SEQ ID NO: 186353 - protein, 105 aa, Glycine max
  Clone ID: PAT_MRT3847_13928C.1.pep
MAIEVCSEISSTGISPRISFSHDLKNTEDASVRVEDRHRGSDLCLLDSSSDFVFCITNGLAQQLSSADELFSNGKIIPTEIKRVSKEPKEPSRPQPATTEKIQKK

SEQ ID NO: 186354 - protein, 178 aa, Glycine max
  Clone ID: PAT_MRT3847_139290C.1.pep
MSNSQQNELHYSTANGDERSNPCLANTRCSFCFPCCFGSRRDSATLGFGWWERVRATSSWSESRSEAQPVTGSPGGRWWSGGVRAFMKVREWSELAAGPRWKTFIRRFSRSPSGGSRHAAGKYQYDPLSYALNFDEGHNGDFGDDGYDGLRNFSTRYAAPPPIKSVSSDSNQDVAVLG

SEQ ID NO: 186355 - protein, 106 aa, Glycine max
  Clone ID: PAT_MRT3847_139291C.1.pep
HQKNKAQNKRRKKKNKDKTKHYTRNENIRNQNHINLTTINWGRKIHPARKPSAPYKFALFKPILPFSIQGPNPLNPGASAPPKPTLGAQKGKSLPRKLKLAHFNNP

SEQ ID NO: 186356 - protein, 116 aa, Glycine max
  unsure (1)..(116): unsure at all Xaa locations
  Clone ID: PAT_MRT3847_139292C.1.pep
GGAWKRGFLFNGPQGTVRSTIIAAMANFXGYNWIDLEWTVVKDKIKLRKFLIETFSRFIIVIEDIDXLIGLXTGQRRKKKEKVEEKDQRQKHQGMQERKVKSTQVTFFGFLNLIDG

SEQ ID NO: 186357 - protein, 48 aa, Glycine max
  Clone ID: PAT_MRT3847_139293C.1.pep
IVKKKKKLKFKKKKKKKRKKKKKKKKKKKKKKKKKKKKKKKKKKGGPF

SEQ ID NO: 186358 - protein, 57 aa, Glycine max
  Clone ID: PAT_MRT3847_139294C.1.pep
KSLEKIKLDFEKKDKKVEPPQAHVVSLQKQGADLRVEYDSLLEDNQNLQVQTLGPKS

SEQ ID NO: 186359 - protein, 159 aa, Glycine max
  Clone ID: PAT_MRT3847_139295C.1.pep
MVSELINANPIIYEKKERRPRTAPSAPHDEYAVELIDQQEVFDHIRDIKDPEHPYSLEELKVITEEAVEVDDQRNYVRVTFTPTVEHCSMATVIGLCLRVKLMRSLPSRYKVDIRVAPGSHATEAAVNKQLNDKERVAAALENSNLLNMVDDCLAPSYD

SEQ ID NO: 186360 - protein, 68 aa, Glycine max
  unsure (1)..(68): unsure at all Xaa locations
  Clone ID: PAT_MRT3847_139296C.1.pep
GFSVILILPLIFCFSDMSCTLTSPLNSLLGIKSKFSQKVLHFTASDFLSRHPSQXKSSXKSPLGYNFH

SEQ ID NO: 186361 - protein, 202 aa, Glycine max
  unsure (1)..(202): unsure at all Xaa locations
  Clone ID: PAT_MRT3847_139297C.1.pep
NILRRRGVLAEVEVLGNVRHRNIVRLLGCCSNNECTMLLYEYMPNGNLDDLLHAKNKGDNLGADWVISDXIALGGGSGIWYLHHEWEPGIRHRDLKXNNILLDPEKKGKMAEFCGGQLIXNEESLSVIGGFYGYIGPEYAYTLXVDEKSDIYSYRVVVMENLNGKRSGDAQFGDGNNIGDWGKAKIKTKDGIYDILDKNAGA

SEQ ID NO: 186362 - protein, 52 aa, Glycine max
  Clone ID: PAT_MRT3847_139298C.1.pep
SHKSIFETVKKKKKKKKKRKKKKKKKKKKKTYKKKKKKKKRNKISIIFVGWD

SEQ ID NO: 186363 - protein, 56 aa, Glycine max
  Clone ID: PAT_MRT3847_139299C.1.pep
ISLDPVATTAPTVAYGHDHGQARTEYVSCDQYLAPSLSASAAPTATVAAAAACTTT

SEQ ID NO: 186364 - protein, 141 aa, Glycine max
  unsure (1)..(141): unsure at all Xaa locations
  Clone ID: PAT_MRT3847_13929C.1.pep
TNNSHLRGTRASASPSLIMSSLGPHKSEWVKGQTHWQPSTSTVRRNTTTPSRLTIIAGSYAXELIKTLKTAAIPGLGIAAINESNATCRKXYASIWLENTEANQQTYRALLVTATELXQYIPGATLYGETLYQFTTDGRKI

SEQ ID NO: 186365 - protein, 90 aa, Glycine max
  Clone ID: PAT_MRT3847_1392C.1.pep
NKTKIKPKRKAGKRRHPANSKKIEKEGQKTTLSQLTNHGKARERKNNTGSEERKKKKSGQRQATTPHTPWKDHSRVRGGKTRPKGSPTGP

SEQ ID NO: 186366 - protein, 83 aa, Glycine max
  Clone ID: PAT_MRT3847_139300C.1.pep
SFSRENRCSKELIAVLRRTKWNEKEINYQNGTFRGLSGKTASLADYIHFASTEFYMLFNIQHDNEGEHSPLFILINILRVTQV

SEQ ID NO: 186367 - protein, 80 aa, Glycine max
  Clone ID: PAT_MRT3847_139301C.1.pep
RERRGRHLHMQWKSLHPLLNRWQALPTKPTTFTTPYSITYIRLSPTRNLCLNAFTHLFPNPFTLFLILFSGLHQHKSFPT

SEQ ID NO: 186368 - protein, 115 aa, Glycine max
  Clone ID: PAT_MRT3847_139302C.1.pep
ILSFDLKTINKLKLQKIIHGFCPVSKNYTDEYPGQGVRSPLQTLYLPGHCSQAGVQRLQGPRFLRGARHKSLFPSWHKIDTYREGLSPLRVGKNPAVPQMRGTRPLPFFRRCGDT

SEQ ID NO: 186369 - protein, 122 aa, Glycine max
  Clone ID: PAT_MRT3847_139303C.1.pep
LERCGGEWKHQKSVEQCKNKIDNLKKRYKVELQRIGSGGIATSHWHWFKKIEAIVGNSLSVKTVSDDDKAGSSGGGANSPSMARQTKNRYAPSNLHCHLGVNVLAVSSQCRATNFKQNSMPF

SEQ ID NO: 186370 - protein, 236 aa, Glycine max
  Clone ID: PAT_MRT3847_139304C.1.pep
TRPGNSEPEAVPEKTEKPEPLPTEVEEKPREQLQVDEEVAEASKEMETKKEIVIETAKSEGTSDDTIKEEKTEKEEETSLTVNATQVSSNAEPQENPVETSSEVVLETSKSEGALDDTAKEEKTDKEEETSLTVNAAQVSSQVSPEAAEKIVEEVDDKKESSISNVIEAESNEAADIIKSPEQASIDEEAKTDLNEEREIYVPAAVEEKVAVDVAANDDVDKKEPEAPNNAVPESS

SEQ ID NO: 186371 - protein, 127 aa, Glycine max
  unsure (1)..(127): unsure at all Xaa locations
  Clone ID: PAT_MRT3847_139305C.1.pep
MASNKVIATILVLSLLAYSTSFTNACGTCHPKPTPSPPPPSGKCPKDTLKLGVCADVLGLVNVVVGSPVSSKCCALLEGLADSEAALCLCTAIKANVLGINLNVPITLSVLLSACQKXTVPAGFQCA

SEQ ID NO: 186372 - protein, 118 aa, Glycine max
  unsure (1)..(118): unsure at all Xaa locations
  Clone ID: PAT_MRT3847_139306C.1.pep
GKSTFPHGTSRSVKRMPLSIGGGAGANNAIXMNMPNAALSMWRYCVGYLVFEVSNMTSPYIKCTAYTFITFVNSADDTINFXAFSHKLVQVXKIQEKDVSKFLQEEFFTVWSTQVRPA

SEQ ID NO: 186373 - protein, 324 aa, Glycine max
  Clone ID: PAT_MRT3847_139307C.1.pep
RPRQPTHLCVSKMEPNDNQLTSFFHHHHQQHQHHQPPPPPQTTASPTNGLLPNADGSHILYPHSVASAVSSQLEPAKRKRGRPRKYGTPEQALAAKKAATTLSHSFSVDKKPHSPTFPSSKKSHSFALGNAGQGFTPHVISVAAGEDVGQKIMLFMQQSRREMCILSASGSISNASLRQPATSGGSIAYEGRFEIISLTGSYVRNELGPVQVIVGTFFIDNKKHNVAGLKGEAPASKLPSPVCEPVPSLGSPRSVLSSSGNPIRGNDEHQAMDGSHFMIQQLGLHGTPPRSTDMGASGFKKSTGFELTGRTGHGAPQSPENWRL

SEQ ID NO: 186374 - protein, 91 aa, Glycine max
  Clone ID: PAT_MRT3847_139308C.1.pep
KYLLKKLQWQHTHLCVSKMEPNDNQLTSFFHHHHQQHQHHQPSPPPQTTASPTNGLLPNADGSHILYPHSVASAVSSQLEPAKRKRGRPRK

SEQ ID NO: 186375 - protein, 81 aa, Glycine max
  Clone ID: PAT_MRT3847_139309C.1.pep
EEERRIVSISKIQQIKEQKKVTYFVVEFINMAKGIRNLSSWMEVAPAPIIFPTKPSNSPALETITEEVAEDDEASMNTLLK

SEQ ID NO: 186376 - protein, 42 aa, Glycine max
  Clone ID: PAT_MRT3847_13930C.1.pep
MSLVKLLDTSAFDAWNLISIFGTTVAADAWLASEHVAVANTY

SEQ ID NO: 186377 - protein, 123 aa, Glycine max
  Clone ID: PAT_MRT3847_139310C.1.pep
ARAVFHITEKRAKVHLELGAAFYDWNFDQVGEDPKLLWTEEEEKKFEDAIRSNPPSPETYFWDHIFRAFPTKSGAHFGRSPFNVNSDDEDDEAGPLRNVFGQQTQNSRGSILLTPKKSQTKKK

SEQ ID NO: 186378 - protein, 64 aa, Glycine max
  unsure (1)..(64): unsure at all Xaa locations
  Clone ID: PAT_MRT3847_139311C.1.pep
GSSSKISIFSLVQSITLLPSLPSFLKPNRRKIRCCSTLHHIETXNNKLNLWVYYTLIAQLILTS

SEQ ID NO: 186379 - protein, 356 aa, Glycine max
  Clone ID: PAT_MRT3847_139312C.1.pep
MEPIDNHLTSFFHHHQQQQQHHQHQHQHPPPPPPTTASPTNGLLPNADGSHMLYPHSVASAVSSQLEPAKRKRGRPRKYGTPEQALAAKKAATTSSQSFSADKKPHSPTFPSSSFTSSKKSLSFALGNAGQGFTPHVISVAAGEDVGQKIMLFMQQSRREMCILSASGSISNASLRQPATSGGSITYEGRFEIISLTGSYVRNELGTRTGGLSVCLSNTDGQIIGGGVGGPLKAAGPVQVIVGTFFIDNKKDNGAGLKGDASASKLPSPVSEPVSSLGFRQSVDSSSGNPIRGNDEHQAMDGSHFMIQQLGLHGTPPRSTDWGHPDSRNTGFELTGRIGHGAHQSPENGGYDQIPD

SEQ ID NO: 186380 - protein, 74 aa, Glycine max
  Clone ID: PAT_MRT3847_139313C.1.pep
QRLVVCRDIIHLPQIHHCYQIQKPSWFFNREFVHSLHSQETGAPHDLSTQNQYFLNPDDPSLWTGEGVPCKPSC

SEQ ID NO: 186381 - protein, 29 aa, Glycine max
  unsure (1)..(29): unsure at all Xaa locations
  Clone ID: PAT_MRT3847_139314C.1.pep
GGDVFPGSTLSDHVFWFNNIPXXKLIGVL

SEQ ID NO: 186382 - protein, 96 aa, Glycine max
  unsure (1)..(96): unsure at all Xaa locations
  Clone ID: PAT_MRT3847_139315C.1.pep
RSKSNPLKFINPHSYYLSVPVXHFXSVICNLLSQLLQQEEMXKETPSCFSLPDCKEXLFSHHXGYHCALCXXWLXDWNMXXXYHIXKLSLRGQXVW

SEQ ID NO: 186383 - protein, 84 aa, Glycine max
  Clone ID: PAT_MRT3847_139316C.1.pep
QCRRCDGSGQVQSKQTMEVEIPPGVNDGDTMQIQGQGNFDKKRQITGDLYVVLHVDEKQGIWREGLHLYSKMSIDFTDAILGSV

SEQ ID NO: 186384 - protein, 66 aa, Glycine max
  Clone ID: PAT_MRT3847_139317C.1.pep
NKPEGCPTVYLEFPTFFSTGSTHWTPSDPLLLFWLGQVLASFWRYLCQSSRWMCLELVSPFQTWTR

SEQ ID NO: 186385 - protein, 81 aa, Glycine max
  Clone ID: PAT_MRT3847_139318C.1.pep
FLYHPTRGYWTTGVVLGGLTLSISLCSLNLLFSLPFMDPTNAPLLEHPSSILSALPEGANGQGSSPPKGQNGLRGTHHTGV

SEQ ID NO: 186386 - protein, 61 aa, Glycine max
  unsure (1)..(61): unsure at all Xaa locations
  Clone ID: PAT_MRT3847_139319C.1.pep
FLSVSFTHLSFLSLXFLMVIGIPLSSSGPKNQHLSFTSNTNNNSRKLNISSYHDTGIYFTH

SEQ ID NO: 186387 - protein, 50 aa, Glycine max
  Clone ID: PAT_MRT3847_13931C.1.pep
AAGSDSHSSLSIHLHLLMLLLHYHCLEPSCLLNPIHSVWSHTRLILFFCL

SEQ ID NO: 186388 - protein, 535 aa, Glycine max
  unsure (1)..(535): unsure at all Xaa locations
  Clone ID: PAT_MRT3847_139320C.1.pep
LGYSTRSITLYFYFDHLIELKIAFLSKEDIHKYNTFSALPPDLSQRIFNNMVYSSYLTPASLQPFRDSALQDICLGEYEYANGGGAAAAIVDDAWMDVISSQGSSLLHLDLSASDVTDHGLTFLGHCTNIISLNLNHCHQISDHGLECISGLSNLASLSFRRNYAISAQGLNTFSGLINLVKLDLERCPGIHGSLVHIQGLTMLESLNLNWCNCLVDVDMKPLSVLTNLKSLEISFNKVTDFGISFLKGLQKLNLLNLEGCQVTTACLDSLEELPALSNLNLSRCNLSNDGCEKFSRLENLKVLNLGFNDITDACLAHLKGLTKLKSLNLDSCRIEDEGLVHLAGHQQLNCLELSDTGIGSNGLHHLSXNGGLSKLCGLSSLKSLNLDARQVTDTGLASLTSLTGLTELDLFGARITDFGTNYLKCFKNLRLLEICGGELTDDGVKNIKELSSLKSLNLSQNCNLTDTTLELISGLTDLISLNVSNSGITNAGLQHLKTLKNLRSLSLESCKVTANGIKKLQSTDLPNLVSFRPQ

SEQ ID NO: 186389 - protein, 192 aa, Glycine max
  Clone ID: PAT_MRT3847_139321C.1.pep
MAGNIARKWRDLSGRSNWKGLLDPLDIDLRRYIIHYGQLAQATYDAFNSEKTSKYAGNSRYPKKDFFSKVGLENGNPFRYDVKKFLYATSKASDAEAFLLKSFSKDSWSKQSNWIGYVAVATDAGKEALGRRDIVVAWRGTIQAAEWVKDFHFHLDLAPEIFGGDSSAQVHHGFYSLYTSSTPGSKITDTSA

SEQ ID NO: 186390 - protein, 150 aa, Glycine max
  unsure (1)..(150): unsure at all Xaa locations
  Clone ID: PAT_MRT3847_139322C.1.pep
MVTAACQSGRVSFKHPSSHFHLPQCPSLLDLCIRKITHTLTREDIHKYNTFSALPPDLSQRIFNNMVYSSYLTPASLQPFRDSALQDICLGEYEYANGGGAAAAIVDDAWMDVISSQGSSXLHLDXSASDVTDHCLTFLGHCTNIISLNL

SEQ ID NO: 186391 - protein, 292 aa, Glycine max
  Clone ID: PAT_MRT3847_139323C.1.pep
LEPQVTTACLDSLEELPALSNLNLSRCNLSNDGCEKFSRLENLKVLNLGFNDITDACLAHLKGLTKLKSLNLDSCRIEDEGLVHLAGHQQLNCLELSDTGIGSNGLHHLSGLSNLEKINLSFTFVNDSGLSKLCGLSSLKSLNLDARQVTDTGLASLTSLTGLTELDLFGARITDFGTNYLKCFKNLRLLEICGGELTDDGVKNIKELSSLKSLNLSQNCNLTDTTLELISGLTDLISLNVSNSGITNAGLQHLKTLKNLRSLSLESCKVTANGIKKLQSTDLPNLVSFRPQ

SEQ ID NO: 186392 - protein, 69 aa, Glycine max
  Clone ID: PAT_MRT3847_139324C.1.pep
FHLFKKWRGSEFNLSLATSGCGRLTQLGSTQLRAHTVCLDSTYQRRPRGKSSRNYGSSKFHLKRLCVLG

SEQ ID NO: 186393 - protein, 343 aa, Glycine max
  Clone ID: PAT_MRT3847_139325C.1.pep
DAIRIGNYKDGLYPTDSREFAKRIFYTVFMGSENSSEMTRSRAKVLADEIGSWHLDVSIDVVVSAFLSLFQTLTGKRPRYKVDGGSNVENLSLQNIQARIRMVLAFMLASLLPWVHSKPGFYLVLGSSNVDEGLRGYLTKYDCSSADINPIGSISKQDLRAFLQWAAIHLGYSSLADIEAAPPTAELEPIRSNYSQLDEVDMGMTYEELSVYGRLRKIFRCGPVSMFQNLCYRWGARLTPSQVAEKVKHFFKYYSINRHKMTVLTPSYHAESYSPEDNRFDLRQFLYNARWPYQFRKIDELVSELDVKDVKDSGDHEAMAATSDGVGGMGVAAAGSGNPNVGL

SEQ ID NO: 186394 - protein, 24 aa, Glycine max
  Clone ID: PAT_MRT3847_139326C.1.pep
DSHLILRQDLYKSNHTFMIRHLEF

SEQ ID NO: 186395 - protein, 49 aa, Glycine max
  Clone ID: PAT_MRT3847_139327C.1.pep
HDPVTIDAKFGLCCEMFRTSESSIDIYVLGTILCKRFELAQINHVELLA

SEQ ID NO: 186396 - protein, 51 aa, Glycine max
  Clone ID: PAT_MRT3847_139328C.1.pep
VTNCDINMDHLSNIIILECSIPMTPHDRGSTATIQVELDGIATSALFCTGT

SEQ ID NO: 186397 - protein, 61 aa, Glycine max
  Clone ID: PAT_MRT3847_139329C.1.pep
MVRIMIQVLHYCSKRTHNRSDTYIFTKMLILPHMSSAHLPSDDASHWPIISHKVKPAFINS

SEQ ID NO: 186398 - protein, 88 aa, Glycine max
  Clone ID: PAT_MRT3847_13932C.1.pep
YMIGPLDISWSACHSSTNTLITCVSVDTFMANYVKTKKKKSISLLCSVFILLCNVGIPVTVSLKSLLPFSDISSYDQNNPQSLLSYPV

SEQ ID NO: 186399 - protein, 167 aa, Glycine max
  Clone ID: PAT_MRT3847_139330C.1.pep
MASGSKSVASILLALNLVLYFIVLVIASWAVNHGIQRSGETASVLSIPARIFPIYFPMGNMTTGFFVILSLVAGVVGFTTSLTGLQNIFQWNAPNLHAAAMSSLTTWALTLLAMGFACKEIELGWTDSNLRTLETITIIVSATQLLCTGVIHVGVSKVVAQRMGGRV

SEQ ID NO: 186400 - protein, 64 aa, Glycine max
  unsure (1)..(64): unsure at all Xaa locations
  Clone ID: PAT_MRT3847_139331C.1.pep
LXWTHHFLDHGXALAQLKVKLVSRGDSVGSMPIMTKIHRXSLWXXWIXXGXSGXXSSXXXSXRM

SEQ ID NO: 186401 - protein, 49 aa, Glycine max
  Clone ID: PAT_MRT3847_139332C.1.pep
ETENTTSVRILGWTPLRDVICNVSLSNYGTIVIYPIETSIDYNSQSHSG

SEQ ID NO: 186402 - protein, 67 aa, Glycine max
  Clone ID: PAT_MRT3847_139333C.1.pep
IDTFLFLGHFFYYKNLRKGGAKLKGRPLPHLQNHHPTIPSVLQNTFLNITAYHHSGRELNLLTNQNL

SEQ ID NO: 186403 - protein, 85 aa, Glycine max
  Clone ID: PAT_MRT3847_139334C.1.pep
DSTNISETMCTDLHCTTSIKLESPPSSIPTTTSPPPHKQSATPYPPASHTPRPKTRVQSPSMSASKSTTRVDVLRRRKRAQFRRR

SEQ ID NO: 186404 - protein, 241 aa, Glycine max
  Clone ID: PAT_MRT3847_139335C.1.pep
MPPRIQFHALVASSSWIVVITTITALLLLSFGCERGHALKVPFRVNDVLPVLPREISWPVLNNLHSAVDLLPYFVGSLTPANASVKWKGACFFDNTAKIEFAPSLEGATLYLKTEAAHSWTCMDLYVFATPYRITWDYYFSSREHTLKFDSWEEPAELEYVKQHGVSVFLMPSGMLGTLLSLIDVLPLFSNTGWGQKANLDFLKKHMGATFEKRIQPWRATVDPADVHSGDFLAVSKIRGR

SEQ ID NO: 186405 - protein, 54 aa, Glycine max
  Clone ID: PAT_MRT3847_139336C.1.pep
SSSNRAAHFALLHEFNTSRMYRNRDAPRATMSLYTTTFSILSSLASIKIMSRKG

SEQ ID NO: 186406 - protein, 107 aa, Glycine max
  Clone ID: PAT_MRT3847_139337C.1.pep
NMDENGHGFLEFDELVHALMPGLPERVLINQEQLLEVFRFFARDGNGYLPASELPGSLAKMGQPLPFRELALPYGEADNNGGGVLSFNEFPPLMAKSPPEFFGVKVP

SEQ ID NO: 186407 - protein, 134 aa, Glycine max
  Clone ID: PAT_MRT3847_139338C.1.pep
PSRPPTRPPTRRGRVGWPQARQPYSSETIDYIKSLDAEEDIALLKFHGWDLPVECARTLRISTMLLKKGVERGLTPFAIGSLMCRESLNKESVIEEVVQAALDSVLPGTSEATLLDSVSQILDLHLDEIVRSHL

SEQ ID NO: 186408 - protein, 95 aa, Glycine max
  Clone ID: PAT_MRT3847_139339C.1.pep
GIRLEAGWQVSPDLYGDNNTRLFTYWTSDAYQATGCYNLLCSGFIQVNSEIAMGATISPVSAYRNSQFDISILIWKVKSQESSWLLICRWKPPFN

SEQ ID NO: 186409 - protein, 75 aa, Glycine max
  Clone ID: PAT_MRT3847_13933C.1.pep
AWGLVLHVKGVGYGPVCYLLKTCRVGSAPGNGIGICSTHFWLVKVNDFRETVQSQLKNIWLFQNQCQWNNYEVNK

SEQ ID NO: 186410 - protein, 54 aa, Glycine max
  Clone ID: PAT_MRT3847_139340C.1.pep
RNIQVVDSSNNLKAPKGIGPFTEQSNCYDVQTGSNGDWGHYFYYGGPGKNPNCQ

SEQ ID NO: 186411 - protein, 418 aa, Glycine max
  Clone ID: PAT_MRT3847_139341C.1.pep
MGSSCGCGVTLVLVFCLWGVLISLSSAARLSASRQKLEVAKHLNRLNKPPVKTIQSPDGDTIDCVPISKQPAFDHPFLKDHKIQTRPSFHPEGLFEENKLSEKPDAKTHTPITQLWHANGRCPEDTIPVRRAKEEDVLRASSVKRYGRKKHRAIPKPRSAEPDLINQSGHQHAIAYVEGDKYYGAKATINVWEPKIQQTNEFSLSQLWILGGSFGQDLNSIEAGWQVSPDLYGDNNTRLFTYWTSDAYQATGCYNLLCSGFIQVNSEIAMGATISPVSGYRNSQFDISILIWKDPKEGHWWMQFGNDYVLGYWPSFLFSYLADSASMIEWGGEVVNSEPDGQHTSTQMGSGHFPEEGFGKASYFRNIQVVDSSNNLKAPKGIGTFTEQSNCYDVQTGSNGDWGHYFYYGGPGKNPNCQ

SEQ ID NO: 186412 - protein, 358 aa, Glycine max
  unsure (1)..(358): unsure at all Xaa locations
  Clone ID: PAT_MRT3847_139342C.1.pep
MADPYSNFFSSSSPLFRFNHNQYFPSSNPSPQHHNHNFINHTKTNDTTTTTAFFHYHQHQTTTAFSSFPPSPPLREELPLLKLSPTKQDEEEVEDLVSNCTGGAMDVEERIHLKEELEDDEDGSTSVTVALHIGLPSPSAAEMASVLSSSSHEITDKDQHGDHGAAEDSSSAGFRLNKGQYWIPTPSQILIGPTQFSCPVCCKTFNRYNNMQMHMWGHGSQYRKGPESLRGTQPTGMXRLPCYCCAPGCRNNIDHPRAKPLKDFRTLQTHYKRKHGIKPFMCRKCGKAFAVRGDWRTHEKNCGKLWYCICGSDFKHKRSLKDHIKAFGSGHAAYGIDGFEEEDEPASEVEQDNDDSTQ

SEQ ID NO: 186413 - protein, 123 aa, Glycine max
  Clone ID: PAT_MRT3847_139343C.1.pep
MGSSCGCGVTLVLVFCLWGVLISLSSAARLSASRQKLEVTKHLNRLNKPPVKTIQSPDGDTIDCVPVSKQPAFDHPFLKDHKIQTRPTFHPDGLFEENKLSEKPKAKAHTPITQLWHTNGRCP

SEQ ID NO: 186414 - protein, 78 aa, Glycine max
  unsure (1)..(78): unsure at all Xaa locations
  Clone ID: PAT_MRT3847_139344C.1.pep
SAGSAEDGAGVYPQRSLLLDLHQSWGGWDFHTSSPSYDLHSTAGRREAGPRVSCPWESKDLRSQAGTGMGRLAFYXXY

SEQ ID NO: 186415 - protein, 299 aa, Glycine max
  unsure (1)..(299): unsure at all Xaa locations
  Clone ID: PAT_MRT3847_139345C.1.pep
MGDGNYDMREFCIPDYILVPGSEVKSVSHVPACPVIAFINTKSGGQLGGELLVSYSTLLNKNQVFDLGKNAPDKVLQKLYATLETLKHNGDNFAAEIQNRLRIIVAGGDGTASWLLGVVSDLKLPQPPPIATVPLGTGNNLPFAFGWGKKNPTTDLQSVVSFLNHVKGAKXEMKIDSWHIIMRIKAPKEGSCDPIAPLELPHAMHAFNRVSSTDKLNLKGYHTYRGGFWNYFSMGMDAQVSYAFHSERKLHPEKFKNQLYNQSTYLKLGCTQGWFFGSLFQSASRNIAQLAKVKIMKKG

SEQ ID NO: 186416 - protein, 88 aa, Glycine max
  Clone ID: PAT_MRT3847_139346C.1.pep
TQATPPPKGLKLAGLNKNVIRGSHQPPPFKPRLIKAILPPAIKNPVLGTTVGKRWGGLQTLCQKQAPLKRRHPRSQKKPPFFGTHLPR

SEQ ID NO: 186417 - protein, 168 aa, Glycine max
  Clone ID: PAT_MRT3847_139347C.1.pep
VIFDSYSQFEESMLAYKMEEMGLSDEEGDEEEGEESGVEEGDEEDIRFKGRLVEEDFERKILHGFWLNDKKDIDLRLARFDYLMERRPELANSVLLRQNPHNVEQWHRRVKLFEGNPTKQILTYTEAVRTIDPMKAVGKPHTLWVAFAKLYEQHKDLANARVIFDKAV

SEQ ID NO: 186418 - protein, 126 aa, Glycine max
  Clone ID: PAT_MRT3847_139348C.1.pep
FVVMQLQQLLDVIEHASLCHSIKTQPCTYPHCRQIKKLFAHASRCEIRFSGGCQFCKKVWQGLTLHSKNCRDSACRIPRCMCVTFTFSQPTFNLFPKLCIRIYSLIYFLLNLQGSEETSRMDSNAI

SEQ ID NO: 186419 - protein, 76 aa, Glycine max
  Clone ID: PAT_MRT3847_139349C.1.pep
ATWHGPLTSVVAILNSRPKVAAEQEMGTQTKRKQNSKTRASKNKKGKITKGEKKTKTTAKERGKAKKRDKRKSKKM

SEQ ID NO: 186420 - protein, 103 aa, Glycine max
  Clone ID: PAT_MRT3847_13934C.1.pep
ATSLLEKKFGPFVEWDNSEVLKKQNRKTRTTNDEKLYRCECLEPILPSRKHCTHCHKTVASDIEFDGHNDGKCNAGLLAIEKNKDKNGSSKGRGNLKCDTLHE

SEQ ID NO: 186421 - protein, 50 aa, Glycine max
  Clone ID: PAT_MRT3847_139350C.1.pep
RVATRTACGPSVAATEGNDKHIVGAHASGCTGRLGYASLIPYVEPVVQVS

SEQ ID NO: 186422 - protein, 89 aa, Glycine max
  Clone ID: PAT_MRT3847_139351C.1.pep
ATSLIDSSFPSPPLLYYHPIHQKLLQNIFYDTLLWNTFNCLLILDKSLHISGILPGIILLHLPLSLFTSPFSKTQFKQSYQFASIFNEL

SEQ ID NO: 186423 - protein, 95 aa, Glycine max
  unsure (1)..(95): unsure at all Xaa locations
  Clone ID: PAT_MRT3847_139352C.1.pep
MEFIQSLVEPWMRDQRSRLLGLNEKASWGPLQWRMKRPRAWHREYKKRXPEIVPACPETXLALKAESVYYXQDLLCCMDLFECDYKRPGGEMIRA

SEQ ID NO: 186424 - protein, 42 aa, Glycine max
  Clone ID: PAT_MRT3847_139353C.1.pep
KPYRDLSHQCSVPKLLCWLSYTPKGLKCHFSPKWRLLGLHAG

SEQ ID NO: 186425 - protein, 404 aa, Glycine max
  unsure (1)..(404): unsure at all Xaa locations
  Clone ID: PAT_MRT3847_139354C.1.pep
MEMERIVEFPHTYMDTXPRKRARLGWDIAEVPKAQVGLFCGQEVENISSFSPSXHPPSSLFKGVARNGSPPWRDDDKDGHYMFELGDNLTSRYKIHSKMGEGTFGQVLVCWDRERKEMVAXKIIVRGIKKYLVAAMIEICGVATSLVNTINEFNYLYPNSVLVXKLGSSFYYDFWINKYRAFPIDLLHQIVSLVLLFKVALMHTPXRLRNDIKPNNRLLVSPEFVIFPDYTSXEIKIFVFEKSSYIQEDQTYSFXTRQFRAPEIILGFGXIDTFDIWSVCCILVXLCTCDSLIGQTHXNLEHLXMMERVRGPLRQPMLKRVDRHAEKYVRRGRLDWPEGATSRESIKAVMKLPRLQNLVMQHVDHSAGDLIHLLQGLLRYDPSERLTAKEALRHSFFMRDQFRR

SEQ ID NO: 186426 - protein, 145 aa, Glycine max
  unsure (1)..(145): unsure at all Xaa locations
  Clone ID: PAT_MRT3847_139355C.1.pep
AGARFFAWVSGGSSSASDHLVKVFKLEKFVDELPHMSQILGYHRLEGVSKFKVLKIGMFKKNWKLHRDLAPATENAFGTTNHTASVPGPTIEALYGDDTHVRGQNHLRPKHILAWDPTIPTVMTNITRGIPXVAHLHCGIHAPES

SEQ ID NO: 186427 - protein, 282 aa, Glycine max
  unsure (1)..(282): unsure at all Xaa locations
  Clone ID: PAT_MRT3847_139356C.1.pep
GPQDKIHSKMGEGTFGQVLECWDRERKEMVAIKIVRGIKKYREAAMVEIEVLQQLGKHDKGSNRXMHDLHMIHTDLKPENILLVSPEYLKIPDYKSTTRSPSSFFKRVPKSSAIKVIDFGSTTYEREDQNYIVSTRHYRAPEVILGLGWSYPCDIWSVGCILVELCTGEALFQTHENLEHLAMMERVLGSLPQTMMKRVDRHAEKYVRRGRLDWPEGATSRESIKAVMKLPRLQNLVMQHVDHSAGDLIHLLQGLLRYDPFERLTAREALRHSFFMREHLRR

SEQ ID NO: 186428 - protein, 371 aa, Glycine max
  unsure (1)..(371): unsure at all Xaa locations
  Clone ID: PAT_MRT3847_139357C.1.pep
MEMERIVEFPHTYMDRPPRKRARLGWDIAEAPKAQVGLFCGQEVENISSYAPSEHPPSSLFKGVARNGSPXGEMMTKMAITCLSXGDNLTSRYKIHSKMGEGTFGQVLECWDRERKEMVAIKIVRGIKKYREAAMIEIEVLQQLGKHDKGGNRXMHDLRMIHTDLKPENILLISPEYVKVPDYKSSSRSSCSYFKRVPKSSAIKVIDFGSTTYEREDQNYIVSTRHYRAPEVILGLGWSYPCDIWSVGCILVELCTGEALFQTHENLEHLAMMERVLGSLPQTMMKRVDRHAEKYVRRGRLDWPEGATSRESIKAVMKLPRLQNLVMQHVDHSAGDLIHLLQGLLRYDPSERLTAKEALRHSFFMREHFRR

SEQ ID NO: 186429 - protein, 69 aa, Glycine max
  Clone ID: PAT_MRT3847_139358C.1.pep
MMEVVIVAIAATLGNLLMGWDSSTIAAGMTYIKKEFVLDATLEGLIVSMSFITGTIVTLFSGTVSDLVG

SEQ ID NO: 186430 - protein, 88 aa, Glycine max
  Clone ID: PAT_MRT3847_139359C.1.pep
GDRDRGAVTLVKHNEDDRKTESESKLARLAGHDDDSSEQRGRNYNKDVESHFVGRTARYGEDHETRRHIRDDDNHREHEHRRDNDNRG

SEQ ID NO: 186431 - protein, 57 aa, Glycine max
  unsure (1)..(57): unsure at all Xaa locations
  Clone ID: PAT_MRT3847_13935C.1.pep
PKAKXFPXXVXAXFXIXSQEXXXXYMLXSPAXGWCXHTLQSRXXRSPNCPCKSXXIF

SEQ ID NO: 186432 - protein, 87 aa, Glycine max
  unsure (1)..(87): unsure at all Xaa locations
  Clone ID: PAT_MRT3847_139360C.1.pep
GNHGCACMNRLYGFYDECARRFNVRLWATFTHCFSCLPVASRVVEXLKGGASPTCIHTLFWLLIPLVQLPTLVPVAGWLCDLVWSCP

SEQ ID NO: 186433 - protein, 91 aa, Glycine max
  unsure (1)..(91): unsure at all Xaa locations
  Clone ID: PAT_MRT3847_139361C.1.pep
RTLRTCGWFGPVWDKQIPASSQVRSRNGFSVLVTGAVGFVGTHLFSALKLRGDWVLXLDNFNDYYYPSLKRALLGLLDRIWVFIIXGDIND

SEQ ID NO: 186434 - protein, 75 aa, Glycine max
  Clone ID: PAT_MRT3847_139362C.1.pep
RFLYWNGSKPMLCLTETELIKEFLSKHITVSGKSCQKRQCSKNFIGEGLMMANGEDWYHQRHIVAPAFMRDRLKA

SEQ ID NO: 186435 - protein, 114 aa, Glycine max
  unsure (1)..(114): unsure at all Xaa locations
  Clone ID: PAT_MRT3847_139363C.1.pep
QGKNKKHVYFGTADSYYCSWTFHSPCHLSLTLTPNMPQMHHHHPRRHNLHHSNSKALCKCRFVPFFLRAWPTSSSSSSPPFSSSASSSSTSASSPPTRXLSAAVIRHAGRRRRT

SEQ ID NO: 186436 - protein, 114 aa, Glycine max
  unsure (1)..(114): unsure at all Xaa locations
  Clone ID: PAT_MRT3847_139364C.1.pep
GPVPVDPRVREDEAEXAAALXXSPNSAAASFEMDLCIYSSRGGSSYKRDFEGEAYDQRTSSRASDDDDNNRGGGGNTRKKLRLSKEQSAFLEESFKEHNTLNPKQKLALAKQLS

SEQ ID NO: 186437 - protein, 60 aa, Glycine max
  Clone ID: PAT_MRT3847_139365C.1.pep
EIGKLKWHLELRMACVFPSVFFITFLVICSATARSPIFFSSEFPFHFILFCVSPFNFLGN

SEQ ID NO: 186438 - protein, 61 aa, Glycine max
  Clone ID: PAT_MRT3847_139366C.1.pep
EGATKLAESLLKGTEEFVKLDLSYCGLTFNFVLNTSVNFFCSVIELNLEGNPIMPEVCCLD

SEQ ID NO: 186439 - protein, 79 aa, Glycine max
  unsure (1)..(79): unsure at all Xaa locations
  Clone ID: PAT_MRT3847_139367C.1.pep
HFTKRPEEIGAGDQHDMFGYATDETPXHMLFFHALAFLGGGRITLVRKNGTCPWMKPDAKTQKTAEYYNGNGARXPGRV

SEQ ID NO: 186440 - protein, 79 aa, Glycine max
  unsure (1)..(79): unsure at all Xaa locations
  Clone ID: PAT_MRT3847_139368C.1.pep
ETRDLIDRYKRLNGRMIRLFRSMICANATVDSQRFKGNIEEVSTAGHLVGTECXITWTVRLSKLKPTTSLLHKEGKIIS

SEQ ID NO: 186441 - protein, 43 aa, Glycine max
  Clone ID: PAT_MRT3847_139369C.1.pep
YSHVEGMFQYQSSAFIIYVLIERVRIESVQTILQFPLTPCLPY

SEQ ID NO: 186442 - protein, 36 aa, Glycine max
  Clone ID: PAT_MRT3847_13936C.1.pep
MSQAFTMFKYHVFFNNSTMIVRFKEPFEPAPLIVSV

SEQ ID NO: 186443 - protein, 64 aa, Glycine max
  Clone ID: PAT_MRT3847_139370C.1.pep
LLITALILIPQGLATYYKPIKKPPVHHPTTYKPPLYKLPVYKPDPPVYKPKPPVYNPPYKIPPY

SEQ ID NO: 186444 - protein, 42 aa, Glycine max
  Clone ID: PAT_MRT3847_139371C.1.pep
IKGTEDQYDVRSECPCIYVDGLLMRTTYTLSDHRAHQLMHRL

SEQ ID NO: 186445 - protein, 347 aa, Glycine max
  unsure (1)..(347): unsure at all Xaa locations
  Clone ID: PAT_MRT3847_139373C.1.pep
MSNFLSNTNPNPNKSFEVNQPPTDSVSSLSFSPKANFLVATSWDNQVRCWEVAQNGVNVATVPKASITHDHPVLCSTWKDDGTTVFSGGCDKQVKMWPLLSGGQPMTCCLHDAPLKXLLGFPEMNLLVTGSWDKTMKYWDTRQSNPVHTQQLPERCYAMTVRHPLMVVGTADRNLIVYNLQNPQVEFKRIVSPLKYQTRCLAAFPDQQGFLVGSIEGRVGVHHLDDSQHGKNFTFKCHREGNEIYSVNSLNFHPVHHTFATSGSDGAFNFWDKDSKQRLKAMLRCSQPIPCSTFNNDGSIFAYSVCYDWSKGAENSNPAAAKTYIFLHLPQESEVKGKPRIGATGRK

SEQ ID NO: 186446 - protein, 40 aa, Glycine max
  Clone ID: PAT_MRT3847_139374C.1.pep
FCCFKKKKKIKKKKKKKKKKRKNYKKKKKKKKKKWAVRSK

SEQ ID NO: 186447 - protein, 54 aa, Glycine max
  Clone ID: PAT_MRT3847_139375C.1.pep
QIYHIPLVKNTIFLENQHAQEQTYIPIIGFTNPNYGIKSYKQAIDSLHLCISLC

SEQ ID NO: 186448 - protein, 89 aa, Glycine max
  Clone ID: PAT_MRT3847_139376C.1.pep
NFLGPVPTPKDSGQKKQQQCSLDQTQQLLGWEKLKRWEKTSLFFLAHFFFKPLAGDLDSSKNKSKCWGSPPISNPYGLGQNKFFRVNFP

SEQ ID NO: 186449 - protein, 67 aa, Glycine max
  Clone ID: PAT_MRT3847_139377C.1.pep
ERQQFRSSSVQKAKNIRKIQAGRVFKSKWKGQFHRLLTFHSLPCLHAYILLIFSNLGTLCFLYFFSS

SEQ ID NO: 186450 - protein, 54 aa, Glycine max
  Clone ID: PAT_MRT3847_139378C.1.pep
DRSKKRDPRAFRLRFDTKLSLVILPPLHCLSKLFFRTQLGILSEWLLPHQHCRP

SEQ ID NO: 186451 - protein, 72 aa, Glycine max
  Clone ID: PAT_MRT3847_139379C.1.pep
GTGLAVPDFRIFAGRGYCLVRWNRRMEDSFLSIDDSLGDTSLTSGGLCRKPLWFDILYFFPHQLIFRDIDVQ

SEQ ID NO: 186452 - protein, 592 aa, Glycine max
  unsure (1)..(592): unsure at all Xaa locations
  Clone ID: PAT_MRT3847_13937C.1.pep
MPSTSCWTIGKDLGYLHFGLVCEIVAMIESYLRENKLFVDYNEPQQDRVYSSYLELNLSDVEPCISGPKRPHDRVPLKEMKADWHACLDNKVGFKGFAIPKEAQGKVAKFDFHGQPAELKHGSVVIAAITSCTNTSNPSVMLGAGLVAKKAHELGLKVKPWVKTSLAPGXGVVTKYVHIKLTVVLESXLNEQGFNKGGFGCTTCIGNSRVLEHSVTSAISENDIVAAAVLSGNRNFEGRVHPLTRANYLASPPLVVAYALAGTVDIDFQKEPIGTGKDGKNVYLRDIWPSTQEIAEAVQSSVLPDMFRSTYEAITKGNTMWNQLQVPAETLYSWDPKSTYIHEPPYFKGMTMDPPGAHGVKDAYCLLNFGDSITTDHISPAGNINKDSPAAKYLLERGVEHKDFNSYGSRRGNDEVMARGTFANIRLVNKLLNGEVGPKTVHIPTGEKLYVFDAAQRYKAEGQDTIVLAGAEYGSGSSRDWADKGPMLLGVKAVIAKSFERIHRSNLVGMGIVPLCFKSGEDADTLGLTGHERYTIDLPSNISEIRPGQDVTVTTTTGKSFTCTVRFDTEVELAYFNHGGILPYVIRNLIKQ

SEQ ID NO: 186453 - protein, 97 aa, Glycine max
  Clone ID: PAT_MRT3847_139380C.1.pep
HHPPLLGNILGKHIKRGFFEKKKVPPPKWLGGGFLSPKNPENFLFWGSFPRAPEGLFPPPPPIIFSGGGHFFFDPPPPPFRLFLLYKLCLKNPPWVP

SEQ ID NO: 186454 - protein, 72 aa, Glycine max
  Clone ID: PAT_MRT3847_139381C.1.pep
IEAEKKRVKEEAHQLALIFETVGAFKVNRNCGYGQQVFGSVTDQDLVDIIEGHLQREVHNTIVDLAKIMQTS

SEQ ID NO: 186455 - protein, 49 aa, Glycine max
  Clone ID: PAT_MRT3847_139382C.1.pep
MRCNFMVVGGMEHGSRLPCCRVEEHLFFLVDSRDKFALSLFAKKGVFYL

SEQ ID NO: 186456 - protein, 258 aa, Glycine max
  Clone ID: PAT_MRT3847_139383C.1.pep
MASTQCFLHHHALTTPARSPSQRIMVSTKPNQLVCKAQKQEDIDVSPISRRLALTVLIGAAAVGSKVQPADAAYGEAANVFGKPKTDTDFLPYNGDGFKLSIPSKWNPSKEVEYTGQVVRYEDNFDSTTNVVVTITPTDKKSITDYGSPEEFLSKVDYLLGKQAFFGETQAEGGFDPNAVATANILETATPVIDGKPYYFLSVLTRTADGDEGGKHHIIRATVKDGKLFICKAQAGDKRWFKGARRFVESAASSFSVA

SEQ ID NO: 186457 - protein, 65 aa, Glycine max
  Clone ID: PAT_MRT3847_139384C.1.pep
LNLKKVFEILNFGGEKPGPMAWKLTPPKVRGVLGFPIYFKSKTKTALKLKKPFKRAPPLLLFIGV

SEQ ID NO: 186458 - protein, 77 aa, Glycine max
  Clone ID: PAT_MRT3847_139385C.1.pep
KIGALVIISGDFSDLEASVCLLGFPSCKAAKIKFVGKVFCFAAFIHCILFHSFWEGISSMCNFLSYLFLHWIFYYLN

SEQ ID NO: 186459 - protein, 113 aa, Glycine max
  unsure (1)..(113): unsure at all Xaa locations
  Clone ID: PAT_MRT3847_139386C.1.pep
MAYNLCSSPSSLFHDLPSISSSSSSRKFKLRNLSSSSLTPHSKTLLHVSLHEHEPIPEHLPPDAKSSSSSKSNYIWVNPRSPKAKQLESRSYDARXYTSLVNLAHSLDSCNPS

SEQ ID NO: 186460 - protein, 48 aa, Glycine max
  Clone ID: PAT_MRT3847_139387C.1.pep
GRGDFSFNLKEYGNGRRKGNPNQLQLKNKYYLELGPDITWKALSKYGP

SEQ ID NO: 186461 - protein, 146 aa, Glycine max
  unsure (1)..(146): unsure at all Xaa locations
  Clone ID: PAT_MRT3847_139388C.1.pep
KNATMASQATKSFENVMSHGMWRAMHCILGMLSLFQEDNLWSEQKIIGDIMLKVGHVFXLSSLINNVMEIAENEKGGFRLEMKPXHSMMREAASTAKCLCVYEGFGFEIDVQKSLPETVMGDEARAFKXILHMIGYLLNMNDTGTL

SEQ ID NO: 186462 - protein, 61 aa, Glycine max
  unsure (1)..(61): unsure at all Xaa locations
  Clone ID: PAT_MRT3847_139389C.1.pep
XTYSFDPAPESSAFAXSXRIEGXREFDRLIKXIKLDSLRPRFYQPXLLRPDRKFKVXIRXX

SEQ ID NO: 186463 - protein, 126 aa, Glycine max
  Clone ID: PAT_MRT3847_13938C.1.pep
VLAGAEYGSGSSRDWAAKGPMLLGVKAVIAKSFERIHRSNLVGMGIIPLCFKPGEDADTLGLTGHERYSIDLPSKISEIRPGQDVTVTTDNGKSFTCTVRFDTEVELDYFNHGGILPYVIRNLIKQ

SEQ ID NO: 186464 - protein, 80 aa, Glycine max
  Clone ID: PAT_MRT3847_139390C.1.pep
DTGFPAKISIPFFTFFFLLISLNQQCCKFNTFTRGGDRFLCKQTMLFFFLSLYIAVKPSLEENSRQDCNVQRLRNMLLRR

SEQ ID NO: 186465 - protein, 87 aa, Glycine max
  Clone ID: PAT_MRT3847_139391C.1.pep
VPNKKRHYQVKQLRLSTAEIKGATGMPDGIEDSEESLGQYMCAPAVRGAALSAWPLEKFGTYRYLLSGPNVGKALYEWMYEKERSYY

SEQ ID NO: 186466 - protein, 240 aa, Glycine max
  unsure (1)..(240): unsure at all Xaa locations
  Clone ID: PAT_MRT3847_139392C.1.pep
MSTSHQQRYLLFAFTTLIVFFSFNTTPVSARLFPNVSSIPRWNTSHAPPDSAWNAYRNFTGCRPGKTYNGLSNLKNYFHYFGYISNVSSKSSNFSDDFDDALEAAVRAYQKNFNLNITGELDDPTMNQIVKPRCGVADIINGTTTMNSGKTNTTDSPTFHTVAHYSFFDGQPRWPVGTQELTYAFDPDNALDDVIKTVFGNAFSRWSEVTTISFRETASYVAADIRIXFYGGEHGDGEPF

SEQ ID NO: 186467 - protein, 66 aa, Glycine max
  Clone ID: PAT_MRT3847_139393C.1.pep
PTRPPTRAFTYTILLFIQTMTRMMRGLLTLTCMLYTYITLYKVQNSLRKLPSIFIIMIKLSSITKL

SEQ ID NO: 186468 - protein, 197 aa, Glycine max
  Clone ID: PAT_MRT3847_139394C.1.pep
MRMRWFLRSPIIKTSLLNLSPPISFRPHWARRTFTSSRLSMAAIHNHSNSNSETGLARRFWIKFTRESIFAMYTPFVIALASGNLHIDSFHHYIAQDVHFLRAFAQAYEVAEECADDDDAKLGICELRKAVLEELKMHNLLVQERELDLAKEHGINSATGKYTEFLLATASGKIEGLKGPCKLATPFEKTKIAAYTL

SEQ ID NO: 186469 - protein, 64 aa, Glycine max
  Clone ID: PAT_MRT3847_139395C.1.pep
NVPFNFEDLITPWVLILRKSLSFSIPLEPPHFSSLRAKTQVYANAPPLPMSVLYVLYPLKFVLF

SEQ ID NO: 186470 - protein, 77 aa, Glycine max
  Clone ID: PAT_MRT3847_139396C.1.pep
NNVLRHYQGQNLRQVRHLILHHQIHAHDHGPFVEKGRPQYATHGYQESESFRGVQLRWCSLYGDHRPREHTNPHQRS

SEQ ID NO: 186471 - protein, 59 aa, Glycine max
  Clone ID: PAT_MRT3847_139397C.1.pep
VLTLACPMFCLNDPPQPSFHHLFGIKKVGACGCSSDKYYRSPWSIRWVNAVLSLDHCQL

SEQ ID NO: 186472 - protein, 74 aa, Glycine max
  Clone ID: PAT_MRT3847_139398C.1.pep
SEFSEEEEIRCMANCKHIFHCACVDRWIDHDQKTCPLCRSTLVPHQKLEEYNQRLWAASGVSQFYYQDDYTASL

SEQ ID NO: 186473 - protein, 85 aa, Glycine max
  unsure (1)..(85): unsure at all Xaa locations
  Clone ID: PAT_MRT3847_139399C.1.pep
MIIAVYVNWGFARIEWSQVAFTSKKDYGKGGREREKHXAEAQHSLHGLNPLEIVKILNEENNYRELFEQARKXAEVARLRELDSV

SEQ ID NO: 186474 - protein, 94 aa, Glycine max
  Clone ID: PAT_MRT3847_13939C.1.pep
MKRIFTAIGMEKYNCPHCSMGTQRRHEKSRINALHVYRPNINTWKCQKIAFLRRDLSYLLNLFSFLSHFITTTQNVYTQWQHSLTFPISHDFTA

SEQ ID NO: 186475 - protein, 82 aa, Glycine max
  unsure (1)..(82): unsure at all Xaa locations
  Clone ID: PAT_MRT3847_1393C.1.pep
WCSWPLXRRLVXGGAVAXGXXGLVAPPLPWLCLALLSVLRRCRCRLVAXGVLLLLLLGRARPAVFXXPLAVFLVSLPPVFLV

SEQ ID NO: 186476 - protein, 96 aa, Glycine max
  Clone ID: PAT_MRT3847_139400C.1.pep
FFYKNITFGFTLFLYEEYASFSGQPAYNDWFLSLYNVFFSSLPEIALGVFDQDVSARNCLRFPMLYQEGVQNVLFSCRQIFSWMLNGFISAIIIYF

SEQ ID NO: 186477 - protein, 53 aa, Glycine max
  Clone ID: PAT_MRT3847_139401C.1.pep
TSSPFFSIKTGHQPWQLIGAIRCSIDNFILTKLGISKPERTGGTCKTNIPVDS

SEQ ID NO: 186478 - protein, 97 aa, Glycine max
  Clone ID: PAT_MRT3847_139402C.1.pep
CGFYSQHQRTWMRAGDCECTGSNTVQTLHCDGGFDTWLSVITYYPRISFSLSFCLLCSGSVRRTGVVLFFIKGATAATGSFVPGPPPNAGKGQPKGG

SEQ ID NO: 186479 - protein, 70 aa, Glycine max
  Clone ID: PAT_MRT3847_139403C.1.pep
TSSSTSLLVAITGFLTSPSFHDTTNTVLPSSIPTSSAGSPLVASPRSRRLSHIHTCIPELGPCHLQQQLH

SEQ ID NO: 186480 - protein, 115 aa, Glycine max
  Clone ID: PAT_MRT3847_139404C.1.pep
EAATIEIRGNITLTKNPILVGDRWHACHCSFSRSAPSPSPSPSRAHRSTMPHATVCPLTWSHMCRMCFDRASTLPLSRAPCADTASAPVPSIMSAASSRSSPTFMATTFAPTRGH

SEQ ID NO: 186481 - protein, 46 aa, Glycine max
  Clone ID: PAT_MRT3847_139405C.1.pep
MGKSYPTASAYYHNAAEKANKKLISFIAHKRCAPLMLRLAWHSSVT

SEQ ID NO: 186482 - protein, 85 aa, Glycine max
  Clone ID: PAT_MRT3847_139406C.1.pep
NLVVVGVEDGFLRVFFGCYFRWEWEKLVFFKNPAQKGGHPGGFFLKSRRVWGKKNGLPRLLLVGWFPPFLCKVKNLIGECGPVPF

SEQ ID NO: 186483 - protein, 121 aa, Glycine max
  Clone ID: PAT_MRT3847_139407C.1.pep
SMRTLLAVLLFFFMMTVTMLHVGAVIVEHEPKTKTKRNLLSETSLGRKGMGTETNNQQTMKVSASNANTNTADSVSNSKAKKNDDNNGGDNDKNDSSQNYGSGPVLNSHHYFHIRTPPIHG

SEQ ID NO: 186484 - protein, 103 aa, Glycine max
  Clone ID: PAT_MRT3847_139408C.1.pep
LLFQLGLSIFFLFRLLTPPGTPLFPSLEMETSKTVMSQLGAPTVRPTPLKARFANSPLEDTGRSNFVSKQPASSPGLTSSGGGIRRPSSAGNLSELTGRSNSV

SEQ ID NO: 186485 - protein, 103 aa, Glycine max
  Clone ID: PAT_MRT3847_139409C.1.pep
KKEDTIYQLHLDPSYHKQLHENKILHPKFQEKGVGSGVSFVTEANRQAQQQIKLVMLVCLSRCYCAKWICLSRLYKTNGIEKPYKAAPVCHIFPEGHLLWFAK

SEQ ID NO: 186486 - protein, 380 aa, Glycine max
  Clone ID: PAT_MRT3847_13940C.1.pep
HASAHASAENDIVAAAVLSGNRNFEGRVHPLTRANYLASPPLVVAYALAGTVDIDFEKEPIGTGKDGNNVYLRDIWPSTQEIAEAVQSSVLPDMFRSTYEAITKGNTMWNQLQVPAETLYSWDPKSTYIHEPPYFKSMTMDPPGPHGVKDAYCLLNFGDSITTDHISPAGSIHKDSPAAKYLVEHGVERKDFNSYGSRRGNDEVMARGTFANIRLVNKLLNGEVGPKTIHIPTGEKLYVFDAATRYKASGQDTIVLAGAEYGSGSSRDWAAKGPMLLGVKAVIAKSFERIHRSNLVGMGIIPLCFKPGEDADTLGLTGHERYTIELPSIINEIRPGQDVTVTTDNGKSFTCTARFDTEVELAYFNHGGILPYVIRNLIKQ

SEQ ID NO: 186487 - protein, 62 aa, Glycine max
  Clone ID: PAT_MRT3847_139410C.1.pep
EALLRLKEPGPSNECPTPKLNALEPDNPIESEGGFIENWNPSDKPFQSAGDTLSPWTLKRNG

SEQ ID NO: 186488 - protein, 184 aa, Glycine max
  unsure (1)..(184): unsure at all Xaa locations
  Clone ID: PAT_MRT3847_139411C.1.pep
LGLHFRAPENLKALVEPPRLPQPQHGLPSEDDAQKQGEQLIIPKGLLLVAHEPXLSVNTAPGPHIRGNTLRAYSIGDKQVDLLLPGTARLRVQLGVNMPAQATRKLQEDKVEESEVELFEVYDVVLYMGIIDILQEYTVKKKLEHACKSLQYDPMTISVVEPKTYAERFINFMEKKVFPEPETS

SEQ ID NO: 186489 - protein, 101 aa, Glycine max
  Clone ID: PAT_MRT3847_139412C.1.pep
DGVLLRLRVQLGVNMPAQATRKLQEDKVEESEVELFEVYDVVLYMGIIDILQEYTVKKKLEHACKSLQYDPMTISVVEPKTYAERFINFMEKKVFPEPETS

SEQ ID NO: 186490 - protein, 360 aa, Glycine max
  Clone ID: PAT_MRT3847_139413C.1.pep
MSPSFRTSLSLFTLSLLFFFSLSVSAHSGHRDDDDDDDADAGGDATPNLRARSLILAKVWCLIVIFFATFVSGVSPYILKWGEGFLVLGTQFAGGVFLGTAMMHFLSDANETFGDLTRKEYPFAFMLACAGYLMTLLADAVISSVLKNTGRDQPRDAEDVQVQGADVSKVSNNSVRSQSQHRSHSISSSDHHHLANPALGSVRSLGDTILLIVALCAHSVFEGLAIGVAETKANAWKALWTICLHKIFAAIAMGIALLRMIPNRPLVSCAAYAFAFAISSPIGVAIGIILDATTQGHVADWIFAISMGLACGVFIYVSVNHLLAKGYMPHIPTKVDSAYFKFLAVLLGVGVIAVVMIWDT

SEQ ID NO: 186491 - protein, 129 aa, Glycine max
  unsure (1)..(129): unsure at all Xaa locations
  Clone ID: PAT_MRT3847_139414C.1.pep
MSGRGKGGKGLGKGGANPXRKVXRDPSQGLSKPAIRRLASRGGAKRLSGLIYEEPRGVLKLFVETLIRPAVTHPAHARRKPVXPMDVVPPLKTQGSPLHGFPGYHIGDFSNASSPRVSYSLHFDVYPPQ

SEQ ID NO: 186492 - protein, 374 aa, Glycine max
  unsure (1)..(374): unsure at all Xaa locations
  Clone ID: PAT_MRT3847_139415C.1.pep
MSPSFRTSLSLFTLSLLFFFSLSVSAHSGHRDDDDDDDADAGGDATPNLRARSLILAKVWCLIVIFFATFVSGVSPYILKWNEGFLVLGTQFAGGVFLGTAMMHFLSDANETFGDLTRKEYPFAFMLACAGYLMTLLADAVISSVLKNTGRDQPRDAEDVQVQGADVSKVSNNSVRSQSQHRITKLPGTEVFSQFESGNGLASVLRSSGMGLYQPAGGLVPPFASRFMSTEATSGDSSSQDSSMLEPEVPPRIKFKRLDKTGRHIMQILDKEAVXDVRGQREIPDIKPGYIVQLKVEVPENKRRVSIIKGIVIARRNAGLNTTFRIRRQVAGVGIESLFPLYSPNIKEIKVLDKKRVRRAKLYYLRERMNPLKN

SEQ ID NO: 186493 - protein, 59 aa, Glycine max
  Clone ID: PAT_MRT3847_139416C.1.pep
LSKLTFWKPSMLTLPKRVHCVEHYLDCICDLNRITSSQPFAPLYNLIYWMILLFIFNFL

SEQ ID NO: 186494 - protein, 56 aa, Glycine max
  unsure (1)..(56): unsure at all Xaa locations
  Clone ID: PAT_MRT3847_139417C.1.pep
SXDPLERPLXXXXFFFFCSATEAHQAYVLRESKDGSSHLKCLDSPTKIHVLLDFTK

SEQ ID NO: 186495 - protein, 101 aa, Glycine max
  Clone ID: PAT_MRT3847_139418C.1.pep
MWGLTFVFFFCPVQPPFPGFLVDDIFLDYLRFAFHFGPVEIVMGLWGEFGIPVEEKSAQGFPPVQDPVEMFDKLFEPQGLTSKKGRQVPFRVFCYVAGRGF

SEQ ID NO: 186496 - protein, 63 aa, Glycine max
  Clone ID: PAT_MRT3847_139419C.1.pep
YCCVIFSSQIQVLEYLAKFKLPSFVSAIPYCLFIVRTIQRKKVEFCMVVVFFASIGNPSLIHG

SEQ ID NO: 186497 - protein, 180 aa, Glycine max
  Clone ID: PAT_MRT3847_13941C.1.pep
MSKPQNDPLVQSETTCGTLLYELQIIWDEVGESESDRDRMLFELEQECLEVYRRKVDLANRSRAQLRQAIADCEAELAAICSSMGERPVHIRQTDQNAGSLKEEHARILPQLEEMQKRKIERRNQFIEIQEQIQSISIEIYGPREYIPAVEDETDLSLRKLEELHRQLHALQIGRSSRLK

SEQ ID NO: 186498 - protein, 123 aa, Glycine max
  unsure (1)..(123): unsure at all Xaa locations
  Clone ID: PAT_MRT3847_139420C.1.pep
RSASFGRSCAPGLYRKFAHRDFLKRCFRQSSNVRGLAPDDIACKXHESIMIQGFICEGDXAAIDDLVHVIQDSCLHSPXVARQLRRRAVYRQEWVQNADVPTIAQIAELHPMHKMMNAPDTDY

SEQ ID NO: 186499 - protein, 38 aa, Glycine max
  Clone ID: PAT_MRT3847_139421C.1.pep
VRTSGSSGIHLSCYREELSNIISLSRHINQKGSFPCHF

SEQ ID NO: 186500 - protein, 88 aa, Glycine max
  unsure (1)..(88): unsure at all Xaa locations
  Clone ID: PAT_MRT3847_139422C.1.pep
SRRXRFFXRRGRRWRXXAAPRWRPXVGPCWWVXXRRPCXXXPPPLXVSPXCXAGSLVXGPAGPXXRFVWSRCXPCCSCVAXXGGVVVV

SEQ ID NO: 186501 - protein, 91 aa, Glycine max
  Clone ID: PAT_MRT3847_139423C.1.pep
MGFRLPGIRKASLNQASSKAMDVPKGYLAVYVGEKMKRFVIPLSYLKQTSFQDLLSLAEEEFGYKHPMGGLTIPCGEDVFLDITSRLNNRC

SEQ ID NO: 186502 - protein, 158 aa, Glycine max
  Clone ID: PAT_MRT3847_139424C.1.pep
MFASPNLRLVTRSLETRGNRHYSSQSGSQTTSLKQRLTELIPQKNAEIKEIKEKYGEMKLGDCTVSQAYGGMRSVKSMVWEPSLLDSEEGIRFRGYSIPECQEKLPKAAGGQEPLPEGTFWLLATGEIPTDAHVKELSREWAARSDVPNWVTDLIKSL

SEQ ID NO: 186503 - protein, 62 aa, Glycine max
  Clone ID: PAT_MRT3847_139425C.1.pep
EEDQDGETDCAAEISDLPALRFSGQDIAQSLEGLDHKDLLQGLPENNQRPFLARIRRPNRHN

SEQ ID NO: 186504 - protein, 139 aa, Glycine max
  unsure (1)..(139): unsure at all Xaa locations
  Clone ID: PAT_MRT3847_139426C.1.pep
VQIYHLNLTIWTFVPDSLSINHVCPIIHIHPMKQKPSKRDLLSDLTCDSHLKIDMFINRQSNLPLHEMXRGSYYLKMLLPSAYEEAXGGAHNIFGNLSLITVTHSDGSHSFMLTRAVLVPSYGDVLTVMQHQTRLMFKT

SEQ ID NO: 186505 - protein, 123 aa, Glycine max
  Clone ID: PAT_MRT3847_139427C.1.pep
LWRVLFGGFLETQICLSPKFFWGAPLPWGKQKGQKRRRPLAPLGGGDMGEKNPPWRQETLPPGGQNFSNPPLKKNPLFSRFFLLWGPLPPLGARAYFFPQKNHPPAFWGTPPQLMPGFFLGGG

SEQ ID NO: 186506 - protein, 33 aa, Glycine max
  Clone ID: PAT_MRT3847_139428C.1.pep
TFNVWKQRRMLHLIHPMDENSYVKNKRCLTKSP

SEQ ID NO: 186507 - protein, 65 aa, Glycine max
  unsure (1)..(65): unsure at all Xaa locations
  Clone ID: PAT_MRT3847_139429C.1.pep
RVKSYQCPSQRLRKSSQTQIPKPCIFFFXKKSKKTLCGPPGYFGKKSVGPFSPNWKTKKGGPKGP

SEQ ID NO: 186508 - protein, 69 aa, Glycine max
  Clone ID: PAT_MRT3847_13942C.1.pep
FQISAFLWHFEQPQLQQLLQFCQKIHQSVNLLIMEIPHLMFKIEQQIMVTVTPQHQKCHVCYIILSNHL

SEQ ID NO: 186509 - protein, 89 aa, Glycine max
  Clone ID: PAT_MRT3847_139430C.1.pep
CCFCFIIVRVYILLLCLLRGQIPARVLSIPMNTNPNSFNRTTTSHSPTSPPSPPSLPNPRRIMPIPTSSPNSPSNPTPSFPTKIPSSFP

SEQ ID NO: 186510 - protein, 50 aa, Glycine max
  Clone ID: PAT_MRT3847_139431C.1.pep
GARERCFIRCPLPARYFSSSHFSCLSRFTGNFAVSGPKRLILLRHAHVGM

SEQ ID NO: 186511 - protein, 39 aa, Glycine max
  unsure (1)..(39): unsure at all Xaa locations
  Clone ID: PAT_MRT3847_139432C.1.pep
YDSVRXWPHNXLXLIVXEMYXYFPCSRRQFGXXGPFPSD

SEQ ID NO: 186512 - protein, 76 aa, Glycine max
  Clone ID: PAT_MRT3847_139433C.1.pep
GFIKFKKPGPLVTFLEGTRGGGSNVWPNSTKKKNGGKQGKFVKGRKPRTSQIWRLQKKTGGRKTNLGGNPLTSEKH

SEQ ID NO: 186513 - protein, 61 aa, Glycine max
  Clone ID: PAT_MRT3847_139434C.1.pep
RDLRLAENEANGDWTFGGNYADCRAKLANESEKHADHQRMQDLMAGVDKLHYRMNYSERAL

SEQ ID NO: 186514 - protein, 53 aa, Glycine max
  unsure (1)..(53): unsure at all Xaa locations
  Clone ID: PAT_MRT3847_139435C.1.pep
PHHHHVHRSTHLCXYGXPAPIPQPGRPFXARLRARDPQDPNLRSGEGFLRVGG

SEQ ID NO: 186515 - protein, 93 aa, Glycine max
  Clone ID: PAT_MRT3847_139436C.1.pep
RVSGRARYPCSECSTLSLQHPHLAHAGRPPRQTTHETPLFTYLFENPGNSDMLCDSDSDAELDTYLVHDPDRTAGRVTCALNNFFIASGEITS

SEQ ID NO: 186516 - protein, 55 aa, Glycine max
  Clone ID: PAT_MRT3847_139437C.1.pep
LNSNLLFSELLIHMLSKSHRESFSRIDYLRKRRKEDVKDFFLREYDLTQGRISGG

SEQ ID NO: 186517 - protein, 52 aa, Glycine max
  Clone ID: PAT_MRT3847_139438C.1.pep
ASLLFCFAVASYLRVLRLLPSFHLDRSGSTFSISFAFCRLFLTDFPLPFEHF

SEQ ID NO: 186518 - protein, 192 aa, Glycine max
  Clone ID: PAT_MRT3847_139439C.1.pep
MAASALSLTSPFHFRKPHNRVSPLNAHPLILIQKGKQSLKSNFSFSTLNASPHFRPPIAIAPSTLTLTRASSSDECFDPAGEAQRLLLSEEKPVNFAFWVIFWASLSLAWFAVSRDANAAVESSIKASGFGFNIANSLRKLGWPDWVVVFTLATLPVLELRGAIPVGYWMQLNPVTFTVVSILGNMVPVPFI

SEQ ID NO: 186519 - protein, 125 aa, Glycine max
  unsure (1)..(125): unsure at all Xaa locations
  Clone ID: PAT_MRT3847_13943C.1.pep
TNRYDINPFDKKEVNPFSNPKXIPTTTNSRLPPLKPXPINYNYNFNTTLNIPLNSSINLKNKKKKLQAEKTKLTKNEQELIQKXESTSLAKIILKDKNXPPVFPIIHHNITNKIAIHLQKLQYIT

SEQ ID NO: 186520 - protein, 48 aa, Glycine max
  Clone ID: PAT_MRT3847_139440C.1.pep
ARALYLEIDINKLLAEDNPGRTKRWNRDITLLRLLIITKQYRQRTTIH

SEQ ID NO: 186521 - protein, 300 aa, Glycine max
  Clone ID: PAT_MRT3847_139441C.1.pep
QAPQQPPYYIPPTPMPNSALPQHPQNQYLPSDQQYRTPQLVAPQPTPSQVTPSPPVQQFSHYQQPQQQQQPPQQQQQQWSQQVQPSQPPPMQSQVRPSSPNVYPPYQPNQATNPSPAETLPNSMAMQMPYSGVPPQGSNRADAIPYGYGGAGRTVPQQPPPQQMKSSFPAPPGEMYGPTGSLPALPPPSSAYMMYDGEGGRSHHPPQPPHFAQPGYPPTSASLQNPPQGHNLMVRNPNQSQFVRNHPYNELIEKLVSMGFRGDHVASVIQRMEESGQAVDFNSVLDRLSSVGPQRGGWSG

SEQ ID NO: 186522 - protein, 64 aa, Glycine max
  Clone ID: PAT_MRT3847_139442C.1.pep
HIIRKNAEHNLRKGFNHFHFSLRSLVCPLHQSSSGKIWLHQSQHLSYPEHLETHLDHLYFVMVP

SEQ ID NO: 186523 - protein, 160 aa, Glycine max
  unsure (1)..(160): unsure at all Xaa locations
  Clone ID: PAT_MRT3847_139443C.1.pep
MLGCGNRRSKGGNRKSNTSSGSGIPKSRKRGSDVKTALFVEGGFLSDWHLPSPTQIPGRSSGSNNKSGSHRRGEGSVSKSGFAKSLGATIRYNYPSFDVQEVACAGIGNNGEDSNLNQLQPFGFADSKKGQIIAHIDQTPXXKPNNVKYRYTYDADFILG

SEQ ID NO: 186524 - protein, 196 aa, Glycine max
  unsure (1)..(196): unsure at all Xaa locations
  Clone ID: PAT_MRT3847_139444C.1.pep
IVXLSFGSMERFSRTQLRENAIGSEKSEHRFLWVVRSEXEEGARAEPPSLEELLPEGFLDRTKEKGMVVRDWAPQAAILSHDSVGGFVTHCGWNSVLEAICEGVPMVAWPLYAEQKLNRVILVEEMKVGLAVEQNNNGLVSSTELGDRVKELMNSDRGKEIRQRIFKMKNSATEAMTEGGSSVVALNRLVEIWREH

SEQ ID NO: 186525 - protein, 98 aa, Glycine max
  unsure (1)..(98): unsure at all Xaa locations
  Clone ID: PAT_MRT3847_139445C.1.pep
WQSHTHWGYRFLIAAGRRLGSWGAILKHPDDFHPLLSLKMAARNADKHIPPDPLWAFCYTVLHXVSRSFPLVLHPLPFPLRPPGRLSYLVLRRSPPPS

SEQ ID NO: 186526 - protein, 59 aa, Glycine max
  Clone ID: PAT_MRT3847_139446C.1.pep
CIYRSSRSGPAFAKYVFINQQPKLGASTRPDTVLVCSICKADEGAEHAALSNTMAPNHK

SEQ ID NO: 186527 - protein, 54 aa, Glycine max
  Clone ID: PAT_MRT3847_139447C.1.pep
PPPPPPPRPPPKPPGGVGVSPGAGARAFGPTFPPPPGGVSFFSAGGRSPGDWAF

SEQ ID NO: 186528 - protein, 125 aa, Glycine max
  unsure (1)..(125): unsure at all Xaa locations
  Clone ID: PAT_MRT3847_139448C.1.pep
KWGINHQHPTVVPGGDLAKLQRAVCIPSNPPSESEXFCGIAHKLDLPYGEXAIQHWYVVPPMXHGEFSQASEDLAAPHQEPYEDGTESGDGGEDSAPANADQSLPRFRVPHVKYFVFCRTCMVSD

SEQ ID NO: 186529 - protein, 60 aa, Glycine max
  Clone ID: PAT_MRT3847_139449C.1.pep
PKMNPVLYCLSLLKSQLKPVLLLQLQYQPLFEYPIYEPSFICIILENKMPSAACPIFVNN

SEQ ID NO: 186530 - protein, 98 aa, Glycine max
  Clone ID: PAT_MRT3847_13944C.1.pep
CSIPEGSQFWISCFAEHSTCTCSKYRAAFAWCYESSTVFILVIGLMPLPPHASHWRDLCTLRARSLFYQRAPVRGCVLIQDLIKSLICDLTPPRHSWR

SEQ ID NO: 186531 - protein, 58 aa, Glycine max
  Clone ID: PAT_MRT3847_139450C.1.pep
KKMNGAFGVEIKAVCPKVEMFPLRERRVPVPQEDFKMAVAKVMKKELKKTLSLRKLWK

SEQ ID NO: 186532 - protein, 124 aa, Glycine max
  Clone ID: PAT_MRT3847_139451C.1.pep
NIMNLCKALRSLPRFVSQVPKRGFGGGGHGSEHHAPPQNEITQADLDKYNYLFPGPTKSESTFALHNVIGKLPFTRSKGFIEFLATNFNTDQANSTTERFVPPKVHENSVFIYQSKELANAVRG

SEQ ID NO: 186533 - protein, 109 aa, Glycine max
  unsure (1)..(109): unsure at all Xaa locations
  Clone ID: PAT_MRT3847_139452C.1.pep
XXXXXXXXXXXXXXXXXXXXXXXXXXXXXXTVSLKSKHFTRTLEFNRKISTRLGHLHHLHTYQTRRFFTTLNTKGKYQTRRFFTTLNTKGKRKKEKSADDNYIVVTNLQ

SEQ ID NO: 186534 - protein, 65 aa, Glycine max
  unsure (1)..(65): unsure at all Xaa locations
  Clone ID: PAT_MRT3847_139453C.1.pep
XITXXPLXXTPPNTTXFHXPHXNNXXXXXQXXXXKSXXXXPXPXLXXXNLXLEPNSXXXYXXXQP

SEQ ID NO: 186535 - protein, 211 aa, Glycine max
  Clone ID: PAT_MRT3847_139454C.1.pep
MAPATTNSSPSAQRHVGFSRRTQAPRQLDGDSPPVKKYRMLSEIMARAPYAVVERETYSDLLCDQCGSGELPEELLLCDKCDKGFHMKCVRPIVVRIPIGSWLCPNCQGGKRVRPFSQKKIIDFFGIRRSSDDANDKRSSQDAKKRKKCSRPLVLHKKKRRLLPFVPTKDLNRRLKQMGSLASALTALNMGISDHLTYLPGMAPRCANQAL

SEQ ID NO: 186536 - protein, 391 aa, Glycine max
  unsure (1)..(391): unsure at all Xaa locations
  Clone ID: PAT_MRT3847_139455C.1.pep
MATATTNSSPSAQRHVGFSRRTQAPRQLDDDSPPVNKYRLLSEIMARAPYAVLERETYSDLLCDQCGSGELPEELLLCDKCDKGFHMKCVRPIGARVPIGSWLCPNCQGGKRVRTFSHKKITXEYPLQINIKNMMSKHYHIISDWNFFFLIXCSELLDAKKRKKCSRPLVLHKKKRRLLPFVPTKDLNRRLKQMGSLASALTALNMEFSDHLTYLPGMAPRCANQALLENGGMQTLSKEDMETLEQCIALSKRGEFPPFMVVYDSREGYTVEADDLIKDMTIIAEYTGDVDYLDTRERDDCDSMMTLLLGAESSQSLVICADKRGNIARFISGINNHTQEGRKKQNCKCVRYNVNGECRVFLVAIRDISKGERLYYDYNGHEYQYPTHHFV

SEQ ID NO: 186537 - protein, 36 aa, Glycine max
  Clone ID: PAT_MRT3847_139456C.1.pep
YKHSFFFFLIAMVSINQHENSPLYPLCAEHLTTPYS

SEQ ID NO: 186538 - protein, 83 aa, Glycine max
  Clone ID: PAT_MRT3847_139457C.1.pep
SRLLLTTPLHIVYPRLVNNLVGSPSVFVYRVRPHNAVETLLMTLLQSSPRGGTEGHQHQTGGAGTRKPPIPHLIINKTCRRLT

SEQ ID NO: 186539 - protein, 82 aa, Glycine max
  Clone ID: PAT_MRT3847_139458C.1.pep
PDSRVAHSPFGCYKYYICFITSISIKRGVIKKIIAWLPLRFSLAMPFTYASHKRILLPISDALFLKPLALRSSFFQGNFHHL

SEQ ID NO: 186540 - protein, 118 aa, Glycine max
  Clone ID: PAT_MRT3847_139459C.1.pep
HSPPTQKHLQTSFGLGTSAHYIRLGVMAGLLQAGATFMQPTKWSRSNTLGQKSTQCISQGFGLEPSGAKRAHAPLRLDLKTWVKNWVDAYQNGREISPCHHLSLWKNVGGKGLERGSP

SEQ ID NO: 186541 - protein, 61 aa, Glycine max
  unsure (1)..(61): unsure at all Xaa locations
  Clone ID: PAT_MRT3847_13945C.1.pep
VSXXSISKQXXILXXKXXSKATXINDKRXATPAPPRFLSRXXCNPSISIKRELLAKXISPR

SEQ ID NO: 186542 - protein, 57 aa, Glycine max
  Clone ID: PAT_MRT3847_139460C.1.pep
LQQAKIAHPIGFIRIIGFVNVLPSAVLQFYGLQAPRLLSVKNLQSICNRHPTLFVCT

SEQ ID NO: 186543 - protein, 76 aa, Glycine max
  unsure (1)..(76): unsure at all Xaa locations
  Clone ID: PAT_MRT3847_139461C.1.pep
MINPTLRASCNGLLRCSRVTDXGVVYVCNPVTHKYKLLXKMRERHVTRFYPDGQATLIGSACDPTYRKSNVVLTGY

SEQ ID NO: 186544 - protein, 68 aa, Glycine max
  Clone ID: PAT_MRT3847_139462C.1.pep
MKDMKDRVCACGIKPTFELLKSIGDADETAMGTLTSRSLRTFTAIFFAMLYVKKNKKLKPPQKPRSLP

SEQ ID NO: 186545 - protein, 171 aa, Glycine max
  Clone ID: PAT_MRT3847_139463C.1.pep
HYPLSIILVGVGDGPWDEMKYFDDNITERLFDNFQFVNFTKIMSENTEASKKEATFALAALMEIPLQYRAAQNIQLNDRESVLHQHKRPLPPPNEVIHHDNARMAIPHMPNLESAESTAPAAAEPVCPICLTNPKDMAFGCGHTTCKECGSTLSSCPMCRHQITTRLRLYT

SEQ ID NO: 186546 - protein, 89 aa, Glycine max
  unsure (1)..(89): unsure at all Xaa locations
  Clone ID: PAT_MRT3847_139464C.1.pep
KIGGIGTVPVGRVETGVVKPGMVVHCGPTGLTTEVKSVESHHDALTEALPGDNVGFNVKNVAVKDLKRGFVASNSKDDPAXEAANFTSQ

SEQ ID NO: 186547 - protein, 40 aa, Glycine max
  unsure (1)..(40): unsure at all Xaa locations
  Clone ID: PAT_MRT3847_139465C.1.pep
RFGXKPTTQITSQFXSIRXVTRXXXXXSIYPLQIYNXLTS

SEQ ID NO: 186548 - protein, 339 aa, Glycine max
  Clone ID: PAT_MRT3847_139466C.1.pep
MTMAMPLFLMFLLLHIAWVASSDLRPGFYSKTCPKAELIVRDVMKKALMREPRSVASVMRFQFHDCFVNGCDGSMLLDDTPTMLGEKLALSNINSLRSYEVVDQVKEALEKDCPGVVSCADIIIMASRDAVSLTGGPEWEVRLGRLDSLSANQEDSNNIMPSPRANASSLIDLFQKYNLTIKDLVALSGSHSIGQGRCFSVMFRLYNQSGTGRPDPAIDPSYRQELNRICPLDVDQNVTGNLDSTPLVFDNQYFKDLAARRGFLNSDQTLFTFPHTREFVRLFSRRKTEFFKAFVEGMLKMGDLQSGRPGEVRTNCRLVNARPINLLLQSPHNMESNDK

SEQ ID NO: 186549 - protein, 200 aa, Glycine max
  Clone ID: PAT_MRT3847_139467C.1.pep
CFAKKQYFNYSLTACIPFVTYNRAGHSTETKDLAAEKSTVQKFDLISNSENKPTLLWKLPQNPSIPTYSTTETPSMKIKSSEMPFPNSKMTMASSSTTGDKLSSSFTPESWGKDFPSSGSHLSTISAPSTFLGKVTEFHVDKSLPKENIPAVPTNVGTHASAHASAHASASSLDRDHSQLLKHHPLHRDHRGSSAAGTVG

SEQ ID NO: 186550 - protein, 130 aa, Glycine max
  Clone ID: PAT_MRT3847_139468C.1.pep
FFFLFFFYFLFLSFPFSFFSSFLFLFFSIFLLQATEADFKSKSCDDLTPISLSIIAFLSSEFIISPFSISNEIPDFAPISLTMSSCTSSFLIIQSEEIKSSLPSPTLISLGLLHFSLASTSTMLTSHLLR

SEQ ID NO: 186551 - protein, 155 aa, Glycine max
  Clone ID: PAT_MRT3847_139469C.1.pep
MMVVQNFVVDLNKALVFQVGHLGEAYEEWVHQPIVSKEGPRFFENEILEFLTRTVWWAIPVIWLPVVCWFIYKSIRMGLSCPHLALLVVLGIFVWTLLEYSLHRFLFHIKTKTYWGNTLHYLLHGCHHKHPMDGLRLVFPSAATAILLMPFWNLV

SEQ ID NO: 186552 - protein, 166 aa, Glycine max
  Clone ID: PAT_MRT3847_13946C.1.pep
WYRAGSFASSTTSFSEISCTQTPKKKGESKGFVEEMRFVAMRLHTRDQAREGEKEVKQPEEKAVTKWDPSVEGYLKFLVDSKLVYDTLEKIVQEAPHPSYAEFRNTGLERSASLAEELEWFKEQGYTIPEPSSPGLTYAQYLKELSVKDPQAFICHFYNIYFAHST

SEQ ID NO: 186553 - protein, 57 aa, Glycine max
  unsure (1)..(57): unsure at all Xaa locations
  Clone ID: PAT_MRT3847_139470C.1.pep
EMGEEVASNPPRYPYXTSTFAFVPFSHSPNPPALPFCPSXSLDHFSPVSLVACDIHC

SEQ ID NO: 186554 - protein, 137 aa, Glycine max
  Clone ID: PAT_MRT3847_139471C.1.pep
LSSLVLLLAALILYPQVLANYENPPLYTPLTEKPPVYNPPHERTSGYKPTGENPAIYKPADEEAPVCKPPVVKPSEGKLPYEKPPVYKPLGEKPPVYKRPVEKRPVYKPTVEKPPVFKPRDEKSPVYKLPAEKPTVY

SEQ ID NO: 186555 - protein, 458 aa, Glycine max
  Clone ID: PAT_MRT3847_139472C.1.pep
RNTICFQTNEVIGELELGTPITSLVWKQEAYFQSEVNSLKPSETDSGNSLEEILFVLSRDGKINIVDGDSGKIICSRPLQVKESSAISMYVIEGSISASEASNDKLQEETVKNTADASPDEEEEPLSTRVNSSEAGLSSSESSHSGDLLLDPLVLLCCENSLRLFSAKSLIQVHEFIITSQFAFTSSLPDLELVAESSLLSILRWNYKVNMDKTMCSDDYGEIVLANSSELAFMSLLAGKDEFSNLEHLPCLHDKVLAAAADAAFKFSSNQKKKQTVVPGILGGIVKGFKGGKTTPTDVTKIPTSNFGHLEDIFFKPPLPDSPTTVAIPDKKEAELDIDDIEIDEPHQPIPKASTSSPDVKNKQKDKLQDREKLFEGGTNNDDLKPRLRKPEEIMATYRKTEDAASVAAQARNKLMERHEKLERISQRTAELQSGAENFASLANELVKTMERRKWWQI

SEQ ID NO: 186556 - protein, 65 aa, Glycine max
  Clone ID: PAT_MRT3847_139473C.1.pep
PMQALTSSPAGSNGGNVTESKSGGVGTQTPRTVHGSPRPAPAWFPVAADGGEILREPMISSTSHP

SEQ ID NO: 186557 - protein, 124 aa, Glycine max
  unsure (1)..(124): unsure at all Xaa locations
  Clone ID: PAT_MRT3847_139474C.1.pep
GNFSRILEKFKVGNEKKKGANQPLKAYETLSPPVERELHPTLPIRWGRVQNSPGFNKKIMNPPERAGLLAKQAFNNVASNLNPLKEDPSKARPLIMQLLRNTLXLXTSDIPKKVEAQKLETPPR

SEQ ID NO: 186558 - protein, 106 aa, Glycine max
  Clone ID: PAT_MRT3847_139475C.1.pep
DLVARAIRSGVFNDVGSGSNVDVSVITKSRTETLRNYETPNERGLKTRNYKFRRGPTAWTKESIRSLIVSEEVKVTAGAGKEQAGVATEPTISGGPGGSEGMEVDP

SEQ ID NO: 186559 - protein, 91 aa, Glycine max
  unsure (1)..(91): unsure at all Xaa locations
  Clone ID: PAT_MRT3847_139476C.1.pep
LSADPEXFAKNRELEVIHSRWAMLGALGCVFPELLSRNGVKFGEAVWFKAGSQIFSEGGLITWXNPSLIHAXSILAIWGHQVILMGSVEGY

SEQ ID NO: 186560 - protein, 93 aa, Glycine max
  Clone ID: PAT_MRT3847_139477C.1.pep
PRQPPLLIKFPQPPRQPARTATTFHCMSTASNGNVQICMLSPHRHCNISRAQPRASQDCLFIFVIWAMHLQILTFSNDGGISVFCHYIGSGES

SEQ ID NO: 186561 - protein, 105 aa, Glycine max
  unsure (1)..(105): unsure at all Xaa locations
  Clone ID: PAT_MRT3847_139478C.1.pep
IKPYNDFFLTCYKICIISTSPHILLKKVFELFVVRNEPGSFESYPYQIYDSHLVILKQELFNVLLIGLLLYIVHALRHVTGINIKCAFVNDKIALHXVLLVGTDT

SEQ ID NO: 186562 - protein, 34 aa, Glycine max
  Clone ID: PAT_MRT3847_139479C.1.pep
SITKYYKLEFLSKWTANHSFYMIPYDCLLKYLMT

SEQ ID NO: 186563 - protein, 170 aa, Glycine max
  Clone ID: PAT_MRT3847_13947C.1.pep
MAHTKVDMGLVLVVMAMLCAGAAAQSQSSCTNVLVSLSPCLNYITGNSSTPSSGCCSQLASVVRSQPQCLCQVLSGGGSSLGININQTQALALPVACKVQTPPTSQCNNAAASPPTGTVAESPNSAPSGTGGSKNLPTTDNGSSSGNSIKLSIPLILILAATYVSTFTTY

SEQ ID NO: 186564 - protein, 191 aa, Glycine max
  Clone ID: PAT_MRT3847_139480C.1.pep
SPEAYANPIMRDMWPAAAKTGAESGHDSPRLLYRIDKHKQDKGHPLWQENDPKVGSGDEAMPGTPICQPIHGTIAPSMGGKSNRKLSTDAKPGSFDSGCALYLLSTLQSQSPELSMVQSSITCPVQSPSGSVHFDAVNEYACSETERDKPSGQVLVFDAKTTNLHYNGMLQMDLDGFVENEDPLALPFLWE

SEQ ID NO: 186565 - protein, 74 aa, Glycine max
  Clone ID: PAT_MRT3847_139481C.1.pep
SHFFFWLITQKISYFLFWSWSIYPFLEICLLCGKFRCFLHLHALTQCVSHWVLNIVFWISTSTFFLDSGCFFSI

SEQ ID NO: 186566 - protein, 68 aa, Glycine max
  Clone ID: PAT_MRT3847_139482C.1.pep
LQILLLCGPPGLGKTTLAHVAARQCGYHVVEVFFCIILCIESWVFKRVTSFTFYLLNDEIYNVIFFII

SEQ ID NO: 186567 - protein, 759 aa, Glycine max
  Clone ID: PAT_MRT3847_139483C.1.pep
ERDHTTVVSYLGEVLCWGYNRDGQLVYGTENATSNYTPRVVESLKGKTLTRVSAAKYHTIVLGSDGEVFTWGHRLVTPKRVVVSRNLKRSGSTLLKFHRKERLSVVSIAAGMVHSMALTDDGALFYWVSSDPDLRCQQLYAMCGRNMVSISAGKYWTAAVTATGDVYMWDGKKGKDKPLVATRLHGVKKATSVSVGETHLLIVASLYHPVYPPNMIENSQKSKLNNKDDVEELNEDILFEDIDSSNIISNVQNDTLSQRSIPSLKSLCEKVAAECLVEPRNAVQLLEIADSLGADDLKKYCEEIVMRNLDFIFAVSSHTVASASLDILANLERLFDQRSSEPWSHRRLPTPTATFPAIINSEEDDSEIEFQRTRDKPMKLEKVLRLDSFLQPKDDPNKEISKVVRAIRKKLQQIEMLEDKQSNGHLLDDQQIAKLQSKSALESSLAELGVPVETSRYKESSSMLPEGKGSKKGKLSKKQRRKMTIVQGHPNGTGIETSRPFTQSVEEDAVCEQISADEGGKDLAFVVQKKDALELLKAKGPSPKASKKKRSKKGGLSMFLSGALDEAPKEVAPPPPTPTPKHEGPAWGGAKFTKGSASLREIQDEQSKIKVNKPAGSKDKVEDLSDFGSGGKIKLSSFLPSSPIPVTSSRSSQVSDGETSTPPWAASGTPPQPSRPSLRHIQMQQGKKQQSLSHSPKTTTAGFSIPTCQGSPSETTGVSRWFKPEVETPSSIRSIQIEEKAMKDLKRFYSSVKIVRKQS

SEQ ID NO: 186568 - protein, 67 aa, Glycine max
  Clone ID: PAT_MRT3847_139484C.1.pep
EGAASPGVFKSLSHARRFRPECRIFWDNLLPGGRHTLLSCASFSPHAPVKATLSARCFMIKRGPGVF

SEQ ID NO: 186569 - protein, 79 aa, Glycine max
  unsure (1)..(79): unsure at all Xaa locations
  Clone ID: PAT_MRT3847_139485C.1.pep
FVALCRPKGRINLHGMLSLIAKQKLYTYPGNYRVFKVLIAAEFNGIDIELPELTCQGHXVQRSFKAQSPAEXVXILETE

SEQ ID NO: 186570 - protein, 56 aa, Glycine max
  Clone ID: PAT_MRT3847_139486C.1.pep
AMIVPQHAVSAGLLLSGDASTTIFRALSIHKSMPILLLILLMMETGASLVIGLQHW

SEQ ID NO: 186571 - protein, 71 aa, Glycine max
  Clone ID: PAT_MRT3847_139487C.1.pep
PATRLHNFCNQNPSKNVSAKHEYYSDCIVNINSTYPDHTPICIVFNSTVEHNPFTQSFYNVISTFYPMKHS

SEQ ID NO: 186572 - protein, 76 aa, Glycine max
  Clone ID: PAT_MRT3847_139488C.1.pep
IFASSFISVRSVDKKVQLLQSRRGLLLVLAKEPQEHRRTFDLCYLDEDMNLFHKVLHIIRCFSVSPQDHEIVQVIL

SEQ ID NO: 186573 - protein, 88 aa, Glycine max
  Clone ID: PAT_MRT3847_139489C.1.pep
LPFKLSPVTPSMLVPTLTVVPQETKLAGSCVANSVPGFMLYNYYVITQVVVCCANRVWGHCPDRKAVAAVLGLAVYTMESMYLRTDLD

SEQ ID NO: 186574 - protein, 285 aa, Glycine max
  Clone ID: PAT_MRT3847_13948C.1.pep
MASSLTTIALFLPQSLYIKPRLAPRPLPPPQFRSLFLTSPAVAGGVRAAVMPRRTAVIVSAATAETPKKKGESKGFVEEMRFVAMRLHTRDQAREGEKEVKQPEEKAVTKWNPSVEGYLKFLVDSKLVYDTLEKIVHEAPHPFYAEFRNTGLERSASLVEDLDWFKEQGYTIPEPSSPGLTYAQYLKELSVKDPQAFICHFYNIYFAHSAAGGRMIGKKVAEKLLNNKALEFYKWDGDLPQLLQNVRDKLNKVAEPWTREEKDHCLEETEKSFKLSGEILRLILS

SEQ ID NO: 186575 - protein, 102 aa, Glycine max
  Clone ID: PAT_MRT3847_139490C.1.pep
FNPPPTKKKEKGVLKKGNTHPSHGGEKKPPGGGNWTYLAGGGGVSKQTRGPGPLHKMGFLTKRIFPWRKTPKRGQPNYNHRGSNGNSHKRPIKNPGERVGVS

SEQ ID NO: 186576 - protein, 129 aa, Glycine max
  Clone ID: PAT_MRT3847_139491C.1.pep
RVSLRDSRPRGKRGQGSTSATQSRGQRHGTPKAFTSTRSTTIPNNEGRRRFRGLIMISRVSTIINTTHTLTRAEFRRLPRLLQWPSRRRGRRYCGLSWILAFLLHFFSVCSPPSIIFSRPCKHINQPKG

SEQ ID NO: 186577 - protein, 181 aa, Glycine max
  unsure (1)..(181): unsure at all Xaa locations
  Clone ID: PAT_MRT3847_139492C.1.pep
EXRXXALXVXTXVTRXXHXTQXTXRVLXXXXXSVHXXXXTXHXXTXXFLXNSHRXXVLWXXYIXXXHXXXXXLVAXXTXXXXHXXXTLYXLXXHXXXLLXXXKXYHIXXXTXLXTXXCLXXXSXXXXSDXXXSTXLSXXVXPXXXHXSXXTSXYXYXXXLXXXXXSVXFDNXYDXVXXXXI

SEQ ID NO: 186578 - protein, 48 aa, Glycine max
  Clone ID: PAT_MRT3847_139493C.1.pep
IIHMRKPFSYVRTYRCTITLISVQFLFPRYKNIEQILLNKGRLLNPAL

SEQ ID NO: 186579 - protein, 94 aa, Glycine max
  Clone ID: PAT_MRT3847_139494C.1.pep
SVYSLSITCLNPNLKNPRISSFFFFALTHIQVHHRILSPISARRAGSGNSLILVSNFSLLAGKNRVLLIKFVFPTEIELFFRSFTTVYTDIHQN

SEQ ID NO: 186580 - protein, 359 aa, Glycine max
  unsure (1)..(359): unsure at all Xaa locations
  Clone ID: PAT_MRT3847_139495C.1.pep
VAFKVIADHIRTISFAIADGALPANEVADIMEPYYPNVKDKSNFIKRVIKSEEERFHETLEEGLTILNELIKEAKNSDQVIKGHDAFKLYDTYGFPIELTEELATQENLSVDMPTFEQEMQQQRDRARQARQNSQSMQVQSEVLKNIQDESQFVGYETTDYQSLITHIIYNGEEVKHVEAGETIYFILRETPFYAVSGGQVADKGTVGNESFEINVTDVTKAPNGQNLHKGIVQFGEATQNAKVEARVNKEDRRLIQKNHSATHLLHAALKEVLGDHVNQAGSLVEPERLRFDFSHFGPMTQEEINLVERRVNEEIWRAIDVRIQEMSIEEAKSIGAMALFGEKYGDIVRVXNMAPFSI

SEQ ID NO: 186581 - protein, 66 aa, Glycine max
  Clone ID: PAT_MRT3847_139496C.1.pep
RQGTRGKANAESKVTTPSRKPNDFPSCIQSVPPSSVPITIHAKPGAKSASITDISRQAVGVQIDAP

SEQ ID NO: 186582 - protein, 44 aa, Glycine max
  Clone ID: PAT_MRT3847_139497C.1.pep
PMLIYIYTHSYWRPNTKKIYDAQGEIADHTFKNNATLLTEYYDR

SEQ ID NO: 186583 - protein, 151 aa, Glycine max
  Clone ID: PAT_MRT3847_139498C.1.pep
GGGPPPSPVGGAAFCCAGLTRVLGPPPHLPSLCKRPPPPSRVFCSRRSSLPVRRSGRKRNQPTSPSYLDFGISSRLVFSSCSQGCSFLNPLLPCSFIEVNTVSIFWMENLLSLSFRVGILSHIFPAVVCPPPAYLLMLTQVSFLLNPLDLL

SEQ ID NO: 186584 - protein, 39 aa, Glycine max
  Clone ID: PAT_MRT3847_139499C.1.pep
LTIIPLPLTSVLVQGNVMIVNYDIAFNFCSSPRVRPRVR

SEQ ID NO: 186585 - protein, 36 aa, Glycine max
  Clone ID: PAT_MRT3847_13949C.1.pep
WKPEEPSCTLPEKKRGRHKRPGLPAKTEVQVPLVVW

SEQ ID NO: 186586 - protein, 57 aa, Glycine max
  unsure (1)..(57): unsure at all Xaa locations
  Clone ID: PAT_MRT3847_1394C.1.pep
FGISKPEHVKKVTGWGTHGVTSATAIMKVLGEPKSPQKGXQKVEVLAPPLKTALPLK

SEQ ID NO: 186587 - protein, 257 aa, Glycine max
  Clone ID: PAT_MRT3847_139500C.1.pep
QKLVEAFDLFREMMRRGLPPDEVTYTSLINAYCVDGELSKALRLHDEMVQRGFLPDNVTYSVLINGLNKKARTKVAKRLLLKLFYEESVPDDVTYNTLIENCSNNEFKSVEGLVKGFCMKGLMNEADRVFKTMLQRNHKPNAAIYNLMIHGHSRGGNVHKAYNLYMELEHSSFACHTVAVIALVKALAREGMNDELSRLLQNILRSCRLNDAKVAKVLVEVNFKEGNMDAVLNVLTEMAKDGLLPDGGIHSSAPAST

SEQ ID NO: 186588 - protein, 64 aa, Glycine max
  Clone ID: PAT_MRT3847_139501C.1.pep
NSKLLVNCLGFVLSYQVFNIWLYPTVFPLPKESIEKQMGGIISISIVDTLIEVLFPLNCFFSQD

SEQ ID NO: 186589 - protein, 72 aa, Glycine max
  Clone ID: PAT_MRT3847_139502C.1.pep
YLHMITLFPQELYLKIAKAVLLTKNHGPYTTYRWRYCTTGLRTMNRTNYKSQVTHKIHLCNELITATANMRY

SEQ ID NO: 186590 - protein, 103 aa, Glycine max
  Clone ID: PAT_MRT3847_139503C.1.pep
RAVFFLSPQITTSLFSSDFSADSLSKILTSPKFPPIVHILNHQFSTFFLPLTHFFFLKKKYTFEFHIILPQFALLLLLLLLLLFHLGLLGIRNTNHFFIKFLS

SEQ ID NO: 186591 - protein, 52 aa, Glycine max
  Clone ID: PAT_MRT3847_139504C.1.pep
ISCGTGYYSEDALNFQFHTRTLLSPYLWKMWNRKAQRRSHINELETYTLDCY

SEQ ID NO: 186592 - protein, 55 aa, Glycine max
  unsure (1)..(55): unsure at all Xaa locations
  Clone ID: PAT_MRT3847_139505C.1.pep
TXXPNLNLSLPHXXPXQXLXLLHXTSQGHPXXXXPHXPSIXXHHXTTTXSXXXSX

SEQ ID NO: 186593 - protein, 311 aa, Glycine max
  Clone ID: PAT_MRT3847_139506C.1.pep
MFCVSVGVNFIGGFAFASGIPKSSVSATMASNSVRVAAAQMTSISDLAANLATCSRLIKEAASAGAKLLCFPEAFSYVGTKDGDSVRVAEPLDGPIMSHYCSLARESSIWLSLGGFQEKGSDPQRLSNTHVIVDDTGKIISSYSKIHLFDVDVPGGRVYKESSFTESGKDIVAVDSPVGRLGLSVCYDLRFPEMYQLLRFQHEAQVLLVPAAFTTVTGEAHWEILLRARAIETQCYVIAAAQAGKHNDKRESYGDTLIIDPWGTIVGRLPDRLSTGIVVADIDLSFVDSVREKMPIAKQRKPIGFWKAASL

SEQ ID NO: 186594 - protein, 165 aa, Glycine max
  Clone ID: PAT_MRT3847_139507C.1.pep
MEVQIPIHTVFDVPSLLQAVAADTVLAAAQSIALIGYLLTNDTNSVSPNLTAANGRFPLEDLFGRKHAYLENKNSETEDDDEDGDEDDEDGHDQDDDGEDEEFSGEEGDEKGDPEDDPEANGGGSDDDDDDDNDNEEDDDDGEDEEEEEEEDDEETSQPPTKKRK

SEQ ID NO: 186595 - protein, 89 aa, Glycine max
  Clone ID: PAT_MRT3847_139508C.1.pep
LTICWYTAFLSLPQMLSCTSCAREKTGWFFFVRGINIFSEYMSEIQLRRTGEPRIEKSGPLRHRDLDITSKTSSSKSWSLRFMNDFVAS

SEQ ID NO: 186596 - protein, 114 aa, Glycine max
  unsure (1)..(114): unsure at all Xaa locations
  Clone ID: PAT_MRT3847_139509C.1.pep
MKMNVLGFLAATIGVAWQCHAYDMFPIRMNTGYGARTFEVKCARWRLAMEAHNIFGFETILEECLEATQEYIHGEQYTSDFKTLNQQAYSYARDLXVHSKDTFXVFNIHGTCIS

SEQ ID NO: 186597 - protein, 142 aa, Glycine max
  Clone ID: PAT_MRT3847_13950C.1.pep
MAGNLAVIEHSNKNSARLREQWEICFARFIPYPTLPPSSDLLPLPPRLRNLSPRGNWISSSSVAFLRLSLSHLLLTVSLNAALLEEHYVTKLHFTWPQVSCVSGYPARGIRTVIVSYRDSLGEIQKFAMRFPTIYEAGSFIN

SEQ ID NO: 186598 - protein, 62 aa, Glycine max
  unsure (1)..(62): unsure at all Xaa locations
  Clone ID: PAT_MRT3847_139510C.1.pep
RKQAHXRVLKMAAXSXHGSLFPILGWQGVKWXHSXPRSREGQHEXXVTKPXSXGXHXTARPC

SEQ ID NO: 186599 - protein, 85 aa, Glycine max
  unsure (1)..(85): unsure at all Xaa locations
  Clone ID: PAT_MRT3847_139511C.1.pep
AQQYSSSSWSCNXSKMAGLALCLLVMLSYASSSYAHLLMNRTRRGFMVSKEAHRTQLTDNGLGHTRHMGWNRWSHVACDINKDLI

SEQ ID NO: 186600 - protein, 57 aa, Glycine max
  Clone ID: PAT_MRT3847_139512C.1.pep
LRDFAHMLEYVMYVITVALQNGNAPLDAIFFNLTFSSSPSYAYQLSAGLIGRAGGRV

SEQ ID NO: 186601 - protein, 75 aa, Glycine max
  Clone ID: PAT_MRT3847_139513C.1.pep
LGPKVLDPYIRSLCAFKSSCTLPLQSPVSSCSPFRSFIACVQSSPVPLLSSCVSCSSSRVWPPPYNQCWCSRRGS

SEQ ID NO: 186602 - protein, 80 aa, Glycine max
  unsure (1)..(80): unsure at all Xaa locations
  Clone ID: PAT_MRT3847_139514C.1.pep
PLXRCAXXRASSPXMLALVAQLVSVRSXGXPPXQSXSXQSXNMXAAXXXXXEXSAXXXTETPSXLXLELNSVLYVRVHXT

SEQ ID NO: 186603 - protein, 175 aa, Glycine max
  Clone ID: PAT_MRT3847_139515C.1.pep
MANPKTKSHHSLGGEDDLDSTESRWVFQEDEEDPSEIEDFDAADLRHQAMFDSDDEDNAEQRLVRTGPRIDSFDVEALEVPGAHRNDYEDVSVGKGIVLAFQTLGVVFGDVGTSPLYTFSVMFRKAPINGNEDILGALSLVLYTLILIPLVKYVLVVLWANDDGEGGTVAFDSLI

SEQ ID NO: 186604 - protein, 47 aa, Glycine max
  Clone ID: PAT_MRT3847_139516C.1.pep
REPSCEVTILIAKIHTTSSSLPVFLSFSLSLDLIPHVMVCRSTVTIP

SEQ ID NO: 186605 - protein, 72 aa, Glycine max
  Clone ID: PAT_MRT3847_139517C.1.pep
KPCLNLYIGILAFHIPKMYKNPLHSEDILASNNCSNSCIFHCMFSSLRLTHSLFLHIIIIYLVEFKKIFLTF

SEQ ID NO: 186606 - protein, 95 aa, Glycine max
  Clone ID: PAT_MRT3847_139518C.1.pep
SPLAQCPRRCKGSCQPPGISARTRVSGSRSTRRECGPNRFSVIPSACLAVAASARTAPSSSSVRFTRSRVSKVRNFENHHREGRDLMRKKKVARS

SEQ ID NO: 186607 - protein, 78 aa, Glycine max
  unsure (1)..(78): unsure at all Xaa locations
  Clone ID: PAT_MRT3847_139519C.1.pep
LIDALDGENPVSVWKGRAHSLALTSKGKLWVWGSGTSGRLGLGSSADQVEPXCVDSLERFQILQALSGFDHNLVLVAG

SEQ ID NO: 186608 - protein, 54 aa, Glycine max
  Clone ID: PAT_MRT3847_13951C.1.pep
WIANYSAADNPLLKVYIQILNAFRVWILFVWSYTRKKRSEKHLGGSEGQPGKVF

SEQ ID NO: 186609 - protein, 57 aa, Glycine max
  unsure (1)..(57): unsure at all Xaa locations
  Clone ID: PAT_MRT3847_139520C.1.pep
LAVIYMDRTEKSFVEGNLDCNWSXESIFKLFADLNIAQFEPHVDVAFAPPFLYVDQV

SEQ ID NO: 186610 - protein, 63 aa, Glycine max
  unsure (1)..(63): unsure at all Xaa locations
  Clone ID: PAT_MRT3847_139521C.1.pep
CNVIEERHGEKLKLGVSIRHLDCLGVHKSALQSCMVCTFTNFANXTNNGSPNILQFLDEMKAF

SEQ ID NO: 186611 - protein, 77 aa, Glycine max
  Clone ID: PAT_MRT3847_139522C.1.pep
ECDGRWNDQRWKKLPKEVLWASNSKEGTSEGCNCFGVGSFACCHLLTHYYIMCCTSSPPLPLGPSTKVLYRFFFCAS

SEQ ID NO: 186612 - protein, 100 aa, Glycine max
  Clone ID: PAT_MRT3847_139523C.1.pep
IHWQGGFGRAQKESFSSSFYFPPLIPLLNPPQSARAQLPNQGGASRPKPENPPRPPVKNHWQGGFGPAQKESSSSSFYFYPIFPLITPPTMGRVQLPTQG

SEQ ID NO: 186613 - protein, 70 aa, Glycine max
  Clone ID: PAT_MRT3847_139524C.1.pep
KYGFLYFYILITCSYHFILFLVLKGAPLKKGLVFTQKTKMPPNIILQKFKVMKKKICLPIIFFGKKKPMF

SEQ ID NO: 186614 - protein, 41 aa, Glycine max
  Clone ID: PAT_MRT3847_139525C.1.pep
ISFTIFFIFLKLNSLIFYYIFFSIFHPTSLFSTKHISFESV

SEQ ID NO: 186615 - protein, 52 aa, Glycine max
  Clone ID: PAT_MRT3847_139526C.1.pep
WIWKPEPSGQYSVRTAYNMLKGVDVEEDNMWVFEELWMIRVPPKLLFSHGGY

SEQ ID NO: 186616 - protein, 417 aa, Glycine max
  Clone ID: PAT_MRT3847_139527C.1.pep
MFGRAPKKSDSTRYYEILGVSKNASPDDLKKAYKKAAIKNHPDKGGDPEKFKELAQAYEVLSDPEKREIYDTYGEDALKEGMGGGGGGHDPFDIFSSFFGGSPFGSGGSSRGRRQRRGEDVVHPLKVSLEDLYLGTSKKLSLSRNVLCSKCNGKGSKSGASMTCAGCQGTGMKVSIRHLGPSMIQQMQHPCNECKGTGETINDRDRCQQCKGEKVVQEKKVLEVVVEKGMQNGQKITFPGEADEAPDTVTGDIVFVLQQKEHPKFKRKADDLFVEHTLSLTEALCGFQFVLTHLDSRQLLIKSNPGEVVKPESFKAINDEGMPNYQRHFLKGKLYIHFSVEFPDTLSLDQVKALEAVLPSKPTSQLSDMELDECEETTLHDVNMEEETRRRQQAQQEAYDEDEDMHGGAQRVQCAQQ

SEQ ID NO: 186617 - protein, 50 aa, Glycine max
  Clone ID: PAT_MRT3847_139528C.1.pep
LDWGRPVLFFFFRKTTCDSHFRGDIRYPGIPISFILKLRPCFVLLFQAKY

SEQ ID NO: 186618 - protein, 62 aa, Glycine max
  Clone ID: PAT_MRT3847_139529C.1.pep
TMTYGDDARHFSRPCEKHMDQHVQEHPGSTWLNSMRRLATPVHLRALEGCYTSTNTSWRKMY

SEQ ID NO: 186619 - protein, 45 aa, Glycine max
  Clone ID: PAT_MRT3847_13952C.1.pep
RTHTMLAKDLNDGDSTLQMDGNEHYDIVINELRRSPVYMIDIIKF

SEQ ID NO: 186620 - protein, 37 aa, Glycine max
  Clone ID: PAT_MRT3847_139530C.1.pep
SIVLLLINHCNVDPWIFFPYSHVLGGLPSFFFFWRCR

SEQ ID NO: 186621 - protein, 513 aa, Glycine max
  Clone ID: PAT_MRT3847_139531C.1.pep
GGYERNKNLDCGSDKFLHVKNVKLPETTYVFANGSMNLRECQDLCLRDCSCTAYANIQITNGGSGCVTWSGELEDMRLYPAGGQHLYVRLAASDVDDIVGGSHKKNHTGEVVGITISAAVIILGLVVIFWKKRKLFSISNVKTAPRGSFRRSRDLLTSERMFSTNRENSGERNMDDIELPMFDFNTITMATDNFSEANKLGQGGFGIVYRGRLMEGQDIAVKRLSKNSVQGVEEFKNEVKLIVRLQHRNLVRLFGCCIQMDEKMLVYEYMENRSLDAILFDKTKRSLLDWQRRFNIICGIARGLLYLHQDSRFRIIHRDLKASNILLDKEMNPKISDFGMARIFGTNQTEANTLRVVGTYGYMSPEYAMDGNFSVKSDVFSFGVLVLEIITGKKNRGFYYSNEDMNLLGNAWRQWRDGSTLELIDSSIGDSCSQSEVLRCIHVGLLCVQERAEDRPTMSSVLLMLSSESAIMPQPRNPGFSIGKNPVETDSSSSKKDQSWSVNQVTVTLLDAR

SEQ ID NO: 186622 - protein, 82 aa, Glycine max
  Clone ID: PAT_MRT3847_139532C.1.pep
SQSPVGDASLPRLWWRRRHGIISTLVLPSRCCMVVKSADARCSSFACLSKPLCRGLSLPSHTRTRGVRRSTPERDPGTCQRS

SEQ ID NO: 186623 - protein, 97 aa, Glycine max
  unsure (1)..(97): unsure at all Xaa locations
  Clone ID: PAT_MRT3847_139533C.1.pep
AKKQQKGGLGGSVKQAKTPIGRPAXLLFRVFAFKDXESXSESNAPLLSKVMGVVLGSQRTKLTXVRSESFLDDQEPSHHEECEKTCERRRHSHPTRV

SEQ ID NO: 186624 - protein, 117 aa, Glycine max
  Clone ID: PAT_MRT3847_139534C.1.pep
RTRRRLLSPLSRAPVFPSPSPYLPRAAAVVSSPPLYPPPPPLQISSSSPSLSPLHPRYGLLKSLRQLVQLRQLVRGRTAGTMRTSSCCLLGSCTLISRSESPQVIHKGFSSTSWSPE

SEQ ID NO: 186625 - protein, 78 aa, Glycine max
  Clone ID: PAT_MRT3847_139535C.1.pep
LLKPLLWNYVAASIFTNIMTSPLLFYLITYRGHLLCHNMISSSTSILLLIPIHFLITTTMMINLITSSVSIYSLFLHS

SEQ ID NO: 186626 - protein, 106 aa, Glycine max
  Clone ID: PAT_MRT3847_139536C.1.pep
GYFLVLIQSLWWFALTYYLVGRWILLRALAPLLRVISLIALLYRLNLEVMAMVEVDTSRAMAVSKGSTMIHQCARSSQNQQYSQPQAHAVPRPDIATQSEDKPRWL

SEQ ID NO: 186627 - protein, 100 aa, Glycine max
  unsure (1)..(100): unsure at all Xaa locations
  Clone ID: PAT_MRT3847_139537C.1.pep
MAAPFSAASLFAIREEDQNQMKQQHSSTPSSSTTPAAPPPQKKRRNQPGTPYPDAEVIALSPXTLMATNRFICEVCNKGFQREXNLQLHRRGHNLPWKLK

SEQ ID NO: 186628 - protein, 69 aa, Glycine max
  Clone ID: PAT_MRT3847_139538C.1.pep
ESLSCFSHIYHRASIFEIQVTGSEPMARSQHIARSRDPALLLTICTRFYSWVLDLIVGMPVGPRSECRA

SEQ ID NO: 186629 - protein, 89 aa, Glycine max
  unsure (1)..(89): unsure at all Xaa locations
  Clone ID: PAT_MRT3847_139539C.1.pep
SXDPLERPLXXLFFFFFFYTNTNLNTKKTTEVLSFYYTYNNSWXILKHEFYHYLQIFTLIPHXFYSSNWIRLLLLKDLLYVLLSPIXXL

SEQ ID NO: 186630 - protein, 51 aa, Glycine max
  unsure (1)..(51): unsure at all Xaa locations
  Clone ID: PAT_MRT3847_13953C.1.pep
TFDQYLYCFMGVSMLXCKDCQVVDEKILHIMRDCPMASMVWMHLLRVDHRA

SEQ ID NO: 186631 - protein, 45 aa, Glycine max
  Clone ID: PAT_MRT3847_139540C.1.pep
NGVYHNSDLGYTVTPIRCMKSWPDLTLKKTSPFLQDTITQKNPLL

SEQ ID NO: 186632 - protein, 314 aa, Glycine max
  Clone ID: PAT_MRT3847_139541C.1.pep
MMASPTSPRVLFLSLFVTLSMILHLSSARKLSESDPQLQFQYHRGPLLTGKISVNLIWYGKFKPSQKAIVADFITSLSSSKPLTAQPSVATWWKATDKYYKNSFPKLALSLGSQIVDENYSLGKSLTTNQILKLASKGPQRNAINIVLTSAEVAVEGFCSSRCGTHGSSVGARVNGKRYKFAYMWVGNSETQCPGQCAWPFHQPIYGPQNPAPLVAPNNDVGLDGMVINVASLLAGTVTNPFGNGYFQGPKEAPLEAGSACTGVYGKGAYPGYAGNLLVDPTTGASYNANGVNGRKYLLPALVDPKTSSCSTLV

SEQ ID NO: 186633 - protein, 115 aa, Glycine max
  Clone ID: PAT_MRT3847_139542C.1.pep
VFFFFFFFFFFFFGRARRKQFFFFFPGGKKMTWLFKPHLFFFPRPQKSQSDSNHRLFFYRFAFPGVFKKKSSCFKWGFTGGIFLVAKMILKKNAPPLVSRDSLTPIFWVAFPPFW

SEQ ID NO: 186634 - protein, 158 aa, Glycine max
  Clone ID: PAT_MRT3847_139543C.1.pep
ARACTIGVIRIHRDTATRRTKSASIGTTAEIRQFGRLGDGSLNVVTRGQQRFRLRRSWTDVEGVPYGEIQVIEEDLPLRIPRDAFGKSAPLSNMPCSQGVSHNLSPKYSHVNMQRSKNEENDSEPNSEESFESELSLMGRKIHLFSCGSKYVHDTMDE

SEQ ID NO: 186635 - protein, 94 aa, Glycine max
  Clone ID: PAT_MRT3847_139544C.1.pep
FSLYFKSFLYVNYFSTTVIYEFNIQTLFFQVGINSYLMGFSFPLTSAIICNQSHVSNLHSRSLSLVCPVFITGHFFCSTRIKSSLSSDQIIRAR

SEQ ID NO: 186636 - protein, 60 aa, Glycine max
  Clone ID: PAT_MRT3847_139545C.1.pep
TGNVNTNGLIPRRCFTNGHEQIHVWGGSHRCSYGCWTPVNGRSSAAFMSVHLAQCGWVCL

SEQ ID NO: 186637 - protein, 62 aa, Glycine max
  Clone ID: PAT_MRT3847_139546C.1.pep
ILPFHGSGKIACREDFVAMMLPPVKPRSVFFCFCLPMHRYMDCMTPEFDVFCGDFVVGDPGE

SEQ ID NO: 186638 - protein, 85 aa, Glycine max
  Clone ID: PAT_MRT3847_139547C.1.pep
MASGSNWLSGVNVVLVMAYGSLDLKEEIDIRLSKVQDIKYEPQLLADDDARLLQLETQGNQNCYNYLYRMKALDAIRASEIPFHA

SEQ ID NO: 186639 - protein, 109 aa, Glycine max
  Clone ID: PAT_MRT3847_139548C.1.pep
DKMESDLGKLFIGGISWDTDEERLKEYFGKYGEVIETVIMRDRVTGRARGFGFVVFGDPSVAERVIMDKHIIDGRTVEAKKAVPRDDQQNINRQSGSAHVSPGPGRTKK

SEQ ID NO: 186640 - protein, 54 aa, Glycine max
  Clone ID: PAT_MRT3847_139549C.1.pep
HSYGLTYPQITAIDSITADPGKCNLPVYTCLVLIEIDNIPVLKSILSDTISYYE

SEQ ID NO: 186641 - protein, 317 aa, Glycine max
  Clone ID: PAT_MRT3847_13954C.1.pep
MTADTHAAPNINPKGLLCNAAAGASAGVIAATFVCPLDVIKTRFQVHGVPQLAHGSVKGSIIVASLEQIFHKEGLRGMYRGLAPTVLALLPNWAVYFSAYEQLKSLLHSDDSHHLPIGANMIAASGAGAATTMFTNPLWVVKTRLQTQGIRPGVVPYRGTLSALRSAHEEGIRGLYSGLVPALAGISHVAIQFPTYETIKFYLANQDDTAMEKLGARDVAIIASSVSKIFASTLTYPHEVVRSRLQEQGHHSEKRYSGVIDCIRKVFQQEGVQGFYRGCATNLLRPTPAAVITFTSFEMIHRFLVSLFPSDPRPHIL

SEQ ID NO: 186642 - protein, 90 aa, Glycine max
  Clone ID: PAT_MRT3847_139550C.1.pep
MVNWAWLMTELMESDLGKLFIGGISWDTDDERLKEYFGKYGEVIEAVIMRDRTTGRARGFGFVVFADPSAAERVIMDKHIIDGRTVSFSL

SEQ ID NO: 186643 - protein, 126 aa, Glycine max
  Clone ID: PAT_MRT3847_139551C.1.pep
DKMESDLGKLFIGGISWDTDEERLKEYFGKYGEVIETVIMRDRVTGRARGFGFVVFGDPSVAERVIMDKHIIDGRTVEAKKAFRDDQLIGLVVHMCLPVLTQFFIIDLLSIMSIYMLFGWAVMGPS

SEQ ID NO: 186644 - protein, 614 aa, Glycine max
  Clone ID: PAT_MRT3847_139552C.1.pep
MEYGKLGPSDPGGSSRRSTVPLTNPTSSSSSASSKKKLIMLSLLAAVLIVAAAISAALVTVVRSRATSNQNGPHLAHNPTQAISRTCSKTRFPTLCINSLLDFPGSTTASEQDLIHISFNMTLRHVSRAFYASSGLSFAATNPKVSAAYNDCLELLEESMEALSRSLDSVLSPSALSGSTEVRPATVGSTEDVMTWLSTALTNQDTCAEGLQDTSGSVKDQMIDNLKDLSELVSNCLAIFSASGSGDFSGVPIQNKRRLMENKEEEEENVNRDISGKFPGWLNKRDRRLLSLPVSAIQADITVSKTGNGTVKTIAEAIKKAPEHSTRRFIIYVRAGRYEENNLKVGRKKTNVMFIGDGKGKTVITGKKNVIDGMTTFHSASFAASGAGFIARDITFENYAGPAKHQAVALRVGADHAVVYRCNIVGYQDSCYVHSNRQFFRECNIYGTVDFIFGNAAVVFQKCNIYARKPMAQQKNTITAQNRKDPNQNTGISLHNCRILPAPDLAPVKGSFPTYLGRPWKQYSRTVYLVSYMGDHIHPRGWLEWNGDFALNTLYYGEYMNYGPGAAVGQRVQWPGYRVIKSTMEANRFTVAQFISGSAWLPSTGVAFAAGLST

SEQ ID NO: 186645 - protein, 61 aa, Glycine max
  Clone ID: PAT_MRT3847_139553C.1.pep
HVKAVIRSWSILAADVMILLFCVVKALQILLRQQYMALNSLICYAYATCPLPTSCLLHDLQ

SEQ ID NO: 186646 - protein, 52 aa, Glycine max
  Clone ID: PAT_MRT3847_139554C.1.pep
LILQPYIDDTDSVLLLDAFSESCLFRTIHASKSGTHSNRKMPKANYMNWIIT

SEQ ID NO: 186647 - protein, 74 aa, Glycine max
  unsure (1)..(74): unsure at all Xaa locations
  Clone ID: PAT_MRT3847_139555C.1.pep
CXSXDRCGHXPSKXPFLREGXXLLXPLPCWXSRXQLPPTLLVLXLCXXAEPGLXSXVVYTKXGVXXLNRQHXXX

SEQ ID NO: 186648 - protein, 320 aa, Glycine max
  unsure (1)..(320): unsure at all Xaa locations
  Clone ID: PAT_MRT3847_139556C.1.pep
MGGDEEEEEVLGSGQSASTNNSLPPPVDKTILKLNHLDVHADDAGSHASLASGKKKKRGGQRAVGPDKSGRGLRQFSMKVCEKVESRGRTTYNEVADELVAEFSEPSNSELPPDQQQYDEKNIRRRVYDALNVLMAMDIISKDKKEIQWRGLPRTTVNDIEELKTERLGLRNRIEKKTAYLQELEXEQFIGLQNLIQRNEQLYSSRNPPSGSVSLPFIXVQTRPHATGGMEISEDMQLVHFDFNSTPFELHDDNYVLKAMKFGERPLEDNMTHNLTDGGEGSSMSGLCQPQTPTNLNVSNRPPTSPPLPGILKARVKQEH

SEQ ID NO: 186649 - protein, 38 aa, Glycine max
  Clone ID: PAT_MRT3847_139557C.1.pep
HRCSDVATASVFPKFQDSVTWLSSILFHLPQLCSFFRI

SEQ ID NO: 186650 - protein, 48 aa, Glycine max
  Clone ID: PAT_MRT3847_139558C.1.pep
SWILVVETTSLLMVEATYILTLPTPLNDGSLVHMPSFYIHIASSFFKL

SEQ ID NO: 186651 - protein, 68 aa, Glycine max
  Clone ID: PAT_MRT3847_139559C.1.pep
GLLWWRAEWAHQCACHARPPIADPKETTVWDIPQGISEDSDTAGNTLTPHVNCTEATARFPEKAEAPA

SEQ ID NO: 186652 - protein, 108 aa, Glycine max
  Clone ID: PAT_MRT3847_13955C.1.pep
VDPRRPKKIKKKKKKKKKKKKKKKKKKKKKKKKKKKKKKKKKKKKKKKKKKKKKKKKKGGALFRGPSFIPGGGEVFIFFFGAPKLNFLARVLKTWGGENPGGPQIKSF

SEQ ID NO: 186653 - protein, 372 aa, Glycine max
  Clone ID: PAT_MRT3847_139560C.1.pep
MDSLLANYASSDEEEDQQQPSPPKTTSFSSLPQPKSSLFQSLPQPKSSPFSSLFQSLPPPKQPSSESASLPNPNPNPNPKPQIEEPRPKRVVQFRPPIIPLPNPTQLDDDDDDEEEERNRRKNKLESSTQTSSVKSFLASIPAPRNTATLGVQASSGSGRRSILETETPAPASNSGGFSNVPVDQSTGDYENFDDYQYATDQYANYYGNFGSGAEPGSSGTEPKAGVAAYGTEQYGNYGDAYAAYGDYGQYGNNWGDVSAATPVPEASGISDSVMRIPGKRGRHEIPTEVIEVKQEELIKNRPREDQVKLTGIAFGPTYQPASTKGKPTKLHKRKHQIGSLYFDMKQNEMKLAERRVKGMLTKAETQAKYGW

SEQ ID NO: 186654 - protein, 122 aa, Glycine max
  Clone ID: PAT_MRT3847_139561C.1.pep
QSKLQPLPMKTLFSNQRSEAKLSSIAYPIAQRHYRRREIRLRFTTFSTKETLENTFRRRNLGIPGILPSGEGSTVPMWGETRRRRNCGQGIRVGREKPNRLGRSWGRWNRGEGNSKNEKGMV

SEQ ID NO: 186655 - protein, 295 aa, Glycine max
  Clone ID: PAT_MRT3847_139562C.1.pep
PRVRPRVRAARRRQKGILHYLFSSNFCEAFLLVEMESESVKRRIHMIAAHFAPNDDISTTNVLPMNCSGSLNSVLRRCDNKVYFARQASASLGYFMRQTSIEEGGSTSFIAPKTNHGAAASECPSDARAPCFARPAREESVFTNSVIQPMAREQGSDFSTLDPPTFARPTRQIRGDQLHSEKKTGYSEIGGIEWSPRMDVAESEGKYVIMVEVPGVSIGDIRVEVDDLKLYVKGRRSTSSWTVAGCPNASFSSYHRREILYGPYGVVWPLPAGVNKDRISAEFLDGFLQIIVPKV

SEQ ID NO: 186656 - protein, 51 aa, Glycine max
  Clone ID: PAT_MRT3847_139563C.1.pep
PFLMLLARLLQLHNLKSLLIVILSREALTICLTFCVEASAYTVTLSSQPYY

SEQ ID NO: 186657 - protein, 236 aa, Glycine max
  Clone ID: PAT_MRT3847_139564C.1.pep
MGSLPDFDTLPPLSSRISTVVPATPREDENGAFQLNYMDLLVKLHYIRPVFFFTSEAVQGLSISDLKKPMFPLLDPYYHVSGRVRRSESGRPFVKCNDAGVRIAESHCDRTLEEWFRENGNGAVEGLVHDHVLGPDLAFSPLVFVKFTWFKCGGLSVGLSWAHVLGDAFSAFNFLSKWSQILAGQAPPKSLHVSSFPEPKISHNSIVDDPPVSIKKTNILGEYWLATNYHDVATHS

SEQ ID NO: 186658 - protein, 82 aa, Glycine max
  Clone ID: PAT_MRT3847_139565C.1.pep
WDHWMLHLCQSNSYSYEGVLVSDLTIFEVRERCNCDIAMLRKSLITGRFANSLNTTNHGKRLIEDEDAEKTEPSFDHFSQDG

SEQ ID NO: 186659 - protein, 96 aa, Glycine max
  Clone ID: PAT_MRT3847_139566C.1.pep
KKIPKYNNSLLEVLTFIFSGAARDEQSAPLAAAASEATATETGAPALAEYAMKSPSFLFTATLGDKVDQYEYSVPVEVKPYFSGSKLRLDIFMNTN

SEQ ID NO: 186660 - protein, 66 aa, Glycine max
  Clone ID: PAT_MRT3847_139567C.1.pep
IGLSIYKKELITNVLCEDEEQADEAIYILCGSLSLEEYLYHKCPITVPSFSSEGLCHHFVSVSLPE

SEQ ID NO: 186661 - protein, 103 aa, Glycine max
  unsure (1)..(103): unsure at all Xaa locations
  Clone ID: PAT_MRT3847_139568C.1.pep
ARVRKLGIRLEXASSLPEKWPSNIHVCHRGAGPTTAASATCPAPHTRVVFCVKGHLSSLAQPALQVPSTPSARARPLGLPAAGIGGSGSRGSQVWMMGGACLA

SEQ ID NO: 186662 - protein, 113 aa, Glycine max
  Clone ID: PAT_MRT3847_139569C.1.pep
QALQWVNSRIIPYLPETKITGVQVGNEVFTDDDITLIEHLVPAVVNIHNALAQLGYSNIKVSTPSSLAVLDQSYPPSAGSFKSEISGIMYQFLNFLSSSKSPFWINAYPYFAF

SEQ ID NO: 186663 - protein, 114 aa, Glycine max
  Clone ID: PAT_MRT3847_13956C.1.pep
TPSEDDTAMEKLGARDVAIASSVSKIFASTLTYPHEVVRSRLQEQGHHSEKRYSGVIDCIRKVFHQEGVSGFYRGCATNLLRTTPAAVITFTSFEMIHRFLVSYFPSDPRPHIL

SEQ ID NO: 186664 - protein, 50 aa, Glycine max
  Clone ID: PAT_MRT3847_139570C.1.pep
CILELMKIFHFQNTTIHSLVYSLLIILNSIPRTILHSPSTHSLADYLSDP

SEQ ID NO: 186665 - protein, 58 aa, Glycine max
  Clone ID: PAT_MRT3847_139571C.1.pep
FKVERNVVRKSKDFDHKEATGLHPANHIVESKAQSAGKIPTFCIWVKGNPTPLLDPPP

SEQ ID NO: 186666 - protein, 69 aa, Glycine max
  Clone ID: PAT_MRT3847_139572C.1.pep
LLYVSQDSTSSSLCFHRTQHPRLYVFIRLNVFVFMFHKTQRLMSLCFHKTLCPLSLCFIGLNVLCLYVS

SEQ ID NO: 186667 - protein, 65 aa, Glycine max
  Clone ID: PAT_MRT3847_139573C.1.pep
KKRNREGVRESIKLVSSGSDIRVPSSFYLSPFLGLQLPNFSRCSIPPTILIASPPVTDDGIKSQL

SEQ ID NO: 186668 - protein, 26 aa, Glycine max
  Clone ID: PAT_MRT3847_139574C.1.pep
QKTTDGDHYYLVKHQFTKHIYRVRRS

SEQ ID NO: 186669 - protein, 85 aa, Glycine max
  Clone ID: PAT_MRT3847_139575C.1.pep
SIVPSTNNSHTYFTSTNRFYNLDILIFIISVQTNNRFIIDLTHIQTCNTILLTVSNIIVINIINNHIPHTMRCSTNSDYIVFFGD

SEQ ID NO: 186670 - protein, 61 aa, Glycine max
  Clone ID: PAT_MRT3847_139576C.1.pep
DICVPKVLTILALTFLFLTIVNISFSFFCFFNRFPSDLLTQLKTDCLVLHNHRVSFVLSMT

SEQ ID NO: 186671 - protein, 78 aa, Glycine max
  unsure (1)..(78): unsure at all Xaa locations
  Clone ID: PAT_MRT3847_139577C.1.pep
PCLTMGSGITLKVEKGFVISFPCYMXNFFERCLYNMFNIHNFPGFLICVFLYSSSYFVICMLFCNFLKDHIKTCPLCL

SEQ ID NO: 186672 - protein, 78 aa, Glycine max
  Clone ID: PAT_MRT3847_139578C.1.pep
CLVVGELASRRPPFLFFLSKYLSIQHSHQLMNTVPHRQVDGMKCFRQLLTPGHKKDIDSKKAPDESAVVAALYLRLGK

SEQ ID NO: 186673 - protein, 88 aa, Glycine max
  Clone ID: PAT_MRT3847_139579C.1.pep
KLGPQKLGDSKGFFLKLNKLVSKNEYLKGVLMEKKNIFGKKMGGLELGIQKIKTFFRPFLLSPGVKRFRFCSKISKSKGSPIVSAKPP

SEQ ID NO: 186674 - protein, 50 aa, Glycine max
  Clone ID: PAT_MRT3847_13957C.1.pep
AVQAQRLSVISDIDGYAQRTGQLSTRRWVYHASSSCSSKSLSFVPATIIL

SEQ ID NO: 186675 - protein, 52 aa, Glycine max
  Clone ID: PAT_MRT3847_139580C.1.pep
DQSHAQALKHSHKHNSEIRTERDENERCSKRHREWGWAECGSYMRIGLRINE

SEQ ID NO: 186676 - protein, 161 aa, Glycine max
  unsure (1)..(161): unsure at all Xaa locations
  Clone ID: PAT_MRT3847_139581C.1.pep
EDEHIKEVNNEAYDWLIKVGTKLWRKHTFSYYTKCDVLMNNLCDAFNSTILCAREKWKLVXTLSGHLVFEVSHSMLSDKFIVNLNSWSCSXNLWEITGILCRHACAAIQDNSQEPEDYVDXYYLKDTYMKCYEHAITAINGPINWAETPAESILPPEYKQG

SEQ ID NO: 186677 - protein, 43 aa, Glycine max
  Clone ID: PAT_MRT3847_139582C.1.pep
DLLIWNRLVLHSSWTKLHHWCASRAPTTPTSRKNVGRLRLSQV

SEQ ID NO: 186678 - protein, 184 aa, Glycine max
  Clone ID: PAT_MRT3847_139583C.1.pep
MASKAPKKANLLDHHSIKHILDESVSEVVTSRGFVEDVRLSNVRLLIGAIIIVIALFAQFYKKKFPENRDFLIACIALYVIFNGLLQLIIYTKEKNAILFTYPPVGSFTSTGLVVSSKLPRFSDMYTLTIASADPKSISANDQVHFTKSVTQWFTKDGVLVEGLFWKDVEALIVQYTKEPKKSK

SEQ ID NO: 186679 - protein, 52 aa, Glycine max
  Clone ID: PAT_MRT3847_139584C.1.pep
NIKWDMVKLKNMIVHTFELTLSYSIYHGSTFHFNGPAFNTIYAFLHCRILTK

SEQ ID NO: 186680 - protein, 62 aa, Glycine max
  Clone ID: PAT_MRT3847_139585C.1.pep
MQDHRVRIIYWMIPTSCLLVFGLALDLFGMHINKVLYSLSYTCVTAGAAGVLFVGIYLMVRF

SEQ ID NO: 186681 - protein, 353 aa, Glycine max
  unsure (1)..(353): unsure at all Xaa locations
  Clone ID: PAT_MRT3847_139586C.1.pep
MKTHIHIALFLLLVSPLIPIAVAQAQSQPNDFSDANLNQFSPSIAIIIVILVVALFLMAFFSIYVRHCADSPSTTVSPLTTARSRRAARGLDPALIQTFPILEYSDVKIHKIGKEALECAVCLCEFEDTETLRLIPKCDHVFHPECIDEWLGSHTTCPVCRANLLPTDSEDAIANGNANGVVPVPETFTRDIEAQNDAVQAAPEQQNAEADPVLPEPEVXFPGQNTEPEPHARVAVEPAAEVSQDTERLTLRLPEEVRKQILQNPQLHRARSLVILPREGSSRRGYRTGEGSSRGRSSRRLDRGFKSDRWVFTMAPPFLVRASSIRSPRVANNGGEGTSAAASLPPPPAVESV

SEQ ID NO: 186682 - protein, 387 aa, Glycine max
  Clone ID: PAT_MRT3847_139587C.1.pep
MNNPNGGICFLLFLFLFPFAAAQPATNQNQSYYNKFSPSMAIIIVILIAALFLMGFFSIYIRHCSDSPSASIRNLAAATGRSRRGTRGLEQAVIDTFPTLEYSAVKIHKLGKGTLECAVCLNEFEDTETLRLIPKCDHVFHPECIDEWLASHTTCPVCRANLVPQPGESVHGIPILNAPEDIEAQHEAQNDLVEPEQQQQDPKPPVPTEPQVLSLNQTLNRNRTRGSRSGRPRRFPRSHSTGHSLVLPGEDTERFTLRLPEEVRKQILQNPQLHRARSLVILPREGSSRRGYRTGEGSSRGRSSRRLDRGFKSDRWVFTMAPPFLVRASSIRSPRVANNGGEGTSAAASLPPPRCCGVCLSFDSPFCKISIFYCIYQLFFAATIFLR

SEQ ID NO: 186683 - protein, 186 aa, Glycine max
  Clone ID: PAT_MRT3847_139588C.1.pep
SEKSNLLENSLFDVNAELEGLRVKSKVLEDTCRSLDHEKSSICQEKETLVSQLNITHQTLKDLEKLHSELELKHLELKGERESALQKVEELLVSLYSEREENSRVLKLNEDELAEKELQIHILQEDANCKKKEYEEELDRAIHAHVQIFILQKCVDDLEKKNFSLLVEWQRLLEASKMSYKMICKL

SEQ ID NO: 186684 - protein, 52 aa, Glycine max
  unsure (1)..(52): unsure at all Xaa locations
  Clone ID: PAT_MRT3847_139589C.1.pep
HCNSQMAPMKSRVMSDYPWSPRWEPSMMAERICDCLXDEALNCKRQCREGQV

SEQ ID NO: 186685 - protein, 59 aa, Glycine max
  Clone ID: PAT_MRT3847_13958C.1.pep
CIGFQPLKTIGPLRVMEESKKPFIFWKKHLHIGAGSNENQILLFQQIGYVKHVEQNLAG

SEQ ID NO: 186686 - protein, 192 aa, Glycine max
  unsure (1)..(192): unsure at all Xaa locations
  Clone ID: PAT_MRT3847_139590C.1.pep
MMTSYVNLKIWLLNFVTLFSILSLSHGRRANANFRVRAVNLGGWLVTEGWMKPSLFDGIPNKDFLDGTGLQFKSVTTRKYLCAESGGGTIIVANRTSASGWETFALWRLNEDTFRFRVFNKQFVGLDGINVVAASNICTYSVTFHIVKESDNSSRIRIIASNGXYFLLAKTEDLATADGSEVNGWGDDDPSV

SEQ ID NO: 186687 - protein, 37 aa, Glycine max
  Clone ID: PAT_MRT3847_139591C.1.pep
ETSPLHTTPYYQLTSRPDFPRLSFSVSSTHEYLCTYI

SEQ ID NO: 186688 - protein, 94 aa, Glycine max
  unsure (1)..(94): unsure at all Xaa locations
  Clone ID: PAT_MRT3847_139592C.1.pep
XAPRSRTVDXXRXXGXPSWXPAAATAREIXAXXAXRRXXLXLLGAGLAPEPXGXGSCTGLISXLESXYQKMXKXXXLSXSXXLQLNXRNNINQK

SEQ ID NO: 186689 - protein, 303 aa, Glycine max
  Clone ID: PAT_MRT3847_139593C.1.pep
ARAGKEDARSSTAMSVNKISGGSSRHRKSINGFSGSTPSGGQRETGSSRNSSLHKNLTSEKISQPGLMDKALDGTSLEGVTCKLIVKIPSQGRSPAQSASAGSFDDPTIMNSRASSPVLPEKHDQFDHCSKEKSDLYRANIVSDINTESWQSNDFKDVLTGSDEADGSPAAVTDEEHCQIGNDCKKTLEVPKAASSSSGNENKSGNLQDASYTSINALIEGVKYSEADDVGMNLLASVAAGEILKSELLTPAGSPERNTTAVEQSCTGNGVVKSSEENLVRDECHSNNGLDGEHKNQGSVTGD

SEQ ID NO: 186690 - protein, 62 aa, Glycine max
  Clone ID: PAT_MRT3847_139594C.1.pep
IVWSFGSCTLVWSFGSGTFGWCFGSGTIWWFFGSGTVLWSFGSGTFWWFFGSVTFCCFLAAV

SEQ ID NO: 186691 - protein, 78 aa, Glycine max
  unsure (1)..(78): unsure at all Xaa locations
  Clone ID: PAT_MRT3847_139595C.1.pep
RRWXWXXXRXXRRRRVXXRRRRXRRXWWFXXGXRRRGXVAGRXCXSGXVPWXXXVXXRAXXXAXXXXGLPXXPPLLLP

SEQ ID NO: 186692 - protein, 35 aa, Glycine max
  Clone ID: PAT_MRT3847_139596C.1.pep
KAKHKKKVQYMVESVQLMASECLKYVRRSSQPYEK

SEQ ID NO: 186693 - protein, 432 aa, Glycine max
  unsure (1)..(432): unsure at all Xaa locations
  Clone ID: PAT_MRT3847_139597C.1.pep
MASSGPNGTDNGDSLPPPPPVVPSDVVPVKAELEKKKALRLPIARRGLASKGTKLQLLTNHYRVNVANTDGHFYQYSVALFYDDGRPVEGKGVGRKLLDRVHETYDSELNGKDFAYDGEKTLFTLGSLARNKLEFTVVLEDIIASRNNGNCSPDGNGELNESDKKRMRRPNRSNHASGXFKVELSYASKIPLQAIANALRGQESENYQEAIRVLDIILRQHAAKQGCLLVRQSFFHNNPKNFADVGGGVLGCRGFHSSFRTTQSGLSLNIDVSTTMIITPGPVVDFLISNQNVRDPFSLDWAKAKRTLKNLRIKSSPSNQEFKITGLSELPCKDQMFTLKKKGGDDDTEEEVTVYDYFVNIRKIDLRYSGDLPCINVGKPKRPTYIPLEVVPLVSLHRLHDPRQNLRHWYNSCYMRQGALAIHKAIPNLVNV

SEQ ID NO: 186694 - protein, 57 aa, Glycine max
  Clone ID: PAT_MRT3847_139598C.1.pep
GPPFSYVSFPLLRFLYLISTPSLLWWLWSIKCAFISRLPVAPVRPQATTPDSYLKPW

SEQ ID NO: 186695 - protein, 176 aa, Glycine max
  unsure (1)..(176): unsure at all Xaa locations
  Clone ID: PAT_MRT3847_139599C.1.pep
MASFGPNGTENEDSLPPPPPVVPSDVVPVKAEPEKKKASRFPIARRGLASKGTKLQLLTNHYRVNVANTDGHFYQYSVALFYDDGRPVEGXGXXGRKLLDRVHETYDSELNGKDFAYDGEKTLFTLGSLARNKLXFXVVLEDVIATRNNGNCSPEGNGELNESGQKRMRRPNRSKA

SEQ ID NO: 186696 - protein, 95 aa, Glycine max
  Clone ID: PAT_MRT3847_13959C.1.pep
KLSTVVHAETVNASHMTLHMLLALTAPETNDTMVQDLYCTTCLNIAISIHKRILLWNPVRDRTSIFTMTLVLEHMGYRLLLDCHNAMINASYEIL

SEQ ID NO: 186697 - protein, 108 aa, Glycine max
  unsure (1)..(108): unsure at all Xaa locations
  Clone ID: PAT_MRT3847_1395C.1.pep
TGPPRFLLKPSNLCTTHIGKDYGPGVPIIGTGALYIPGGNWSRALXTXKIIQLPSRELAAPTHDIDPTDDIALLTSIAYFYADLSKTKKKDREIYRDPTLTARPACPL

SEQ ID NO: 186698 - protein, 314 aa, Glycine max
  unsure (1)..(314): unsure at all Xaa locations
  Clone ID: PAT_MRT3847_139600C.1.pep
MELLQNGHKNLVSIKPSELPLLNGAALTLLNSLSETHEYXGNIDPSRVFVTKVKRIIVKVGTAVVTRSDGRLALGRIGALCEQLKELSSQGYEVILVTSGAVGLGRQRLRYRKLANSSFSDLQKPQGELDGKACAAVGQSSLMALYDTMFSQLDVTSSQLLVNDGFFRDSGSRIQLSDTVNSLLDLRVIPIFNENDAVSTRKAPYEDSSGIFWDNDSLAGLLALELKADLLVLLSDVEGLYSGPPSDPNSRLIHTYIKEKHQGEITFGDKSRLGRGGMTAKVNAAVCAAHAXIPVIITSGYATNNIIRVLQGER

SEQ ID NO: 186699 - protein, 75 aa, Glycine max
  Clone ID: PAT_MRT3847_139601C.1.pep
IVALYSRCMLCGVSPNSRLITLCVVIVGHAVIMLLARNECVQVEFLEQIREHNRAYVLEGYVGHFGSLLIETRHV

SEQ ID NO: 186700 - protein, 191 aa, Glycine max
  unsure (1)..(191): unsure at all Xaa locations
  Clone ID: PAT_MRT3847_139602C.1.pep
PGSTIGPGSNHGLASLAYGYALLSQTSQQTVRFRLYLIRELDKTFRNSKCRDTDYIQYLKITLNMXNDQVVQHANPYQSLTARRCKPTIILXRGMSMTDRTXKLICGQVEHVHSLRSWLERXHTCPTYRDLVVPAXNGTTVAAWHEGSQSYVHQRGTSVTGRRSTAQTEATDSLSRHQXRLRAGVADASIY

SEQ ID NO: 186701 - protein, 118 aa, Glycine max
  unsure (1)..(118): unsure at all Xaa locations
  Clone ID: PAT_MRT3847_139603C.1.pep
NGYVETVMDRLGYEGQDTHCRLWDLEMYEIVVPLRRPHGGSSAASXASQSSQWGNVVSLGTXDMLQSMVDVPKISPSVAPCVHAWPLSGLIFTQIYVMGAFWYGHITIWMRAWPAERP

SEQ ID NO: 186702 - protein, 90 aa, Glycine max
  Clone ID: PAT_MRT3847_139604C.1.pep
ISARSVNAMLGLDWDLNTPPLPDTGQWLLLASNETLPSPIVEILRARIIGLHHYLMLYMMLAYTVLSDAAKAPGLGLCATYMYTMAVGRL

SEQ ID NO: 186703 - protein, 528 aa, Glycine max
  Clone ID: PAT_MRT3847_139605C.1.pep
ARATPNAPFTLPTTTPNAPSTLPSTTPVAPSTLPTTTPNAPSTLPTTNPTAPSTLPTATSPSSSKPSVAKQQPVVAATPSTSKKPPTAATSPTSTPTTTAAPSKLPTAASPTSSKTPITTQAPVNSPVPKATSPTSSAPVKSPVPKTTSPTSYVPVKSPVPKATSPTTSAPVKSPLPKATSPTISAPVKSPLPKATSPTTSAPVKSPLPKATSPTTSAPVKSPLPKATSPTTSAPVKSPLPKATSPTTSAPVKLPVPKVTTPTSAPVKLPDTKPLPPSSAPVKLPVPKALPPTSTPLKPPVPKTTPPKIAPVKPPVPKTLPPKIAPVKPPVPKVTPALSPKPPSPKIPPKKAPISPPPLPLPPADAPPLPTPKVSPTPSKAPTPAKETPAPAPAHKKKAPLSSPVPSPLSNTPTPAPTPAIETPTPAPAPEDDTPPPPPHRHRRRRHKHKHKHERHHALSLAPAPTTIIRRSPPAPLADDIATTDSEETPSPAPSPNANGAHSYYRQGNMWPSINIGLAIAILLSVIA

SEQ ID NO: 186704 - protein, 177 aa, Glycine max
  Clone ID: PAT_MRT3847_139606C.1.pep
MLNLYPPATHSAWNGQPVSYPPGTDSIVNEIFEATKGTGTKEKELNKALGGKTATQRGFIAKRYQELHNQSLRDLMDNETSGHYEFLLKLLASPLPEAEAGILRKATKGLGTKEDLIYPVVVGRTNAEINILKKMYYEAYGEDLGSVLDSDLHGDFQTVILASLQAALVPYDANIHN

SEQ ID NO: 186705 - protein, 121 aa, Glycine max
  unsure (1)..(121): unsure at all Xaa locations
  Clone ID: PAT_MRT3847_139607C.1.pep
MAAITRLLNRTSSLSSVARGFSSHASPPRKEERNVQWVFLGCPGVGKGTYASRLCNLXTAPLSSQLSEIVNQGKLVSDEIIISLLSKRLADGEAKGESGFILDGFPRTIKQAEILEGVTDI

SEQ ID NO: 186706 - protein, 119 aa, Glycine max
  Clone ID: PAT_MRT3847_139608C.1.pep
MAAITRLVKRTSPLSSVARGFSSHAPPCKEERNVQWVFLGCPGVGKGTYASRLCNLLGVPHIATGDLVRHELASNGPLSSQLSEIVNQGKLVSDEIIISLLSKRLADGEAKGESGFILD

SEQ ID NO: 186707 - protein, 191 aa, Glycine max
  unsure (1)..(191): unsure at all Xaa locations
  Clone ID: PAT_MRT3847_139609C.1.pep
MAAITRLLNRTSSLSSVARGFSSHASPPRKEERNVQWVFLGCPGVGKGTYASRLCNLLGVPHIATGDLVRHELASNGPLSSQLSEIVNQGKLVSDEIIISLLSKRLADGEAKGESGFILIQLYMAMXDDTEAVVKERLRIYNEKSQPVEEFYRSRGKLLEFDLPGGIPESWPKLLQALNLDDYEEKQSVAA

SEQ ID NO: 186708 - protein, 57 aa, Glycine max
  unsure (1)..(57): unsure at all Xaa locations
  Clone ID: PAT_MRT3847_13960C.1.pep
ENXQVSHEYGRYGYPTTVVLGDKGSXIXGAESTAKMASAMFSIFCLMMAQFPAWGQF

SEQ ID NO: 186709 - protein, 101 aa, Glycine max
  Clone ID: PAT_MRT3847_139610C.1.pep
SADLSSQTSAMLCTINPDSQLGLPDMSPIRSLLVTSVAPQKLRTAVHEVLCVVFRPDSPRVRCIRSPACTYIDSNMYATEATSSVYLMIDSQDLRMLTPVS

SEQ ID NO: 186710 - protein, 129 aa, Glycine max
  Clone ID: PAT_MRT3847_139611C.1.pep
GNSSRIGSTAARRRQKGTPCRPNEDLNIYVFALFNENMKPGPASERNYGLFKPDGTPAYPLGFPLASVPVVAGNNNTGVASTPPQPTSPTSSTGYLSISSASSLERCRLLGRSLSFLVPLVMELLILKF

SEQ ID NO: 186711 - protein, 83 aa, Glycine max
  Clone ID: PAT_MRT3847_139612C.1.pep
LTPRTMVHVFEPFAPRGLKLLHGLWVYVGTTHSLSDIGCSVCSRRSCSRRYSLIFAPSPPPPKQWSDDHTRDDRETLPWNGIG

SEQ ID NO: 186712 - protein, 48 aa, Glycine max
  unsure (1)..(48): unsure at all Xaa locations
  Clone ID: PAT_MRT3847_139613C.1.pep
VRATLFTXFILLFYIXNLVQFSPVPVLYIPSSTRTGSVKTCLENVYKR

SEQ ID NO: 186713 - protein, 68 aa, Glycine max
  Clone ID: PAT_MRT3847_139614C.1.pep
KNFFFKKKKGAFPNKGVFNPKVFLKGKFFGKKFPPALLKERFFVKFRKESLLGVLNLPQVKGPFNLSE

SEQ ID NO: 186714 - protein, 59 aa, Glycine max
  Clone ID: PAT_MRT3847_139615C.1.pep
GQYRIMHACFPNAIPNHQEAMSRSFYKFTNQYHFALLDCLSLWDFTFLYITKKKVKAKW

SEQ ID NO: 186715 - protein, 52 aa, Glycine max
  Clone ID: PAT_MRT3847_139616C.1.pep
RLSKIYSKLKFQIRQNLFVVLTLTYTDSSSLLELLFCYLTTDMCNTNTIDGA

SEQ ID NO: 186716 - protein, 68 aa, Glycine max
  Clone ID: PAT_MRT3847_139617C.1.pep
GSRTSVLKAWWQSHSKWPYPTEEDKARLVQETGLQLKQINNWFINQRKRNWHSNPSTSTALKSKRKRS

SEQ ID NO: 186717 - protein, 81 aa, Glycine max
  Clone ID: PAT_MRT3847_139618C.1.pep
TRLQLYGVLSLFTTDAQLHRCKTINGLKFLLFNLTHLLFSLSLCNSPFFFKRTKQNRPSLSFLIFHGISSTIPFHLFILLF

SEQ ID NO: 186718 - protein, 101 aa, Glycine max
  unsure (1)..(101): unsure at all Xaa locations
  Clone ID: PAT_MRT3847_139619C.1.pep
QTHNTELPNLPQKKKQGGGVEENKKTLKDQRGKESDTATHTETLKQDNKPWLLDRKIVLKRXRYIDRKTDTHTNRKMAHTHTCEHERPTDTHNISTHTHTY

SEQ ID NO: 186719 - protein, 116 aa, Glycine max
  Clone ID: PAT_MRT3847_13961C.1.pep
VGKSSWKGFPGFFFFFFPVMVRRGGFSMEVFGWAQRINPPLKVVSINGGGKQGQNWGLRGSLAIGGFFSPPTPPQVRFKNGFPPKKRGAPLPFLVLGPFGLKGSQRFYGAQRFLAP

SEQ ID NO: 186720 - protein, 56 aa, Glycine max
  Clone ID: PAT_MRT3847_139620C.1.pep
KRKEGRILIIEMKKEKKHINSFKCLYLMLAIRSSRHLPHVSATKLFSITFKKQYGK

SEQ ID NO: 186721 - protein, 62 aa, Glycine max
  Clone ID: PAT_MRT3847_139621C.1.pep
SSFPHSPASLKHDSLLHAAVKTFLANFRHPDSVLTGSQISIPFPTNYGRFLHCCGLFTINIS

SEQ ID NO: 186722 - protein, 55 aa, Glycine max
  unsure (1)..(55): unsure at all Xaa locations
  Clone ID: PAT_MRT3847_139622C.1.pep
FXFFIXXXXKQKRGLLLNKVNNHIIFRVNKIWRSTALLKQATKLSVVYPNFTKFS

SEQ ID NO: 186723 - protein, 59 aa, Glycine max
  Clone ID: PAT_MRT3847_139623C.1.pep
SWNLKGTAYDGAFTMNKILEFVDYNKFPLVTKLTEMNSIRVFSSPIKLQVTFISKFNLH

SEQ ID NO: 186724 - protein, 32 aa, Glycine max
  Clone ID: PAT_MRT3847_139624C.1.pep
SSRSSLESTCIHSLDTTNSPIPVSYIKFDRMC

SEQ ID NO: 186725 - protein, 140 aa, Glycine max
  Clone ID: PAT_MRT3847_139625C.1.pep
MASHRQSYEAGQTKGRTEEKTNQTMGNIGEKAQAAKEKTQEMAQAAKEKTQQTAQAAKDKTCDTSQAAKEKTQQNTGAAQQKTSEMGQSTKESAQSGKDNTQGFLQQTGEKVKGAAQGATEAVKQTLGLGEHDQDNRRNY

SEQ ID NO: 186726 - protein, 132 aa, Glycine max
  Clone ID: PAT_MRT3847_139626C.1.pep
VSPPGQYHQGMGGSSQGQRGLGVLLRVGENLGLREKELQASPFLALAGVLMARRLQRKGYCIRRAMTRRRARYSQSGSCHVRTAEFILQPDSTPSIFREATASPFLKDKFSRGRRSETPSEFPGYRVWSFPL

SEQ ID NO: 186727 - protein, 185 aa, Glycine max
  Clone ID: PAT_MRT3847_139627C.1.pep
DAFRCTFRREPRVLSLNLSNLERGRSTVLLNPCIGRTISTMSVTLPNGLPNHLTTLLGDGQTVLKLVLSVPEEEETLPHQSTKPPPMVNPVQLPPVDKVTGHPLPHPLDDDDLDPPLLPSTTPTGQSTLRPQPAVRPAPPDRPELVETRDALESKRGTETGSEDTRRGAGLTPRLRGYDRFIYVT

SEQ ID NO: 186728 - protein, 483 aa, Glycine max
  unsure (1)..(483): unsure at all Xaa locations
  Clone ID: PAT_MRT3847_139628C.1.pep
MVKICCIGAGYVGGPTMAVIALKCPEIEVVVVDIAAPRINAWNSDHLPIYEPGLDDVVKQCRGKNLFFSTDVEKHVAEADIVFVSVNTPTKTQGLGAGKAXADLTYWEEXAARMIADVSKSDKIVVEKSTVPVKTAEAIERILTHNRKGINFTILSNPEFLAEGTAIADLFKPDRVLIGGXRKPQMGQKAIHSLKSVYAHWVPEDRILCTNLWSAELSKLAANAFLAQRISSVNAMSALCEATGADVSQVSHSIGTDSRIGPKFLNASVGFGGSCFQKDILNLVYICECNGLPEVANYWKQVIKVNDYQKMRFVNRVVSSMFNTVSGKKIAILGFAFKKDTGDTRETPAIDVCKGLLGDKAKLSIYDPQVTEDQIMRDLAMKKFDWDHPAHLQPLSPTSNKQVSVVWDAYEAIKDAHGICIMTEWDEFKNLDYQKVYDSMQKPAFIFDGRNVVNVNKLREIGFIVYSIGKPLDSWLKDMPAVA

SEQ ID NO: 186729 - protein, 92 aa, Glycine max
  Clone ID: PAT_MRT3847_139629C.1.pep
GPTTVSSYPSPLSFSFAYSSSVPFFSLASSSSPAPTFGATDSSIFGAATTLFATSSSSTMTMLFGGSNILCRVAFWWNALFHDNVIWCNALS

SEQ ID NO: 186730 - protein, 110 aa, Glycine max
  unsure (1)..(110): unsure at all Xaa locations
  Clone ID: PAT_MRT3847_13962C.1.pep
HSYGNDYAKYAREDHDLESLERDARXQSGWKLVHSHDFIPPCNLAIVSXYVGTGAQLAMLGLIVQWLTIAGMMYAQRSAIITTSIACYALTWFTPGYMRVGTHSREGLTH

SEQ ID NO: 186731 - protein, 134 aa, Glycine max
  unsure (1)..(134): unsure at all Xaa locations
  Clone ID: PAT_MRT3847_139630C.1.pep
LYVCKGLLGDKAKLSIYDPQVTEDQIMRDLAMKKFDWDPPAHLQPLSPTSNKQVSVVWDAYEAIKDAHGICVMTEWDEFKNLDYQKVXDSMQKPAFIFDGRNVVDVNKLREIGFIVYSIGKPLDSRLKDMPAVA

SEQ ID NO: 186732 - protein, 107 aa, Glycine max
  Clone ID: PAT_MRT3847_139631C.1.pep
FAKLLKSETGADLLREYVRGSPKCSELLEAWKLREGKQGMNYLFDLISAILSQSKGKYNPSDIESVNITKDLDKFARVLISQPLSDIPNEVNNKEWRRQKAALLLMA

SEQ ID NO: 186733 - protein, 108 aa, Glycine max
  unsure (1)..(108): unsure at all Xaa locations
  Clone ID: PAT_MRT3847_139632C.1.pep
HIFQFSWVPYRGLEEHLPRRAYRDMEIWPTCTAIICFSIVEXHQTNRVKLQFGLQQDIPVDPLNLDLLHQIDMRGNHYTDRMEYHAEWINISEQIHVSSASDSNISSG

SEQ ID NO: 186734 - protein, 63 aa, Glycine max
  Clone ID: PAT_MRT3847_139633C.1.pep
VFVDLWSYFSNGWLFGVFSLPFCTYVDLYVQILNDLKHAFWPLLLVHSEPASLFFCYFLLFEG

SEQ ID NO: 186735 - protein, 159 aa, Glycine max
  unsure (1)..(159): unsure at all Xaa locations
  Clone ID: PAT_MRT3847_139634C.1.pep
MIEINMKHQGKLRVFLPNMIILVTILLHSTTWISAQEVEDESEFDYIKGSEKGPSHWGELKKEWETCKSGKMQSPIDLSSHRVRVVPKLGELKKYYTPQNATIKNRGHDIELKWEDAGSININGTEIFLHQCHWHSPSEHTINGRRYDLEXHMVHESKT

SEQ ID NO: 186736 - protein, 86 aa, Glycine max
  Clone ID: PAT_MRT3847_139635C.1.pep
DCTIPRAFFLLTRSGSPRLAAPVVCSGQFQVGPLVAVWSWGVSGVVLRRGSLPVHGDFSPELVLLVSGGIVTLAGLGWSNIIRDGH

SEQ ID NO: 186737 - protein, 62 aa, Glycine max
  Clone ID: PAT_MRT3847_139636C.1.pep
IFLHCQCVIIFLKMNCKSIQDDPVHKALSYWNLGRVNVHILNPTSREVVHKAATLLSHQGLP

SEQ ID NO: 186738 - protein, 61 aa, Glycine max
  Clone ID: PAT_MRT3847_139637C.1.pep
ISYVFRQELALQQGLTLWDGHQVDLLERAMMNHTKNNGVSLYNSVRMVSLIIERISSDSCP

SEQ ID NO: 186739 - protein, 173 aa, Glycine max
  unsure (1)..(173): unsure at all Xaa locations
  Clone ID: PAT_MRT3847_139638C.1.pep
IILCIRIQLNVTCFLQKKKKKKKKKKKKKKKKKKKKKKKKKKKKKKKIGGAPAPNFPFRGGFYPPPLARVLTRGEGENPGVSQFNWFGKNPPFPRWVKKKRAPPVPLSQKLAHLNGKWDPPFSRPLNPGGWGVTPRXTRSFARALRPRSFRFFPSFFASXARFSRKALNGGLL

SEQ ID NO: 186740 - protein, 96 aa, Glycine max
  Clone ID: PAT_MRT3847_139639C.1.pep
HRLLTYLLPAALHIKCVLPTILSFTWFVGTRLFPLTLISITWFIFLPNTPSSLGLGDFYRLCIPRIPHSLYLYSFLGNTTLHPIRPSLSLLSSITL

SEQ ID NO: 186741 - protein, 37 aa, Glycine max
  Clone ID: PAT_MRT3847_13963C.1.pep
TCLGEQPALPCNSCLDKSIGRRIHGSLTSWVTWNSLT

SEQ ID NO: 186742 - protein, 182 aa, Glycine max
  Clone ID: PAT_MRT3847_139640C.1.pep
MVVVLSDQDEFDEEPGEVVDSAPPQKVGEERQFSGFKKKLLKRGQGWEFPNFDDVVTVRCVGIGTLLDGTTFDYTRERDRPRTFALGKDDVAAGLDRGICTMKKGEVALFTLPGDGGDGDFTRDSDGSVVRFEVELVSWITVVDVCKDGGVVKKIMEKGSGNERPGDLDEVLVKYQVVLDDG

SEQ ID NO: 186743 - protein, 39 aa, Glycine max
  Clone ID: PAT_MRT3847_139641C.1.pep
DIGESGYISQNQTGHKFAGITCNKLFPRVNKFIFQPAFC

SEQ ID NO: 186744 - protein, 140 aa, Glycine max
  unsure (1)..(140): unsure at all Xaa locations
  Clone ID: PAT_MRT3847_139642C.1.pep
LETSTIISLVIFFLLIALTTVFVGSEFALVKVRSTRIEQLVDEGNKSAXIVKKMIDNLDYYLSACQLGITVTSLGLGWLGEPTFEKMMHPLFELLHLPSPLTTTISFVVSFIVXTYLHVVLGELAPKSFAIQHTEQLALF

SEQ ID NO: 186745 - protein, 58 aa, Glycine max
  Clone ID: PAT_MRT3847_139643C.1.pep
MTEAYIRNKPGIAIVNDMPVLHHGRSSLGFIPVRFVLRIFVNVPIAVAIFLTVFRSFS

SEQ ID NO: 186746 - protein, 99 aa, Glycine max
  unsure (1)..(99): unsure at all Xaa locations
  Clone ID: PAT_MRT3847_139644C.1.pep
LADANADDSGAGSKDYVHIRVQQQYGTKSLTTVQGLKKEFSSYKILXDVKKELCCNGSVAQDPELGQCIQLQRDQRKNVSTFLVQARLVKNDHIKMHGF

SEQ ID NO: 186747 - protein, 43 aa, Glycine max
  Clone ID: PAT_MRT3847_139645C.1.pep
CARNKWPTPHEESNQHLNANILDHTFKTPMINDPMERSITPPK

SEQ ID NO: 186748 - protein, 69 aa, Glycine max
  unsure (1)..(69): unsure at all Xaa locations
  Clone ID: PAT_MRT3847_139646C.1.pep
MNSTIFFALFLFCTLGRSYLPSPIPDFVLDNECNPLENSCTYYTLSDITTLRGLIAAPTGNXTCPLTVV

SEQ ID NO: 186749 - protein, 71 aa, Glycine max
  unsure (1)..(71): unsure at all Xaa locations
  Clone ID: PAT_MRT3847_139647C.1.pep
XXXFFFFFFSIKETHIYLVGFRGSMITLFSNTVWLNIKGSQSLEFWDWSNFSGIKFFKTKHHFLPGTNISF

SEQ ID NO: 186750 - protein, 177 aa, Glycine max
  Clone ID: PAT_MRT3847_139648C.1.pep
MGNTDPGRENMSLHVNRTKDWMQKTSAHVNKLLSATFPHICIHPSQKVRKGLVDAIKGLLSECFYTLGESRLMLLECLCALVVDVSNDVSSTAQDFLECLFSQNLKHVIKHNAAEIFIRNLEKLPRVVLGHEESHAVLHAQQLLTIIFYSGPRLLVDHLQSPVWASIIISHIPSIDL

SEQ ID NO: 186751 - protein, 70 aa, Glycine max
  unsure (1)..(70): unsure at all Xaa locations
  Clone ID: PAT_MRT3847_139649C.1.pep
SQXXKXXPTQRXXLNKXTSLXTPISXLXSXSXSXLRSSIFVAENERVHSXHIGQAGIQVGXAAGXLXXXX

SEQ ID NO: 186752 - protein, 105 aa, Glycine max
  unsure (1)..(105): unsure at all Xaa locations
  Clone ID: PAT_MRT3847_13964C.1.pep
FPSTXKQARVALNSVLTPFLTTNLIKYDGCMHPEIHRLLKSYKLREFEMLLTKLAIPYQLVGQWVTVKEYERQGIHLNCPEKVKIPFYVHGIPDKLYEMLWDTIC

SEQ ID NO: 186753 - protein, 177 aa, Glycine max
  unsure (1)..(177): unsure at all Xaa locations
  Clone ID: PAT_MRT3847_139650C.1.pep
MSMMSIMHAMSIRSSAFFCFQINCSDSKQGRGFGENTNSNSNRIKTNKSDKGSTTKQSRPLSSQAPRLSSQLDGKSRNDFLDVDFEERLKAVRRSALEQKKAEEETEFKCLFCDVXKKLYACIVTLMVQIGVGVAVAVFGLVFAFGDFLPSGSVSPTEDSAVVNSKLSEEDKATLQV

SEQ ID NO: 186754 - protein, 58 aa, Glycine max
  Clone ID: PAT_MRT3847_139651C.1.pep
VPFQWGHIFPKGFMNSIPQSFCFFSSGRPTPKAFEYYYRVKPPRAPPKLFLRSGLKPN

SEQ ID NO: 186755 - protein, 71 aa, Glycine max
  Clone ID: PAT_MRT3847_139652C.1.pep
RVAMILESGLVKDYQGGEQQWIYSLCFCLAAGSKLLSGNTIKELLFLSASVSRFVIEHKSFSEFGSHQAYV

SEQ ID NO: 186756 - protein, 64 aa, Glycine max
  Clone ID: PAT_MRT3847_139653C.1.pep
DTHSICNVSRSVLGVESEYGMMAVTPRNAPSMLYSDLANFSFRGSAHDPLRRRLTPHGHHGCAI

SEQ ID NO: 186757 - protein, 101 aa, Glycine max
  Clone ID: PAT_MRT3847_139654C.1.pep
TYLTVIGYDSSFLTPAALSADLPSFGGEGINVTSVPRSLRAISGSSASALEGIAFNGFLTGSTEVKTVGQRKPRRRTMGSAAVGFLSSSPFLEYSFRSSAL

SEQ ID NO: 186758 - protein, 139 aa, Glycine max
  Clone ID: PAT_MRT3847_139655C.1.pep
VFLLCFQVLRLLDFLASLLEHPLGKGLLLREGTLQMLTKVLDRCFVIVDVDGKQIHDRSSAKCSFNFFSWCLPIFKFIMLLFHSETSRHYPRRHDFKNFEKLSDEDCALILRYLLKSCQVTLLILSVYTFEDCALSSAC

SEQ ID NO: 186759 - protein, 66 aa, Glycine max
  Clone ID: PAT_MRT3847_139656C.1.pep
IAGYLFVRFFPSFGERFFSSVLFESVKPKPESLVFTPSCSSLPSLFLLLKLHSVLGLCIYFFSIRI

SEQ ID NO: 186760 - protein, 108 aa, Glycine max
  Clone ID: PAT_MRT3847_139657C.1.pep
GWIYKHFPSVADSTTDQDYDEDSPCACRWIVTKKIVKSIRTPAYRECLDRLQIPDVCWISYGDYRLVRDFHIKSCYSGLLRWGPVAVYYRPKRVVRQFGYTQTIPAPP

SEQ ID NO: 186761 - protein, 122 aa, Glycine max
  Clone ID: PAT_MRT3847_139658C.1.pep
GNAGSPLFGLGAPVGGHHFILTPRLSRRPRASGPPAGVRVTNAAGEGPHRLWPRCHRFHAAWTGWDASGCPWEPRRMGAGHARARGDTQRDADIYSYQHPPWDHLHLGYHERRGLLAPKGPT

SEQ ID NO: 186762 - protein, 69 aa, Glycine max
  Clone ID: PAT_MRT3847_139659C.1.pep
LRSAYLSYKRKRKILFTKREENKNQNSNISPRSSSAVRGSMRTSKGHYPTHKRMASLLKCQAVVGPFSR

SEQ ID NO: 186763 - protein, 43 aa, Glycine max
  Clone ID: PAT_MRT3847_13965C.1.pep
FCHEQFIIIDHYTKIFDRINNSTVTLTCFRIKQRVKTSRDRMA

SEQ ID NO: 186764 - protein, 213 aa, Glycine max
  unsure (1)..(213): unsure at all Xaa locations
  Clone ID: PAT_MRT3847_139660C.1.pep
MNPEYDYLFKLLLIGDSGVGKSCLLLRFADDSYIESYISTIGVDFKIRTVEQDGKTIKLQIWDTAGQERFRTITSSYYRGAHGIIIVYDVTDEDSFNNVKQWLSEIDRYASDNVNKLLVGNKSDLTANRVVSYDTAKEFADQIGIPFMETSAKDATNVEDAFMAMSAAIKNRMASQPSAXNARPTTVQIIMQPXPTVQIRGQPVAQKGGCCSS

SEQ ID NO: 186765 - protein, 171 aa, Glycine max
  unsure (1)..(171): unsure at all Xaa locations
  Clone ID: PAT_MRT3847_139661C.1.pep
IESYISTIGVDFKIRTVEQDGKXTIKLQIWDTAGQERFRTITSSYYRGAHGIIIVYDVTDEDSFNNVKQWLSEIDRYASDNVNKLLVGNKSDLTANRVVSYDTAKEFADQIGIPFMETSAKDATNVEDAFMAMSAAIKNRMASQPSANNARPPTVQIRGQPVGQKSGCCSS

SEQ ID NO: 186766 - protein, 109 aa, Glycine max
  Clone ID: PAT_MRT3847_139662C.1.pep
NPHGGTNEKKKEKGEAKEKTPQYHKRDSSKKNNNNGNRKQRKARANNTKKIRGQKNSRIGPNHYAGGAIKEGARKTTIMCPTPERKNITAWTRDQVTKRPGGLLKGPRG

SEQ ID NO: 186767 - protein, 202 aa, Glycine max
  Clone ID: PAT_MRT3847_139663C.1.pep
MNPEYDYLFKLLLIGDSGVGKSCLLLRFSDDSYIESYISTIGVDFKIRTVEQDGKTIKLQIWDTAGQERFRTITSSYYRGAHGIIIVYDVTDEESFNNVKQWLSEIDRYASDNVNKLLVGNKCDLEANRAVSYETAKAFADGIGIPFMETSAKDATNVEQAFMAMTASIKDRMASQPANNARPPTVQIRGQPVAQKGGCCSS

SEQ ID NO: 186768 - protein, 216 aa, Glycine max
  unsure (1)..(216): unsure at all Xaa locations
  Clone ID: PAT_MRT3847_139664C.1.pep
MNPEYDYLFKLLLIGDSGVGKSCLLLRFADDSYIESYISTIGVDFKIXRTVEQDGKTIKLQIWDTAGQERFRTITSSYYRGAHGIIIVYDVTDEESFNNVKQWLSEIDRYASDNVNKLLVGNKCDLEANRAVSYETAKAFADEKGLTLWQLCKRFNVGIPFMETSAKDATNVEQAFMAMTASIKDRMASQPANNARPPTVQIRGQPVAQKGGCCSS

SEQ ID NO: 186769 - protein, 38 aa, Glycine max
  Clone ID: PAT_MRT3847_139665C.1.pep
VVTLLHILTKFVDPEKICQTFHPEIVMSKLPYLLINTH

SEQ ID NO: 186770 - protein, 78 aa, Glycine max
  unsure (1)..(78): unsure at all Xaa locations
  Clone ID: PAT_MRT3847_139666C.1.pep
DACEDPLELANDPNQAGLLKVKEFKNGRLAVWAMLESYFTAYVTGEGPXDNLAQNLIDPAGINKVNVVNGSADRALTV

SEQ ID NO: 186771 - protein, 74 aa, Glycine max
  unsure (1)..(74): unsure at all Xaa locations
  Clone ID: PAT_MRT3847_139667C.1.pep
FERITDNSGNSDDAPSKARILSNIQNFYNTVIKAQMVLXVHTVLEDREFATVDPDGYCEDGTCLSTLSSAPATR

SEQ ID NO: 186772 - protein, 102 aa, Glycine max
  Clone ID: PAT_MRT3847_139668C.1.pep
SSAQSFFSALSYAHFCATAIANSCYRGFMREASFCSPTILVSYPPRCAPSHLSACVVTPLVFMSPAKSVCHSFHVAHNLVGVGTGTSSLIATPHMVAPPAWP

SEQ ID NO: 186773 - protein, 73 aa, Glycine max
  Clone ID: PAT_MRT3847_139669C.1.pep
HRHAESGRSKCAAEASVHASHGLGRTIRALLTHVKHPLQIPIANSRRSLQTYADAGSTPVAASEELKDLGLST

SEQ ID NO: 186774 - protein, 82 aa, Glycine max
  unsure (1)..(82): unsure at all Xaa locations
  Clone ID: PAT_MRT3847_13966C.1.pep
GISLQSRTNHVTLSDLKNSLIPQSHQSFYFTFNGKPLPDKTPLSQFPPLCTLSLRSRVLGGGGDGGATXAESRDCYLNMYAD

SEQ ID NO: 186775 - protein, 33 aa, Glycine max
  unsure (1)..(33): unsure at all Xaa locations
  Clone ID: PAT_MRT3847_139670C.1.pep
NXRDDITSKGKLLQKIMSCVLLPFKLKTQNIQS

SEQ ID NO: 186776 - protein, 36 aa, Glycine max
  Clone ID: PAT_MRT3847_139671C.1.pep
KNKLICIKDKVYFMVKEKCIGICYDKMLKGFIYDYK

SEQ ID NO: 186777 - protein, 67 aa, Glycine max
  Clone ID: PAT_MRT3847_139672C.1.pep
AVAPLRPEHHFPARRLSHARHHYLFEALSPEATTSPLKHNPLLRVGNLAGSGGVRRRWIPVLRRAVA

SEQ ID NO: 186778 - protein, 175 aa, Glycine max
  unsure (1)..(175): unsure at all Xaa locations
  Clone ID: PAT_MRT3847_139673C.1.pep
VATLLNCTQAVFRKFQDEVVMMSSCFSITQTQTSGSIVTYMVKEREREEPARDARNFEVMYDNAGAEVRCICSCFNFXGYLCRHALYILNYNCVEEIPCQYILSRWRRDFKRLYVPHLSADNVDISNPVQCFDHLYKRAMQVVEEGMISQDHYMLSWQTFKESLNKIRLVADKIE

SEQ ID NO: 186779 - protein, 90 aa, Glycine max
  Clone ID: PAT_MRT3847_139674C.1.pep
KLSSQRFPCDNSAPVIFIPVDQNLPDNIFESAQSNACVVCRGREPEDLLESCDVCHIRKIHSYCMDPPLRPWICPHCKELRMHYRSNHLY

SEQ ID NO: 186780 - protein, 76 aa, Glycine max
  Clone ID: PAT_MRT3847_139675C.1.pep
QMSLDVKRGKANIVIDTTGSLDDLNQQFQKVLVEVTRPLTWTEFSCSRQGVFTILASVASGLVLFVKAFNNHSRTS

SEQ ID NO: 186781 - protein, 57 aa, Glycine max
  Clone ID: PAT_MRT3847_139676C.1.pep
TNILFDLNTLVECSSYMPLSGFHGVVSGFLVGIKQIIPDQELPFIKMNPKWFPFYHF

SEQ ID NO: 186782 - protein, 94 aa, Glycine max
  Clone ID: PAT_MRT3847_139677C.1.pep
SGTPAALFFLFFIFENPIKKRCEKGRKTTTKTKKAADTASKAGKENTRKEQAMAGEGGADGGRAESHHGRAAGAPRKGGPGARTQSTGGRERGA

SEQ ID NO: 186783 - protein, 117 aa, Glycine max
  Clone ID: PAT_MRT3847_139678C.1.pep
NGRALIACPRQWALFVLPPPPPVFFFLNRGVSRPHLWCYAFSKGAPAFPLFFYPPCQKGGVFRVAFCVGTPGFFLSFPPLIKGPIILEKGAPNKHPNFFFFRFAKIQYGRPRFCILF

SEQ ID NO: 186784 - protein, 88 aa, Glycine max
  Clone ID: PAT_MRT3847_139679C.1.pep
GSSYDGEPNFGNERPSSPSSSRKGKKSRNSDKPQRPQRGLGAAQLEKIILHGYHPCLHAPYPSNFSNEDPREHIAYSSAPSSSFAYSS

SEQ ID NO: 186785 - protein, 366 aa, Glycine max
  Clone ID: PAT_MRT3847_13967C.1.pep
RSGFPGSTHPSATPWPFPWPAPWGTSSAGSRCDDRSVNPSAEITEEDISKEMTSTKSLQQPLPIFGEKSVCEEFGPASKPNNRFDKVSPPKLMCISTGDDQFMVRGRLSSVDETAPLIISTNISSQKVLQEEKATVLQNPAPERPAVGHLPPAFDDVIHVIRHSSYRVGSEQPVKESLEMGVQSVDVGKFINIVRDDLEMRNVSTPLTLKSSNCSEAIGLKSNISDNMEIRNLSNPPNLKSSSCTDLMNIKSSFSDHPVVRQQDVENTDSLVSKSDSSEYTKHKTPTAAEGTPPKEILDVKSSRQRAEALEGLLELSADLLQQNRLEELAVVLKPFGKDKVSPRETAIWLAKSLKGLMIEESGGRS

SEQ ID NO: 186786 - protein, 52 aa, Glycine max
  Clone ID: PAT_MRT3847_139680C.1.pep
LILRIFFILMKLKHYTRFNVISHSGSCKMFLTLCIFSFHLLTRFSKFSISKV

SEQ ID NO: 186787 - protein, 83 aa, Glycine max
  unsure (1)..(83): unsure at all Xaa locations
  Clone ID: PAT_MRT3847_139681C.1.pep
XLXXXRXXCCMCVXLXXIXXVCAXXXSVVFXXFRIGXXGCWTKLSXXXSSVELGLVFGXSGXVXXXGGXLLFXXLASRLRXVX

SEQ ID NO: 186788 - protein, 81 aa, Glycine max
  Clone ID: PAT_MRT3847_139682C.1.pep
NTQVGKINNSGTQLLKIPSNKRGRNHPHFFMTPIKINLLTNLMTKNAHFIQKPRGEILYFEIKRKKKVKAIRVVIYVGNAL

SEQ ID NO: 186789 - protein, 83 aa, Glycine max
  Clone ID: PAT_MRT3847_139683C.1.pep
QELVSEDNFELIIDAMEKVYYYNPDETFDEKSAANGCQDLGSKEVVEAVYNYWMRKRKQKRSFLLRVFQGHQSKRAPLIPKPL

SEQ ID NO: 186790 - protein, 114 aa, Glycine max
  Clone ID: PAT_MRT3847_139684C.1.pep
VNEKSSVQKESDVKMSDAEGSLNGGEPSVVPMEEGEKETQMTGIYDLVAVLTHKGRSADSGHYVGWVKQENGKWIEFDDANPNPKLEEDIPRLSGGGDWHMAYIIMYKARVVSV

SEQ ID NO: 186791 - protein, 51 aa, Glycine max
  Clone ID: PAT_MRT3847_139685C.1.pep
VGWVRQENGKWIEFDDDNPKPKLEEDITRLSGGGDWHMAYIIMYKARVVSV

SEQ ID NO: 186792 - protein, 54 aa, Glycine max
  unsure (1)..(54): unsure at all Xaa locations
  Clone ID: PAT_MRT3847_139686C.1.pep
GHYVGWVXQENGKWIEFDDANPKPKLEEDITRLSGEGDWHMAYIIMYKARVVSV

SEQ ID NO: 186793 - protein, 173 aa, Glycine max
  unsure (1)..(173): unsure at all Xaa locations
  Clone ID: PAT_MRT3847_139687C.1.pep
FVRFFWKRESNQKAKILRKVDYPLELDVYEFCSDELRKXLEAPRQILRNEEGKKLGLKVNEKSSVQKENDVKMSDAEGATSGGGEPSVVPMEEGEKETQMTGIYDLVAVLTHKGRSADSGHYVGWVKQENGKWIEFDDDNPKPKLEEDITRLSGGGDWHMAYIIMYKARVVSV

SEQ ID NO: 186794 - protein, 63 aa, Glycine max
  Clone ID: PAT_MRT3847_139688C.1.pep
VGLSIPNLNHLSDSIFISSPISSFASQIKKKYDVTYMIARWRCNQIKVCSLLFMHKRRIARWR

SEQ ID NO: 186795 - protein, 77 aa, Glycine max
  unsure (1)..(77): unsure at all Xaa locations
  Clone ID: PAT_MRT3847_139689C.1.pep
RXXHSXXFQXXNXVKGYPSRXTKXGIXFPIAXANPLGQKKXRLRPQGIEKNKYXNPVKPLIQIFLSDHFHFPNEXXF

SEQ ID NO: 186796 - protein, 86 aa, Glycine max
  Clone ID: PAT_MRT3847_13968C.1.pep
RNKPCSLLGEKTKFSFYPSNWSPTTSLNQITCSTKRASPPHDYYNMPWLAFRINNPFFPLHETKTGGVKKNLPPFFLPGSNNSLKG

SEQ ID NO: 186797 - protein, 441 aa, Glycine max
  unsure (1)..(441): unsure at all Xaa locations
  Clone ID: PAT_MRT3847_139690C.1.pep
MITVSVRWQKEIFKDVELDTTQSAYVFKCQLYDLTGVPPERQKIMVKGGLLKDDADWSTVGVKEGQKLMMMGTADEVVKTPEKGTVFVEDLPEEEQVVAVGHTAGLFNLGNTCYMNSTLQCLHSVPELKSALTNYSHSGRNNDVDQSSHLLTIATRDLFNELDKSVKPVAPMQFWMVLRKKYPQFGQLHNGVFMQQDAEECWTQLLYTLSQSLRSLGISENPDAVKALFGIELISRIHCQESNEESSETESVYSLKCHISQEVNHLHEGIKHGLKSELEKASPVLGRSATYLKESRINALPRYLTVQFVRFFWKRESNQKAKILRKVDYPLELDVYDFCSDDLRKKLDAPRQILRNEEGKKLGLKVNEKSSVQKESDVKMSDAEGSLNGGEPSVVPMEEGEKETQMTGIYDLVAVLTHKGRSADSLHYVXEVKQENGXWIE

SEQ ID NO: 186798 - protein, 47 aa, Glycine max
  Clone ID: PAT_MRT3847_139691C.1.pep
VVLNSLNNLCRIIVCKRFKVSIHINISIVYVVNDHVVRTLVTRAKVL

SEQ ID NO: 186799 - protein, 59 aa, Glycine max
  unsure (1)..(59): unsure at all Xaa locations
  Clone ID: PAT_MRT3847_139692C.1.pep
GDLKDKPGWQKMQTRGEVXEASASLIXWSASALQAXVNFGQYPEGGVSVKRAAISRRFM

SEQ ID NO: 186800 - protein, 46 aa, Glycine max
  unsure (1)..(46): unsure at all Xaa locations
  Clone ID: PAT_MRT3847_139693C.1.pep
RSQFLTSEKAYVLXLTASTLLLDGSHTKEFSHALMNTIRIAFPNAQ

SEQ ID NO: 186801 - protein, 69 aa, Glycine max
  Clone ID: PAT_MRT3847_139694C.1.pep
KRGEPLKVHFKKVKKKFFPKKFLLGLKFHNFWDYSLFKKHFLNFFKKIRHHPFYNKRNFFFSKTWKKKF

SEQ ID NO: 186802 - protein, 66 aa, Glycine max
  Clone ID: PAT_MRT3847_139695C.1.pep
SRHLWGPELPMKPGYTSTQFAGPVTSPVFSAESNAEPKRRKRRLERAFMVDCRKPICVYLSRKVSH

SEQ ID NO: 186803 - protein, 66 aa, Glycine max
  Clone ID: PAT_MRT3847_139696C.1.pep
ISGSLWGARSFGQPLFTCFAPLRIHSWASPSMGVAPRGPMFVLTPGLVVILFKTPPSVVLWAGRSP

SEQ ID NO: 186804 - protein, 86 aa, Glycine max
  Clone ID: PAT_MRT3847_139697C.1.pep
GKPIRFFSQVYDTCQTGSGGIFQHKGPTIQTSHTLPCLQKIPIKSKMILNLHSNCMHCETSKHSEGSRTLIYKQHGKLTYNYTNVQ

SEQ ID NO: 186805 - protein, 48 aa, Glycine max
  Clone ID: PAT_MRT3847_139698C.1.pep
VLCFQILQEECMPILILEVYYYTFVRLVILMTQELLCLCFCTLVLVDT

SEQ ID NO: 186806 - protein, 110 aa, Glycine max
  Clone ID: PAT_MRT3847_139699C.1.pep
QITVSNEHLIKNAIAIAISNEQLIRNSYENSRRQASTRTRAFHALANFVALREYGDEDVVSVHEYVKPYFSGSKLKSFLAGHNITTTGGIDKTRATFQFKKVADCDFLKK

SEQ ID NO: 186807 - protein, 147 aa, Glycine max
  unsure (1)..(147): unsure at all Xaa locations
  Clone ID: PAT_MRT3847_13969C.1.pep
GSSASDAKCVVGRRSADASVQGDMKGGTVKAIPGPPERPMRDVNYKGEEQQCYRQERSCMGPMNTKESGEAYLGSTIXNAAETGPANCNDXQRKATNDASDILGLNVQRTINQPTEGGMAXGLDNRATMYGETNVIIXDGDGGTFDV

SEQ ID NO: 186808 - protein, 62 aa, Glycine max
  Clone ID: PAT_MRT3847_1396C.1.pep
GKRKKYQRGFPRFLSLRKKLFKPFKGIYKKAVFKVGKETKGHGQGKKKKYPAFRAPYIMGPP

SEQ ID NO: 186809 - protein, 52 aa, Glycine max
  Clone ID: PAT_MRT3847_139700C.1.pep
KKSGKKTRRVCYKNQANMIQSISGTHLRRVISKTNLISQGCDKKFRLTLDIR

SEQ ID NO: 186810 - protein, 39 aa, Glycine max
  unsure (1)..(39): unsure at all Xaa locations
  Clone ID: PAT_MRT3847_139701C.1.pep
XXNXAEXEGGCXXXXPNPVCVXLETXTPGRXXWDSCCYD

SEQ ID NO: 186811 - protein, 163 aa, Glycine max
  unsure (1)..(163): unsure at all Xaa locations
  Clone ID: PAT_MRT3847_139702C.1.pep
PRVRGEWKNGVIFGRGTLIWANGNRYDGQWENGVPKGQGVFTWPDGSCYVGCWNKDLKVNQLNGTFYPGSGDTLTVTMRKRSSVDGARGSAVKSFPRICIWESEGEARDITCDIIDEVSLLYRDSSGTRSDXGEMVKPFRRNPCLSGEVKKXGQTIFQGDKKY

SEQ ID NO: 186812 - protein, 109 aa, Glycine max
  Clone ID: PAT_MRT3847_139703C.1.pep
ESTVSTNQQPPLKSVAASAEASQGTKVKKLAIIANRCLVKNPKNRPKMSEVLDMVTQVVESTVSTNQQPPLKSVAASAEAFQGTKVKNKKVTMDQNPDCNWLRMGRPKL

SEQ ID NO: 186813 - protein, 84 aa, Glycine max
  unsure (1)..(84): unsure at all Xaa locations
  Clone ID: PAT_MRT3847_139704C.1.pep
FLXRXXPCXWCXXFCXXLXAFPXXGLXXXXCPXXXPLVXGXVSSLSVXXXPAPXRFVVXLXAXXXXXWWXXLGLAXLXXXXLPL

SEQ ID NO: 186814 - protein, 84 aa, Glycine max
  unsure (1)..(84): unsure at all Xaa locations
  Clone ID: PAT_MRT3847_139705C.1.pep
ITGSDSDFHDFDKDRSXECLRPKQIWALCDEEDGMPRVSXVIREVEAGNPFKRHMRCLRCKTDGDGGLRXWVGGGWTRGWGNGG

SEQ ID NO: 186815 - protein, 104 aa, Glycine max
  unsure (1)..(104): unsure at all Xaa locations
  Clone ID: PAT_MRT3847_139706C.1.pep
FKNRNSTEHFDACXGYNKNHYXWELIFTIKECGRNKGFEMWSCEWANXYSWNLSXLMLLSKQSQVLDIILEISQNFEIGGNNIMPDFFVQQDIVRSSKNMESFE

SEQ ID NO: 186816 - protein, 54 aa, Glycine max
  Clone ID: PAT_MRT3847_139707C.1.pep
VRIECRYICSSLCIVTSFTSRTSMVIEIIFSLYSSRVPRSWHRSLSHWSHSHLI

SEQ ID NO: 186817 - protein, 51 aa, Glycine max
  Clone ID: PAT_MRT3847_139708C.1.pep
NLEMGSTTNYVQRLTTYGTVWFKEMFSTSILSFLFTNNYKAQPWFQFVSCV

SEQ ID NO: 186818 - protein, 92 aa, Glycine max
  Clone ID: PAT_MRT3847_139709C.1.pep
DITCQNTMPLPRTEQIWITNRRASVSSAMRLFTRRVGPCYLNYRGDDDMDVHRDHTDDRYLDEQTHLCPDHVVFSHATRGRTRGWTREFWTV

SEQ ID NO: 186819 - protein, 52 aa, Glycine max
  Clone ID: PAT_MRT3847_13970C.1.pep
CHSRPLLTDCIWYAHGTEPVASRSRPLAHMYRMLAFKPVSVVRFSTRKQAML

SEQ ID NO: 186820 - protein, 54 aa, Glycine max
  Clone ID: PAT_MRT3847_139710C.1.pep
PPNEYPLSSLNWGFICRFITPKIKVEPQGIFVLATKRRPGERKQRSDLSRHTFV

SEQ ID NO: 186821 - protein, 62 aa, Glycine max
  Clone ID: PAT_MRT3847_139711C.1.pep
VGGDIVIDEGYGGEVGRYGFEVGIRNYGGGYWSGVMLGGRVVRRVEMDEEDEGNVEGTGEDY

SEQ ID NO: 186822 - protein, 53 aa, Glycine max
  Clone ID: PAT_MRT3847_139712C.1.pep
ITQIVLMRKHFILLFPLFKIFPPGNPKSQMMFLSTASNIKKPFFILLLIIYGR

SEQ ID NO: 186823 - protein, 184 aa, Glycine max [sequence omitted]

SEQ ID NO: 186824 - protein, 63 aa, Glycine max
  Clone ID: PAT_MRT3847_139714C.1.pep
VLKSLCFWSELQPGYERLCCLRCMQPRDHNFATTCVCRVPKQLREEKVIECVHCGCKGCASGD

SEQ ID NO: 186825 - protein, 41 aa, Glycine max
  Clone ID: PAT_MRT3847_139715C.1.pep
SISQGQASQRFLWLVFGPVPVLDIKVLRLSIAFVSCIVVGP

SEQ ID NO: 186826 - protein, 330 aa, Glycine max
  unsure (1)..(330): unsure at all Xaa locations
  Clone ID: PAT_MRT3847_139716C.1.pep
LGAHSVISLLSCDQRQWRNCPNVYLILTSDNSVKECFRDLGLFPEDQRIPFTSLIDMWAELYGLDDDGIEAMSIINKLDSMNLANVSVESDTDNYFYNNLFIVLHDLXELAIHQSTQEPIERRKRLIIEINQNKPECWLGEKSKLLGWRVKQKPQHATDHTLSISTDENCTSDWPLMMQLAQVEVLIFNQFTWKXALTDFIEEMNKLKVLIVTSYSFHPSEMSNFELFGSFPXLKRIRLEWIFVPSFVAMKNLKKLSLYTCNMKQAFENNHMLIPNAFPNLEELNIDHCKDMVALPKGLCDITSLKKLSITNCHKLSALPQEIGNLMNLE

SEQ ID NO: 186827 - protein, 80 aa, Glycine max
  Clone ID: PAT_MRT3847_139717C.1.pep
TDKNTRYKDEDLKSKKSSYNCKGCRNICYLSKNTIKVEGMAIHGSWTRKAKKLVQQGFNLTKKCSVEANKNRFGQACIQG

SEQ ID NO: 186828 - protein, 33 aa, Glycine max
  Clone ID: PAT_MRT3847_139718C.1.pep
SSIIRLKDALVQHDNHGARSKVVIGAATLYCTS

SEQ ID NO: 186829 - protein, 86 aa, Glycine max
  unsure (1)..(86): unsure at all Xaa locations
  Clone ID: PAT_MRT3847_139719C.1.pep
LHWSLNHQSPWPSXVXSLCFLLFSGCCFAXSXREXACRXNECQMXXLXNALKPDNRIXPEGGLIETWNXNNKXFXCAGVXLXXCTL

SEQ ID NO: 186830 - protein, 47 aa, Glycine max
  Clone ID: PAT_MRT3847_13971C.1.pep
SQTPYNKIKNKKFKGRPFYTIQAYLLVLATTSPLSIASPKLSSLDGV

SEQ ID NO: 186831 - protein, 104 aa, Glycine max
  unsure (1)..(104): unsure at all Xaa locations
  Clone ID: PAT_MRT3847_139720C.1.pep
KLDSEVGERPFFGTAQAEGGFAPTTVATAIFLFPPPPVIYGRRNYFLSGWTKTGHVDYSXRPHTILAIAKDGVVFIGKDQAGYKRLFSVPKIFAECAASFFSVS

SEQ ID NO: 186832 - protein, 104 aa, Glycine max
  unsure (1)..(104): unsure at all Xaa locations
  Clone ID: PAT_MRT3847_139721C.1.pep
SFSFSFIFLFHSFFFFFFFPVFPLLAPFPCFPYSAQTLAFYCLATVSLTFXYHVPIPVSAAFSLRLILTRTYAHSLSCATPPLMLPRFYPLHSRPSRFYSSFKA

SEQ ID NO: 186833 - protein, 71 aa, Glycine max
  Clone ID: PAT_MRT3847_139722C.1.pep
INMLKLNVLPSCSVGMLTSWQSSCPRTRSRLVEFSAHELHSHHVPKPRDSFTGIPNSCSCFSQTQKNPDAW

SEQ ID NO: 186834 - protein, 160 aa, Glycine max
  unsure (1)..(160): unsure at all Xaa locations
  Clone ID: PAT_MRT3847_139723C.1.pep
TRPRTRGKKGNPXGGVGVQPMNGGFQNMGGDGGPQVMMSGRNVGPMSMPMPNIPAVQGLPAGPVNGGGYFQGAGPEAMPGNPFHQQQQQQQQQQQLQQQQQYMAAMMNQQRAIGNDRFQPMMYARPPPAVNYMYPPYPYPPPDPYTHFFSDENTSSCNVM

SEQ ID NO: 186835 - protein, 40 aa, Glycine max
  unsure (1)..(40): unsure at all Xaa locations
  Clone ID: PAT_MRT3847_139724C.1.pep
MKQADDHHSFSKRRNMXLEMFDISPVVKPIREPRVVVQTF

SEQ ID NO: 186836 - protein, 81 aa, Glycine max
  unsure (1)..(81): unsure at all Xaa locations
  Clone ID: PAT_MRT3847_139725C.1.pep
VGGGKXXXXXKKKKXKRGGXXXXXXXXKKXXKXXXXXGGXTTFLHSTFFYVTKNLLNIFIFYPEIRTPVPLLLAESATYAA

SEQ ID NO: 186837 - protein, 189 aa, Glycine max
  Clone ID: PAT_MRT3847_139726C.1.pep
NNSSSPFNKSPWLLPSSPAINLFHHHHHHHDNDLPENGLIGSLVRKEGHIYSLAVSGNLLYTGSDSKNIRVWKDLKDFTGFKSSSGLVKTIVISGGKIFTGHQDGKIRVWKVSSKNPSNHKRIGSLPTFKEYVKSSMNPKNYVEVRRHRNAVKVKHFDAVSSLSLDEEEGLLYFGSWDKTLQVWRVADS

SEQ ID NO: 186838 - protein, 73 aa, Glycine max
  Clone ID: PAT_MRT3847_139727C.1.pep
GDYETMPQTKQICTNQQTKLEINIHFRKTILIFIIPTINQHNLWTKQQSKFGGDLNVLGEDRAPKKQTGKNTN

SEQ ID NO: 186839 - protein, 87 aa, Glycine max
  Clone ID: PAT_MRT3847_139728C.1.pep
VRIPGSTHASGETQHRRTKCKHAIPSTILTRLRWQYNMQRPNTIKTNGLPTPKQKQALSTKVLCREMQLTKLKEELKRALCYAIREM

SEQ ID NO: 186840 - protein, 135 aa, Glycine max
  Clone ID: PAT_MRT3847_139729C.1.pep
MREVISIHVGQAGIQIGNACWELYCLEHGIQPDGQMPSDKTIGGGDDAFNTFFSETGAGKHVPRAVFLDLEPTVVDEVRTGTYRQLFHPEQLISGKEDAANNFARGHYTIGKEIVDLCLDRIRKLADNCTGLQGF

SEQ ID NO: 186841 - protein, 96 aa, Glycine max
  Clone ID: PAT_MRT3847_13972C.1.pep
LGGNTLVGVFIFLRYIFSPSGCFSPTKKKIGVLFSGSTTELFWEIPSLGGFKKCFFFFFPPYFGVFFFLGLGFPLFFLFIPLKKLFFNKKIIKKKT

SEQ ID NO: 186842 - protein, 71 aa, Glycine max
  Clone ID: PAT_MRT3847_139730C.1.pep
FFFLYAILQEAPPRNFGYHVYMPFRSLVAGMKVPVSIVHAVELNSPIAIWLLRSDHSTISFDHFMYLALVA

SEQ ID NO: 186843 - protein, 76 aa, Glycine max
  Clone ID: PAT_MRT3847_139731C.1.pep
KYPIDQIVFLKKIIVALFILKIFTPLEKRQQDKTFPDNCFLNNIFYNKTIVSLNKIISKKSIHNSLVTANVEKLTG

SEQ ID NO: 186844 - protein, 45 aa, Glycine max
  Clone ID: PAT_MRT3847_139732C.1.pep
KKTLFIERGIFITWGKHDVFKKALNQKAKCFTLLPLIQKLILSLC

SEQ ID NO: 186845 - protein, 125 aa, Glycine max
  unsure (1)..(125): unsure at all Xaa locations
  Clone ID: PAT_MRT3847_139733C.1.pep
FGLKFYSTLYNVGSVASPIGSHLFSVRLAGYLYDKEAXRQMAALGLKSRPGEELHCNGSEGYKMAFIIITAVSLFGALVSLILVLRTREFYKGDIYKKFREEARTAEAEFCPTQNKNGQTAAYEG

SEQ ID NO: 186846 - protein, 54 aa, Glycine max
  Clone ID: PAT_MRT3847_139734C.1.pep
VLWYLSSTTESISIYHPLSHVSLRIPSSISHILNLTITTIIIIIISNLYALVNP

SEQ ID NO: 186847 - protein, 416 aa, Glycine max
  Clone ID: PAT_MRT3847_139735C.1.pep
MLEGGAKFPGIIDLNKNNNNYYDFSQGFYHKLGEGTNMSIDSVGSLQTSNGGGSVAMSIDNSSVGSNDSHTRMLDHQGLRRRANDNYSVAHSANRRGRVTHALSDDALAQALMDNSSPTEGLDNFDEWTIDLRKLNMGEPFAQGAFGKLYRGTYNGEDVAIKILERPENDPAKAQLMEQQFQQEVIMLATLKHSNIVRFIGACRKPMVWCIVTEYAKGGSVRQFLMKRQNRSVPLKLAVKQALDVARGMAYVHGLLLIHRDLKSDNLLIFGDKSIKIADFGVARIEVQTEGMTPETGTYRWMAPEMIQHRPYTQKVDVYSFGIVLWELITGMLPFQNMTAVQAAFAVVNKNVRPIIPNDCLPVLRDIMTRCWDPNPDVRPPFAEIVGMLENAENEIMTTVRKARFRCCMTQPMTAD

SEQ ID NO: 186848 - protein, 668 aa, Glycine max
  Clone ID: PAT_MRT3847_139736C.1.pep
MVNIQTNTSYIFPQTQSTVLPDPSKFFSSNLLSSPLPTNSFFQNFVLKNGDQQEYIHPYLIKSSNSSLSLSYPSRQASSAVIFQVFNPDLTISAPQGPKQGPPGKHLISSYSDLSVTLDFPSSNLSFFLVRGSPYLTVSVTQPTPLSITTIHSILSFSSNDSNTKYTFQFNNGQTWLLYATSPIKLNHTLSEITSNAFSGIIRIALLPDSDSKHEAVLDKYSSCYPVSGKAVFREPFCVEYNWEKKDSGDLLLLAHPLHVQLLRNGDNDVKILEDLKYKSIDGDLVGVVGDSWVLKTDPLFVTWHSIKGIKEESHDEIVSALSKDVESLDSSSITTTESYFYGKLIARAARLVLIAEELNYPDVIPKVRNFLKETIEPWLEGTFSGNGFLHDEKWGGIITQKGSTDAGGDFGFGIYNDHHYHLGYFIYGIAVLTKLDPAWGRKYKPQAYSIVQDFLNLDTKLNSNYTRLRCFDPYVLHSWAGGLTEFTDGRNQESTSEAVSAYYSAALMGLAYGDVPLVALGSTLTALEIEGTKMWWHVKEGGTLYEKEFTQENRVMGVLWSNKRDTGLWFAPAEWKECRLGIQLLPLAPISEAIFSNVDFVKELVEWTLPALDREGGVGEGWKGFVYALEGVYDNESALQKIRNLKGFDGGNSLTNLLWWIHSRSDE

SEQ ID NO: 186849 - protein, 144 aa, Glycine max
  Clone ID: PAT_MRT3847_139737C.1.pep
MLESGAKFPGIIDLNKNNNNYYDFSQGFYHKLGEGTNMSIDSVGSLQTSNGGGSVAMSIDNSSVGSNDSHTRMLDHQGLRRRANDNYSVAHSANRRGRVTHALSDDALAQALMDNSSPTEGLEHFDEWTIDLRKLNMGEPFAQG

SEQ ID NO: 186850 - protein, 75 aa, Glycine max
  Clone ID: PAT_MRT3847_139738C.1.pep
PTFIKGAYNTPSHIRKGVSGRLFALSSNNVAIKFSSPETRKVYGIRRKTDVNHESAVLSSSSSKSKHGRHVETLR

SEQ ID NO: 186851 - protein, 140 aa, Glycine max
  Clone ID: PAT_MRT3847_139739C.1.pep
IADFGVARIEVQTEGMTPETGTYRWMAPEMIQHRPYTQKVDVYSFGIVLWELITGMLPFQNMTAVQAAFAVVNRNVRPIIPNDCLAVLRDIMTRCWDPNPDVRPPFAEIVGMLENAENEIMTTVRKARFRCCMTHPMTAD

SEQ ID NO: 186852 - protein, 229 aa, Glycine max
  Clone ID: PAT_MRT3847_13973C.1.pep
MGNLFCCVQVDQSTVAIREGFGRFEKVLQPGCHCMPWFLGKQLAGHLSLRLQQLDLRCETKTKDNVFVNVVASIQYRALAEKANDAFYKLSNTKTQIQAYVFDVIRASVPKLNLDDAFEQKNEIAKAVEEELEKAMSAYGYEIVQTLIVDIDPDEHVKRAMNEINAAARLRMAANEKAEAEKILLIKRAEGEAESKYLSGLGIARQRQSIVDGLRDSVLGFSVNVPWTT

SEQ ID NO: 186853 - protein, 192 aa, Glycine max
  Clone ID: PAT_MRT3847_139740C.1.pep
LIDAPTHTTTTNSRLSSMMTTTPTTLEICVVSAEGLKQQSSSYFSCIRTLHHISPELPAHMVYHHYDEGGTGEQVFRVPVDPTFFSDTYSRLHLQLYNKRRFAGLTQLGSCLIPPSDIALQPYHSVRYLSYRLRAKDGSRTHLTVNLSIRLHGSLDLDTCQPVIGIPVTAVRKFRNAHSSSGSTSCKMETEF

SEQ ID NO: 186854 - protein, 97 aa, Glycine max
  Clone ID: PAT_MRT3847_139741C.1.pep
PNIFDSMSAFVPSGWGILSIRAAWKPVIKRFGLWKSVSSIDRLYDAGMGMVILVPIAFFWGFPFVSTCQARVMFIQAVSGGLDISLIQGGDNPTPGI

SEQ ID NO: 186855 - protein, 141 aa, Glycine max
  Clone ID: PAT_MRT3847_139742C.1.pep
ASPFRCKEKGPPYPFLKARQVPSPFLKGPLKLIFFLNCPAFPLGEFKIGVGHSFKAFIEGPFELPLLFPIPALEGSLVGIHEGCPVVFDIPPSKDGGGISSFVPAGLECFVMILALLPVIRPFVGGPFHGHFELPFPFLRI

SEQ ID NO: 186856 - protein, 92 aa, Glycine max
  Clone ID: PAT_MRT3847_139743C.1.pep
RPTRSVTSISIEETSISYCKVRTLLLNVILRLPFITGTALRDQIYFELSHEPLLSTIDLLSTLLSSKNASFTLDSMLCKPKHHFNLNVFDQT

SEQ ID NO: 186857 - protein, 48 aa, Glycine max
  Clone ID: PAT_MRT3847_139744C.1.pep
LPDAPTHASTHASTSLMPNADQALCAHYGGMCNGLGQALSLNDSLQRV

SEQ ID NO: 186858 - protein, 104 aa, Glycine max
  unsure (1)..(104): unsure at all Xaa locations
  Clone ID: PAT_MRT3847_139745C.1.pep
GKKDPKKSRFVSTLPAETPLXSLKNRAKPLNLTVKSTQIRLRFKPHENGGKVNSPNDEGLXSWHPWFLMVECKEFNGDTFEYRQFCSKELRAALTDIVWRSSPL

SEQ ID NO: 186859 - protein, 107 aa, Glycine max
  unsure (1)..(107): unsure at all Xaa locations
  Clone ID: PAT_MRT3847_139746C.1.pep
WKAYRYLNVPKEEIDNQVQDLLVTGYIRRRSSYYAXSXVFVRKKNDFWRCCTDFRRVNAFSIKNRFLMSLIXVLLNELNGACYFFKMDIRSGYNKVRTADEDIHKTT

SEQ ID NO: 186860 - protein, 102 aa, Glycine max
  Clone ID: PAT_MRT3847_139747C.1.pep
SPPGRAIDKPRLNGDPLCFILKPRKGEPLGEFQIVSGSKGAGGLLWGRHTSRMWTFQKKTRATLKTIDLGNYPKRQPPRPGRKKEIERTVSPGLANTPTGEH

SEQ ID NO: 186861 - protein, 86 aa, Glycine max
  unsure (1)..(86): unsure at all Xaa locations
  Clone ID: PAT_MRT3847_139748C.1.pep
YAMHCIDSAGQSPXFKIFFFAQKADAASMFLVECILITSRAGRRIEIKANDQGSSQAFFTLFQRTLKKFGCPCMFVVSSDVTTRQM

SEQ ID NO: 186862 - protein, 41 aa, Glycine max
  Clone ID: PAT_MRT3847_139749C.1.pep
CWSCSWLALKLVKGVVEIETKSAVAVLRAYCVCHGARAILT

SEQ ID NO: 186863 - protein, 284 aa, Glycine max
  Clone ID: PAT_MRT3847_13974C.1.pep
MGNLFCCVKVDQSTVAMREGFGRFEKVLQPGCHCMPWFLGKQLAGHLSLRLQQLDLRCETKTKDNVFVNVVASIQYRALAEKANDAFYKLSNTKTQIQAYVFDVIRASVPKLNLDDAFEQKSEIARAVEEELEKAMSAYGYEIVQTLIVDIDPDVHVKRAMNEINAAARLRLAANEKAEAEKILLIKRAEGEAESKYLSGLGIARQRQAIVDGLRDSVLGFSVNVPGTSARDVMDMVLVTQYFDTMKDIGAASKSSAVFIPHGPGAVRDVASQIRDGLLQASHQ

SEQ ID NO: 186864 - protein, 53 aa, Glycine max
  Clone ID: PAT_MRT3847_139750C.1.pep
LEHGIEPDGQMPSDTTVGGGDYALNTSHRETGAVKDQPRAAYVDMKATRDELV

SEQ ID NO: 186865 - protein, 47 aa, Glycine max
  Clone ID: PAT_MRT3847_139751C.1.pep
YIHMPSIIQIYYDLMDMATEVEHRFTLIEASNLQTHLMYKELFKALY

SEQ ID NO: 186866 - protein, 69 aa, Glycine max
  Clone ID: PAT_MRT3847_139752C.1.pep
NSKFNLKLLKENFSTMYITLYNKITNLTLNFWGRNFSPMYITLYNKILQDKFNAPKGGRPQSNNKGTLL

SEQ ID NO: 186867 - protein, 75 aa, Glycine max
  Clone ID: PAT_MRT3847_139753C.1.pep
RQRHYERRGDELTERYRYVRGAHLRITTTILQLGTGIPSMGMYVCCCACWLLRKLCFRLKRGDICITDERNMRMK

SEQ ID NO: 186868 - protein, 110 aa, Glycine max
  unsure (1)..(110): unsure at all Xaa locations
  Clone ID: PAT_MRT3847_139754C.1.pep
FHASWTKSEPHFWELIFPIQVCGPNNGFEMWSSEWANXQTSWHLSFLIDNPKQFTVFDILLGISHDFEIAGYIFMPVFFVPQATARSSAYAPSLSMIWNLYLFLSSACLI

SEQ ID NO: 186869 - protein, 106 aa, Glycine max
  unsure (1)..(106): unsure at all Xaa locations
  Clone ID: PAT_MRT3847_139755C.1.pep
XXSXXXIXXXXXLXXRXXXXRXSXXXCXXXXXXXXXXXXXXXXSXXEPWXXXXXPXXXKAXXQXXGXXXXGXXXXLRRXXXXXRLXHXXCXQAXXXXIXXXKXXXX

SEQ ID NO: 186870 - protein, 49 aa, Glycine max
  Clone ID: PAT_MRT3847_139756C.1.pep
IYEKAVKILETYWMEEDDETMPPGDASQSGFNFGGAQPPAVPSGGFNFN

SEQ ID NO: 186871 - protein, 41 aa, Glycine max
  Clone ID: PAT_MRT3847_139757C.1.pep
DLDILDAYYTICNLNLGNFLPHYIRWHLYTIVDQHFLHLSH

SEQ ID NO: 186872 - protein, 169 aa, Glycine max
  unsure (1)..(169): unsure at all Xaa locations
  Clone ID: PAT_MRT3847_139758C.1.pep
DPLQQRAIQHHIAYLGQTPSQLLTVPLLKKMPLPEVLHLLTIFRIPKEVKPYACSIARNASFISGTPIHASSDTDVVVDTDAPHAHVSQHKWQLNTPDGLGTPFLSQHRKPILASARGTIMRMYKAPSXSGGDWIXHQTLAYAVSGILSSAFVSMTSITENITDGHAHN

SEQ ID NO: 186873 - protein, 77 aa, Glycine max
  Clone ID: PAT_MRT3847_139759C.1.pep
VVDGFIHTYTLGWYLHKFISVYGMYDFLHVLLFQYSMIRHTRLVFHSRFRMRGSSAMDIPLLVSLSYFSFSDDILSV

SEQ ID NO: 186874 - protein, 519 aa, Glycine max
  Clone ID: PAT_MRT3847_13975C.1.pep
PSFQFSSTAMEGATKWDPVCLKTSDEEHHIYSQMKLLDQKVSTVSSVSALEAELEQARVQIQELETECHSSKKKLEHFLKKVSEERASWRSKEHEKIRAYVDDIKSELNRERKSRQRIGIVNSRLVNELADVKLLAKRYMQDYEKERKARELIEEICDELAKEIGEDKAEIEALKRESMKLREEVEEERRMLQMAEVWREERVHMKLIDAKVALDEKYSQMNKLVADLETFLKSINVNPNAKEMKEARSLQQAAAAVDIQDIKGFSYEPANPDDIFAIFEDLNFGESNEREIEPCVAHSPVSHASKIHTVSPEAKLISKDNLQRCSDVFMDDNGDIEEDESGWETVSHVEDQGSSCSPEGSALLVNKNRRESDVSGRSVLEWEENAGLETPITEISEVCSVPAKQSKKVSSMARLWRSGPNSGDNYKIISVEGMNGRLSNGRVSSGGIMSPDWELGNGGLSPQDHLYQLSSPESANLHNRGMKGCIPRTVQKSSLKARLLEARMESQKVQLRHVLKQKI

SEQ ID NO: 186875 - protein, 99 aa, Glycine max
  unsure (1)..(99): unsure at all Xaa locations
  Clone ID: PAT_MRT3847_139760C.1.pep
MPCSREVYSRIGAQLLKYVAPTTVENFRTLCTGEKGLGRNTGMPQHYKSMRSHRAIEGYMMHGRDIYAGDGTRRRSTYGAKFDDXRSKMKHEKNGTLDM

SEQ ID NO: 186876 - protein, 443 aa, Glycine max
  unsure (1)..(443): unsure at all Xaa locations
  Clone ID: PAT_MRT3847_139761C.1.pep
MSCCLSCCASLTCGLCTSTASCISQKSARIGYCGLFGVSLVVSWILREVGAPLLEKFPWIGGTSDTNTTEWYQAQAVLRVSLGNFLFFGILALIMIGVKDPNDRRDSWHHGRWTAKIVIWLLLVVFGWXKPLLEEAEEGKAKEEKEAQPVIYSYSFFHQIFALASMYSAMLLSVWNRKSXAGRSLLIRVIILLDSTHTRVGPCGVVDLHRGFAALSHITVFYDILAGSGSGILCFGSPSPATCGAAVSSLQHMILCIDPPLHARCNAFYIYHSFAXLITFFVQYNXIKLXQFNFNDYECNGLNKSRAVSTGTLVLGMLTTVLSVLYSALRAGSSTTFLSPPSSPRLGGSKPLLEEAEEGKAKKEEKEARPVSYSYSFFHLIFALASMYSAMLLSGWTSTSESSDLIDVGWTSVWVRIGTEWVTAGLYIWSLLAPLLFPDREFV

SEQ ID NO: 186877 - protein, 167 aa, Glycine max
  unsure (1)..(167): unsure at all Xaa locations
  Clone ID: PAT_MRT3847_139762C.1.pep
IIIGVQKQVNGSLLPSAVISLYCAYVCXYTGLSSEPRDYECNGLNKSRAVSTSTLVLGMLTTVLSVLYSALRAGXSTTFLSPQSSPRMVGSKPLLEEAEEGKAKEEKEAQPVIYSYSFFHQIFALASMYSAMLLSGWTNTSESXDLIDVGWTSVWFESAPSGHCWID

SEQ ID NO: 186878 - protein, 88 aa, Glycine max
  Clone ID: PAT_MRT3847_139763C.1.pep
MGHRQFHNTSSLFEGEPDQNWNHMHTDQQCVHLGRTSTSENGSFIYPAENMSIDNMSFPSHWNSSTTSNGYACSSNNIDVPPHQSDAS

SEQ ID NO: 186879 - protein, 549 aa, Glycine max
  unsure (1)..(549): unsure at all Xaa locations
  Clone ID: PAT_MRT3847_139764C.1.pep
MGHRQLHNTSSLFDGEPDQNWNHLHTDQQCVHLGRTNTSENSSFIYPAENMSIDSISFPSHWNSSTRSNGYASSSHNIVVPPHXSDASGTYNDXFMYLSRTVSLFRASENYLHQPSSSNYDRQTFHVDAGFIDLTMGSGQGHHKRKSPGIPSVYEGGSTSRYFNAGSSTDLPISSELWQEKPNIDSQYMPWDHFTMTPTFRGTGLSIKGEGSLRNVRSRSTLDLDSNLSRTHLSSNHSHNSYPTVPPVDHSSMADLSGQTSGTLTRDWSQMNMSPANGRVLLSDTSSFGLETSHFLVGSGATASNASVDVGGFHHEFGASRNPTAPQSFHNTHTQTARGIRSNYSQRSTPTFRASSSLRLGHVTSDDGLPMVAESYSSRHPRPLSTIGWRNGDRNGRSRISSERYRSLTEESGLHDRFSSEGFMVVERASVYGSRNMLDQHRDMRMDVDNMSYEELLALGERIGYVNTGVSEDLLSKCLTETIYCSSEQSEDEGNCVICLEEYKNMDDVGTLQTCGHDYHVSCIKKWLSMKKLCPICKVSALPEDTKDK

SEQ ID NO: 186880 - protein, 551 aa, Glycine max
  Clone ID: PAT_MRT3847_139765C.1.pep
MGHRHLHNTSSLFDGEPDQNWNHLHTDQQYVHLGRTNTSENSSFIYPAENMSIDSISFPSHWNSSSRSNGYASSSHNIDVPPHQSDASGTSNDHFVHSSSAGPSLFIPLENYAHQPSSSNYDRQTFHVDGGFIDLTMGSGQGHHKRKSPGIPSVYEGGSTSRYFNAGSSTDLPISSELWQEKPNIDCQYIPWDHYCTMTPTLRGTGLSIKGEGSLPNVRSRSTLDLDSNLARTHSSSNHSHNSYPTVPPVDHSSTADLSGQTYVTLTRDWSQTNISPAYGRVLFHASGAFGLETSHFLVGSGATASNAASVDVGGFHHEFGTSRNPTAPQSFHNTQTQTARGIRSNYSQRSTPTFRASSSLRLGQVTSDDGLPMVAESYSSRLPRPLSTIGRRNGDRNGRSRISSERYRSLAESGLHDRFSSEGFMVVERASVYGSRNMLDQHRDMRMDVDNMSYEELLALGERIGYVNTGISEDSLNKCLTETIYCSSEQSQDEGNCVICLEEYKNMDDVGTLKTCGHDYHVSCIKKWLSLRKLCPICKVSALPEDTKDK

SEQ ID NO: 186881 - protein, 183 aa, Glycine max
  unsure (1)..(183): unsure at all Xaa locations
  Clone ID: PAT_MRT3847_139766C.1.pep
GSRGKAMFSHWRNYDDLNEYFWSVDCFRLGWPMRVDSDFFSVPFPQQERQVNKDEENRGPASDRWSGKTNFVEIRTFWHIFRSFDRMWSFYILCLQAMIIIAWNGSGELSSIFRGDVFKQVLSIFITAAILKLAQAILDIFLSWKARKVMSLHVQLRYIFKAXLAAAXVIXLPVTYAYSEKSS

SEQ ID NO: 186882 - protein, 50 aa, Glycine max
  Clone ID: PAT_MRT3847_139767C.1.pep
SFMNRSPFCLGNRLIRPVYLPVQRQMCLVCANAECCNTVAMVAVSSTPSI

SEQ ID NO: 186883 - protein, 67 aa, Glycine max
  Clone ID: PAT_MRT3847_139768C.1.pep
SIPLFGVPGGGNPPPPPLFWPPKQGPFFVLAFESKKKRNFPLFLSRGFAFACKIKPVGPNAKAPFGA

SEQ ID NO: 186884 - protein, 48 aa, Glycine max
  Clone ID: PAT_MRT3847_139769C.1.pep
LLSCYIISQNLDVRGYALPPLLCPLFPRRSLVIRDLSESAIRVLKSSP

SEQ ID NO: 186885 - protein, 58 aa, Glycine max
  Clone ID: PAT_MRT3847_13976C.1.pep
LLFFFYFFFWGFLLKHSGVYTPTTFKTHGNHKHTGTPKKGEHKTPGKTKHQTYKKKKK

SEQ ID NO: 186886 - protein, 144 aa, Glycine max
  Clone ID: PAT_MRT3847_139770C.1.pep
APHLARSLSLSPLFPFTLPLVSPKSYAPNTRILEVARITMSLACLVCHSVDSPSPSHSFRSYSVSSAENEGRCHAVATCLTRKLSLPPSTFHSFLAPSSSSKVTPQPTGSSNNLIPGTPRLVRSRAVTRDRVRNWNFDEIAMES

SEQ ID NO: 186887 - protein, 46 aa, Glycine max
  Clone ID: PAT_MRT3847_139771C.1.pep
VSFYLSLRPPLYLCHNLTPSLLHFHSDRLQCPESPARLRNPIVISL

SEQ ID NO: 186888 - protein, 61 aa, Glycine max
  Clone ID: PAT_MRT3847_139772C.1.pep
IRLEDSDHFLHAIIDILKIYSNTQAGATLTTYESAPGIVQQISSLHSDIDSLQSYHYNSLS

SEQ ID NO: 186889 - protein, 63 aa, Glycine max
  Clone ID: PAT_MRT3847_139773C.1.pep
HASEHGFESTTISDILNDKGKGADGSWLWCTTDDTVYDAVKSMTQNNVGALVVVKSDAIAICS

SEQ ID NO: 186890 - protein, 55 aa, Glycine max
  unsure (1)..(55): unsure at all Xaa locations
  Clone ID: PAT_MRT3847_139774C.1.pep
RACIXAFFQIQFXKLCNFGSNSESYNHKRLHQENPKQVKSVALKYNHNLVLIMNA

SEQ ID NO: 186891 - protein, 66 aa, Glycine max
  unsure (1)..(66): unsure at all Xaa locations
  Clone ID: PAT_MRT3847_139775C.1.pep
FPFTLHKKKYLNDLSVAKPKTCSKQGGKRKDXQERDSFKPTNQTRPTKGYPSXHWGRVGTEFHFIS

SEQ ID NO: 186892 - protein, 44 aa, Glycine max
  Clone ID: PAT_MRT3847_139776C.1.pep
MCDFLCLSLLVLCNLLFFFCSCMYFICCYFICNIIFICIFHYFL

SEQ ID NO: 186893 - protein, 426 aa, Glycine max
  unsure (1)..(426): unsure at all Xaa locations
  Clone ID: PAT_MRT3847_139777C.1.pep
MMMVMKKEATYSSILTLLIATLSLALSDEFGDRGENVTVDPSLVFQNDRLRNAYIALQAWKQAILSDPRNQTTDWVGSQVCSYTGVYCAPALDNPNIRTVAGIDLNHGDIAGYLPQELGLLVDLALFHINSNRFCGTVPHKFDRLKLLYALDLSNNRFAGKFPEVVLRLPSLKFLDLRFNEFEGTVPRELFDKDLDAIFINDNRFVFDLPDNFGNSPVSVIVLANNRFHGCIPASLGNMSNLNEIILMNNAFRSCLPSEIGLLKNLTVFDVSFNQLLGPIPNAVGNAVSLEQLNVAHNLLSGQIPASICMLPHLQNFTYSFNFFTSEPPACLALPAFDDRLNCLPARPAXRPPAQCXSFLSKPVDCNSFKCKHFVPSPPSPSPFPSPTAPVTPSPSPSTPSPFPSPTTPVTPPSPSHSPPSPSTPS

SEQ ID NO: 186894 - protein, 84 aa, Glycine max
  Clone ID: PAT_MRT3847_139778C.1.pep
VNLNQLFRSCVELVGARSTNELRMPPAPKQQMQGKVINGMWPYIFLHVQFCNGSGSGVPEHRPPCSVFLHALSVSMELNPLQSV

SEQ ID NO: 186895 - protein, 79 aa, Glycine max
  Clone ID: PAT_MRT3847_139779C.1.pep
GASIERWLRIHIVCGAICALMIMIPLCIPNSSLKEHIRKKGMGQARCFGICGYAIWVLKEKGSLKKNLNSYNFFFCFSL

SEQ ID NO: 186896 - protein, 97 aa, Glycine max
  Clone ID: PAT_MRT3847_13977C.1.pep
MYTIKKKKKKKKKKKKKKKKKKKKKKKKRNNKKKRSDSIKGENITYECMKRIKLSNSRHKNKGGGFLGFQTFHWAQPGLTLFIGVAKIKTWGQFFKY

SEQ ID NO: 186897 - protein, 110 aa, Glycine max
  unsure (1)..(110): unsure at all Xaa locations
  Clone ID: PAT_MRT3847_139780C.1.pep
MDLAKGKWKQNMIFKAWEGCRLTSRRPHLKLKSLSENDDDDHHEKKKKKNSQIAPHGCFSVHVGPXEKKVVVKTKYVNHPLFQMLLEETEQEYGFESDGPIWLPCNVDLF

SEQ ID NO: 186898 - protein, 87 aa, Glycine max
  Clone ID: PAT_MRT3847_139781C.1.pep
LVNAEEAVTVIFFMIIKITRMVGKISTGKMELPDILLPARVETILLRAVDLMKLVLIFQKEGVEWEHHASLCIITILMGTVKFLWMD

SEQ ID NO: 186899 - protein, 65 aa, Glycine max
  Clone ID: PAT_MRT3847_139782C.1.pep
LTNCFWNCFYKTFTCSEKNKLPFFFFLTPTVFFFANPPFLDGLGPPSHWLRDLKWNPQGLIPITL

SEQ ID NO: 186900 - protein, 95 aa, Glycine max
  Clone ID: PAT_MRT3847_139783C.1.pep
PKGKGPLGAQWASLGSPPILIRGASHPPILFFERFGLAPSPTRKPPPGLKLGVGAPGFQIGAPSGFPLFAPLAWGFVGPPLGVGVVFGLKTLGAL

SEQ ID NO: 186901 - protein, 414 aa, Glycine max
  Clone ID: PAT_MRT3847_139784C.1.pep
MADRFFPNPMPEFVPETTPSTPQEEEEALTVGDSLPKLLAMPHAPLLERLKRAALDLKETIVIETWGLSGQQVRDFTLYCGVLGTAFLLFKSYRVTGNGNDLSLCSEIVKACDAASARSRDVTFICGRAGVCSLGAVAAKHAGDDESLKYYLAQFKKIKLSKDLPDELLYGRVGFLWACLFLNKHLGLGTVPSNYTAVVVDEVIKNGRALGRKGRCPLMFEWYGEKYWGAAHGLAGIMHVLMDMELKPDELEDVRGTLKYMISNRFRSGNYPVSEDDRKSDALVHWCHGAPGMALTLVKAAKVFGDKEFLDAAIEAAEVVWNRGLLKKVGICHGISGNAYVFLSLYQLTGDVKYLYRAKAFACFLLDRAHKLISRGEMHGGDRPYSMFEGLGGMAYLFLDMSDPSLSKFPAYEL

SEQ ID NO: 186902 - protein, 133 aa, Glycine max
  unsure (1)..(133): unsure at all Xaa locations
  Clone ID: PAT_MRT3847_139785C.1.pep
NRGIEGLTRFSIREGSNEVKPVKTTFREGEGPGFKGEERRGGTXLESMVDFAITNLGGNNVDAVSPEGPKKDIGFHQFPWAPGVKRLVEAKVRVGGNRGNSLNAGFNGPKSEPPKAYLVQWKGAVGSRVKAVA

SEQ ID NO: 186903 - protein, 69 aa, Glycine max
  Clone ID: PAT_MRT3847_139786C.1.pep
LLNIGTPTATTLDLLPQTLIRSHATIYRHHRFHDGLRIQALSRRRRSSPRPSGRTHGRTRGRTRGRTRE

SEQ ID NO: 186904 - protein, 77 aa, Glycine max
  Clone ID: PAT_MRT3847_139787C.1.pep
YCYNDELAMGMQFDASYCTIPDWLLPHIVINLVWIVIKLSFCCARTFANRIDEGVEQICIDQVLIVTSSRISKVSSS

SEQ ID NO: 186905 - protein, 75 aa, Glycine max
  unsure (1)..(75): unsure at all Xaa locations
  Clone ID: PAT_MRT3847_139788C.1.pep
FLLGRGLCVCSALVSLLYGFSSFLFFVPAPCVFPFFLGWWDLCAXSLKGPLFPAGGGGVFMRGGRPSGGSPRTRA

SEQ ID NO: 186906 - protein, 66 aa, Glycine max
  unsure (1)..(66): unsure at all Xaa locations
  Clone ID: PAT_MRT3847_139789C.1.pep
MAETFLXTSESVNXGHPDQALXSXISDAVLDXACLEQDPDSKVACETCTKTNLVMVFGEITXKANV

SEQ ID NO: 186907 - protein, 59 aa, Glycine max
  Clone ID: PAT_MRT3847_13978C.1.pep
VICSKCSGFGFNSDASITVTGCHRTGIKVSIRHLGPSMIHHMHHACNQCIGTAETINDR

SEQ ID NO: 186908 - protein, 94 aa, Glycine max
  unsure (1)..(94): unsure at all Xaa locations
  Clone ID: PAT_MRT3847_139790C.1.pep
XXHXXGGXTGGGCGDHGGPQTTTTIRKAKAGGGRQERRDYRDKSGPEGPYTVTTSRPEQGHSQGERTRKLNNTNGQARKDRLTLPKPAERTART

SEQ ID NO: 186909 - protein, 302 aa, Glycine max
  Clone ID: PAT_MRT3847_139791C.1.pep
MINMATMEDMSNMSGEITLPGFRFHPTEEELLDFYLKNMVVGKKLRYDVIGFLNIYQHDPWDLPGLAKVGEREWYFFVPRDKKHGSGGRPNRTTEKGFWKATGSDRKIVTLSDPKRIIGLRKTLVFYQGRAPRGCKTDWVMNEYRLPDNCKLPKEIVLCKIYRKATSLKVLEQRAALEEEREKKQMVDNSPASPPSSTDTMSFSSPQEEQNVPLPLLQHVLKKESETTEDMVVSKQEKTTNQLTLKDTKSTCGTSLQMPFGKEKLPDLQLPMLSDWTQDTFWAQLNSPWLQNFTPTNILNFY

SEQ ID NO: 186910 - protein, 111 aa, Glycine max
  Clone ID: PAT_MRT3847_139792C.1.pep
ETPNGKPKNKRPLPQEDPVIDPVAALDKSRLRKVTERVMPPRAPKEDGRESLLEMIRSKSFNLRPAAVQRPPRIQGPKTNLRVAAILEKANAIRQAFAGSDEDDADSWSDS

SEQ ID NO: 186911 - protein, 205 aa, Glycine max
  Clone ID: PAT_MRT3847_139793C.1.pep
MATMEDMNNMSGEITLPGFRFHPTEEELLDFYLKNMVVGKKLRYDVIGFLNIYQHDPWDLPGLAKVGEREWYFFVPRDKKHGSGGRPNRTTEKGFWKATGSDRKIVTLSDPKRIIGLRKTLVFYQGRAPRGCKTDWVMNEYRLPDNCKLPKEIVLCKIYRKATSLKGLEQRAALEEEREMKMVGSPASFTDTMFSSPQEEQTCPC

SEQ ID NO: 186912 - protein, 72 aa, Glycine max
  unsure (1)..(72): unsure at all Xaa locations
  Clone ID: PAT_MRT3847_139794C.1.pep
SMVKVHQNLCWAVAXYVEAIRMVAGGLLPQLDFVMKQXLSEGLLALRAIFVVVECPDKFSFRLPDKYECWVM

SEQ ID NO: 186913 - protein, 269 aa, Glycine max
  Clone ID: PAT_MRT3847_139795C.1.pep
LKQIAPQPRLPTLAKLCAEMLPAAADGMLNMQDATGQSVLQDAFQILGCKEIRNSAARASSESADVEEEGGESGSAARGKTITQAVKKGLIQNTVPIFIELKRLLETKNSPLIGSLMECLRIILKDYKNEIDDILVADKQLQKELIYDIKKYEAAKAKATVAEAVGTKPKSGSNQSPDASKNLTKTQEQTVGQSSNELPSDSRVASAMADTAAAATARSVLREINKGTATPPLSSLSVPKVKSCTGMCHSKDKRMDVIQSIRKRQPFDS

SEQ ID NO: 186914 - protein, 59 aa, Glycine max
  unsure (1)..(59): unsure at all Xaa locations
  Clone ID: PAT_MRT3847_139796C.1.pep
LVVWPETRGKTFIFQSIPKEATVINYFPPQIAGSELLISGCFXGFALFLSVQILAFTSS

SEQ ID NO: 186915 - protein, 325 aa, Glycine max
  Clone ID: PAT_MRT3847_139797C.1.pep
IFIIVGLCGFFYILGLWQRSGFGKGDSIAVEITKHTDCSVLSDLNYETHHDDDSGTPNSSDTQVREFKPCDDRYIDYTPCHDQARAMTFPRENMAYRERHCPPDDEKLYCLIPALRGYSTPFSWPKWRHASAYANAPYKSLTVEKAVQNWIQYEGNVFRFPGGGTQFPKGADAYIDELASVIPLDNGMVRTALDTGCGVASFGAYLFKKNVVAMSIAPRDSHEAQVQFALERGVPAIIGVLGTIMLPFPSGAFDMAHCSRCLIQWGANDGKYMKEVDRVLRPGGYWILSGPPINWKNSFQAWQRPEDELEEEQRQIEDTAKLLCW

SEQ ID NO: 186916 - protein, 52 aa, Glycine max
  Clone ID: PAT_MRT3847_139798C.1.pep
LHLPARTTCPSYLSAWVTFSTFASSSQCILSTTNFHTWQIPICLSRLVFFIS

SEQ ID NO: 186917 - protein, 67 aa, Glycine max
  Clone ID: PAT_MRT3847_139799C.1.pep
ERSTVSLTTHTLCETSLSKKNYSHFTSDLCCMILTDTALELYTRTDRRGMLHCNRLTIIKDPRHLNC

SEQ ID NO: 186918 - protein, 84 aa, Glycine max
  Clone ID: PAT_MRT3847_13979C.1.pep
ITTMMRLRERGSSGKNLRGAMLFDELSTARTVVGVTINHHGFEQCSSWKNTYISSSRGWWCSVLTYIVEGSSRSRDGGGAVVSD

SEQ ID NO: 186919 - protein, 71 aa, Glycine max
  unsure (1)..(71): unsure at all Xaa locations
  Clone ID: PAT_MRT3847_1397C.1.pep
AWVTPDEQTYXLVIDLYARRMRWERAKIVFYEMGTSNVQPNSYVCSRILANYCDQWEGQKSFQVLKDIKSN

SEQ ID NO: 186920 - protein, 92 aa, Glycine max
  Clone ID: PAT_MRT3847_139800C.1.pep
TFSKLTQAHPFKKKKPPSPGTKKRTFSHQTKPGRGPEKKKKQFPALLGNPTPCTLRFTHKRTKGAPGAPPTHKIIHTAGYPSPPPGGGGGFI

SEQ ID NO: 186921 - protein, 625 aa, Glycine max
  unsure (1)..(625): unsure at all Xaa locations
  Clone ID: PAT_MRT3847_139801C.1.pep
MGAISIPLVLVLLFCCLVSVSQAEYLTYKDPKRPLNVRIKHLXKRMTLEEKIGHLVQIERSVATPQVMKKYFIGSVLSGGGSVPETNASAETWIQMVNGIQNGSLSTRLGIPMIYGIDAVHGHNNVYKATIFPHNVGLGVTRDPVLIKKIGDATALEVRATGIQYVFAPCIAVCRDPRWGRCYESYSEDPKIVQAMTEIIPGLQGDISDNSRKGVPFVAGKNKVAACAKHYVGDGGTTKGINENNTVVSYNGLLRIHMPAYHDSIVKGVSTVMVSYSSWNGQKMHANHFLVTDYLKNKLKFKGFVISDWLGIDRITSPSHTNYSYSIRVGCCGWNXICSWFPLFSPNSGVSAGIDMIMVPFNYTEFIDELTRQVKNNIIPISRIDDAVARILRVKFVMGLFENPYADPSLANQLGSKEHREIAREAVRKSLVLLKNGKSYKKPLLPLPKKSTKILVAGSHANNLGXKCGGWTITWQGLGGNGLTQXKSRLDAVKQNDDPASEVHCRENPXAETFGDSLNLTISEPGPSTITNVCGSIQCVVVLITRRPVVIQPYLSKIDALVAAWLPGTEGQGVTDLLFGDYGFTGKLARTWFKTVDQLPMNVGDKYYDPLFPFGFGLSTNPTRY

SEQ ID NO: 186922 - protein, 107 aa, Glycine max
  Clone ID: PAT_MRT3847_139802C.1.pep
RKSAKNAQKVAPCAEKKIDRSCPGEIRRSKRTRRTQRGIRRKRAFSSQDRAVGIKVVCTMCKAQLVNQNPHRLTTLCFQTSKGEASSRVKIGIFKQKAKKSPKKIAL

SEQ ID NO: 186923 - protein, 48 aa, Glycine max
  Clone ID: PAT_MRT3847_139803C.1.pep
DQSSGCKYYSALPSYLTLRGSLVLVKLVRTGHVLYIRKKGFYFPFPSR

SEQ ID NO: 186924 - protein, 62 aa, Glycine max
  unsure (1)..(62): unsure at all Xaa locations
  Clone ID: PAT_MRT3847_139804C.1.pep
SIKFASFGTPARSCGNFHERNWYAHKCYDAFEMNXVAQNWCTMTLSPERFGRHPCPSGFTKL

SEQ ID NO: 186925 - protein, 43 aa, Glycine max
  Clone ID: PAT_MRT3847_139805C.1.pep
KITHTFTHFLRQFKRGGWKIFNIGASITQQRGFLPKFPFIVFN

SEQ ID NO: 186926 - protein, 102 aa, Glycine max
  Clone ID: PAT_MRT3847_139806C.1.pep
HTSERDEDDCILEGEGATGWHGADIGGIIYWLVSASYLNVTRILRSLLQPWVTHHVVTQTRIILMIQRYGFGLLDALFCGVSSAAYVPFYTAFIPLLFWSGH

SEQ ID NO: 186927 - protein, 41 aa, Glycine max
  Clone ID: PAT_MRT3847_139807C.1.pep
IALFMTEMQSDSASALTASDAFLTGTMRYMQFPKQKGGMLG

SEQ ID NO: 186928 - protein, 98 aa, Glycine max
  Clone ID: PAT_MRT3847_139808C.1.pep
SSSLRTPWKETPSLPTGSGHPPQVGEGPRNYLPRVKGGSFLRVPPKKCPKSITCPVSNKGGFSPPPPTRVEGSSLGIFRGASQKHAPSVGRKALPMFF

SEQ ID NO: 186929 - protein, 68 aa, Glycine max
  Clone ID: PAT_MRT3847_139809C.1.pep
STLKPHTWHSVMLSKSLVFLCGGPVSEGFSDDSGHASALFFDSRSFIAGFIKLKLLGDEMFRFRVSTF

SEQ ID NO: 186930 - protein, 65 aa, Glycine max
  Clone ID: PAT_MRT3847_13980C.1.pep
LSRHCQRARALNGKTRIPSTHFAGLKFNPKKKRSRSIKENPSYIKPIRRIFSVERLMALMVNLNF

SEQ ID NO: 186931 - protein, 53 aa, Glycine max
  Clone ID: PAT_MRT3847_139810C.1.pep
NRSRVRESHMPPLLDHHTKAEARRSKLEMIHRHKLESCFAIVFLESIIAGQSY

SEQ ID NO: 186932 - protein, 116 aa, Glycine max
  Clone ID: PAT_MRT3847_139811C.1.pep
GNWFHHLWPKQCRKKVGSSKKGVNKEEMKPAPFLPKITMVGLSTEEAGQMSKANLKKPMDDLTRELEKTELDIMTDGGSKECKVEDRDPLFVANVGDYYSSLGKPGSGRWIRGGSN

SEQ ID NO: 186933 - protein, 116 aa, Glycine max
  Clone ID: PAT_MRT3847_139812C.1.pep
FSDRCTLPFTLVDRFRRDMLGILRLGLRPSCLFEAFSYLLNCSFSLSISALFRLGQNLPIREQNTLFGVLYRLVVDVCWFRGDSLGFICSSFSYFVFDTGSLLSLLTTSKHINSQS

SEQ ID NO: 186934 - protein, 43 aa, Glycine max
  unsure (1)..(43): unsure at all Xaa locations
  Clone ID: PAT_MRT3847_139813C.1.pep
VFHVLKLGEXADXXALALNKDNTNLLVSTXDKQSIIFTDPIVS

SEQ ID NO: 186935 - protein, 69 aa, Glycine max
  Clone ID: PAT_MRT3847_139814C.1.pep
FPFFLFVVFFRELIEIVLKIYNNSFYSNALDHLNISPLFDFHLDIESHFVFGRTLNYCCTNISFYYLAR

SEQ ID NO: 186936 - protein, 86 aa, Glycine max
  Clone ID: PAT_MRT3847_139815C.1.pep
ASYFTVAFLCLLSAMLVCLHDKMRIVALLVCFMVHTSSPMWLLHIQYHLRAELSSFGYLWCEKYGSFLPGLSPDGFWRAYNSTNVL

SEQ ID NO: 186937 - protein, 55 aa, Glycine max
  Clone ID: PAT_MRT3847_139816C.1.pep
FGVVSHSTTAFNKWVLDDEAFSLTKTLKMYKKSFALGIRIVFLSEEPLSPRDVTA

SEQ ID NO: 186938 - protein, 40 aa, Glycine max
  Clone ID: PAT_MRT3847_139817C.1.pep
KGFNKHLEMIYTSKIVNILTRIVLIIKSPHLDKKKCGYSR

SEQ ID NO: 186939 - protein, 94 aa, Glycine max
  unsure (1)..(94): unsure at all Xaa locations
  Clone ID: PAT_MRT3847_139818C.1.pep
ICXLVKFVNLXNIIVPLIXLRIIXXSSXFXXISKVXFGDXVGTQQPNGKXWFXNLHRCSXSDTXGXPXEXXSXVEXHIHNFXXXXAXPFXGGXP

SEQ ID NO: 186940 - protein, 223 aa, Glycine max
  unsure (1)..(223): unsure at all Xaa locations
  Clone ID: PAT_MRT3847_139819C.1.pep
GNHRQRRAKAIAASSLSSPVLSYTKFSSPTPRFTNSKNSIFALSCSSPKSIPVTEKEVLQAIADSDGKNLPCVRTYDTDLSQLTLVGTVDFHQALTAAAADGGEVATDHIDAGLDAMVVETVFPAPSCDHATVSTRLFLPARKVKEKAAKLRNSFPKDLFSGSGSKNVLAMTFRQVVLQQIWSFDLTVFQPGEERKMVDLETPREVXASFALSSXDEYLISXL

SEQ ID NO: 186941 - protein, 51 aa, Glycine max
  Clone ID: PAT_MRT3847_13981C.1.pep
DLVAKFPFLLLLLNPQKATNLLFQFRFSIPFHHQLQVCLENVYIFHCSSET

SEQ ID NO: 186942 - protein, 167 aa, Glycine max
  Clone ID: PAT_MRT3847_139820C.1.pep
RAARADLGAQFADVCLPGSAYTEKSATWINTEGRSQLGRVAVVPPGAAREDWKIIRALSEVVGSPLPYDDLIQLRERMWDVSPTLVRYDSREEPSSTILKLGLTTLSKASAPAASSTPFKKPITDFYRTDPISRASVTMASCSKAFTKKEYDVAQVDDSGTAQASYA

SEQ ID NO: 186943 - protein, 181 aa, Glycine max
  Clone ID: PAT_MRT3847_139821C.1.pep
HNVDSFPSSPSNHYHYASLLDSCIAAKALEPGKQLHARLCQLGIAYNLDLATKVVDFYSVCNSLWNAHHLFDKIPKGNLFLWNVLIRAYAWNGPHEAAISLYHQMLEYGPKPDNFTLPFVLKACSALSTIGEGRIIHELVIRSGWERDVFVGAALVDMYAKCGCVVDARHVFDKIVERDAV

SEQ ID NO: 186944 - protein, 186 aa, Glycine max
  unsure (1)..(186): unsure at all Xaa locations
  Clone ID: PAT_MRT3847_139822C.1.pep
MLHFSLRNQMSFSSIRKTQETSRILSILSFSLNLFPVSPYYFLHQSFATQLIPQHKVDSFPSSPSNHYYYASLLESCISAKALEPGKQLHARLCQLGIAYNLDLATKLVNFYSVCNSLRNAHHLFDKIPKGNLFLWNVLDSAYAWNGTHETAISLYHQMXEYGLKPDNFTLPFVLXACSALSTIGE

SEQ ID NO: 186945 - protein, 44 aa, Glycine max
  Clone ID: PAT_MRT3847_139823C.1.pep
AAHTLLFSLDVSTFYIIVNVWEYLPPVSYVHENALLYASNDLIF

SEQ ID NO: 186946 - protein, 43 aa, Glycine max
  Clone ID: PAT_MRT3847_139824C.1.pep
CMKLSYVSPVTLILHLRDRFSGPVSTKIFNFAEALSLGEDNSF

SEQ ID NO: 186947 - protein, 60 aa, Glycine max
  Clone ID: PAT_MRT3847_139825C.1.pep
FRRDIRSRLVPLRLCPPKEKSLWVYVPLFNINPRFPHPKKPIIFYVPNYDFYEMWVSCGA

SEQ ID NO: 186948 - protein, 57 aa, Glycine max
  Clone ID: PAT_MRT3847_139826C.1.pep
RPSLYVHHAHCLLYETESLVWLKYTESGQRQSSLTLAEAWNVSSREVQSIKYAQSEI

SEQ ID NO: 186949 - protein, 101 aa, Glycine max
  unsure (1)..(101): unsure at all Xaa locations
  Clone ID: PAT_MRT3847_139827C.1.pep
TRRFLRVEPWCNLTLWQKLIQRPYENGDPRSLELAKVILRMLMLRRTKETKDKRGXTFLPPPIDIQLIECEQSESERDFYEALFERSEASFVPQLLICAWI

SEQ ID NO: 186950 - protein, 93 aa, Glycine max
  Clone ID: PAT_MRT3847_139828C.1.pep
VVLTAKIQEQSYLKNLCLKQPPLFFFRFPPNLSGGPRAKFFFLKSLLGAPPIPILGKRGALSPNKVMGKNSPLYGFNPPHQKPQKNKRNGGFF

SEQ ID NO: 186951 - protein, 72 aa, Glycine max
  unsure (1)..(72): unsure at all Xaa locations
  Clone ID: PAT_MRT3847_139829C.1.pep
SVWASYNRGIQNKYTVFWYVVGIRHVPVLKYFSIKPLXESSTALXPTNFCERNLVFLTLSSYIVKCLGCGRS

SEQ ID NO: 186952 - protein, 168 aa, Glycine max
  unsure (1)..(168): unsure at all Xaa locations
  Clone ID: PAT_MRT3847_13982C.1.pep
SEVIISXPXXXXXXXXXXXXXXXXXXXXXXXXXXXXXXXXXXXXXXXXXXXXXXXXXXXXXXXXXXXGGXXXXXXXXXXXXXXXXXGGEIFPTPQPLISPLLKLNKFNSQNTLPITISSPNKTPPNLPTKPIQNNPIPLIKISQSFKGLQGKICKLMAYLLPPPFTLC

SEQ ID NO: 186953 - protein, 192 aa, Glycine max
  Clone ID: PAT_MRT3847_139830C.1.pep
MFQPNLMDALEMGQNTSESEVPRILEDEFDSATKSGSENHEGASGEDQDPRPNKKKRYHRHTQHQIQEMEAFFKECPHPDDKQRKELSRELGLEPLQVKFWFQNKRTQMKTQHERHENTNLRTENEKLRADNMRYREALSNASCPNCGGPTAIGEMSFDEHHLRLENARLREEIDRISAIAAKYVGEARGEL

SEQ ID NO: 186954 - protein, 56 aa, Glycine max
  Clone ID: PAT_MRT3847_139831C.1.pep
HQFWQRLATAVDDDENPEDPFVLNGHILCTHSLSPTREMQDLSHKNGRKLAGDERK

SEQ ID NO: 186955 - protein, 651 aa, Glycine max
  Clone ID: PAT_MRT3847_139832C.1.pep
PTRLRRLEKELSRELGLEPLQVKFWFQNKRTQMKTQHERHENTNLRTENEKLRADNMRYREALSNASCPNCGGPTAIGEMSFDEHHLRLENARLREEIDRISAIAAKYVGKPVVNYSNISPSLPPRPLELGVGGAGFGGQPGIGVDMYGAGDLLRSISGPTEADKPIIIELAVAAMEELIGMAQMGEPLWLTTLDGTSTMLNEDEYIRSFPRGIGPKPSGFKCEASRETAVVIMNHVNLVEILMDVNQWSTVFSGIVSRAMTLEVLSTGVAGNYNGALQVMTAELQLPTPLVPTRESYFVRYCKQHADGTWAVVDVSLDNLRPGPSARCRRRPSGCLIQEMPNGYSKVTWVEHVEVDDRGVHNLYKQLVSSGHAFGAKRWVATLDRQCERLASAMATNIPTVDVGVITNQDGRKSMMKLAERMVISFCAGVSASTAHTWTTLSGTGADDVRVMTRKSVDDPGRPPGIVLSAATSFWLPVPPKRVFDFLRDENSRNEWDILSNGGVVQEMAHIANGRDTGNCVSLLRVNSANSSQSNMLILQESCTNSTGSFVIYAPVDIVAMNVVLNGGDPDYVALLPSGFAILPDGTTSHNGSGGIGETGPSGSLLTVAFQILVDSVPTAKLSLGSVATVNNLIACTVERIKASLSGEPA

SEQ ID NO: 186956 - protein, 714 aa, Glycine max
  unsure (1)..(714): unsure at all Xaa locations
  Clone ID: PAT_MRT3847_139833C.1.pep
MVLDPRLVLVLFIGTCILAINGDTDPNDVASLKVLFQSMNSPSQLNWNGDDPCGQSWQGITCSGNRVTEIKLPGRSLSGSLGYQLEPMSSVTNLDLSNNNLGGTIPYQLPPNLQYLNLANNNFNGAIPYSLSEKTSLIVLNLGHNQLQQALNVDFQKLSSLSTLDLSFNSLTGDLPQTMSSLSSIRTMYLQNNQFTGTIDVLANLPLDTLNVGNNHFTGWIPEQLKNIIQKDGNAWSSGPAPPPPPGTPPAVARNRNHKSGGHSPSDGGSSDGGGKKSGIGGGXAIAGIVISILVVGAIVVFFLVKRRPKKSFNDVEKLDNQPLAQNEVHEMNSMQTSSVIDLKTFDTSASPISLKPPPFDRHKSFDEDEFSNKPVIVNKPTKVKKTVTAPTNVKSYSIADLQIATGSFSVEQLLGEGSFGRVYRAQFDEGKVLAVKKIDSSVLPNDMSDDFVELVSNISQLHHPNVTELVGYCSEHGQHLLVYEFHKNGSLHDFLHLPDEYSKPLIWNSRVKIALGIARALEYLHEVCSPSVVHKNIKSANILLDTDFNPHLSDSGLASYIPNANQVLNNNAGSGYEAPEVGLSGHYTLKSDVYSFGVVMLELLSGRKPFDSSRPRSEQALVRWATPQLHDIDALAKMVDPTLEGLYPVKSLSRFADVIALCVQPEPEFRPPMSEVVQALVRLVQRTNMSKRTFGTDQGGSNRGGDDQDTQDM

SEQ ID NO: 186957 - protein, 471 aa, Glycine max
  Clone ID: PAT_MRT3847_139834C.1.pep
MEEEIEYEEVEEEEEVEEIEEEVEEVEEEEEVEVEEEEEEEEEEEEEEEVEVEEVEEDDAMQNHSSDEAKVEDEDEKRKHAELLSLPPHGSEVYIGGIPHASDEDLKSLCERIGEVAEVRIMKGKDSSENKGFGFVTFTSVELASKAIEELNNTEFMGKKIKCSKSQAKHRLFIGNVPRSWGVEDLKKIVTEIGPGVTGVELVKDMKNTNNNRGFAFIDYYNHACAEYSRQKMMSPTFKLGENAPTVSWADPKNAESSAASQVKAVYVKNLPKNVTQEQLKKLFERHGKITKVVLPPAKSGQEKNRIGFVHFAERSNAMKALKNTERYELEGQLLECSLAKPQADQKSGGSNTQKPGPGLLPSYPPHVGYGLVGGAYGALGAGYAAPGLAQPLLYGGGQTPAGMAMMPMLLADGRIGYVLQQPGMQPQAPPSHHRGGRGGGGSGSGNRNAGSSSKGRHNNDGGHGRRYRPY

SEQ ID NO: 186958 - protein, 87 aa, Glycine max
  Clone ID: PAT_MRT3847_139835C.1.pep
YGHVPSLCYYPMANAHRCLQGTDWLEQNSNFSLKCHEYISILYCDFECIFNLDFNKNFLDSLISALGLLISKTLVLSVYHYRFSYRL

SEQ ID NO: 186959 - protein, 126 aa, Glycine max
  unsure (1)..(126): unsure at all Xaa locations
  Clone ID: PAT_MRT3847_139836C.1.pep
AHFGAPRKDERAKPKPXKTHATQRXXGGTXTXRKEQTXPRKKRSPXXQKPQXXXXKSPERRDNGGGNRQRRTAKGKXSRNPKRTRPERDKETNRQRKRRRPSKRHRGKNRSRKRPKRTKETGRTQK

SEQ ID NO: 186960 - protein, 76 aa, Glycine max
  Clone ID: PAT_MRT3847_139837C.1.pep
RIDTDKIAEVNKVWYPLQLHAGDLDGVLFKLKRRRKSPIALVQAKQSLRSTTDSYLLYKSNFHSFATLCIARSYYG

SEQ ID NO: 186961 - protein, 70 aa, Glycine max
  unsure (1)..(70): unsure at all Xaa locations
  Clone ID: PAT_MRT3847_139838C.1.pep
LYPHIXXQHLNLIQIIYLPHPITNARMYSTIFEIFLIYTHPKPSWPLFYSLKLNQSLPFSTGQICLPLSL

SEQ ID NO: 186962 - protein, 160 aa, Glycine max
  Clone ID: PAT_MRT3847_139839C.1.pep
MSSSDIPGFLVRFDASSMSFKCSPRYRKYMACCLMYRGDEVPKDVNAAVSNIKTKRTVQFVDWCPTGFKCGINYQPPTVVPAGDLAKVQRAVCMISNNTAVAEVFARIDYKFDLMYAKRAFVHWYVGEGMEEGEFSEAREDLAALEKDYEEVGAEGEEEE

SEQ ID NO: 186963 - protein, 54 aa, Glycine max
  Clone ID: PAT_MRT3847_13983C.1.pep
EWFSYKHTLHSISTSSLINEEYRTFATTVTTFVPLPPVKQSPLHKTLHPITYSI

SEQ ID NO: 186964 - protein, 98 aa, Glycine max
  unsure (1)..(98): unsure at all Xaa locations
  Clone ID: PAT_MRT3847_139840C.1.pep
FPKHLALGKNSKEIRWPAQSPCCKKKIIILRRRPPTSFGAKYQSGYIGRPAPKNGQKTASFXALRLRPFGKEATKLLFFGGLKKGKKTSQNGCSNQKI

SEQ ID NO: 186965 - protein, 121 aa, Glycine max
  Clone ID: PAT_MRT3847_139841C.1.pep
MSHHPPGAVPPPGAFPPGAVPPPGAHPPGAFPPGAHPPGSMPPGAYPPPGTMPPPGAFPPGSIPPGAFPPGSLPPGSMPPCAFPPGTMPPGAYPPGAFPPGAYPPGHDFKSYKKQFMDQKD

SEQ ID NO: 186966 - protein, 122 aa, Glycine max
  unsure (1)..(122): unsure at all Xaa locations
  Clone ID: PAT_MRT3847_139842C.1.pep
NSSSDELSLDLVIRSRTLVYKVARAANKKGRTSSIRDTFAYSGYAHVKNGYVTCDGHHKCNEDLHLMLATGLEAYKFSIXWAILPPTGAGPVNTTXVQYYNNMLNELISLGNQTHAALHKYY

SEQ ID NO: 186967 - protein, 38 aa, Glycine max
  Clone ID: PAT_MRT3847_139843C.1.pep
KIDCVDNMLSCKAHNMCNLPRIGSFLVLIYLRLVHSWS

SEQ ID NO: 186968 - protein, 86 aa, Glycine max
  Clone ID: PAT_MRT3847_139844C.1.pep
NQSPLLFRPWPPCSALSAAVMSLPPPSPPIARYHVHLFYASFFFFILNILVLVTPCYLGFLDLILLCLNPVMSCFCSDFGSSCLEF

SEQ ID NO: 186969 - protein, 40 aa, Glycine max
  Clone ID: PAT_MRT3847_139845C.1.pep
RTRGRTRGKKKKKKKKKKKKKKKKKKKKKKRKKRSKGSQN

SEQ ID NO: 186970 - protein, 64 aa, Glycine max
  Clone ID: PAT_MRT3847_139846C.1.pep
VKPVKGSTKPFSNQRVPPFIGQFIPSRDIKPTLVPIKFPLMQMSTFRDKSGTPNVMCLYFRMWS

SEQ ID NO: 186971 - protein, 54 aa, Glycine max
  Clone ID: PAT_MRT3847_139847C.1.pep
PNTFFFFNYIFNALFTPSIQSILFINLQLLSFNIIIIYSFTLLNIHISFYTKIY

SEQ ID NO: 186972 - protein, 101 aa, Glycine max
  unsure (1)..(101): unsure at all Xaa locations
  Clone ID: PAT_MRT3847_139848C.1.pep
WEKNPSGGKIKGPGPGAPPPVTLVPXGGENRVKAPPPPEGLFWPKKKTRWGRKNPPPPFFNLGNFPGEPKPPRRGICPYGNFPSPAGGPAPPPKKTGGGRK

SEQ ID NO: 186973 - protein, 125 aa, Glycine max
  unsure (1)..(125): unsure at all Xaa locations
  Clone ID: PAT_MRT3847_139849C.1.pep
SKGRDGARVQKEGEPGRRAGNKNTEPGEGAAMGPGGSRRGTPARTXRGXAEEDSGRGAEFXDAAVKEAGKIKAETKGXKLKDFGATSQSSSDXQTERAKLRQEGEENAKQVPTSGGEKETMKATK

SEQ ID NO: 186974 - protein, 80 aa, Glycine max
  unsure (1)..(80): unsure at all Xaa locations
  Clone ID: PAT_MRT3847_13984C.1.pep
XLGLFVFTIHKLSIRPSMKQVARYLNFDDSLPDISDWRYYDSQSSTNSLSFLEAMSTGKDCIFIQFIFHWQQKYTANKNR

SEQ ID NO: 186975 - protein, 62 aa, Glycine max
  Clone ID: PAT_MRT3847_139850C.1.pep
FVWHVPDVNALLKRKLRNFYGQAHVKVEMCLQAGAPLPEQYKSPMRLDVGIPPPFKKTDMVV

SEQ ID NO: 186976 - protein, 74 aa, Glycine max
  Clone ID: PAT_MRT3847_139851C.1.pep
LSSFLEYLPMNRINFLLTYHNKKCHLPHLFLIDMQQQFDTLMHILPPILFSTITHHLIYLISQSLTYHHLPMEL

SEQ ID NO: 186977 - protein, 59 aa, Glycine max
  Clone ID: PAT_MRT3847_139852C.1.pep
ETHNNFFDIKILRKRKKTHSPNLIPSVRKRAETSCSSTQLSFASLSPSLTILSYNLKLI

SEQ ID NO: 186978 - protein, 279 aa, Glycine max
  unsure (1)..(279): unsure at all Xaa locations
  Clone ID: PAT_MRT3847_139853C.1.pep
MFCGTESYLAPEVLSNLGYDGAAADVWSCGVILYVLMAGYLPFEEADLPTLYRRINAAEFVCPFWFSADTKSFIXKILDPNPKTRVKIEEIRKEPWFKKNYFPVKLGEDEQVNLDDVRAVFDDIEDQYVAERSEITEGGPLIMNAFEMIALSQRLNLSPLFDRHQDYVKRQTRFVSRKPAKVIISSIEAVAESMGLKVHSRNYKVRLEGVSANRVGQFAVVLEVFEVAPSLFMVDVRKATGDTFDYHKFYKNFCGKLGNIIWRPAGTMPNSNLRKQMTL

SEQ ID NO: 186979 - protein, 146 aa, Glycine max
  unsure (1)..(146): unsure at all Xaa locations
  Clone ID: PAT_MRT3847_139854C.1.pep
MAGMGDGPAIGIDLGTTYSCVGVWQHDRVEIIANDQGNRTTPSYVAFTDSERLIGDAAKNQVAMNPINTVFDAKRLIGRRFSDASVQSDIXLWPFKVISGPGEKPLIVVQHRGEEKQFAAEEISSMVLIKMREIAEAYLGSTIKNA

SEQ ID NO: 186980 - protein, 65 aa, Glycine max
  Clone ID: PAT_MRT3847_139855C.1.pep
IMKFKKVDVCEPLFSPSSFWRPDSILFSSSKGFKMSFFHELTASLSLASGLYVEIFFLVTGANQV

SEQ ID NO: 186981 - protein, 54 aa, Glycine max
  Clone ID: PAT_MRT3847_139856C.1.pep
SRSIISDAMPTISEDSVAIGSKIVIHDYELACSLWYCIPAVLQDLDAVLVAPVM

SEQ ID NO: 186982 - protein, 54 aa, Glycine max
  unsure (1)..(54): unsure at all Xaa locations
  Clone ID: PAT_MRT3847_139857C.1.pep
HACVHAYENKKNKKKKKIKERMKKKKXKNKKKKKKKNNKKKKKKLKKKKKKKKR

SEQ ID NO: 186983 - protein, 62 aa, Glycine max
  Clone ID: PAT_MRT3847_139858C.1.pep
SGECNYYLFNIVEAKIKKLTYNRQKTLNLKHFGSNRASYKCFIQFILYFPFEKERSYKFLHV

SEQ ID NO: 186984 - protein, 120 aa, Glycine max
  Clone ID: PAT_MRT3847_139859C.1.pep
TRKIFIMVGKILWCCLYLSTFQCLYSIIADFATPILSLRKEKLQKEYEERNLNSLAICGKNSLGLHVDFEDFTKKMFHFVRMIWYIWRKYNIDYLLILPFWCVVAMICFMLMLYCNWLAL

SEQ ID NO: 186985 - protein, 70 aa, Glycine max
  Clone ID: PAT_MRT3847_13985C.1.pep
HLRYTGLAHCLEHSTTLESARLKNHCQQNVRASYQILSVLFNATENYGWALFENPLTALLLMGLPLLTII

SEQ ID NO: 186986 - protein, 319 aa, Glycine max
  unsure (1)..(319): unsure at all Xaa locations
  Clone ID: PAT_MRT3847_139860C.1.pep
MNSNGYPASSFKIPTVKFTKLFINGHFVDSLSGGEFETIDPRTGEVIARIAEGTKEDIDLAVKASRLAFDHGPWPRMPAVERARIMMKWADLIDQHVEEIAALDAIDAGKLYHMLKGIEIPATANTIRYYAGAADKIHGEVLKPAREFHAYTLLEPVGVGGHIIPWNFPSIMFGPHASXPSLAAGCTMVLKPAEQTPLSGLVYAHLAKLAGIPDGVLNVVPGFGQTAGAAISSHMDIDKVSFTGSTEVGREVMRAAANSNLKPVSLELGGKSPVIVFDDADVDKAAGLALMGILFNKGEICVAGSRVLVQEGIYDEFEK

SEQ ID NO: 186987 - protein, 194 aa, Glycine max
  unsure (1)..(194): unsure at all Xaa locations
  Clone ID: PAT_MRT3847_139861C.1.pep
MNSNGYPASSFKIPTVKFTKLFINGHFVDSLSGGEFETIDPRTGEVIARIAEGTKEDIDLAVKASRLAFDHGPWPRMPAVVRYHLLPPVLFLQETSFNERARIMMKWADLIDQHVEEIAALDAIDAGKLYHMLKAIEIPATANTIRYYAGAADKIHGEVLKPAREFHAYTXLEPVXSVGHIIPRNXLASCLSPS

SEQ ID NO: 186988 - protein, 176 aa, Glycine max
  Clone ID: PAT_MRT3847_139862C.1.pep
MNPFSSGTRLRDMIRAIRACKTAAEERAVVRKECAAIRAAINENDNDYRHRNLAKLMFIHMLGYPTHFGQMECLKLIASPEFPEKRIGYLGLMLLLDERQEVLMLVTNSLKQDLNHTNQYIVGLALCALGNICSAEMARDLAPEVERLLQFRDPNIRKKAALCSIRIIKEVPDLAE

SEQ ID NO: 186989 - protein, 65 aa, Glycine max
  Clone ID: PAT_MRT3847_139863C.1.pep
LKASLPANLMQFVVPANLLGFPSISVPVGYDKERLSIGLQIMGRPWAEATILRVAAEVEVRIFGW

SEQ ID NO: 186990 - protein, 116 aa, Glycine max
  Clone ID: PAT_MRT3847_139864C.1.pep
ARERRFKGALHHHTKQQGSAREAPQEEARVAPAPAPVATLPPPGKGHPTPKNEVANRGGCHHNPAESHESPTDGPPPKAQKAWLEALPDSNSHTFRPPVKHSDCPPDTKSETLSSH

SEQ ID NO: 186991 - protein, 42 aa, Glycine max
  Clone ID: PAT_MRT3847_139865C.1.pep
DFQFFVGESKGYDAGVVLAYPKAGAADPTILAVANALKEVKS

SEQ ID NO: 186992 - protein, 75 aa, Glycine max
  Clone ID: PAT_MRT3847_139866C.1.pep
KWYGPDIKIFLPEGLLDRSEIPHYLTGEVPGDYGYDPFGIIKKPEDSARSLAFVVIHARWTMSGAAGSMMTESLS

SEQ ID NO: 186993 - protein, 86 aa, Glycine max
  Clone ID: PAT_MRT3847_139867C.1.pep
YELLHFFFFKTVTMREERKKFPNKIPTASADPPIHRSTYVFSYENLHNRLYKFSYENLHNRLYKPSSHFFIFLFIQDPDPFRSLDS

SEQ ID NO: 186994 - protein, 85 aa, Glycine max
  unsure (1)..(85): unsure at all Xaa locations
  Clone ID: PAT_MRT3847_139868C.1.pep
XATVLEXLDKALKXKDXTRSLXXYXDVXXGTSTGGXMTAMXXXPXSSXAXSPLFXPSEVVXFYKXXGAKIXEPRXXXDLDKCXXF

SEQ ID NO: 186995 - protein, 51 aa, Glycine max
  Clone ID: PAT_MRT3847_139869C.1.pep
EGLRGKLSIFAFNQSHLMGRTELFELKQLRSHCYLINSVIIISKYQPHKYR

SEQ ID NO: 186996 - protein, 70 aa, Glycine max
  unsure (1)..(70): unsure at all Xaa locations
  Clone ID: PAT_MRT3847_13986C.1.pep
HEQIXSERSXFKLRNMRGGEVVATNHHPLSLSLXARQYNFTTTTVHGHLSITSLLFFFSLQFQISIHKHG

SEQ ID NO: 186997 - protein, 36 aa, Glycine max
  Clone ID: PAT_MRT3847_139870C.1.pep
RGKCKNSIHLNRQHVITVTRESAFLNFLNNNKKYRS

SEQ ID NO: 186998 - protein, 117 aa, Glycine max
  Clone ID: PAT_MRT3847_139871C.1.pep
FIGGPPQTKFKNFRAPFQPQKFCGARFYFQKFLTPMGPFISLKLKWRNFFSPNPQRGKMKLHKPPTFFFYIKIMAPKKPHNGSHWGPSHKTRFSPEEIFFLKNPKKSPWKPPEEKIW

SEQ ID NO: 186999 - protein, 42 aa, Glycine max
  Clone ID: PAT_MRT3847_139872C.1.pep
LNEHKPVKFTFFPHTFLNSVELGMILLNIQRITPISIDIMAC

SEQ ID NO: 187000 - protein, 60 aa, Glycine max
  Clone ID: PAT_MRT3847_139873C.1.pep
LHLLFSFSLLHIFKNQAAASSGAPNLKPQPWETRARTHSPNIRGRRATSNKNTENRGGGG

SEQ ID NO: 187001 - protein, 50 aa, Glycine max
  Clone ID: PAT_MRT3847_139874C.1.pep
RQKGSAARRRQKGSAAIRRQKGTGVRRRQKGTAAIRTTDGFSCQNTTECY

SEQ ID NO: 187002 - protein, 62 aa, Glycine max
  Clone ID: PAT_MRT3847_139875C.1.pep
YPLPLNPNQYQLLIKRVKYSPPPRDRREVHFPLFSRKIDALCSYCARYHPIYPVQGFYIFTL

SEQ ID NO: 187003 - protein, 67 aa, Glycine max
  Clone ID: PAT_MRT3847_139876C.1.pep
PVPQLMTSTLYNHGNSMRPLKGLTETVLKKSETSCADTAYEASPATDLRAEAPQPTTTDNTPASQYC

SEQ ID NO: 187004 - protein, 80 aa, Glycine max
  Clone ID: PAT_MRT3847_139877C.1.pep
GLAGLKLKKRNPSLQKVVVKEWPLTGPSLLNRVKFQTLSQVGIISIIIIKIKIGVLMEIPLLLHSPKPLPIPRSSKSTTS

SEQ ID NO: 187005 - protein, 37 aa, Glycine max
  unsure (1)..(37): unsure at all Xaa locations
  Clone ID: PAT_MRT3847_139878C.1.pep
VMVLNHIGLRVVLDVVYNHLXNXSGPFDEHSVLDKIV

SEQ ID NO: 187006 - protein, 94 aa, Glycine max
  Clone ID: PAT_MRT3847_139879C.1.pep
CVEPRSFHTVVSIMVLQCRSYSRLYTRCESKVKYTPLAKHPLKLANRVGSGGKGPSQAYCLQEMFNMFSCLKKNEFSQSPCSNEITTFQTCAEQ

SEQ ID NO: 187007 - protein, 116 aa, Glycine max
  Clone ID: PAT_MRT3847_13987C.1.pep
IKGKQDRGPKKLTQHPIMGSPLKKKRVWKNSSQTKLKTKPLYLKTWAFRKSQKKKKTPPNPRDKKKGPPTPLFLLLNPQRGGNPKHPNFTKTPRGPITKKTSLPRGEQKKLEQTSP

SEQ ID NO: 187008 - protein, 32 aa, Glycine max
  Clone ID: PAT_MRT3847_139880C.1.pep
KGGHVDQNITYVALRRCRRIYFFIKGVKKIYC

SEQ ID NO: 187009 - protein, 54 aa, Glycine max
  Clone ID: PAT_MRT3847_139881C.1.pep
TSALSPYHKVIPVTTVTGSFIESRAIGHLKCVGDHQHRHDFATFSAVIDTAKSC

SEQ ID NO: 187010 - protein, 357 aa, Glycine max
  Clone ID: PAT_MRT3847_139882C.1.pep
VHVYRNFDRGIHGKGVAVKFAGDGSTPNKALLMRAETNMMLMSPLNDGKPHASKLHQLDIETGKIVTEWKFGKDGADLTMRDITNDTKGSQLDPSESTFLGLDDNRLCQWDMRDRKGIVQNIATASSSPVLHWSQGHQFSRGTNFQCFATTGDGSIVVGSLDGKIRLYSKTSMRMAKTAFPGLGSPITSVDVTYDGKWVLGTTDTYLVLICTLFTDKDGRTKTGFSGRMGNRIPAPRLLKLTPLDSHLAGANNKFHGGHFSWVTENGKQERHLVATVGKFSVIWDFQQVKNSAHECYRNQEGLKSCYCYKIILKDESIVESRFMHDKFAVSDSPEAPLVVATPMKVSSISMSGKRHG

SEQ ID NO: 187011 - protein, 105 aa, Glycine max
  unsure (1)..(105): unsure at all Xaa locations
  Clone ID: PAT_MRT3847_139883C.1.pep
IILVVLVAFLNLIIIFEKFCTTGKGGGINYYAKTCPNVEYIVVKEIXDAKARDRSVTAAILRMHSHDCFARGCDASVLLKAQRSKRSXKDWPPNVSLHALYASEA

SEQ ID NO: 187012 - protein, 60 aa, Glycine max
  Clone ID: PAT_MRT3847_139884C.1.pep
FLESPGWGCTVSCNCHSSGGGDSSGGSRSKFVKREPENLAFSFGGEVFHAGEKSSPANDI

SEQ ID NO: 187013 - protein, 78 aa, Glycine max
  Clone ID: PAT_MRT3847_139885C.1.pep
LLHVWCSLSLVLLEGLSWPLELVWPFFLRFPSPVPFSCFLLLSVILVSISSFCIVFVVFCISFPSFKRCPIYNKYVPT

SEQ ID NO: 187014 - protein, 111 aa, Glycine max
  Clone ID: PAT_MRT3847_139886C.1.pep
NSRFDELTFLRPPFLFFLGVLLKNYWVYASNDLLQQDKIIVLLYSIRNLVYSHKITPTITNHRFTTESTQKIERFSITRSKQHTTCSTQEHNFLPAKNMKTYATHTCLRIK

SEQ ID NO: 187015 - protein, 57 aa, Glycine max
  Clone ID: PAT_MRT3847_139887C.1.pep
FKVLYFDRLKMGLKKKIPGHGFLLKVDSNIGKKGRRPFFPVYYSSKKSIAFVPSYDF

SEQ ID NO: 187016 - protein, 301 aa, Glycine max
  Clone ID: PAT_MRT3847_139888C.1.pep
MQRGTPVRKPHTNTSDLLTWSETPPPDSAAAATTRSGQPSDRISKVLHGGQLTDEEAQTLAKSKPCSGYKMKEMTGSGIFAANGEDSASEANSANLNNRTSIRMCQQAMNGISQISFSTDESISPKKPTSIPEVAKQRELSGTMQSDSDTKSKKQISNAKTKELSGNDIFGPPPEILPRSVAAARTLESKESKDMGEPLPRKAPVEKTAKKPAGGQSNILFGEASVEKTAKKIHNQKFAELTGNNIFQGDVPPGSAEKPLSRAKLREMTGSDIFADGKTEIKDPVRGARKPPGGESSIALV

SEQ ID NO: 187017 - protein, 96 aa, Glycine max
  Clone ID: PAT_MRT3847_139889C.1.pep
WAYISFYCKTLTGSFLTVGGGGKKKAPKNKGQKIKFKALGTGAWADGKEHQTPKTEKKAKKRGGPGLKEPHAKFLKTPKKKGTKENGGEEPFPHFF

SEQ ID NO: 187018 - protein, 49 aa, Glycine max
  Clone ID: PAT_MRT3847_13988C.1.pep
PGCLHIRCYLVLKLVMLLSLVFCSGLSFSGDAIGLISVLVNLLSYPPLN

SEQ ID NO: 187019 - protein, 70 aa, Glycine max
  Clone ID: PAT_MRT3847_139890C.1.pep
PNVKTISLRSLIDRSIIESFGEKGRICITSRVYPSMSIDKNAHLYVFNNGSQSVVISELNAWSMKQAEFS

SEQ ID NO: 187020 - protein, 68 aa, Glycine max
  Clone ID: PAT_MRT3847_139891C.1.pep
FGVFFLWALHFFLLWVFCYWPIFFSKLDANCGSFGYGWFFVGQKETVYLSLFVCLRSCILSQTIDMFF

SEQ ID NO: 187021 - protein, 343 aa, Glycine max
  Clone ID: PAT_MRT3847_139892C.1.pep
MGCSFSGLNALYDSVNGGGDVWINENRFRIVRQLGEGGFAYVYLVKETPNDSAVAAGLSKKLKGSSHLSDDGTYAMKKVLIQNNEQLELVREEIRVSSLFNHPNLLPLLEHAIISVKPTQETSWNHEAYLLFPVHLDGTLLDNAKIMKAKKEFYSTSDVLQIFRQLCAGLKHMHSFDPPHAHNDVKPGNVLITHRKGQPPLAILMDFGSARPARKQISSRSEALQLQEWASEHCSAPFRAPELWDCPSQADIDERTDIWSLGCTLYAIMYGVSPFEYALGESGGSLQLAIVNAQVKWPAGPKPPYPEALHQFVSWMLQPTASMRPRIDDIIIHVDKLVAKFSQ

SEQ ID NO: 187022 - protein, 51 aa, Glycine max
  Clone ID: PAT_MRT3847_139893C.1.pep
SDAYDPHNVLVHQLPLQIFRIISYPSLMIGSLSSSTSSVNDYAYGLVLFRL

SEQ ID NO: 187023 - protein, 112 aa, Glycine max
  unsure (1)..(112): unsure at all Xaa locations
  Clone ID: PAT_MRT3847_139894C.1.pep
FWGDRINQKGVGPAPIPIFQASFENFSNSLKFMPPPKVKSRAMEVAKFIQKXNGVSSPVDSFSRHLPPELPLPIPFAVGDGPANPFPWFFFPLTKFCPFPWGGGKVFFFFLL

SEQ ID NO: 187024 - protein, 158 aa, Glycine max
  unsure (1)..(158): unsure at all Xaa locations
  Clone ID: PAT_MRT3847_139895C.1.pep
RPRVRPRVRRGVRVFEDAKMTSPYIKCTGSFLIAFGNMADDTINVEGHPHKLVQFGEIQEKVVLKYSQEEFLTAWSTHVRPATTLXADGRTYLYAMVHDSTVSTIPGDCVIGVRMATINNMCAYGLNAGISGVXLVGTIHESIRQQTXVWNQMATVRT

SEQ ID NO: 187025 - protein, 66 aa, Glycine max
  Clone ID: PAT_MRT3847_139896C.1.pep
PGTFFGPTFYHPPRPIINLKAPHSFVSISLSLHSLHLFRTNYLILVIWDFPPPPPPPPPPPPPPPQ

SEQ ID NO: 187026 - protein, 75 aa, Glycine max
  unsure (1)..(75): unsure at all Xaa locations
  Clone ID: PAT_MRT3847_139897C.1.pep
MXCXGGNCGCXRXCKCXKXCXGCKMXQDLSYTEXXTTTETLVMGVAXVKAQFESAEMGVPAENDGCKCGANCTAT

SEQ ID NO: 187027 - protein, 55 aa, Glycine max
  Clone ID: PAT_MRT3847_139898C.1.pep
LLATLLVAHDCRGSYDQMFPLLVATWIIKQYIREASCAIWRLSVEAYYVVWCAHC

SEQ ID NO: 187028 - protein, 110 aa, Glycine max
  unsure (1)..(110): unsure at all Xaa locations
  Clone ID: PAT_MRT3847_139899C.1.pep
ARGLKNHLKRLNAPKHWMLDTLGDSFPPKPSSXPHISKKYLPLILILLNLLNYTLTYHKTIPILIHTHLLINKKLKTNNTYPTNFINFISFPTTNHNFHLLFNTKHLFHL

SEQ ID NO: 187029 - protein, 58 aa, Glycine max
  Clone ID: PAT_MRT3847_13989C.1.pep
EHLFRITLADIFKFNINANEVMLISNIKNHGVKKFLFNSYFSRSNVPCAYNQKAQVKF

SEQ ID NO: 187030 - protein, 138 aa, Glycine max
  unsure (1)..(138): unsure at all Xaa locations
  Clone ID: PAT_MRT3847_1398C.1.pep
HPKASRPKKDPLRKNTGXGARTPEEKCPSWRLAEEAHNNLGXETKPEEGVEATKENIHGEQYRPDSKTVNQQADFYARDLEDHPKDTLGIRIEGTAPTKKAYDQKHGYGVEKMNTTLXDEWRNKGNAPALPETMKKNN

SEQ ID NO: 187031 - protein, 100 aa, Glycine max
  Clone ID: PAT_MRT3847_139900C.1.pep
HRENKTKILEFLRKSWEIDRRTEWSIWMVYSKVAMPRQNMSNGVEGTSLSHGMHRSSIITRRFTDDPIQTAAMRAELHRRGIAQMRINNRSLQDMYIFGD

SEQ ID NO: 187032 - protein, 80 aa, Glycine max
  Clone ID: PAT_MRT3847_139901C.1.pep
NTLHGSLNPVCHLGLDPWPPSAAYATLGESQLQPYTTLQPMAAWTICRSTIANWKSSFTRILGSGYCRKFGSLYLFWIAK

SEQ ID NO: 187033 - protein, 59 aa, Glycine max
  Clone ID: PAT_MRT3847_139902C.1.pep
QVYYLPKSSYESRAYKTQLQKNPQSAQVILENSLAHSCYKTHLQEVIHMCLFKFTPGNS

SEQ ID NO: 187034 - protein, 76 aa, Glycine max
  Clone ID: PAT_MRT3847_139903C.1.pep
TPQRLKPDNGIRQSLPSTVLQIQMLTSPQASKCDKFAKHLYPPPPLVCLYLKTIPICFCFIKFHHPAFLGSVFPLQ

SEQ ID NO: 187035 - protein, 47 aa, Glycine max
  Clone ID: PAT_MRT3847_139904C.1.pep
GSRMEMVLCINRYLFILSLSIPHLKSEADDVIDIYVFFIRCSYARNY

SEQ ID NO: 187036 - protein, 62 aa, Glycine max
  Clone ID: PAT_MRT3847_139905C.1.pep
GRFPPYSIKAESHFFVFSWPIQDIHEQLQDALHHNKMQFTELEHGVWPLVLELRRPCNSKAL

SEQ ID NO: 187037 - protein, 91 aa, Glycine max
  Clone ID: PAT_MRT3847_139906C.1.pep
DGEHYASRLEPWRIKSSLQQGQPVESHGFLYPGGIYIGANKTHVLFYQVSQDILHWSDRKSFTRLNWRRFLFSISLSEMYSIKVYHVEVHW

SEQ ID NO: 187038 - protein, 363 aa, Glycine max
  unsure (1)..(363): unsure at all Xaa locations
  Clone ID: PAT_MRT3847_139907C.1.pep
LDRFTEMEYEHCVKAFDSYVSAAKMMDELVGFYGWCKDTGIARSSEYPDVQRITDKLLGTLEGFLKEMSCRPKSPERKLEVKVTVNESQPEADMNKVKALPAPETESFTPPPPMSVAQPNKIAPNSQKQTSDLVDLREDGVSADEQGNKLALALFSGAATVRTEGSWEAFPSNGESEVKSAWETPAAEAGKADWELALVENTSNLSRQKADLAGGFDXTLLNGMYDQGAVRQHVSTTQLSGGSASSVALPGPGKSATPVLALPAPDGTVQAVGPQDPFAASLTVPPPSYVQIADMERKQHLLVQEQQLWQQYGRDGMQGQLGLSRVAGAPGYYAPAPQPMMPYGMPQFGGIGQPGGYYPAPYY

SEQ ID NO: 187039 - protein, 40 aa, Glycine max
  Clone ID: PAT_MRT3847_139908C.1.pep
LYLATLSEGVAHPFMSFAVPFSKKSKKGLVLVLCRICFTC

SEQ ID NO: 187040 - protein, 48 aa, Glycine max
  Clone ID: PAT_MRT3847_139909C.1.pep
KKHRFGFSRVRSICSISRVVGLFPILALGIYCTEIKYTVYYFIKEFNP

SEQ ID NO: 187041 - protein, 47 aa, Glycine max
  Clone ID: PAT_MRT3847_13990C.1.pep
KSLFLYSHFKFSYTDNQIDGSLVGMTFKIVYVKINKLTISICYWIIV

SEQ ID NO: 187042 - protein, 163 aa, Glycine max
  Clone ID: PAT_MRT3847_139910C.1.pep
TAARDDRRGRIILLVCDPFLDKDTSLNFIGFNSFGYQSRLNCCCRRLGDGIVPVDDGGTGVTLLKQGQDLVIVNVDDSRAVLAAQDRSNGSLIAVQLSTDHKPHLPREAERIRICKGRVFAIKNEPGIARVWLPNIDSPGLAMSRAFGDFCLKDFGVISAPDF

SEQ ID NO: 187043 - protein, 309 aa, Glycine max
  Clone ID: PAT_MRT3847_139911C.1.pep
MAKQEVVEGFKFEQRHGKERVRVARVWKTRQGQHFIVEWRVGITLFSDCVNSYLRDDNSDIVATDTMKNTVYAKAKECSDILSAEEFAILLAKHFVSFYQKVTGAIVNIVEKPWERVTVDGQPHEHGFKLGSEKHTTEAIVQKSGSLQLTSGIEGLSVLKTTQSGFVNFIRDKYTALPDTRERMVATEVTALWRYSYESLYSLPQKPLYFTEKYQEVKKVLADTFFGPPKGGVYSPSVQNTLYLMAKATLNRFPDIAYVSLKLPNLHFIPVNISNQDGPIVKFEDDVYLPTDEPHGSIQASLSRLWSKL

SEQ ID NO: 187044 - protein, 39 aa, Glycine max
  Clone ID: PAT_MRT3847_139912C.1.pep
RSSYSRCASKYTIELMHLFLIPWCSSKNCYMLSRTRIFT

SEQ ID NO: 187045 - protein, 309 aa, Glycine max
  Clone ID: PAT_MRT3847_139913C.1.pep
MAQQEVVEGFKFEQRHGKERVRVARVWKTRQGQHFVVEWRVGITLFSDCVNSYLRDDNSDIVATDTMKNTVYAKAKECSDILSAEDFAILLAKHFVSFYKKVTGAIVNIVEKPWERVIVDGQPHEHGFKLGSEKHTTEAIVQKSGSLQLTSGIEGLSVLKTTQSGFVNFIRDKYTALPDTRERILATEVTALWRYSYESQYSLPQKPLYFTEKYQEVKKVLADTFFGPPNGGVYSPSVQNTLYLMAKATLNRFPDIAYVSLKMPNLHFLPVNISNKDGPIVKFEDDVYLPTDEPHGSIQASLSRLWSKL

SEQ ID NO: 187046 - protein, 46 aa, Glycine max
  Clone ID: PAT_MRT3847_139914C.1.pep
LCIALELVHSVSSLSLCSSVVPFYSTYILDCNNRHRYVSCSFSVFS

SEQ ID NO: 187047 - protein, 81 aa, Glycine max
  Clone ID: PAT_MRT3847_139915C.1.pep
EALHQSNIVPPSPSHSPIGSQQSSSKDAQDRTIEKLTRQLDRARRKCEVYRSNLLSVLKDIEEQKLQLSVKVQNIKLEMKD

SEQ ID NO: 187048 - protein, 44 aa, Glycine max
  Clone ID: PAT_MRT3847_139916C.1.pep
KKKFFFFFKKKWGVTYSTNNQPLLRSLDMEGVNLHNATFYYGEG

SEQ ID NO: 187049 - protein, 179 aa, Glycine max
  Clone ID: PAT_MRT3847_139917C.1.pep
MAASVSCSWLTLPSQMRKLSLTSSSSSLSISNSASLSFSRNLSHPLFSQGNCLSLSTVQRRASVVCEAAPKKVDSAVKRARQAEKRRVYNKARKSEIKTRTKKVLEALEVLKKKQDAQAEEILSIEKLIGEAYSIIDKAVRVGTLHRNTGANRKSRLARRKKAVEIHHGWYTPTPEASV

SEQ ID NO: 187050 - protein, 618 aa, Glycine max
  Clone ID: PAT_MRT3847_139918C.1.pep
AVVAVPDGLKAWELLKGRPHNVDLILTEVDLPSISGYALLTLIMEHEICKNIPVIMMSSQDSISTVYKCMLRGAADYLVKPIRKNELRNLWQHVWRRQSSTTGINGLQDESVAQQKVEATAENNAASNRSSGDAACIQRNIELIEKGSDAQSSCTKPDCEAESDPVGNMQEFSLLKCGEAYPSGTETQQVETSFRLGQTLMMHDCHAGGLNVSIRKNGEASTTNDKDTDTEHFGNASISGEAHDNPYVQINSSKEAMDLIGAFHTHPNCSLKNSTVNCTGNFDHSPQLDLSLRRSCPGSFENKLTEERHTLMHSNASAFKRYTTRQLQISMPAVLINFSDQQREQITNCEKNISHIATGSNSDSSTPMQRCIVSPTTVQSKESELATSHPPQGHSLPIPVKGVRFNDLCTAYGSVLPSVFHTQSGPPAMPSPNSVVLLEPNFQVNAFYQSNMKESSSEQLYESRGPNGNTTQNHIVYTQEHKSEHAEDRGHISPTTDQSVSSSFCNGNASHLNSIGYGSNCGSSSNVDQVNTVWAASEGKHKDLTNNANSHRSIQREAALNKFRLKRKERCYEKKVRYESRKKLAEQRPRVKGQFVRQVHPDPLVAEKDGKEYDHSDF

SEQ ID NO: 187051 - protein, 49 aa, Glycine max
  Clone ID: PAT_MRT3847_139919C.1.pep
LSLSLIFSVGNSNLLPFKTRTKPNWTNLKGPIRAPKLFLFWARGVTIYI

SEQ ID NO: 187052 - protein, 60 aa, Glycine max
  Clone ID: PAT_MRT3847_13991C.1.pep
PGSGANVFKSLKSPLFKGCIFGASINNGRDLPPFTQYSWACFMSKFYLPGGHRVMAPYLD

SEQ ID NO: 187053 - protein, 134 aa, Glycine max
  Clone ID: PAT_MRT3847_139920C.1.pep
RLNDCFLLQSSCTKPDCEAESGPVDNIDNIQEFSPLKCGEAYPSGTETQTVETSIRLGQTLMMHASHAGGLNVSICKNGEASTTDADPEHFGNGISVNCTGKFDLSPQLDLSLRRSRPSSFENELTEKAHPDAF

SEQ ID NO: 187054 - protein, 345 aa, Glycine max
  unsure (1)..(345): unsure at all Xaa locations
  Clone ID: PAT_MRT3847_139921C.1.pep
MTKNDKAGTAENKASKDETSSKDSPAAQRATTATFGPRPGPAGLPGNPFDLSAMSGLLNDPSIKELAEQIAKDPSFNQMAEQLQKTFQGAPQDAIPSFDXQQYFSTMQQVMQNPNFMTMAERLGNALMQDPSMSAMLESFSNPSNKDQLEERMTRIKEDPSLKHILEEIETGGPAAMMRYWNDEEVLRKLGQAMGLANSGDVGASAENSGADETEDLGNEDESIVHHTASVGDVEGLKNALAAGADKDEEDSEGRTALHFACGYGEVKCAQVLLEAGAKVDALDKNKNTALHYAAGYGRKECVALLLENGAAVTLQNMDGKTPIDVAKLNNQNEVLKLLEKDAFL

SEQ ID NO: 187055 - protein, 55 aa, Glycine max
  unsure (1)..(55): unsure at all Xaa locations
  Clone ID: PAT_MRT3847_139922C.1.pep
KVIHRILSPYGSHHPSSLYTRTAADIDNKSAFFSASYLMVRCFEKRVKKTKXKKA

SEQ ID NO: 187056 - protein, 71 aa, Glycine max
  Clone ID: PAT_MRT3847_139923C.1.pep
MLKPVVLWWVLSVQNPVGKEKKNLWNSVLVLGLKTQKSKLLPFLFGAKIGLPLFLFLFSPKFLFKSKLVDS

SEQ ID NO: 187057 - protein, 81 aa, Glycine max
  unsure (1)..(81): unsure at all Xaa locations
  Clone ID: PAT_MRT3847_139924C.1.pep
TSILAKPQTFMNLSGESVSLLSGXYSNVGTIVSYYKIPVKQVLVIVDDLDLPFAKLQLLPKGGHGGHNGWVLGVYIFWRRV

SEQ ID NO: 187058 - protein, 385 aa, Glycine max
  unsure (1)..(385): unsure at all Xaa locations
  Clone ID: PAT_MRT3847_139925C.1.pep
MVVRFNPSCLTLSHNPHHTTYFSKQVTVRSSYGKHMKRGGLGRRPQIVSSVLGNSNTEGVSVFVVSDLHTDYAENLKWVECLSNVKHKNDVLLVAGDVAETCSMFVVTMSLLKERFEHVFYVPGNHDLWCRREGQNYVDSLEKLNKLLDACERIGVETNPTVIDEIGIIPLFSWYHESFDKEKDIQAXRIPSLEMACKDFYACKWPEGLSNGDMSLALYFDAMNDKQIDVIKEIQMACDHIITFSHFVPRQELCPEKRMLFYPKLPKIIGSDSLEDRIRSIHGAEGRKDASSCHVFGHTHFCWDAVVDGIRYVQAPLAYPRERKRRMNGGENWLPFCLYADNKFADRLNPCYWSDYYSANPRTPHNTKLAPWVARFYKQTETVDV

SEQ ID NO: 187059 - protein, 261 aa, Glycine max
  Clone ID: PAT_MRT3847_139926C.1.pep
MDSKFRKNNRNSYTSEQDQDTDHDVAQENIAESPPSSTVFNIDGLVPSPTPSSKRRRAIQKRVVQIPMKETEGCRLKGESNTPPSDSWAWRKYGQKPIKGSPYPRGYYRCSSTKGCPARKQVERSCVDPTMLVVTYSSDHNHPWPPSRNHARPTKKPEPVPDPVQPEPEEKFADLGGDDSMITTAEELGWLGEMETTSSTVLESPIMATGYHADVALIPMREEDESLFADLGELPECSVVFRQGLLTERRRYTAPWCGTTS

SEQ ID NO: 187060 - protein, 52 aa, Glycine max
  Clone ID: PAT_MRT3847_139927C.1.pep
VLRQLSCQSLVRSGEVHSIRHMLALLAHLSCHVCQWKKRTRSGSALHKAVTA

SEQ ID NO: 187061 - protein, 79 aa, Glycine max
  Clone ID: PAT_MRT3847_139928C.1.pep
RSFSQSTMYMGVKFLMRIKKLTHLKLLANKGLFLIMQIVGNKYFCPFNNKNLCFSFINRYEICRGYVKGHVLLTHLPFN

SEQ ID NO: 187062 - protein, 81 aa, Glycine max
  Clone ID: PAT_MRT3847_139929C.1.pep
AQDFGLVEEACFPYTGTDSPCIMKEDCFRYYSSEYHYVGGFYGGCNEALMKLELVHHGPMAVAFEVYDDFLHYKKGIYHHT

SEQ ID NO: 187063 - protein, 89 aa, Glycine max
  unsure (1)..(89): unsure at all Xaa locations
  Clone ID: PAT_MRT3847_13992C.1.pep
AVADAGGIFELAKVIIQEDPQPPHALWESAALVLSNVLHSNADYYFKVPVVVLVKLLHSTLEXTISIALNALIVHDRSDASSAEQMWKL

SEQ ID NO: 187064 - protein, 87 aa, Glycine max
  Clone ID: PAT_MRT3847_139930C.1.pep
SRSNTTVYLNFCPYPYNRQTLSYLTHTLLLNRSYQHLTMALPSFSYNPVVPLLNNELYIFIPSIQNLDFLEMLLPFFEPYHLIIVLY

SEQ ID NO: 187065 - protein, 124 aa, Glycine max
  Clone ID: PAT_MRT3847_139931C.1.pep
EAKFLKKENMNLKIQLRETAEAVHAAGELLVRLREAEHAVSVTEENFTKVQQDNEKLKKQMDKLKRKHKMEIITMKQYLAESKLPESALQPLIREDSDVVHKGATSRDDQAWRVEFGAIYQQHY

SEQ ID NO: 187066 - protein, 123 aa, Glycine max
  Clone ID: PAT_MRT3847_139932C.1.pep
MKSTVGVCLLLLVLLEAMCCEGCWKEERDALLVLNSRFDFPLSWDGPDCCQWEGVECNSTTGRVAGLDLRWRWSFPPSNGTKLYINYSDFVVFKDLQKLDLSWNAISGCVWNEARLESWNSLT

SEQ ID NO: 187067 - protein, 85 aa, Glycine max
  unsure (1)..(85): unsure at all Xaa locations
  Clone ID: PAT_MRT3847_139933C.1.pep
ALRVEREREAXFLKKENMSXKIQLRETAEAVHAAGELLVRLREAEHAASAAEENFRKVQQDNEKLKKQMDKLKRKHKMEIVTMKQ

SEQ ID NO: 187068 - protein, 82 aa, Glycine max
  Clone ID: PAT_MRT3847_139934C.1.pep
FMCLREIKPEAKKTTVLSVIPVVAELVMTNGSVGSLSLGIKSLPKFLCYSAKLKNPRSGVAAVKHGDKSAHPDPEDSGNIIG

SEQ ID NO: 187069 - protein, 90 aa, Glycine max
  Clone ID: PAT_MRT3847_139935C.1.pep
LLLSDKRQIVPLKSTSLDIMIRLDHGDVPPARYYFSSRSSCSMLVARSWTCTRDNDRSSSHHMWAPYANCMTSIYVHRTFCPGGVCIPLT

SEQ ID NO: 187070 - protein, 138 aa, Glycine max
  Clone ID: PAT_MRT3847_139936C.1.pep
ISSIIITVQKNPEIFSNRHDDDNKKKNKKKLMNHVCDSESHQHKNVSNSLINCGSITGRRRCRRKRQVLSLGQTRDCHDEQSQKWEGENVHSPHFRTIFEARKWWKNLTNEKEAEKILEKCVSVPFCRLRSRMPRGSS

SEQ ID NO: 187071 - protein, 85 aa, Glycine max
  unsure (1)..(85): unsure at all Xaa locations
  Clone ID: PAT_MRT3847_139937C.1.pep
MASSMISSPAVTTVNRAGAGMAAPFTGLKSMAGFPSXKTNDDSTSIATNGGXVQCIHVWPPIGNTKFETPSDLPDLDDAQVAKEI

SEQ ID NO: 187072 - protein, 68 aa, Glycine max
  unsure (1)..(68): unsure at all Xaa locations
  Clone ID: PAT_MRT3847_139938C.1.pep
GRNLQNFSSFFFFFFYIFXKCRFVYSKETTHISKISFSFYXFLMPFIILNDHYHNIILLLFYSHKTNI

SEQ ID NO: 187073 - protein, 76 aa, Glycine max
  Clone ID: PAT_MRT3847_139939C.1.pep
KWPPKSSRAQDVSFGLLKNIPSLYVRVPVPRYEKKKVQTWPCLWNGIPNPCSLFARKFPPEPMDSLLRLLAHYSGP

SEQ ID NO: 187074 - protein, 34 aa, Glycine max
  unsure (1)..(34): unsure at all Xaa locations
  Clone ID: PAT_MRT3847_13993C.1.pep
RTRSTLSGXVMRLTKFHENCWSTCGISHKGTKFM

SEQ ID NO: 187075 - protein, 99 aa, Glycine max
  Clone ID: PAT_MRT3847_139940C.1.pep
ESGRAKGPFGIFFIFPPVGKVLGRLPTLGGVQKKAANKTFKGHGWGLKKSHLRGVGEVKVPLRSLPTPGGFFGWKQKDHVSLDQIILASFPEILIHSKK

SEQ ID NO: 187076 - protein, 66 aa, Glycine max
  Clone ID: PAT_MRT3847_139941C.1.pep
IRLELLFSSLRGAPSSQIRSAPFTKRRLIDYWSILTLWVDYQFSFLHCSTSLKLTVEHVLIICMTP

SEQ ID NO: 187077 - protein, 59 aa, Glycine max
  Clone ID: PAT_MRT3847_139942C.1.pep
MEKLITLLKPTSDKKDYDEVDMANIHKKKEEEKALLELKATAQQKGSFGGSGLMKSGKK

SEQ ID NO: 187078 - protein, 72 aa, Glycine max
  Clone ID: PAT_MRT3847_139943C.1.pep
NAYFQNLPKGLGVLKSDHGLYGDPSTRPFVETFAKDQNRFFQVFARAMPKLSLLNVQTGRKGEIRRRCDQIN

SEQ ID NO: 187079 - protein, 52 aa, Glycine max
  Clone ID: PAT_MRT3847_139944C.1.pep
LFLKISQVFSLVVLLGFPNVRKKKKGLEPPFHYLCVRDISLTKDIISKIPTV

SEQ ID NO: 187080 - protein, 69 aa, Glycine max
  Clone ID: PAT_MRT3847_139945C.1.pep
GLRPTLHFLTCSPDLDPTRRSDSAGHSAGLVAGRSFEPRRIRSGWSRKSKEDVLACSAGDIQSVQELHA

SEQ ID NO: 187081 - protein, 136 aa, Glycine max
  unsure (1)..(136): unsure at all Xaa locations
  Clone ID: PAT_MRT3847_139946C.1.pep
HTSFVEGNGQYEGVTDALGNVKSLKETDLLNNMLSXRIRRVFXELKNLTIMNLLRYKLNXHDPLNKHIDTASKSVVSNXENNSTGSIPENXVKNGRLTLATTMTDIITQTLPTYNMHEKRLNTMITNGNYYLLTHI

SEQ ID NO: 187082 - protein, 114 aa, Glycine max
  unsure (1)..(114): unsure at all Xaa locations
  Clone ID: PAT_MRT3847_139947C.1.pep
WIRICHAGIKKTGAEDIACCGQQVRTDKENGNRAALCPGSRGCHKCINHCVRKGAIHFXGREHPCHDLKINMILSCAGPYRLLTGRRGSSRKSHVHFATSGYMQLSMYVSHATT

SEQ ID NO: 187083 - protein, 50 aa, Glycine max
  Clone ID: PAT_MRT3847_139948C.1.pep
WREHERKHDRGVLSFRVRHVTFSCMKTLTPQSLAPLTLPLKNCLNKSKLS

SEQ ID NO: 187084 - protein, 754 aa, Glycine max
  Clone ID: PAT_MRT3847_139949C.1.pep
MENTDPCRHFLKDVKRIIIKVGTAVVTRQDGRLAVGKLGALCEQIKELNSLGYEIILVSSGAVGLGRQRLRYRKLINSSFADLQKPQVELDGKACAAVGQNSLMALYDVLFSQLDVTSAQLLVTDNDFRDKDFRMQLSETMKSLLALKVIPIFNENDAVSTRKAPYEDSSGIFWDNDSLSALLALELKADLLILLSDVEGLYSGPPSDPRSKLIHTYIKEKHQSEITFGDKSRVGRGGMTAKVKASIHAAEAGIPVIITSGYAAENIIKVLQGQRIGTLFHKDAHKWAPVKEVDAREMAVAARDCSRRLQALSSEERKQILLKIADALEAHQNEIRIENEADVADAKEAGYEKSLVARLLASLANNIRIIANMEDPIGRVLKRTELAEGLILEKTSSSLGVLLIVFESRPDALVQIASLAIRSGNGLLLKGGKEAKRSNAILHKVITEAIPDIVGSKLIGLVTSRAEIPELLKLDDVIDLVIPRGSNKLVTQIKSSTKIPVLGHADGICHVYVDKSADLEMARRIVLDAKIDYPAGCNAMETLLVHKDLVEKGWLNSIIIDLRTEGVTLYGGPKASPLLNIPMARMLHHEYNSLACTVEIVDDVYAAIDHINLYGRHATLYFLIIAHTDSVVAEDHEVANVFLRQVDSAAVFHNASTRFSDGARFGLGAEVGISTSRIHARGPVGVDGLLTTRWILKGSGQIVDGDKAIDYTHRDLGLKLYNSVEEGYLCYLVLLLLRSRCYTRELLFSPTLEN

SEQ ID NO: 187085 - protein, 51 aa, Glycine max
  Clone ID: PAT_MRT3847_13994C.1.pep
QSVCASHFFLLTSPFLTTKTDRNSPYTPHKSMYTTGDQICLQTIGNGSKLQ

SEQ ID NO: 187086 - protein, 547 aa, Glycine max
  Clone ID: PAT_MRT3847_139950C.1.pep
VRLQYRRIPGSTQRPALELKADLLVLLSDVEGLYSGPPSDPHSKLIHTYIKEKHQNEITFGDKSRVGRGGMTAKVKAAVHAADAGIPVVITSGFAAENIINVLQGQRIGTLFHKDAHKWAPVKEVDAREMAVAARDCSRRLQALSSEERKQILLKIADALEAHQNEIRIENEADVAVAQEAGYEKSLVARLAIKPGKIASLANNMRIIANMEDPIGQVLKRTELSDGLILEKTSSPLGVLLIVFESRPDALVQIASLAIRSGNGLLLKGGKEARRSNAILHKVITEAIPDTVGGKLIGLVTSREEIPELLKLDDVIDLVIPRGSNKLVSQIKSSTKIPVLGHADGVCHVYVDKSANVEMARRIVLDAKIDYPAACNAMETLLVHKDLVEKGWLNGIVVDLRTEGVKLYGGPRASSLLNIPQAQTFHHEYSSLACTVEIVDDVYAAIDHINLYGSAHTDSIVAEDKEVANVFLRQVDSAAVFHNASTRFSDGARFGLGAEVGISTSRIHARGPVGVEGLLTTRWILKGSGQVVDGDKGIVYTHKDIAT

SEQ ID NO: 187087 - protein, 256 aa, Glycine max
  unsure (1)..(256): unsure at all Xaa locations
  Clone ID: PAT_MRT3847_139951C.1.pep
MADRSRSFMKDVKRVVIKVGTAVVTREEGRLAVGRLGALCEQIKQLNSLGYDIILVSSGAVGIGRQRLRYRKLINSSFADLQKPQLELDGKACAAVGQNSLMALYDILFTQLDVTSAQLLVTDNDFRDEDFRKQLTETVKSLLSLKVIPVFNENDAVSTRKAPYEDSSGIFWDNDSLSALLALEVKADLLVLLSDVEGLYSGPXSDPHSKLIHTYIKEKHQNEITXFGDKSRVGXRGGMTAKVKAAVHAADAGISC

SEQ ID NO: 187088 - protein, 92 aa, Glycine max
  unsure (1)..(92): unsure at all Xaa locations
  Clone ID: PAT_MRT3847_139952C.1.pep
TAKEHLRRLSMKEREHGEKERQVSEAEEHGTIGXMENIHTYMTMFQRAQXLRRRAEDYYRCXITPSARKPLCNRCTYNLVLPGSEKRYYSHA

SEQ ID NO: 187089 - protein, 361 aa, Glycine max
  unsure (1)..(361): unsure at all Xaa locations
  Clone ID: PAT_MRT3847_139953C.1.pep
MGVCTSKPQKPNPYALREAEAEADPSQIPKTTLSPAGADTPRRKDDAITGKRSPFYPFYSPSPARFLKKSPAPAGGSRSASSTPRRFFRRPFPPSSPAKHIRAVLARRQGKKASATAAIPEEGEEGAADLDKRFGFSKEFTSRLEVGEEVGRGHFGYTCSAKFKKGELKGQQVAVKVIPKAKMTTAIAIEDVRREVKILRALNGHSNLIQFYDAFEDQHNVYIVMELCEXEGGARDESCEKTTEGKYSXDDAKAVMVQILNVVAFCHLQGVVHRDLKPENFLYAKKDESSELKAIDFGLSDFVRPDERLNDIVGSAYYVAPEALHRSYSTEADVWSIGVIAARARAESARDGCEKTTEEAH

SEQ ID NO: 187090 - protein, 753 aa, Glycine max
  Clone ID: PAT_MRT3847_139954C.1.pep
MENTDPCRHFLKDVKRIIIKVGTAVVTRQDGRLAVGKLGALCEQIKELNSLGYEIILVSSGAVGLGRQRLRYRKLINSSFADLQKPQVELDGKACAAVGQNSLMALYDVLFSQLDVTSAQLLVTDNDFRDKDFRMQLSETMKSLLALKVIPIFNENDAVSTRKAPYEDSSGIFWDNDSLSALLALELKADLLILLSDVEGLYSGPPSDPRSKLIHTYIKEKHQSEITFGDKSRVGRGGMTAKVKASIHAAEAGIPVIITRNFNSKNTMKSIIYATHFMVIFILQIGFSLVLPHFSGYAAENIIKVLQGQRIGTLFHKDAHKWAPVKEVDAREMAVAARDCSRRLQALSSEERKQILLKIADALEAHQNEIRIENEADVADAKEAGYEKSLVARLLASLANNIRIIANMEDPIGRVLKRTELAEGLILEKTSSSLGVLLIVFESRPDALVQIASLAIRSGNGLLLKGGKEAKRSNAILHKVITEAIPDIVGSKLIGLVTSRAEIPELLKLDDVIDLVIPRGSNKLVTQIKSSTKIPVLGHADGICHVYVDKSADLEMARRIVLDAKIDYPAGCNAMETLLVHKDLVEKGWLNSIIIDLRTEGVTLYGGPKASPLLNIPMARMLHHEYNSLACTVEIVDDVYAAIDHINLYGRHATLYFLIIAHTDSVVAEDHEVANVFLRQVDSAAVFHNASTRFSDGARFGLGAEVGISTSRIHARGPVGVDGLLTTRWILKGSGQIVDGDKAVNYTHRDLSI

SEQ ID NO: 187091 - protein, 215 aa, Glycine max
  Clone ID: PAT_MRT3847_139955C.1.pep
MANFITFFIPLALTLLFSSLVTASYHQSISPSLLRSREKLTHLRFYFHEIFTSDKPSNLVIDPPKVVADSPLPFGSQVVIEDPLTIGPDVESKQIGKAQGFYLSATQRPGLELEIVMGMALTFLEGEFNGSSLSVLGRNKIFNEVRELPIIGGTGEFRFARGYILARSVKVDYHKGDATVEYNAYVYHYSSTSSSSHEIFNDGVQFMTDPILSKI

SEQ ID NO: 187092 - protein, 83 aa, Glycine max
  Clone ID: PAT_MRT3847_139956C.1.pep
FWKGPTGVFGFVKFPPGPRVLPQKLPNFGGKGVPPPLGGGGPLPPVEKVGLSPQITPLSPGGGAPLKLFWGKPPPGAPAFYKA

SEQ ID NO: 187093 - protein, 490 aa, Glycine max
  unsure (1)..(490): unsure at all Xaa locations
  Clone ID: PAT_MRT3847_139957C.1.pep
AIPEEGEEGAADLDKRFGFSKEFTSXLEVGEEXXXGHFGYTCSAKFKKGELKGQQVAVKVIPKAKMTTAIAIEDVRREVKILRALNGHSNLIQFYDAFEDQDNVYIVMELCEGGELLDMILSRGGKYSRLDAKAVMVQILNXVVAFCHLQGVVHRDLKPXENFLYAKKDESSELKAIDFGLSDFVRPDEIRLEYGCEKTTEGGSAYYVAPEVLHRSYSTEADVWSIGVIAYILLCGSRPFWARTESGIFRAVLKADPSFDETPWPSLSLEAKDFVKRLLNKDPRKRISAAQALSHPWIRNYNNVKVPLDILIFKLMKTYMRSSSLRKAALRALSKTLTADELYYLREQFALLEPSKNGSISLENVNKALMKYATDAMKESRILDFLSSLNSLQYRRMDFEEFCAAALSVHQLEALDRWEQHARCAYELFDKDGNRAIVIEELVSELGLGPSIPVHVVLHDWIRHTDGKLSFLGFVKLLHGVSSRSLAKVQ

SEQ ID NO: 187094 - protein, 105 aa, Glycine max
  Clone ID: PAT_MRT3847_139959C.1.pep
RSPLWAFDSANYVLKVIPGPSLVISLIVGSPHLQPLLSPTIPGFTFVRRIFIAGLYPIHPNLNNYRLLSTIMCARASCHTFYYNFRVAPPPPPPPPPPKKEDVIQ

SEQ ID NO: 187095 - protein, 48 aa, Glycine max
  Clone ID: PAT_MRT3847_13995C.1.pep
FYSQLSLVASCFSSYLPKTTQHCGSFQHLNGSLPPLIKWHLNPHLIRT

SEQ ID NO: 187096 - protein, 54 aa, Glycine max
  Clone ID: PAT_MRT3847_139960C.1.pep
ARTTNEGHGCDKTTQRDTTDQDKTIHSRRRKEEDLDSPVNTLSHHLLPTYMHRW

SEQ ID NO: 187097 - protein, 70 aa, Glycine max
  Clone ID: PAT_MRT3847_139961C.1.pep
LHSVVSVPWCFQGLRSYSSLKLVAYMLTFLSATTQQQEEDHRKNQAHHRHQKVNMLHLKRSLLNQQVLQI

SEQ ID NO: 187098 - protein, 44 aa, Glycine max
  Clone ID: PAT_MRT3847_139962C.1.pep
QFCSKDKESRSPPGGGFHMLFQEGLLRYKIRFFDLNALKRMGCQ

SEQ ID NO: 187099 - protein, 69 aa, Glycine max
  Clone ID: PAT_MRT3847_139963C.1.pep
KKKKKKKKKKKKKKKGRTNLKEGRLIYGCLPKISFFLMSSFFYGVAELFYVADWKNLGVWGIFLALPQH

SEQ ID NO: 187100 - protein, 79 aa, Glycine max
  Clone ID: PAT_MRT3847_139964C.1.pep
LVYIYKTKLCGYKIHQIQSSTAQKEKDFTFQTVTSKICSTRHVTPWKHSSNALVPRQKTRLFFSIAYIQGQRAPFRVCP

SEQ ID NO: 187101 - protein, 50 aa, Glycine max
  Clone ID: PAT_MRT3847_139965C.1.pep
FFQFNQNIIKTHIFKFSPPIYINQFINLLTQKPIPYPKPPNKNNLSHTPS

SEQ ID NO: 187102 - protein, 38 aa, Glycine max
  Clone ID: PAT_MRT3847_139966C.1.pep
AALPSSPIPTVLVSIGGSESFYRVSEGELSVALPVVDA

SEQ ID NO: 187103 - protein, 86 aa, Glycine max
  unsure (1)..(86): unsure at all Xaa locations
  Clone ID: PAT_MRT3847_139967C.1.pep
SLLLSVRLSXXXCXKAXXPLLMXSRSXDXXVGVTSCXXCILRXLXXXSLESKRLGLRHCXSTRGITXRTXVGAXGRTKRRGIESFR

SEQ ID NO: 187104 - protein, 159 aa, Glycine max
  unsure (1)..(159): unsure at all Xaa locations
  Clone ID: PAT_MRT3847_139968C.1.pep
MEMERVFEFPHTHMDRRPRKRARLGWDIPEVPKAQVGLFCGQDVGTISSFAPSRGPSENTTSSLFVKPVARNGSPPWRDDDKDGHYMFALGENLTSRYKIHSKMGEGTFGQVLECWDRERKEMVAVKIVRGIKKYREAAMIEXIEVLQQLGKHDKGGNR

SEQ ID NO: 187105 - protein, 80 aa, Glycine max
  Clone ID: PAT_MRT3847_139969C.1.pep
ILVYKGSIYLFISVLLFWNLDNNNNNNTYRLYMFDSCFSFDVFALVFYQRYIMMVDQSCLLMEGRLPLVTFMVGECLTFR

SEQ ID NO: 187106 - protein, 202 aa, Glycine max
  unsure (1)..(202): unsure at all Xaa locations
  Clone ID: PAT_MRT3847_13996C.1.pep
MPRYDDKYGNTRLYVGHLSSRTRSRDLERAFSRYGRVRGVDMKNDFAFVDFSDPRDADDARYNLDGREVEGRHVTVEFAKGGPRGSWESSGQGQGPPTGPGRCFDCGXDGHWARDCKTGDGKNKCFLSGERGHIEKNCKNSPKKLRHGXKSFRSHSAHHGRRRDRSYSRDRSYSRSISPVGRERSPVSEDRSESSTLLDKKA

SEQ ID NO: 187107 - protein, 128 aa, Glycine max
  unsure (1)..(128): unsure at all Xaa locations
  Clone ID: PAT_MRT3847_139970C.1.pep
GPQDKIHSKMGEGTFGQVLECWDRERKEMVAVKIVRGIKKYREAAMIEIEVLQQLGKHDKGGXSCVQIRNWFDYRNHICIVFEKLGPSLYDFLRKNNYRSFPIDLVREIGRQLLECIAFMHDLRVIHT

SEQ ID NO: 187108 - protein, 437 aa, Glycine max
  unsure (1)..(437): unsure at all Xaa locations
  Clone ID: PAT_MRT3847_139971C.1.pep
MEMERVFEFPHTHMDRRPRKRARLGWDIPEVPKAQVGLFCGQDVGTISSFAPSRGPSENTTSSLFVKPVARNGSPPWRDDDKDGHYMFALGENLTSRYKIHSKMGEGTFGQVLECWDRERKEMVAVKIVRGIKKYREAAMIEIEVLQQLGKHDKGGNRCVQIRNWFDYRNHICIVFEKLGPSLYDFLRKNNYRSFPIDLVREIGRQLLECIAFMHDLRMIHTDLKPENILLVSPEYVKVPDYKSSSRSPSSYFKRVPKSSAIKVIDFGSTTYEREDQNYIVSTRHYRAPEELISGMXAILGLGWSYPCDIWSVGCILVELCTGEALFQTHENLEHLAMMERVLGPIPQQMLKRVDRHAEKYVRRGRLDWPEGAISRESIKAVMKLPRLQNLIMQHVDHSAGDLIHLLQGLLRYDPFERLTARDALRHSFFMRDHLRR

SEQ ID NO: 187109 - protein, 39 aa, Glycine max
  Clone ID: PAT_MRT3847_139972C.1.pep
RKLDFHLPMTKKKKLSVRLFFRILFFKINIKYEKLKFQF

SEQ ID NO: 187110 - protein, 75 aa, Glycine max
  unsure (1)..(75): unsure at all Xaa locations
  Clone ID: PAT_MRT3847_139973C.1.pep
GGVFLXLLLXLLFYFRXKTQTGLEFITCPSSSSPPYFSSSPPSNLIPQITDTKLSSSYLFTPTNLSPSTTLTKPT

SEQ ID NO: 187111 - protein, 84 aa, Glycine max
  unsure (1)..(84): unsure at all Xaa locations
  Clone ID: PAT_MRT3847_139974C.1.pep
DSLPVVVDSLEGVAHLGELYSGVYVPLPTKSILXDTSNEWKLVLPCDKISSVSTXTDERLVGTEHEGSEPFFGGIQIYANPMMP

SEQ ID NO: 187112 - protein, 80 aa, Glycine max
  Clone ID: PAT_MRT3847_139975C.1.pep
MSCNGCRVLRKGCSDTCPLRSCLQWIESSESQRHATLFLAKFFGRSDLMSFISSVPETKRPGTVQHSTLYSLIIHAFTCA

SEQ ID NO: 187113 - protein, 62 aa, Glycine max
  Clone ID: PAT_MRT3847_139976C.1.pep
KKGPPQFHGSLMTPIIHREFFPSPSTSYIQKMVMSPLRNIIIVTLPGFPPPKIIIFFSKHVN

SEQ ID NO: 187114 - protein, 50 aa, Glycine max
  Clone ID: PAT_MRT3847_139977C.1.pep
DYPYEKLVLSSKNKPHRPRCNGPCYRQIQIKSSRNVLNQVLYDNKKKLVL

SEQ ID NO: 187115 - protein, 57 aa, Glycine max
  unsure (1)..(57): unsure at all Xaa locations
  Clone ID: PAT_MRT3847_139978C.1.pep
EHHKFCWLCXGXXXXMPPXVXSNXRMTQRLVIXGNXVLDWPSYSTSRGXLDQXDVXG

SEQ ID NO: 187116 - protein, 126 aa, Glycine max
  Clone ID: PAT_MRT3847_139979C.1.pep
IQVFFIWVWAPCFFLWVGGNLERGFCFQFFFLKGLKGPPFLSFKKEKKKWVYPGSFFGGKYNSGGGVLKPPSWALKKRGETKKKIFPPGFFPPKKKKKKKKKKKKKKQKKKKRKKTKKSKKKKRTT

SEQ ID NO: 187117 - protein, 67 aa, Glycine max
  unsure (1)..(67): unsure at all Xaa locations
  Clone ID: PAT_MRT3847_13997C.1.pep
FPDLVRYISLGLRVCTFTYDGLLSAYLDLSVFMTFYAFWYASVSIDFHSPVIXENVPALWLLRVGLN

SEQ ID NO: 187118 - protein, 110 aa, Glycine max
  Clone ID: PAT_MRT3847_139980C.1.pep
NMKQNDRRRECLSNSNSESCSFLLMGREPPQNLLPSKHDFPRLVLVVALASLVAWTCNFLFTPSKPFCDPNLHSPDYFSGLSLSLSLSLSLSLSMSFICFSNFPHFLFVL

SEQ ID NO: 187119 - protein, 190 aa, Glycine max
  Clone ID: PAT_MRT3847_139981C.1.pep
MEAFTLLKYWRGGGALGHPPSSDTPSSRTATTTTILTAVENENATESDDDDDGPFFDLEFTVPDEDAHENPNANHTQEEEDEDINIEESDGEREFKFTLSPSSNDRSDPNLSPLSPSDDLFFKGKLVHVDPSEPNSKPQFTASLLKSATKFRVFMLGLKKPKPNDKDSNNGSDSAIPEAHKDKKHFTVKF

SEQ ID NO: 187120 - protein, 78 aa, Glycine max
  Clone ID: PAT_MRT3847_139982C.1.pep
CFMSHLKPFKEQMSSECRLKPTKLNLCHIVYILKILLYCLEFKYFILFFIILYLFYNLNILVQFKLLVKYFFLCQLSC

SEQ ID NO: 187121 - protein, 211 aa, Glycine max
  Clone ID: PAT_MRT3847_139983C.1.pep
MQDPTAFQGVKPPQFPEQEQLKCPRCDSNNTKFCYYNNYNLSQPRHFCKNCRRYWTKGGALRNIPVGGGSRKTTKRSSSTLSKRSSAPSSSSAVSDPDPTRICTNPVDQDQRVLNIGGGSFSSLLASSGHFGTLLEGLNPSGSGLKMGEFVEGVSSDPGLNLDSGLNPDLQVQSNENSESFLGLQNGDSSCWNGTHGWSDLAIYTPGPSFQ

SEQ ID NO: 187122 - protein, 80 aa, Glycine max
  unsure (1)..(80): unsure at all Xaa locations
  Clone ID: PAT_MRT3847_139984C.1.pep
EXSSRLSTYGQXPRSRLGXFLMXTLXTWNMASXPDGMMPSDSFLXCXPXRFNTFFSXTGSGKARXFATSSSDXEPXVIDE

SEQ ID NO: 187123 - protein, 164 aa, Glycine max
  Clone ID: PAT_MRT3847_139985C.1.pep
MGRSPCCEENVGVKKGPWTPEEDEKLIDYISKHGHGSWRTLPKRAGLNRCGKSCRLRWTNYLTPDIKRGKFSEEDERIIINLHSVLGNKWSKIATHLPGRTDNEIKNYWNTHIRKKLLKMGIDPETHKPRTDLNHLMSLSQLLGTSNLSSAMNTTWGNNPLGLQ

SEQ ID NO: 187124 - protein, 239 aa, Glycine max
  unsure (1)..(239): unsure at all Xaa locations
  Clone ID: PAT_MRT3847_139986C.1.pep
GRLYSKLLEAVLKTGNRMNVGTTRGGARAFKLDALLKLADVRGADGKTTXVHFVVQEIVRPDGIGVSDSIMGKISQRSKNRSEEEKEEDYKRMGLELVSGLSTELYNVKKTATIDLDVLASSVSNLSEGMKKLQHLVEKELLKNERSMNFVQCMKSFLNYADGNLKELRGDEDIVLARVKEITEYFHGDVISKEDGNPLRIFVIVRDFLGMLDNVCKELRRSKAPRSLNPLAMLPLDRS

SEQ ID NO: 187125 - protein, 163 aa, Glycine max
  unsure (1)..(163): unsure at all Xaa locations
  Clone ID: PAT_MRT3847_139987C.1.pep
KFTHLGSSNHMEKLIPFSGILSSDPAQNXVKIHYCGGASFAGHPESEQRGSGLFFRGXVIWKTIMDELLSTGLSKAKQALLSGCSAGGLATLIHXNFRQVLPKEATVECLADAGFFLDXGLAKSLHKDCIAKMEPYKCLFPSEIVKNIKTPLFLVHPAYDFWQ

SEQ ID NO: 187126 - protein, 432 aa, Glycine max
  unsure (1)..(432): unsure at all Xaa locations
  Clone ID: PAT_MRT3847_139988C.1.pep
MPSWPSSSSALTAPNLRLRTLRIWASKDYAIAAFIFLILFSLLLFSHLDSRSHSRYDSQPHHSKLVPXTLLRNANQTRALCLDGSAPRDHGQSGAGSGARNXLSHIEGGGRRRRQTCLAIPAILSCHQXKFTHLGSSNHMEKLIPFSGILSSDPAQNXVKIHYCGGASFAGHPESEQRGSGLFFRGXVIWKTIMDELLSTGLSKAKQALLSGCSAGGLATLIHXNFRQVLPKEATVECLADAXFFLDEKDISGNSTLRSFYHDVAQLQGLAKSLHKDCIAKMEPSKCLFPSEIAKNIKTPLFLVHPAYDFWQIRNILVPQGSDPDGHWQRCRLDIRSCNANMIDKLDSYRGSLLKAVNEFQQRKEIGMFIDSCFVHCQTEMEVTWHSPNSPKINDKTIAESVGDWYFDREAVKRIDCSSFSCNPTCHNMDFT

SEQ ID NO: 187127 - protein, 280 aa, Glycine max
  unsure (1)..(280): unsure at all Xaa locations
  Clone ID: PAT_MRT3847_139989C.1.pep
PRVRPRVRGTLRPGTPGPGGHPTMHYFNPSFRTSSTPPRKSPFLSSDKEGSGPHGAGLHSSNRLSLETDSNGSSTVTCHKCGEQFNKWDAAEAHHLSKHAVTELVIRHXDSLRKALIVCRVSAGGVHRXSRTFRRLQDKQALIHWLGKLVFIQIHRSFICXGSSTLCLSXMCSVCRSIRNVFSAKYELKGGIGVVTTSTSGRAFESIEIIGEEPSLRKALIVCRVIAGRVHRPLENIQEMAAQTGFDSLAGKVGLYSNIEELYLLNPRALLPCFVVICKP

SEQ ID NO: 187128 - protein, 81 aa, Glycine max
  Clone ID: PAT_MRT3847_13998C.1.pep
NSIPNFMDPKLRFFIIIFLLLFVELYPDRVNSLSMRVDVEKSPTKVSFQMKGRKLLNLDTDDYKESGANPRNDQGKTKPHG

SEQ ID NO: 187129 - protein, 73 aa, Glycine max
  unsure (1)..(73): unsure at all Xaa locations
  Clone ID: PAT_MRT3847_139990C.1.pep
ITFTVGDKPFTLPPXQYIFKTGKGISKVCPNGFIAFDNPPPPGPLWIFGDVFMRGYHPVFSYGNLRVGFSQTA

SEQ ID NO: 187130 - protein, 143 aa, Glycine max
  unsure (1)..(143): unsure at all Xaa locations
  Clone ID: PAT_MRT3847_139991C.1.pep
LRVRPRVRGREGFPNTIAQIEPDMNPRFQLLSTTTNGDYVQGKDLAMAKVNGARAAVGLTSRHTPTPLTESGSKKDRGLIAEYIGRMSNVAQNGKQPQEEDXSEGNLSFDIKPRSRXEKDFSTKAKSVSGKTLKMKKWCRTHH

SEQ ID NO: 187131 - protein, 91 aa, Glycine max
  Clone ID: PAT_MRT3847_139992C.1.pep
KSTVMEVSSLKARSETGSVNMLILGGLELKEHIFRLHEMLVDHVCCYTPFILPDRKELLESTVSLQPKWYPCLVPPENLPVLTNKWTQCSC

SEQ ID NO: 187132 - protein, 59 aa, Glycine max
  Clone ID: PAT_MRT3847_139993C.1.pep
KNKITAWWPAFLMPLTWLSNLLLANLMHNYGLLLPTMIVFFINTHQYKFCVLILPYEFL

SEQ ID NO: 187133 - protein, 146 aa, Glycine max
  Clone ID: PAT_MRT3847_139994C.1.pep
MEEAKALHQQQQQQQQQQQLLLQQQQQQQHQQHYLLLQQLQKQQQQQQQAAAISRFPSNIDAHLRPIRPLNLQQNPNPSPNPAPNPNPNPLINLHQNPNSNHLPPPQQPSQQQQQQKIIRPGNQMELQMAYQDAWRVCHPDFKRPF

SEQ ID NO: 187134 - protein, 174 aa, Glycine max
  Clone ID: PAT_MRT3847_139995C.1.pep
SQFIDVSNTTPDETAFFRLVLNREGVVGSLIMIQPTLFQYSFDGPPVPVLLDIRSISPDFILLFDSFFCVVIHYGSKIAQWRKLGYDKDPNHESLRKLLEAPELDAEQLVADRLPVPRIIRCDQHSSQARFLLAKLNPSVTQNSTYTEGSDIIFTDDLSLEVFLDQLQVLAVQS

SEQ ID NO: 187135 - protein, 124 aa, Glycine max
  Clone ID: PAT_MRT3847_139996C.1.pep
MSPFKGTFVAASSNFQNQGLGRNSSMAANKGPAPPGFEPGGSIGGDIKICRNFVSPNPGTTPGNSPGQVFGVNPGQKNPASFNPKKRGGPPGWDKKFGAPLNGPPVKGINVPIFGSSQELIFFE

SEQ ID NO: 187136 - protein, 303 aa, Glycine max
  unsure (1)..(303): unsure at all Xaa locations
  Clone ID: PAT_MRT3847_139997C.1.pep
MKRFHSKRKLLIFLVVIPSLVAAECTCDEEDQERDKSKALXGVILATGFIHILPDAFENLTSPCLNKYPWDAFPFTGFVAMCTAMGTLMVETYATAYFKKHHHSQVQTTYVEKEESGDVHLHTHATHGHAHXHLPSHDHQSSALFRHRVISQVLELGIIVHSIIIGISMGASESPKTIRPLVAALTFHQFFEGMGLGSCIIQANFQRLSITIMGLFFALTTPVGIGIGIGITNVYDENSPTALIVEGIFNAASAGILIYMALVDLLAADFMNPRMQKSGSLRLGANLSLLLGAGCMSLLAKWA

SEQ ID NO: 187137 - protein, 268 aa, Glycine max
  Clone ID: PAT_MRT3847_139998C.1.pep
MKRFHSKRKLLIFLVVIPSLVAAECTCDEEDQERDKSKALRYKIAALISILVASAIGVCIPLLGKVIPALSPEKNIFFIIKAFAAGVILATGFIHILPDAFENLTSPCLNKYPWDAFPFTGFVAMCTAMGTLMVETYATAYFKKHHHSQVQTTYVEKEESGDVHLHTHATHGHAHGHLPSHDHQSSALLRHRVISQVLELGIIVHSIIIGISMGASESPKTIRPLVAALTFHQFFEGMGLGSCIIQVLYVIYHCPILVSSRASDIFDS

SEQ ID NO: 187138 - protein, 28 aa, Glycine max
  Clone ID: PAT_MRT3847_139999C.1.pep
IIWVGPFIGAALAALSPQVVMRAIPFKS

SEQ ID NO: 187139 - protein, 143 aa, Glycine max
  unsure (1)..(143): unsure at all Xaa locations
  Clone ID: PAT_MRT3847_13999C.1.pep
DPSPSRSYLTEFXEEKGETRGEXDPFPXCXXXKSLFLCXGHGESQTGDXAVRISASNPXIKPIMGLPLVFSSVSFSKVIRCSASHKVXXLCLISXSXVYHFLYRYHIHRKQFFCLFVLICVKVVLLFVGSTSHLFLGFSKLDF

SEQ ID NO: 187140 - protein, 577 aa, Glycine max
  unsure (1)..(577): unsure at all Xaa locations
  Clone ID: PAT_MRT3847_1399C.1.pep
MSYVPPHLRNATSTTVATARTPSVTLDNNNNNHHHHHKLAFPSNTTTTNCSPSLSFHNNASRRSSAAPPSPRILATPDAVFPQWQPSERVSRMTPEQIEEVRSRLNLDVAVASDSPPAPAPIESFTDMCLHPSIMKDIAYHEYTRPTSIQAQAMPIALSGRDLLGCAETGSGKTAAFTIPMIQHCLAQHPIRRNDGPLALVLAPTRELAQQIEKEVKAFSRSLESLKTAIVVGGTNIEKQRSELRAGVEIAVATPGRFIDHLQQGNTSLSRISFVVLDEADRMLDMGFEPQIREVMRNLPEKHQTLLFSATMPVEIEELSKEYLANPVQVKVGKVSSPTTNVSQTLVKISENEKIDRLLDLLVEEASQAEKCGHPFPLTIVFVERKTRCDEVAEALVAQGLSAVSLHGGRSQSEREAALHDFRSGTTNILVATDVASRGLDVTGVSHVINLDLPKTMEDYVHRIGRTGRAGSTGLATSFYTDRDMFLMANIRKAIADAESGNTLTFATGKVARRKEKEAAAAQKEANIALSKQLGLGAASMNIEDKYKFMITATNTKKEGAXIVPGMINEVFGSSHI

SEQ ID NO: 187141 - protein, 64 aa, Glycine max
  Clone ID: PAT_MRT3847_139C.1.pep
KKEKGRHPTSWFLYYKIKYAKYGRPLYNIVNTFTVLRLTTLSLLHLILLSTDVVLHEDVLKHPG

SEQ ID NO: 187142 - protein, 103 aa, Glycine max
  unsure (1)..(103): unsure at all Xaa locations
  Clone ID: PAT_MRT3847_13C.1.pep
TMIDATAITVRTVTDXSVEGADAKNIFYLXEEDDADKMYAKLDAXPRARAGGDDGRYIGMELPAXERLTQIXISMVYPEPWCMPRLYTADVAENYEEYYAYKR

SEQ ID NO: 187143 - protein, 354 aa, Glycine max
  Clone ID: PAT_MRT3847_140000C.1.pep
MKRFHSNSKFFTFSILIFLVVIPTLVVAECTCDEEDQERDKSKALRYKIAALISILVASAIGVCIPLLGKVIPALSPEKNIFFIIKAFAAGVILSTGFIHVLPDAFENLTSPCLNEHPWDAFPFTGFVAMCTAMGTLMVDTYATAYFKKHHHSQDEATDVEKESGHEGHVHLHTHATHGHAHGHVPTDDDQSSELLRHRVISQVLEVGIIVHSIIIGISLGASESPKTIRPLMAALIFHQFFEGMGLGSCITQANFKKLSITLMGLVFALTTPMGIGIGIGITKVYDENSPTALIVEGIFNAASAGILIYMALVDLLAADFMNPRMQKSGSLRLGANLSLLLGAGCMSLLAKWA

SEQ ID NO: 187144 - protein, 76 aa, Glycine max
  Clone ID: PAT_MRT3847_140001C.1.pep
TRSLAPNSISQSSFFSTQILTQRFSILTKPARTYHSPLHSFITKLSSISFQNYLFFLYFYYLLFLNLNTLNIPPFH

SEQ ID NO: 187145 - protein, 61 aa, Glycine max
  Clone ID: PAT_MRT3847_140002C.1.pep
LSFWLLLPTPKNCFLHHFWLQNWQIQNVKLSCSTFWIFLSVGVGFEYSTREFSTHTPSSTN

SEQ ID NO: 187146 - protein, 54 aa, Glycine max
  Clone ID: PAT_MRT3847_140003C.1.pep
VLGKACCHLGLMEDAMVLLQTGKRLATAAFRRESVCWSDDSFSLSNSLFSGDTP

SEQ ID NO: 187147 - protein, 141 aa, Glycine max
  unsure (1)..(141): unsure at all Xaa locations
  Clone ID: PAT_MRT3847_140004C.1.pep
GLCIYPKPSLLTTTTSGHXLFTAALTLPRSTHSHPTLLCPTTXSFTSKSPSYSCLYXRMSNTLLTRPLLFAVKALSGGGSKASXQESDKSELQXDVEAPYEEYYVDIEQPFGLKLVHGMXGRTYIDAIAPXDHTDHAGVFT

SEQ ID NO: 187148 - protein, 89 aa, Glycine max
  Clone ID: PAT_MRT3847_140005C.1.pep
HVSLHYSDQGPTDSAFAIRVLDMAIDAINSLTTSPNSTLPSPTTLTSLPARQIEESPRPSDGEFLGERLKGTKIDDLLIHSPALTHAWS

SEQ ID NO: 187149 - protein, 78 aa, Glycine max
  Clone ID: PAT_MRT3847_140006C.1.pep
KFLVYACPRIFQRFLNHGKRSFPGSRANLDLHNTCSENPPSLLVLSAAQTLQTWFSLIIVKVRGCCSSLLAPNLAVNN

SEQ ID NO: 187150 - protein, 128 aa, Glycine max
  unsure (1)..(128): unsure at all Xaa locations
  Clone ID: PAT_MRT3847_140007C.1.pep
ILKKEKNGKKKKKKKRLTLIGTRICAACSCTEHFDACXWTKSQPHSWELLFSIEACGPNNGLGVWRFVWXTQSCWHTRVLRDTARQNTGTDFLLGIPHDVACAWNTLMPAFFDSQSCGGSSENAEPFA

SEQ ID NO: 187151 - protein, 79 aa, Glycine max
  Clone ID: PAT_MRT3847_140008C.1.pep
EKKTPVLFYFLKNQSCRGPDQPLMAMEIKVITKETLKRFFPHNTRLGTKGPPEIGGYLKDIIYRSPEPGAGQFFRSKTS

SEQ ID NO: 187152 - protein, 56 aa, Glycine max
  Clone ID: PAT_MRT3847_140009C.1.pep
DSSTYGHSSTRRDRRAMTNDKSHNSSYLTYSEKLNSVIASTISSIYPSEKSHNSPY

SEQ ID NO: 187153 - protein, 145 aa, Glycine max
  Clone ID: PAT_MRT3847_14000C.1.pep
MEKEAELGEKEFEQMVRALPSDAVKELLSHGVCTRCIFRLFGLQGPVYASPPSLSSLFDATQQDCLCTLCLGILQFTYSNVQNDNLPLLIADMVKRQAYQFDTFSLEVSIPPIIIDDVNFLCSYMKTKYGSQPWFQENLHSGCIS

SEQ ID NO: 187154 - protein, 165 aa, Glycine max
  Clone ID: PAT_MRT3847_140010C.1.pep
MSSLIAEDVKSRSEVYHGDEMCQVKSKELLKEIALPNGLLPLKDMEECGYDRQTGFVWLKQKKSYTHKFDKIGKLVSYAPEVTAHVQQGKITKLTGVKTKELLLWITLSDIYVDDPPTGKITFKTPAGLFRSFPVSAFEIQEEPEAKDTTKRVPDTAEPVQVKEL

SEQ ID NO: 187155 - protein, 44 aa, Glycine max
  Clone ID: PAT_MRT3847_140011C.1.pep
RRDEAELTLGTIAWKENKNGDSCHDYLEDRASFSEYKLMDYESN

SEQ ID NO: 187156 - protein, 59 aa, Glycine max
  Clone ID: PAT_MRT3847_140012C.1.pep
GSPIVFHIIGLLDKGGQVSYTWDNLIRELYRGMPNVSKTSNSFRARPFWEGVNFPGGSF

SEQ ID NO: 187157 - protein, 62 aa, Glycine max
  Clone ID: PAT_MRT3847_140013C.1.pep
LNPQEGSMCIQPYHLVLRGVSKHNSTETLALGKSHKYLKEWLCHFKYTVGEKCALIKYTSYQ

SEQ ID NO: 187158 - protein, 401 aa, Glycine max
  Clone ID: PAT_MRT3847_140014C.1.pep
MERLKWAQLGERLKTGGAQMGRMVSGKVKEMLQAPTPESKMVDEATLETMEEPNWGMNLRICGMINSDQFNGSEVVKAIKRKINHKSPVVQTLSLDLLEACAMNCDKVFSEIASEKVLDEIIRLIDNPQAHHQTRSRAFQLIRAWGESEDLAYLPVFRQTYMSLKGRDEPVDMAGGNSPHVPYASESYVDAPERYPIPQAELHDIDDPAAFSSNYQHISVEERKEHLVVARNSLELLSSILNSDAEPKTLKEDLTVSLLDKCKQSLSIIKGIVESTTNDEATLFEALYLNDELQQIVSKYEELDAAQSSGAQQPQNADTDKHDAKAVQNPNEVPENEESEAAQNLDRKLPQKSNTLEVNATEGERDDLAETKIVDGLAETKIVDDGTKEKNAESSFKRDTE

SEQ ID NO: 187159 - protein, 103 aa, Glycine max
  unsure (1)..(103): unsure at all Xaa locations
  Clone ID: PAT_MRT3847_140015C.1.pep
KKKLGGQSKCKFPPFWFWSAGSGHQFPKPNGLGIKGXPLTWFIKPFYWHFPNFLAQPLGIFKLTGLSWDFDIITKXGXXLRFLPIFRGWGFFPIPPLDLLRVF

SEQ ID NO: 187160 - protein, 97 aa, Glycine max
  unsure (1)..(97): unsure at all Xaa locations
  Clone ID: PAT_MRT3847_140016C.1.pep
TLKPNNGALTGHAISTSGATNEINVVDANYQKEALIIETYTPPDPGPYPQDQPKQNSVRFTPXQVNSALDLNHILSLFMHNDFSFNLSLPSCFPHNS

SEQ ID NO: 187161 - protein, 73 aa, Glycine max
  Clone ID: PAT_MRT3847_140017C.1.pep
FYLPLFIVLTKALNHVEIYSLEEVAPLCCCNYIAICTIDKIKYPQSGKQEKLNFNTTCCIFRFGNPIFHDLML

SEQ ID NO: 187162 - protein, 58 aa, Glycine max
  unsure (1)..(58): unsure at all Xaa locations
  Clone ID: PAT_MRT3847_140018C.1.pep
DSCVYTLLPNIFLXLNSEIQVIYIYFDEKALYRQNLIFGEHHVVFLLTHSPVRACWLF

SEQ ID NO: 187163 - protein, 49 aa, Glycine max
  Clone ID: PAT_MRT3847_140019C.1.pep
MYTLYNDDNNFTKKSILFLGMNPLLCFSLHYQVFERINVILYKVCVIFI

SEQ ID NO: 187164 - protein, 56 aa, Glycine max
  Clone ID: PAT_MRT3847_14001C.1.pep
QVIQSMRCTITVGHFNNRPGRNKCKYYDHHRYSVHLGMNSLYHVFIYLHVRFSILD

SEQ ID NO: 187165 - protein, 38 aa, Glycine max
  Clone ID: PAT_MRT3847_140020C.1.pep
LIDHGTTGVIYFKTIKPNIAFKILYYTCVTNVMHCTSC

SEQ ID NO: 187166 - protein, 313 aa, Glycine max
  unsure (1)..(313): unsure at all Xaa locations
  Clone ID: PAT_MRT3847_140021C.1.pep
LEVDRNPNVFTLLNRTCSLVDPDTIKDPNTFNYGIFFDALDSRVVESTTDFPQKFFYCFWWGLRNLSSLGQNLKTSTDVSEIAFAIFIAIFGLVLFSLLIGNMQKYLQSTTVRVEEMRVKRQDAEQWMSHRMLPENLRERIRKYEQYQWQENRGVEEEALIRNLPKDLRRDIKRHLCLALVKKVPMFEKMDEQLLDAMCDRLKPVLYTEKSYIVREEDPVDEMLFIMRGKVSTMTTNGGRTGFFNSMFLVAGDXCGEELLTWALDPNSSSNLPISTRTVETLSEVKAFALMADDLKFGGSQLRRLHSXQXQHA

SEQ ID NO: 187167 - protein, 55 aa, Glycine max
  Clone ID: PAT_MRT3847_140023C.1.pep
SETDHKVGQVSKSELHLHGNYVPFCCFVYINKPMLIKSVIEVIKALVTFFLYFNR

SEQ ID NO: 187168 - protein, 152 aa, Glycine max
  unsure (1)..(152): unsure at all Xaa locations
  Clone ID: PAT_MRT3847_140024C.1.pep
KMCQTYKGHKRCMKXKVSRTDFTINHYAGDVTYQAHYFLDXTLDYVVAEHEALLCASKCALAANIFPSLPEETXKLSILSDIGSQFKHQLQSLMETLNTADPHYIRCVTPNTVLQAAIFENFIVLNQLRCGGVLEEIRISCAGYPTKRTFEE

SEQ ID NO: 187169 - protein, 46 aa, Glycine max
  Clone ID: PAT_MRT3847_140025C.1.pep
CDVIVAEVCASQASKASTFLLVSVIHVGCILIPDFSHLDHKHNRKG

SEQ ID NO: 187170 - protein, 72 aa, Glycine max
  Clone ID: PAT_MRT3847_140026C.1.pep
SGGGKLVKKAQQRGRGKRLANGTTLWGAPGKKGGRREERIYFKKGGGGGGKKKEKGGGQEKGGIFGGGGGKK

SEQ ID NO: 187171 - protein, 105 aa, Glycine max
  Clone ID: PAT_MRT3847_140027C.1.pep
VSNFQMSERQKMVPTSTELQPRAPCNLVLFLSAPPTTLPLSDTKPVKPSSNNISEMVYKFAKVCKLKSIGVFSSEIPNLPHLQRSICNETLLSENSSEENRCYDQ

SEQ ID NO: 187172 - protein, 82 aa, Glycine max
  Clone ID: PAT_MRT3847_140028C.1.pep
QRIPFFNEKGKYVSTDPLDINDLSSLNYIGTKLLESFKRKTAILEKENSALSQKLQKLEQERGIIAQRRVEEGNNTEDNNTL

SEQ ID NO: 187173 - protein, 145 aa, Glycine max
  Clone ID: PAT_MRT3847_140029C.1.pep
MECSDTKPVKPNSNNISEMVCKFAKVCKLKSIGVFSSEIPNLPHLQRSIYNETLLSEDSSEESRCYDQKVHPHPTEVPAKENACAGLEVMRKLFDAVSALKLAYLQLQQAHIPYDPQKIVAADDLVGAELEKLCKFKREYVQKHC

SEQ ID NO: 187174 - protein, 47 aa, Glycine max
  Clone ID: PAT_MRT3847_14002C.1.pep
LNTILCCTEFFTWLTKPQRYRELLELLVRNPFTEVTPCWNILFSYQD

SEQ ID NO: 187175 - protein, 95 aa, Glycine max
  unsure (1)..(95): unsure at all Xaa locations
  Clone ID: PAT_MRT3847_140030C.1.pep
VVKVMGKXKVLVKVXPEGKYVVXIDKSIXHYXDYXHSNXSXTFGKRXYVSSLSYCPSESXIPXGTMLDXKFEXGXPRFLNLTXIDLVGSRIQXNL

SEQ ID NO: 187176 - protein, 103 aa, Glycine max
  Clone ID: PAT_MRT3847_140031C.1.pep
LSIKGRSYPSVTLQPTRRRDHLRCAAHPQTAKKVCDIVNKQLTLPHESAVTAESIFAALGADALDTAENVMGLDEEYDLTVEEDSDHSITTRHDAADMIVSLL

SEQ ID NO: 187177 - protein, 382 aa, Glycine max
  Clone ID: PAT_MRT3847_140032C.1.pep
MEAIFVTKPASHSLLLTKLSPNPKHLFPPHQQSFHNIRHKPTRFRPVIAVFQNQHQQDAAAASNHTEDESYGEVKGIIGSRALEAATGMEYLIEWNDGHAPSWVPADFIAKDVVAEYETPWWTAAKKADESALKNLIESDDGRDVDAVDADGRTALLFVAGLGSESCVKLLAEAGANLDHRDRSGGLAALHMAAGYVRPGVAKVLLDLGADPEVADDRGRTALDLAREILKVTPKGNPMQFGRRIGLEGVIRVLEGAVFEYAEVQEILERRGKGENLEYLVRWKDGGANEWVKAKFVAEDLVKDYEAGLEYAVAEAVLAKRVADEGTPEFLVKWADLEEPTWEPEENVDPELVKAFEGSNNQAQPSSNGPAVVFSNQDSPSL

SEQ ID NO: 187178 - protein, 139 aa, Glycine max
  Clone ID: PAT_MRT3847_140033C.1.pep
MSAPTLHHFSSLFTLFIVLLHHSNADVGTASRYSPPYLPSGCYGTEATQFPSSNLFAAAGDGIWDNGAACGRQYLVRCISAEQPRTCIPDQSIQIKIVDYAATAVSPASAGGTTMVLSDKAFGTIANMSATLINIELQQ

SEQ ID NO: 187179 - protein, 131 aa, Glycine max
  unsure (1)..(131): unsure at all Xaa locations
  Clone ID: PAT_MRT3847_140034C.1.pep
FVVNKVCQFMENPLDIHWGAVKRILRYLKGTLSHGLLMKPVVVGKPLSITAMCDADWAFDVDDRRSTSGSAIFFGPNLISXWSRKQQVTARSNTEVEYRSIAQTLAELTWVQALLQELQVPFSTPILLCDN

SEQ ID NO: 187180 - protein, 72 aa, Glycine max
  Clone ID: PAT_MRT3847_140035C.1.pep
STVVRGKTLKMGNGEPEDVAIQISRSNDTMYKAGMDELVILKELYVQIQMHKRHCVRFLSSFRYRDHLCPVF

SEQ ID NO: 187181 - protein, 70 aa, Glycine max
  Clone ID: PAT_MRT3847_140036C.1.pep
TDTNNPFSSRQALAPPNTTVDLNTTSQPSYTTTEPPIPTPFNQSASCKPPSTTEPTKSPTAPTPSAGATT

SEQ ID NO: 187182 - protein, 154 aa, Glycine max
  Clone ID: PAT_MRT3847_140037C.1.pep
QARRKYHCQRRRCWVLVYPSSDQDALPTLLLPDDHLPPRFGPDNIGLFLKVLSFNSFTEAERESFEAEVRAQKPSFIAGLIEIADAFNSPETVRECLERACYTLGKPKLPFTKFTASMLKLNENRIRQSIFIAKFLNHQTVFKMLTHALVVGGS

SEQ ID NO: 187183 - protein, 65 aa, Glycine max
  unsure (1)..(65): unsure at all Xaa locations
  Clone ID: PAT_MRT3847_140038C.1.pep
LPRRKRLSXEVXFPRHLSGTSLINFHFNCLTLTSXXKSNYQDSDFFCCGNALLELRLTSXSFNEL

SEQ ID NO: 187184 - protein, 59 aa, Glycine max
  Clone ID: PAT_MRT3847_140039C.1.pep
DQSSAGEYYLGVDNLIIPFSELLHNYNPLFIIIKYRYYFQIHHNPLLQYKIIFYKIPLN

SEQ ID NO: 187185 - protein, 235 aa, Glycine max
  Clone ID: PAT_MRT3847_14003C.1.pep
EEALAVFEEMLDAGIRPTRKAYNILLDAFSISGMVEQAQTVFKSMRRDRYFPDLCSYTTMLSAYINADDMEGAEKFFKRLIQDGFEPNVVTYGTLIKGYAKINDLEMVMKKYEEMLMRGIKANQTILTTIMDAYGKSGDFDSAVHWFKEMESNGIPPDQKAKNVLLSLAKTDEEREEANELVVHFSENSSLPKVNGIVKLVDEDEEEDNYEYFDAQLARAYEHSTEVKVDECQVL

SEQ ID NO: 187186 - protein, 87 aa, Glycine max
  Clone ID: PAT_MRT3847_140040C.1.pep
KSGRRRRPPSRGSPPLFFWLLVCSTGVLAGLVLASREQKNNFLIAKNVFFERGKNSFPLFPQKGFWMVSFRAQFVPPFLRVVPKKMK

SEQ ID NO: 187187 - protein, 70 aa, Glycine max
  Clone ID: PAT_MRT3847_140041C.1.pep
LILSYAYVNRFCNGRYFQFIGLMYDHSNLYFSKKKKKKKNKKKKKKKKKKKKTKFKNTSKNAHQLFTKRI

SEQ ID NO: 187188 - protein, 63 aa, Glycine max
  unsure (1)..(63): unsure at all Xaa locations
  Clone ID: PAT_MRT3847_140042C.1.pep
EDEEMEKNPKRGYMRSNTQPTKETLIDIXEIEISGRHAYDEIYLGXKDTPNRPTDKRHLEHMK

SEQ ID NO: 187189 - protein, 48 aa, Glycine max
  Clone ID: PAT_MRT3847_140043C.1.pep
GSQKNTAIPPTSSNQFFQFQLPTIQINTNRINAKSNPEPMQFIFLVTL

SEQ ID NO: 187190 - protein, 65 aa, Glycine max
  Clone ID: PAT_MRT3847_140044C.1.pep
MKFMKLGSKPDTFQTDGNNVRYVASELASDIVVNVGDIKFYLHKFPLLSKSSRLQTLISLNNEEN

SEQ ID NO: 187191 - protein, 135 aa, Glycine max
  Clone ID: PAT_MRT3847_140045C.1.pep
HASAHASGGSGNGNSTGTTAGGGIIVVGSLEHPLSSLSIQGYVKANGGNFEPQIRNEKFAIFDNFTGGPGGGSGGTILMFLHMLTIGKSAVLSSMGGYSSSNGSGGGGGGRIHFHWSDIPTGDVYLPIASVNGDI

SEQ ID NO: 187192 - protein, 120 aa, Glycine max
  unsure (1)..(120): unsure at all Xaa locations
  Clone ID: PAT_MRT3847_140046C.1.pep
GGHEPAGSVSASIRALKQEREHLARKVNTKLTAEERELLYAKWEVPPVGKXQRRLQFVNKLWTDPYNMQHVQESAEIVAKLIDFSVSDENSKDLIELNFSSPFNKKQWAGWNFISNLLNL

SEQ ID NO: 187193 - protein, 71 aa, Glycine max
  Clone ID: PAT_MRT3847_140047C.1.pep
HRPGDWSTFGQFLRNQSPPVPLCQCNFNHVLDFLRDLEQSGTTKDHLHGSILFGQHTPTGPCACPLMQAWG

SEQ ID NO: 187194 - protein, 59 aa, Glycine max
  Clone ID: PAT_MRT3847_140048C.1.pep
LMGCLSTVSTFAAEFNAMRESSRPMRAYAYAAITVLVSFALGILIYCIPVWTKGFDIDT

SEQ ID NO: 187195 - protein, 37 aa, Glycine max
  Clone ID: PAT_MRT3847_140049C.1.pep
TTTRLALLPPPPPPPPPPPPPPPPPPKKAVLQRCRAA

SEQ ID NO: 187196 - protein, 70 aa, Glycine max
  Clone ID: PAT_MRT3847_14004C.1.pep
VILYVGIAIDLTSFVQQQEQEADDPMCSLVAWGVLPFMSLCAISSKQMSKEENQRKATNMTMPSSEYCHV

SEQ ID NO: 187197 - protein, 58 aa, Glycine max
  Clone ID: PAT_MRT3847_140050C.1.pep
SRIQTFPCVRAGKGEPLSKPTDPVYVPNFHGFRGAHSVLTEPGPRPNYGARWKMSPST

SEQ ID NO: 187198 - protein, 57 aa, Glycine max
  Clone ID: PAT_MRT3847_140051C.1.pep
SQTTLLTFPFSSHASHHIPTLSWTLFMTRSAPEFPRLLKRCVTRALTVSSASGQLLE

SEQ ID NO: 187199 - protein, 129 aa, Glycine max
  Clone ID: PAT_MRT3847_140052C.1.pep
MSKAKAAAAASKAAKAPKKFTIECTEPVEDDIFDIASFEKFLHDRFKVGGKVGVLGDQVTITREGSIITVVSKVAFSKAYLKYLTKKFLKKQLLRDYIRVIARTKTGYFLRYYNFHQDDGEAQEGGDHS

SEQ ID NO: 187200 - protein, 75 aa, Glycine max
  unsure (1)..(75): unsure at all Xaa locations
  Clone ID: PAT_MRT3847_140053C.1.pep
VHLNESTFLASVMPNKEIGVNXNSTLIPHIDGRGALIAVFDSGVDPAADGSPSTXDGKPRVHDLIDCTGSGDLTP

SEQ ID NO: 187201 - protein, 51 aa, Glycine max
  Clone ID: PAT_MRT3847_140054C.1.pep
IAFNLKREYRLFPPQPPQKGKGKKKKKLGNQIRNPHLFYEGEKETPFPKGV

SEQ ID NO: 187202 - protein, 201 aa, Glycine max
  unsure (1)..(201): unsure at all Xaa locations
  Clone ID: PAT_MRT3847_140055C.1.pep
VVSTKPFRMRISWLNSRSNSELGPIDWVGSGFYKTCGDFRTGKHEITESLNSFSHKVRWTKGTRGVVRIFPRKGEVWALYRNWSPDWNENTLDEVIHKYDMVEVLEDFNEEGGLLVSPLVKVDAXRTVFHRXPAMIREERFLKWRYFQFSHQVPNFKXLLTSQEAHYAPRDCRELDPAATPLYLLQMVTSAIVTAKNALEA

SEQ ID NO: 187203 - protein, 54 aa, Glycine max
  Clone ID: PAT_MRT3847_140056C.1.pep
SLWWNIVCVRALHITRISTVDISRSASKATLRKMKRLNVLLYRSLDDVVSATWN

SEQ ID NO: 187204 - protein, 112 aa, Glycine max
  unsure (1)..(112): unsure at all Xaa locations
  Clone ID: PAT_MRT3847_140057C.1.pep
MASRALKPAPFTVEKSSVRGLTSLSRNYLSFTDVAKRGKKIKTDTPXGINDGMALTEGDDACRTKGKGKGAYQFVDIYCANVNGYSPMYDTQDWSSTADVHAGEPTGLAIVA

SEQ ID NO: 187205 - protein, 112 aa, Glycine max
  Clone ID: PAT_MRT3847_140058C.1.pep
PCFTKATIPAPLRCPHPLTLRLLGLLLLFNTLVAPAYVAFIRCLVLLCLFGYAPYPPYLPGLSSVFGPTLSIKPFFFSRLLLLRWFLFSSHTLPTHCSICPPPPPKKEDVIQ

SEQ ID NO: 187206 - protein, 52 aa, Glycine max
  Clone ID: PAT_MRT3847_140059C.1.pep
SRADSARVRLRETTEGFFNLGVCEKVKNKIFSLNLPGESKEICQPEQFINAL

SEQ ID NO: 187207 - protein, 47 aa, Glycine max
  Clone ID: PAT_MRT3847_14005C.1.pep
CARLLQVKGFKEGIHVSVGGRAKLVNSHQGHVCSLVSPVSDKSKAIV

SEQ ID NO: 187208 - protein, 150 aa, Glycine max
  Clone ID: PAT_MRT3847_140060C.1.pep
APKKGSLAHKNLTFTETLAPLLPKPTLETPQNLHFWNPFFFFPGGALLCPPNWPEKHPPYWRKIFWGESGGPKKIPPCQGGGQKNSPSPWGKKIPGGEPQLFFSPERKKFFFFLPKTKIAPKIMGGVKHKFPNPQKLFERVDPPGGEENP

SEQ ID NO: 187209 - protein, 49 aa, Glycine max
  Clone ID: PAT_MRT3847_140061C.1.pep
SPLPTMHNLTMHNLNKWLYIFLRLCMVRLCMVVNCDHIISKKMYSHLLN

SEQ ID NO: 187210 - protein, 53 aa, Glycine max
  Clone ID: PAT_MRT3847_140062C.1.pep
MKTKTPPSLLSLTVDSAVLNLSDISDLSHVPDHILLDLFLASTTTYLFSSFLF

SEQ ID NO: 187211 - protein, 63 aa, Glycine max
  Clone ID: PAT_MRT3847_140063C.1.pep
ECFFNGSIERFLYHQFHQPHFQLSFNNPKSKKPKEGEGEGFEIPRGENLEKREKMRCCNLQPL

SEQ ID NO: 187212 - protein, 225 aa, Glycine max
  Clone ID: PAT_MRT3847_140064C.1.pep
MENNPKEQAEQQRVNFNGDPHIHDNGNVFHHFQPTPAVDSGYALNHSMARPLRKRPWHHSNNGTSPDQVDVSCKVYVAPVPRTATEDEIRTVFEEHGTIVEIVLLKHKKTGTRQGSCFVKYATFDEADRAIKVLNNKYTFAGESYPVAVKFADRELERLGVADKVFVSSINKEATNKEIEDIFSPYGHVEDIFFKSTHGYAFVKFSNREMALAAIKGLNKTFTMR

SEQ ID NO: 187213 - protein, 101 aa, Glycine max
  Clone ID: PAT_MRT3847_140065C.1.pep
MGKHILLLPLGLSLLMSSLLALQCFRCISFDSTGFCYVGRHICQTYPDEICAWVVVTTRDGKFVYGNQSCAECNATTVEHGSLIVSTNCCSATPFCNMVHR

SEQ ID NO: 187214 - protein, 83 aa, Glycine max
  unsure (1)..(83): unsure at all Xaa locations
  Clone ID: PAT_MRT3847_140066C.1.pep
MTGKAYPKKHTAXEIAAKVDAVTTNRGXGRLGLMDRSGLEKGGHSKYECPHCKVTALDVKSMQFHHYARNSKLAVADLLLFFI

SEQ ID NO: 187215 - protein, 108 aa, Glycine max
  unsure (1)..(108): unsure at all Xaa locations
  Clone ID: PAT_MRT3847_140067C.1.pep
PFFLLKRKGITNTIYTMAFAFNFTKTLILLVYLYCLRMQTQAXPMPSYPSSPALQPLQAHQQCWAELQDHSARSAGPAPIQLLQGPQSGDARDPYTSGENPRVDKRAP

SEQ ID NO: 187216 - protein, 138 aa, Glycine max
  unsure (1)..(138): unsure at all Xaa locations
  Clone ID: PAT_MRT3847_140068C.1.pep
PQVASGCTAEEVAASLGTFVQTAPRMASIGSYEVNLLAGEDLGNCMHIDVLKSEKKNVLELSKETHISSMCSDSKLKNDPMEQISKLFVNSEKTRQTPVSRTVGFQIRASTPRVNGFGGNGYSSPVXNVISDATEASE

SEQ ID NO: 187217 - protein, 105 aa, Glycine max
  Clone ID: PAT_MRT3847_140069C.1.pep
ITSQSGILPPTIATWDRARESQYAAGLAGQNQMAFGMGSPFPQSQPPMFAAQQGFPSTELHSQRNLNFHSNTISGARSQFHPRSNANRGRKTFHGAGRKGWRPPK

SEQ ID NO: 187218 - protein, 83 aa, Glycine max
  Clone ID: PAT_MRT3847_14006C.1.pep
PLVGVSPDFLIPLYPLSFFVWEGVSPLQFGPFGVIPERVRLGGLMGFFFPPSHSCIFGFPPWEKLFPKETFVSPPSGLVGQGV

SEQ ID NO: 187219 - protein, 131 aa, Glycine max
  Clone ID: PAT_MRT3847_140070C.1.pep
MAIFNGHNHLALGFGMLGNVISFMVYLAPLPTFYRIYKKKSTEGFQSLPYLVALFSSMLWLYYASLKPADATLLITINSLGCVIEIVYIIMFTIYATKDARNLTVKLFMVMNVGSFALIFLVTYFAMHGSL

SEQ ID NO: 187220 - protein, 80 aa, Glycine max
  Clone ID: PAT_MRT3847_140071C.1.pep
YPLLWDFRSFLSLGCPFFLSRPSGFGFHPFESPWSTPHFFVAPVAFLVATMLVSPFLKSGPFYAAVSAPRLPFVGFRSWG

SEQ ID NO: 187221 - protein, 37 aa, Glycine max
  Clone ID: PAT_MRT3847_140072C.1.pep
YPLEGANFTQPLAGENPRVNRENPGGTHLNCLAGHPP

SEQ ID NO: 187222 - protein, 122 aa, Glycine max
  Clone ID: PAT_MRT3847_140073C.1.pep
MASLSTRIFFIMSLVCLALGPMAQGEMTCGQVVSNLTPCISYVVYGGTNVPEQCCNGIRNLYGMAQTKPDRQAVCNCIKNGVRNSGFNYSDFNLNLAANLPKKCGVNIPYQISPNTDCTRVQ

SEQ ID NO: 187223 - protein, 57 aa, Glycine max
  Clone ID: PAT_MRT3847_140074C.1.pep
VWNGGEDITPKYIGDDMILLMGLRETRATPMAKEANEQGSSSLEKWTPQLRIGYRLV

SEQ ID NO: 187224 - protein, 85 aa, Glycine max
  Clone ID: PAT_MRT3847_140075C.1.pep
CDWTNKRSLQVLWLLSNSSATRTLDKNLSNGFWAYGVFYLSSNFAHPENNISLQKFHENKIGKMFEPFGHEKEAITFNSRAAIHV

SEQ ID NO: 187225 - protein, 149 aa, Glycine max
  Clone ID: PAT_MRT3847_140076C.1.pep
MKDALREEQIGEFLEAFCLFDKDGDGCITIEELSTAIRSLDENPTVEELQIMMNEVDMDGNGTIEFGEFLNLMARKMKETEAEEELKEAFRVLDKDHDGYISPSELRSVMRTIGEKVTDEEVEQMVKEADLDGDGLIDYEEFVRMMLAD

SEQ ID NO: 187226 - protein, 187 aa, Glycine max
  Clone ID: PAT_MRT3847_140077C.1.pep
MLTHRFLYGFGYDTSTDDYLLIMIPFHWKTEIQVFSFKTNSRNRKMIKLNVPYQGIGSKFSIGSLLNETLHWLVFSKDKWVDVIIAFDLIKRSLSEIALFDHLTKKKYEMFSLRVIGGCLSVSCSDQDWAMTEIWIMKEYKVQSSWTKSFVIPTYGFSPICITKDGGILGSNMRERLEKHNDKGRVA

SEQ ID NO: 187227 - protein, 512 aa, Glycine max
  unsure (1)..(512): unsure at all Xaa locations
  Clone ID: PAT_MRT3847_140078C.1.pep
LELTSLPRLTTLLLDHNQLTGPLPSDIISWKSLITLDLCHNQLSGVIPDAIAQLPGLNILDLSENKISGQIPLQLALKRLTNLNLSSNLLTGRIPSELENLAYATSFLNNSGLCADSKVLNLTLCNSRPQRARIERRSASHAIIISLVVAASLLALLSSFLMIRVYRKRKQELKRSWKLTSFQRLSFTKXNIVSSMSEHNIIGSGGYGAVYRVAVDDLNYVAVKKIWSSRKLEEKLVSSFLAEVEILSNIRHNNIVKLLCCISKEDSLLLVYEYLENHSLDRWLQKKSQPAAVSGSVLDWPKRLHIAIGAAQGLCYMHHDCLPPVVHRDVKTSNILLDSQFNAKVADFGLAKMLMKPEELATMSAVAGTFGYIAPEYAQTTRVNEKIDVYSFGVVLLELTTGKEANRGDEYSCLAEWAWRHIQIGTDVEDILDEEIKEACYMEEICNIFRLGVMCTATLPASRPSMKEVLKILLTCSNLLTNGEKNAGFYDSIPLLKNSKWENQVEYYTDDD

SEQ ID NO: 187228 - protein, 180 aa, Glycine max
  Clone ID: PAT_MRT3847_140079C.1.pep
GSRRFCLKGAFGCLASVTDSSVTKEVFVSLLKSFQFVDCEGEGEILTSPAGVVDSDQNDLKGYSQRCLILELAYCLVQGAKDNLIEIIYNFTIHSFQATDESVHHEAYNTLCKILEENPCLSSARYIALIDLLHGLKPPTSIASLRSRYACFHMLMVHAVNVSLEEEENLKAFLILNEII

SEQ ID NO: 187229 - protein, 46 aa, Glycine max
  unsure (1)..(46): unsure at all Xaa locations
  Clone ID: PAT_MRT3847_14007C.1.pep
HYLVDSLSPWILQKVNYIMTLRKKKKRKELLDYGAKCXLTIFLKQC

SEQ ID NO: 187230 - protein, 83 aa, Glycine max
  Clone ID: PAT_MRT3847_140080C.1.pep
EPPLEDAFIQSSKKLDDDDHHNLDLDPFSKTSSSTGAAGNINEGLTRDFLGLRPLSHTDILTIAGIGNCIHDRQNQSQKPWQG

SEQ ID NO: 187231 - protein, 57 aa, Glycine max
  Clone ID: PAT_MRT3847_140081C.1.pep
TALVLIRGWRVQNKQKKLTTFKLLIPELCTQFQKHLFIHAKALISNYECLHKFVNLS

SEQ ID NO: 187232 - protein, 110 aa, Glycine max
  Clone ID: PAT_MRT3847_140082C.1.pep
SLRIHDGFLFACGSSVDANAGKIFSLSSKMVVGSLSTGLDIHRIAINSDFIFAGTKFGTIEVWLKDKLTRVASIKMAGGHTKITSLVSDADGMMLFVGSSDGKIQVWALD

SEQ ID NO: 187233 - protein, 61 aa, Glycine max
  Clone ID: PAT_MRT3847_140083C.1.pep
VCLFFFFFFFQLGTARSGQYLKAQERENKGEQRPYMPQHEYSRTPSIKFRNHLEARFGSLR

SEQ ID NO: 187234 - protein, 63 aa, Glycine max
  Clone ID: PAT_MRT3847_140084C.1.pep
DDSTNELGPLMAYRPTCTISPGAGCGCIPPWHTDSRCYNIWFFSSIIPQRLGTGSPETFLREH

SEQ ID NO: 187235 - protein, 141 aa, Glycine max
  Clone ID: PAT_MRT3847_140085C.1.pep
MTNSMGPPPPKNPNPPDTAPPSMPPPPPRDSAEPSPPPPPPPARDSSNAPSQGVAVPYKIPPWGAAPCHQFYLEVLKDGSIIDKFDVFEKGAYMFGRLDLCDFVLEHPTISRFHAVVQFKRSGDAYLYDLGSTHGTFLNKN

SEQ ID NO: 187236 - protein, 229 aa, Glycine max
  unsure (1)..(229): unsure at all Xaa locations
  Clone ID: PAT_MRT3847_140086C.1.pep
MTNSMGPPPPKNPNPPDTTPPSMPPPPCDSAEPSPPPSMPPPPCDSAEPSPPPPRDSSNAASQGAAVPYKIPPWSAAPCHEFYLEVLKDGSIIGKFNVFEKGAYMFGRLDLCDFVLEHPTISRFHAVVQFKRSGDAYLYDLGSTHGTFLNKNQVEKNTYVDLHVGDVIRFGRSSRLFIXQGPSDLMPPETNAKLMRRKXRMREAMLDKEAXSVQRARQEASLAEGISWA

SEQ ID NO: 187237 - protein, 52 aa, Glycine max
  Clone ID: PAT_MRT3847_140087C.1.pep
FLHELPQLTLHCQISISLHTPFCSLLNFRLSSTISYYMHIHFITVIINCWKL

SEQ ID NO: 187238 - protein, 72 aa, Glycine max
  Clone ID: PAT_MRT3847_140088C.1.pep
PRVVPVWLVGPVTGAGCALAVPFCAPPFVCLGRSLVLSFVGGYPGLLFPLSPPFCRLLAGVTPGGSTRGLRA

SEQ ID NO: 187239 - protein, 46 aa, Glycine max
  Clone ID: PAT_MRT3847_140089C.1.pep
KPPLKSSYTIELTSIKRSVASIISRTSKSFLSSSYVYVLFPTVTTM

SEQ ID NO: 187240 - protein, 81 aa, Glycine max
  Clone ID: PAT_MRT3847_14008C.1.pep
WDTLPPKIARHHFFALYSHLTILPASCISVLIVELLCIIILIQFLSVCPFLNIGTYLAFFFFQQEINDVTIETWENYNATV

SEQ ID NO: 187241 - protein, 279 aa, Glycine max
  Clone ID: PAT_MRT3847_140090C.1.pep
QMGTSKSCKSEELCTELLESQTGDTSTGSVIQTLRLQVFGVLHWVVSLGLILAIDFLLKKAFVAASIEFPSALFGMFCIFSVLIILDCAIPSAAVALMKFFEPGIMFIQRWLPLFYVPYLVVLPLSLKDIPPSSAIKICFIVVGGWLATLCVTGMTAIGVRKAVKTELIDAEPMEKPSPFSSIELWAWTGIFLISFVASLVYPTALGTRARTYLPFLLASTVLGYMIGSGLPSSVKKVLHPIIFCAASAEVTAVVFGFLSKSGLDPVLGYYLTNSSSDP

SEQ ID NO: 187242 - protein, 40 aa, Glycine max
  Clone ID: PAT_MRT3847_140091C.1.pep
ISWFSGSVYSFLFFFLVYAKHQIKFDNVRYRMQIFAAFIF

SEQ ID NO: 187243 - protein, 218 aa, Glycine max
  unsure (1)..(218): unsure at all Xaa locations
  Clone ID: PAT_MRT3847_140092C.1.pep
MRKSFASTAGSSLTAAVSLPLLTRHHVFLNFRGEDTRDXFISHIYAEPQRKNIETYIDYRLSRGEEISPALHRAIEESMIYVVVFSENYASSTWCLDELTKILDSXEENGRVVIPVFYXVDPSIVRNQRETYAEAFVKHEHRFQDKIDKVHAWKAALTEAAGLSGWDSQVTRPEATLVAEIVKDILEKLDSSSXXIIKEIVGIEXHVTRIQSLMNLES

SEQ ID NO: 187244 - protein, 82 aa, Glycine max
  Clone ID: PAT_MRT3847_140093C.1.pep
AAGRWWNARMSDSRARVRDAGERSDGTLEQDEEGASGKKRAATRTPTRTKHESQPAEQVVTRAGPGQPGLGGSASTSRPRAE

SEQ ID NO: 187245 - protein, 300 aa, Glycine max
  Clone ID: PAT_MRT3847_140094C.1.pep
IGTVFHKDAHLWTNIKEVSAREMAVAAREGSRRLQILKSEERRKILLAIADALETSESMIRHENEADVADAVATGYEKSLMSRLILKQEKISSLAKSVRMLADMEEPIGQILKRTELVDKLILEKISCPLGVLLVIFESRPDALVQIAALAIRSGNGLLLKGGKEARRSNAILHKVITSVMPDTVGDKLIGLVTSRDEIPDLLKLDDVIDLVVPRGSNKLVSQIKESTKIPVLGHADGICHVYVDKSANFDMAKQIVRDAKTDYSAACNAMETLLIHKDLSNNGGLNELVLELQREGVKM

SEQ ID NO: 187246 - protein, 44 aa, Glycine max
  Clone ID: PAT_MRT3847_140095C.1.pep
RHKDALLLTRSDGVTPALENPYYESLIVWTTFCVQCKEKNTRPR

SEQ ID NO: 187247 - protein, 425 aa, Glycine max
  Clone ID: PAT_MRT3847_140096C.1.pep
MDVDGGNKRVYNRLGGRAKHQKVCFHWQAGKCNRYPCPFLHSESPANSHHANGASSKRAYDNSGFSGPRRSPSFNNTWGRGGSRGGGGAGAGAGRGVVVKAEKVCNYWIQGNCSYGERCKFLHTWSVGDGFSLLTQLEGHQKAVSAIAFPSGSDKLYTGSTDETARIWDCQSGKCVGVINLGGEVGCMISEGPWVFVGIPNFVKAWNTQNLSELSLNGPVGQVYALVVNNDMLAVQDGSILAWKFNVATNCFEPAASLKGHSRGVVSLVVGANRLYSGSMDNTIKVWNLETLQCLQTLTEHTSVVMSVLCWDQFLLSCSLDKTVKVWYATESGNLEVTYSHNEENGILTLCGMHDSQGKPILLCACNDNTVHLYDLPSFAERGKILTKKEVRAIQIGPNGIFFTGDGTGEVRVWNWIAEATTTTQ

SEQ ID NO: 187248 - protein, 102 aa, Glycine max
  Clone ID: PAT_MRT3847_140097C.1.pep
GGSCKKSFFRGKYKHKNANPQRGGGQNPLGPKWRLLKDGDFRGGETPKSPSNLRKPPQGLGPKPKKNWWGFSLTGKVEKSPSKGNKLKVFGKNYYRLFVLGP

SEQ ID NO: 187249 - protein, 63 aa, Glycine max
  Clone ID: PAT_MRT3847_140098C.1.pep
PPSKKSKRSKGSINYWKVVTPGFIRDMPYSQVHCILYTMRRNIRIITTALLFVPDIISFITMC

SEQ ID NO: 187250 - protein, 97 aa, Glycine max
  Clone ID: PAT_MRT3847_140099C.1.pep
RNTPRTRKRNNLSRFNLNLWVFNSMQPFTPKSSSTIPNGTFLNGDHHYYRSLTGGMSLTPDLGHGPKSRAPPNPISKPGTRTRTCRPSHRFCFQTFL

SEQ ID NO: 187251 - protein, 67 aa, Glycine max
  Clone ID: PAT_MRT3847_14009C.1.pep
KKVLSPEKDRGNLPPFRNAPSLSFSLSGTPIELLNQVENVSVLKNCEIGPLFYPWKYRTRLMVICHQ

SEQ ID NO: 187252 - protein, 53 aa, Glycine max
  Clone ID: PAT_MRT3847_1400C.1.pep
GKRKISILFKSNRENRGFYLHKNLNPGPFPGDLNQQIIGIVLQKGVLKVLTPP

SEQ ID NO: 187253 - protein, 127 aa, Glycine max
  unsure (1)..(127): unsure at all Xaa locations
  Clone ID: PAT_MRT3847_140100C.1.pep
IRLSLFTLVLYFLPSFLTADNXYLRRTRIIHLFGLFYYEXYKLWTKHEKNFAGTEDETMDVIHKSGYPADVLAKGAPEVEKHVVHERLNDQKPGVDTTSTTKVNNFSKXMHLKQSAVGELKLHTEGK

SEQ ID NO: 187254 - protein, 200 aa, Glycine max
  unsure (1)..(200): unsure at all Xaa locations
  Clone ID: PAT_MRT3847_140101C.1.pep
MTFNASTITTASEGAWQGDNPLNHALPLLIVQTILVVFVSRTLAFLLKPFRQPKVVAEIIGGILLGPSAIGRNKKFMHIVFPAWSTTMLESVASFGLLFYLFLVGLELDFRTIRRSGKQAFNIAVAGITLPFICAVGVTFLLQRAIRSENHNIGYVQHFVFLGVSLSITAFPVLARILAELXLLTTRVGETXMAAAAFND

SEQ ID NO: 187255 - protein, 103 aa, Glycine max
  Clone ID: PAT_MRT3847_140102C.1.pep
PPTPFCWGPLIEFPSKKGTRKGAPKHPLNPIMSNKTNGIAPRKGIFFSSDQPLGPNLFINENQGPGPGKPPPKTPRGPLPPLLLPPIFFFEPQNGKPSWAPQG

SEQ ID NO: 187256 - protein, 81 aa, Glycine max
  Clone ID: PAT_MRT3847_140103C.1.pep
KWYPILIQKTVHKITYNVLAIKNQVSNQCLFLKNTDFKIITVTSPNPCNNSHYIFYPTTLAMAFLVFRSSNLLPIPISKRN

SEQ ID NO: 187257 - protein, 355 aa, Glycine max
  unsure (1)..(355): unsure at all Xaa locations
  Clone ID: PAT_MRT3847_140104C.1.pep
VPITQVPESTGPLLRQIEAMQETNARRSXAWAVVERTLNSRLQEAEAKAATAEERERSVNERLSQTLSRINVLEAQISCLRAEQTQLSRTLEKERQRAAESRQEYLAAKEEADTQEGRVRQLEEEIRDIRQKYKQELQEALMQREHLQQEIEKEKAARSELEKTLRVHSSPLSDQTPTTKLNSAFENGNLSRKLSSASSLGSLEESHFLQASLDSSDSISERRNIGELSMSPYYVKSMTPSSFEAALRQKEGELASYMSRLASLESIRDSLADELVKMTEQCEKLRGEAAVLPGLRSELEALRRRHSAALELMGERDEELEELRADIVDLKEMYREQVNLLVNKIQTMGPSMGSD

SEQ ID NO: 187258 - protein, 133 aa, Glycine max
  unsure (1)..(133): unsure at all Xaa locations
  Clone ID: PAT_MRT3847_140105C.1.pep
IDWLFLVRDDRIFSEMLRRAREADLGTVVVGDWDKALGRHADLWXPWSGVENGEVGDLLPKRRRENSRRREQGEEHGFGLEDDDGGVFLNEDEELGQEFMLLYSEDEDEDVDVEDYYDDDDDDEEEEDGFYIL

SEQ ID NO: 187259 - protein, 75 aa, Glycine max
  Clone ID: PAT_MRT3847_140106C.1.pep
LLANRQTHIFNLGWLMPQGSGPSNFVLSTRLGHQSPQPFLRIFAHYLDQPPFFCADHLSKVKTFVGSRQNFSPIN

SEQ ID NO: 187260 - protein, 147 aa, Glycine max
  Clone ID: PAT_MRT3847_140107C.1.pep
PTRPVNNQLIGAEILSLAEEDVPPEDLVFHKFYTNKMSLSSKPKKKKKKSADEEAAEELFDVDNGEVDGGDESDNEEIENLLDSTDPTLGPDSDYDYDDLDEVADEEDEDLIGDVSDAEINSEMDIDIPSDIDEEETDDAPIDDDDD

SEQ ID NO: 187261 - protein, 524 aa, Glycine max
  unsure (1)..(524): unsure at all Xaa locations
  Clone ID: PAT_MRT3847_140108C.1.pep
MTSLPFAVKARMRFRSRDFTLVLDKFPRDRGSIDLISVMAPNPMKMNMKQSANSTTTTIANKEILVRETMRISANLASTPLLEAPPPPSPIVGIICCEELDGRRWKYVAESDARGGFKKNSFRPVRLNFHNPRDHPLHEVLTFVTSYVVPEGLLDSVIPSXVPYMRGRGRQHHFEILVDHCFIQMLIRSVGVCFQXLLLDVAGRVGKMLLARQGKKFYYFLKQLSITGDLLMELGSSVILANADVLHLFLXIVIDIIIAXNAGALTSTSTITPIYKAFAKGENIWDVTISGECFGNIADLLGTALSILIAKRNPSLVTTFSLLSCGYILSSYREVKSVVLHTLNCGRFSVAVNYFPRRGQLNALHEGNMNENIFSFPWKDRPVVLGSRIKEACXDPSAYVAIEPLFDRERYIVTYNPSKHKVYAVLKDQAKSDDILKAAFHAHVLFFSLMKSLNENKASSLKQREDLSNMTHTVADIEARIAGTCKTVADSYGCFKNKAKEQGWTMSESHLNPGRARFYPVDNR

SEQ ID NO: 187262 - protein, 55 aa, Glycine max
  Clone ID: PAT_MRT3847_140109C.1.pep
SLRSISSHSIFDFSTLKLIEHLTFQNIQTNLGKLSQLCINGLRHQPLEWPNSHKM

SEQ ID NO: 187263 - protein, 160 aa, Glycine max
  unsure (1)..(160): unsure at all Xaa locations
  Clone ID: PAT_MRT3847_14010C.1.pep
MSSITFFQHLSSAFRDNQSHLKLVLLCTAVSGGGLWAYGESVAPEEAVREKKKVVVLGTGWAATSFMKNLKNPKYEVQVVSPRNYFAFTPLLPSVTCGTVEARSIVEPVRNIFKQKXVDVQFSEAECFKIDAENRKVYCRSSVNNNLNGKEEFVVDYDYL

SEQ ID NO: 187264 - protein, 72 aa, Glycine max
  Clone ID: PAT_MRT3847_140110C.1.pep
SFILEQSSLSAKSNQPLIHVCVLPITVISYPEGIFAFSSPCIFPTKGLSCPTSRQQVCPFTRRFFITTHAST

SEQ ID NO: 187265 - protein, 507 aa, Glycine max
  Clone ID: PAT_MRT3847_140111C.1.pep
MTFSLSFTTLLSLLSVILLHVNAFPVHFNHPIHHRHPRFAAHNYRDALTKSILFFEGQRSGKLPPNQRMSWRRDSGLSDGSAMHVDLVGGYYDAGDNVKFGFPMAFTTTMLSWSVIEFGGLMKGELQNAREAIRWGTDYLLKATAHPNTIYVQLGDAKKDHACWERPEDMDTPRSVFKIDANTPGSEVAAETAAALAAASLVFRRSDPTYSKILVRRAIRVFQFADKYRGSYSNALKPYVCPFYCSYSGYQDELLWGAAWLHKATKNPMYLNYIKVNGQILGAAEFDNTFGWDNKHAGARILLSKEFLVQRVQSLHDYKGHADNFVCSLISGTSLSSTQYTPGGLLFKMSDSNMQYVTSTSFLLLTYAKYLTQSHMLVNCGGITVTPRRLRTIAKKQVDYLLGDNPLKMSYMVGYGPRYPRRIHHRGSSLPSIAVHPGKIQCSAGFSVMNSQSPNPNILVGAIVGGPDRHDRFPDQRSDYEQSEPATYINSPLVGALAYLAHSFGQL

SEQ ID NO: 187266 - protein, 88 aa, Glycine max
  Clone ID: PAT_MRT3847_140112C.1.pep
NFGFLLSFSLHSSSPTFKLLSMTSYDGELVLNSSSPSRGVSNHLSSFSIPLALIFKKQRTSLMKKIQCLQAPHGVTSIWLINEMKYRK

SEQ ID NO: 187267 - protein, 119 aa, Glycine max
  Clone ID: PAT_MRT3847_140113C.1.pep
VVALPVLHLPLSYSRAAHVSRTVSCNENSPSKKDHPGDIYAKPPLRAVQPLSCLASLDRSPCSHYEIAYPTHQVQMRQCFRSCSPSTQKNAFCSSNNSVTSILALAARSMDHGCSNLEP

SEQ ID NO: 187268 - protein, 78 aa, Glycine max
  unsure (1)..(78): unsure at all Xaa locations
  Clone ID: PAT_MRT3847_140114C.1.pep
NNRSLTGVGFEPWEEVKKEXTLFPLTHTLTLRRQKYTHESEATINEQITVPYNDSNVDHAMIAYLGRHKAALKVIAKF

SEQ ID NO: 187269 - protein, 98 aa, Glycine max
  Clone ID: PAT_MRT3847_140115C.1.pep
ETVCLLLCNTLFHFINVLSEKLKLPLWFKPRNFIPRYILKPGSNLYLSYLCSSHNLFLGVLFLCILHMVYLILGLRHLAYGLTCIVFEPLLCLNEHPT

SEQ ID NO: 187270 - protein, 142 aa, Glycine max
  unsure (1)..(142): unsure at all Xaa locations
  Clone ID: PAT_MRT3847_140116C.1.pep
IVVKKETQNNRSPRGKANARQKSIPLAPRKGKNPKAPPPNGPPKKGPQTKKKPPGGKTPSPPPXKNPPAPLWKNPRTIKPPPGGSPPKPKTPNKPPGKNPPKNAKRTAPREKGPGPKRRAPGRGKKTEKALPTRTPKPAGDK

SEQ ID NO: 187271 - protein, 118 aa, Glycine max
  unsure (1)..(118): unsure at all Xaa locations
  Clone ID: PAT_MRT3847_140117C.1.pep
MARNEEKAQSMLNRFITMKAEEKKKPKERRPFLASECRDLSEADKWRQQIMREIGRKVAEIQNEGLGEHRLRXDLNDEINKLIREKSHWERRIVELGGPNYSKHSAKMTDLDGNIVDV

SEQ ID NO: 187272 - protein, 154 aa, Glycine max
  Clone ID: PAT_MRT3847_140118C.1.pep
DTLEILDSNHDLQQKYFKRPDSLFKRHLDDLQAAPSQSHFGHVEGTKLSNIVNCEHNDFSRKPDKEMKWLNYNRSNQKHDDGYSCHFVRRHAIHSSPKSSRNQFKGKNVPNAVPTRIVVLKPNLEKVQSPTKIGSSPCSPYAFLSQCGKHAEFS

SEQ ID NO: 187273 - protein, 66 aa, Glycine max
  Clone ID: PAT_MRT3847_140119C.1.pep
IIQNAKCPRSTIDKGDGSPKTEKDRTRGQIHQQKKGTPRTTAKQKNTRGNALNKEPGHGTQNGGPR

SEQ ID NO: 187274 - protein, 68 aa, Glycine max
  unsure (1)..(68): unsure at all Xaa locations
  Clone ID: PAT_MRT3847_14011C.1.pep
PPPVHQYPHPHPPFVHYSAPPSPKTPYKYPSPPPPVHPPXTRHRVDHSPRPRPTNKPYIYASPRPAYA

SEQ ID NO: 187275 - protein, 78 aa, Glycine max
  Clone ID: PAT_MRT3847_140120C.1.pep
RESGRCWMRLGIGDGGIGKVGERDRYGRGRTVLHVLLAKSKRRRLGFDFGFGFDFSLGVHDECGVSSVYLAFLRCRKS

SEQ ID NO: 187276 - protein, 70 aa, Glycine max
  Clone ID: PAT_MRT3847_140121C.1.pep
ILYKNRPNFPPFFGQEIQLELVRVTKICFRFNLSPRPAPMFFLQKVMGRFILFPVARVSLFPALGPVKYV

SEQ ID NO: 187277 - protein, 58 aa, Glycine max
  Clone ID: PAT_MRT3847_140122C.1.pep
HFEYKLLIIHTCLHPAYWPKGWLPFLSGKEKIYLTILKKKSDLQWLRSHASFMLCKFL

SEQ ID NO: 187278 - protein, 72 aa, Glycine max
  Clone ID: PAT_MRT3847_140123C.1.pep
CVTIQSICDVSDRPFSNSRSASSDTWSNHISSAAVYRIIEFYQPGGSWCPYQAKLEISYPSRSEFESLSGRV

SEQ ID NO: 187279 - protein, 87 aa, Glycine max
  Clone ID: PAT_MRT3847_140124C.1.pep
PAWVSFCTLSLSEDSVSDTEFLDSKLATYLALYSFVKYGLAYGVGNGITQDDIMRYFNVGNSIRESRNMIFEHYITRHLEDLFTCTA

SEQ ID NO: 187280 - protein, 105 aa, Glycine max
  Clone ID: PAT_MRT3847_140125C.1.pep
RPHMQWKGLHAQRDTQSDLPFSMTTSISATPSWAFTEPDTLSKSLDGRHRRIVHVITVLVAAAVADSVAATSAPSGRRSRHHGNTAHSKGLKNTPKMTDHDTQCN

SEQ ID NO: 187281 - protein, 70 aa, Glycine max
  Clone ID: PAT_MRT3847_140126C.1.pep
MGSNLSPQLCLMPFILGLLSGGVTTTPWSLARPQGSCSLEGVEIKGGSFRLLQEGHALEYVCPSGFYPVP

SEQ ID NO: 187282 - protein, 96 aa, Glycine max
  Clone ID: PAT_MRT3847_140127C.1.pep
SHGSEQESLSTSVGEEESLQWALDCAGYVEVGCLDTYDVRLYIMRVQRPLALWKVSLLRTVLLALKVRRGKADMRLRDHWLLWCMRLMKTNSAGEC

SEQ ID NO: 187283 - protein, 46 aa, Glycine max
  unsure (1)..(46): unsure at all Xaa locations
  Clone ID: PAT_MRT3847_140128C.1.pep
IFALQKRRDKKASSSSSSVKFASXLRYFGNYPFFCYSDYITINSCL

SEQ ID NO: 187284 - protein, 146 aa, Glycine max
  unsure (1)..(146): unsure at all Xaa locations
  Clone ID: PAT_MRT3847_140129C.1.pep
CTRAQRPQTAIAVGLNTKISKGKRGGQKNAVGPSVTKDXRDIKAPTLFQVKNIGKPLFCRTQGTRIASXGLRHRIFEVLSADLQGDADLSSMKIPVRAADVQRKNVLTDFCRTDLTAAKDRSSVQLWQTLMEAXHRDVKTTDDDAF

SEQ ID NO: 187285 - protein, 60 aa, Glycine max
  Clone ID: PAT_MRT3847_14012C.1.pep
YVTEKSLLKTFFISDIWLPFCLIWEIGQLTTFKLCFILLQYNPSPKKKKKKKKKIVQKKK

SEQ ID NO: 187286 - protein, 52 aa, Glycine max
  Clone ID: PAT_MRT3847_140130C.1.pep
NHNMSLKTRESFQIEYLKAVTEFVVNYMYKEETSMSQYSIPNYILVSFSNII

SEQ ID NO: 187287 - protein, 69 aa, Glycine max
  Clone ID: PAT_MRT3847_140131C.1.pep
RGVGQARFPSIRVWGIRFVSPIPNFQMPKRPMGQLTIPFLVKEMPDGELNNQLSRPKTQKWVKIFFFPV

SEQ ID NO: 187288 - protein, 65 aa, Glycine max
  Clone ID: PAT_MRT3847_140132C.1.pep
LEVLTSFLLLLRCAGLVCLVMVGGGHTTLGHADAVQAVIPFLDPLDINRVLVAQQTIPYFPNSSL

SEQ ID NO: 187289 - protein, 50 aa, Glycine max
  Clone ID: PAT_MRT3847_140133C.1.pep
CLHNNQIISHHARNINICRKIKVDLFPRSKISFHQKGKQKYSSLSNNLTY

SEQ ID NO: 187290 - protein, 162 aa, Glycine max
  unsure (1)..(162): unsure at all Xaa locations
  Clone ID: PAT_MRT3847_140134C.1.pep
MWESILLTVAATAGNNIGKILQKKGTIILPPLSFKLKVIRSYALNKTWVVGFLIDIFGALLMLRALSLAPVSVIQPVSGCGLAILSIFSHFYLKEVMNAVDWVGITLAGFGTIXRVGAGGEEQEVVALSIFHIPGLAFIGFILFILLSGWLRICSANEENKR

SEQ ID NO: 187291 - protein, 67 aa, Glycine max
  unsure (1)..(67): unsure at all Xaa locations
  Clone ID: PAT_MRT3847_140135C.1.pep
TILRGHYECVNSCWFNQQDQDQCSVGKNCKELYTGGNDRQILVWSPARSMADEMDEGPAEDXDNWSS

SEQ ID NO: 187292 - protein, 91 aa, Glycine max
  Clone ID: PAT_MRT3847_140136C.1.pep
KKRKLQCILKWKTDKRGFSERSQDLLMNEGVFSSNREQTGESNMDDLELPLFDFNTITMATNNFSDENKLGQGGFGIVYKGRLMEGQNIAV

SEQ ID NO: 187293 - protein, 138 aa, Glycine max
  unsure (1)..(138): unsure at all Xaa locations
  Clone ID: PAT_MRT3847_140137C.1.pep
MLDVAHMLPISVVYLLIPGLFRNHGPRDCGSTNVSLLKMGLACHIAIIHSEASAEKIARXFYRXILEIYWGSNKLCMLLGHSKVXADASAALILYWSDLKDKFAGLSLAQCPYGGTSIVSYLLXELTLGDYLNLRLLT

SEQ ID NO: 187294 - protein, 689 aa, Glycine max
  unsure (1)..(689): unsure at all Xaa locations
  Clone ID: PAT_MRT3847_140138C.1.pep
MASNSELVRTVVESVLGVSVSDSVMVIAATSVALVIGLLVFVWRKSSDRSKEQKPLAVPKLLVKEEEEDEVDAGSGKTRVAIFFGTQTGTAEGFAKALAEEIKARYEKAAVKVADLDDYAMDDDQYEEKLKKESLAFFMLATYGDGEPTDNAARFYKWFTEGKDERGIWLXQLTYGVFGLGNRQYEHFNKIGKIVDEELSEQGAKRLVPLGLGDDDQSIEDDFVAWKESLWSELDQLLRDEDDVNTVSTPYKAAIPEYRVVIHDSTVTSCNDNHLNVANGNAVFDIHHPCRVNIAAQRELHKPESDRSCIHLEFDISGTGIIYETGDHVGVFAENGDETVEEAGKLLGQDLDLVFSIHTNNEDGTPLGSSLPPPFPGPCTLRFALAHYADLLNPPRKASLVALAAHTSEPSEADRLTFLSSPQGKDEYSKWLVGSQRSLLEVMAEFPSAKPPLGVFFAAVAPHLQPRYYSISSSPRFSPQKVHVTCALVCGPTPTGRIHKGVCSTWMKNAIPLEKSRDCSWAPIFIRTSNFKLPADHSIPIIMVGPGTGLAPFRGFLQERLALKEDAVQLGPALLFFGCRNRQMDFIYEDELKNFMEQGALSELIVTFSREGPEKEYVQHKMMDKAANLWNLISQGGYLYVCGDAKGMARDVHRTLHTIVQQQENVDSSKAEAIVKKLQMDGRYLRDVW

SEQ ID NO: 187295 - protein, 277 aa, Glycine max
  unsure (1)..(277): unsure at all Xaa locations
  Clone ID: PAT_MRT3847_140139C.1.pep
MASACVTNATRAAACRDGAAAAHLKMISIFVIFVTSVAGMSSPVALAGIFRGKPLYDKAIVVIKCFAAGVILSTSRXHVEQHAHAQYAPVEKEAAVELGGSAGDGDGEKGEELAKLKQRLVSQVLEIGIIFHSVIIGVTMGMSQNVCTIRPLVAALAFHQIFEGMGLGGCVAQAGFSFGTITYMCFMFAVATPIGIILGMALFSLTGYDDSSPNALIMEGLLGSISSGILIYMALVDLIAVDFFRNKLMNSNRLLKKASFVALTLGSAAMSILALWA

SEQ ID NO: 187296 - protein, 80 aa, Glycine max
  unsure (1)..(80): unsure at all Xaa locations
  Clone ID: PAT_MRT3847_14013C.1.pep
RRRIQIFGKTLTGPSITLELXAPTPLATVKPKIQDKERITPDQHRHTFADKQLKDKGTLPDYIVHKECTPHLELRPRGGF

SEQ ID NO: 187297 - protein, 48 aa, Glycine max
  Clone ID: PAT_MRT3847_140140C.1.pep
TYFSKPVSYLLVFFKELKGSNLRRWKAWQQHWRAQPGLALLKPLLFLG

SEQ ID NO: 187298 - protein, 62 aa, Glycine max
  Clone ID: PAT_MRT3847_140141C.1.pep
SGRVRYTHATGRRNEWSVRVCISQQWRDSHQCLRDGAVIAASCRQDIYMYPFICMDVWLYHF

SEQ ID NO: 187299 - protein, 147 aa, Glycine max
  Clone ID: PAT_MRT3847_140142C.1.pep
MVDTFSIESRLLIREFDEDRDVKVVGKLEKNCEIGTKKGVSIFTNMMGDPLSRIRFYPLHVMLVAELLESKELVGVVRGCIKSMRTPSESLLKIGCILGLRVSPTHRRKGIGLKLVNSVEEWMLRNGAEYAFLATEKNNDASINLFT

SEQ ID NO: 187300 - protein, 54 aa, Glycine max
  Clone ID: PAT_MRT3847_140143C.1.pep
LLWKCGCLLRTNTLNLNYVMRTSSRHYGLALPFGAARGTWTTCHLIGWLKRGSA

SEQ ID NO: 187301 - protein, 96 aa, Glycine max
  unsure (1)..(96): unsure at all Xaa locations
  Clone ID: PAT_MRT3847_140144C.1.pep
SRXGYXSSEFGSXXXXKXXXXTXXYFXRXLPVKXRQRXXXXXTSPAAXXMDLGEHXVXDXRDIXXWRXHXVXXHLXSRLGXXRXXFAXXXFIIXXL

SEQ ID NO: 187302 - protein, 90 aa, Glycine max
  Clone ID: PAT_MRT3847_140145C.1.pep
FWITVLMFVWNMLIKLLSNGLFLPTLPHLCPYQCKCVVFAYIAVNEQLKEQIKDVDAAQSKEVSVFWVGMAEVNTSRLDFQMFNKNQLDQ

SEQ ID NO: 187303 - protein, 33 aa, Glycine max
  Clone ID: PAT_MRT3847_140146C.1.pep
RIWLCLMQFRLITPWKCSPRTGRASHHPKLLST

SEQ ID NO: 187304 - protein, 64 aa, Glycine max
  Clone ID: PAT_MRT3847_140147C.1.pep
ITIFLSSNQFFSDILNTLIYIILFIKNTHIFFNFYLFHLLFFILKINYPLIFSTLLYILHFSLY

SEQ ID NO: 187305 - protein, 59 aa, Glycine max
  Clone ID: PAT_MRT3847_140148C.1.pep
SKISLYLGSASFSSLSQISLIVLMQSSDLLRSNSPSTHHETTCSSFTRAMAFVLPSCLW

SEQ ID NO: 187306 - protein, 76 aa, Glycine max
  unsure (1)..(76): unsure at all Xaa locations
  Clone ID: PAT_MRT3847_140149C.1.pep
WFWVIRLLTPPGTLVFPSKGESQTTLVPPRRSLTRSTFTSKTSRLAVSQSENNNPASRPARSSSVTRSCIXTSHSQ

SEQ ID NO: 187307 - protein, 124 aa, Glycine max
  Clone ID: PAT_MRT3847_14014C.1.pep
SKRGQGVHESTKNTREQKRGSPNQEERAPQKKTKTTRGGQKKQQKDPEKKRETTKKKKKDEKRNAKGQTLTVSKASGDRRKPSRPKKGGSLKRGKAEQRSYKKKGEGGYQNGAAFHKKRRGGGR

SEQ ID NO: 187308 - protein, 87 aa, Glycine max
  Clone ID: PAT_MRT3847_140150C.1.pep
HFSLIFIFLFLSHVIYYTYIFLFLLSHSLGVKITYAVSKYIFPFELDTPARKLCRLNLQYIYIYIYIYIYIYICVCVCVCVCVCVNL

SEQ ID NO: 187309 - protein, 121 aa, Glycine max
  unsure (1)..(121): unsure at all Xaa locations
  Clone ID: PAT_MRT3847_140151C.1.pep
NIVLKMKKNGKLRKILKKKGILLSETIKNKHKKXLLHSHIVMMFMKGTQNATKCGFSSRVDYVIEKKGLNFGSFDILIDEEVRKGLKVYLNWPTYPKXFXKSELIGGNDIVMELQNNGELK

SEQ ID NO: 187310 - protein, 121 aa, Glycine max
  unsure (1)..(121): unsure at all Xaa locations
  Clone ID: PAT_MRT3847_140152C.1.pep
SNADDWALADMINQPELLHRAREQLDTRAPKXERLAHESDIPTLNYVKACARQALRLDPIAPFIPHRVCMSDTMEENHFMPKDRHVMLNIQELGRNPEVWNETYEFTPERHLQSDGCHVDL

SEQ ID NO: 187311 - protein, 168 aa, Glycine max
  Clone ID: PAT_MRT3847_140153C.1.pep
FCERTEQQQQRSMIRSLALHLAARFRHNHNLVRLSSSSSAASASTLHHATPSPSSSEPVHITQNCVRRMKELEGSESSTDGKMLRLSVETGGCSGFQYVFNLDNRINSDDKVFEREGVKLVVDNISYDFVKGATVDYVEELIRSAFVVTENPSAVGGCSCKSSFMVKQ

SEQ ID NO: 187312 - protein, 97 aa, Glycine max
  Clone ID: PAT_MRT3847_140154C.1.pep
RTGHRTVRGCLHIVHQGGNFFEHWEGFLLIVFNLMTLIEFLKASQFLSAPLTIFLQGLRLKLSHNFWRIWNSRFALIFHSHFKSTPSKALWTSRFLP

SEQ ID NO: 187313 - protein, 60 aa, Glycine max
  Clone ID: PAT_MRT3847_140155C.1.pep
IIYRFGNKIIQFLSTQPNNQLHVSSSLMSLIPLLLRSIFVLRIHAGQVELNYVAGLKGIV

SEQ ID NO: 187314 - protein, 190 aa, Glycine max
  unsure (1)..(190): unsure at all Xaa locations
  Clone ID: PAT_MRT3847_140156C.1.pep
LSQPPDTINGSIRVTVQGEVIEFCFGEEHLCFQTLQRFTAATLEHGMHPPVSPKPEWRKLMDEMAVVATEEYRSVVVKEARFVEYFRSATPETEYGRMNIGSRPAKRRPGGGITTLRAIPWIFSWTQTRFHXPVWLGVGAAFKFAIDKDVRNFQVLXEMYHEWPFFRVTLDLLEMVFAKGDPRIAGLYDE

SEQ ID NO: 187315 - protein, 69 aa, Glycine max
  Clone ID: PAT_MRT3847_140157C.1.pep
VRLLPPRISVLNASTCVLVDMIVCKIRQPFGDSRISARAHSVDPWWSSFSRAINRCSIKYVKDSVESYS

SEQ ID NO: 187316 - protein, 108 aa, Glycine max
  unsure (1)..(108): unsure at all Xaa locations
  Clone ID: PAT_MRT3847_140158C.1.pep
TRQREKTRTGDIRRXPKPPKPTQTKRQKRTKLKNKKSNPTKEARTKPKTTISTIRPKTEPQKKPNSGPSKKTKGLNNGERGPTKTRKGPNKMNDNSRDKRKKITRRTE

SEQ ID NO: 187317 - protein, 107 aa, Glycine max
  unsure (1)..(107): unsure at all Xaa locations
  Clone ID: PAT_MRT3847_140159C.1.pep
VSLRGKPLFTPPRSFLWLVTLANCXLVITQQFNKLQLNNFNALEPNXRVESKGGLIXTWNSQHPELQCAGVTVSKRTLNRNGLHLPSYSPYPQMIIVVQGKGTIGFA

SEQ ID NO: 187318 - protein, 79 aa, Glycine max
  Clone ID: PAT_MRT3847_14015C.1.pep
KSLHLQGFNFTATGNDSAEPCSNCYVLNTLVLRFCSLHNDARVLCISNSTLSILTILEGQTYQIVLSTPNLKSFTIRGS

SEQ ID NO: 187319 - protein, 219 aa, Glycine max
  unsure (1)..(219): unsure at all Xaa locations
  Clone ID: PAT_MRT3847_140160C.1.pep
MEEEHQCSGSGEEPQTQEPDGEDQQLQHQCQVPRAEEKFVLQFMDSMDNYLSLFDAVSSTLRQGWFDLASARHSMGASRINSSLLDLKFHSAATTLKITNYDGTQPXSCLRKWVSSEIESSQIEDEGSMFVVSHFVICLVVRTAEVTMAKNSSGLVENAEVQNERSKSLSIFGVLISPKLRASQLSFEKALETLIEIANMQSSLLYSFHQLRRVEDTKE

SEQ ID NO: 187320 - protein, 105 aa, Glycine max
  unsure (1)..(105): unsure at all Xaa locations
  Clone ID: PAT_MRT3847_140161C.1.pep
GKKKEQTLNFKPRLQSGSYGTQPKAGGGGGPSGLQXAPFSPWGHKPGSPRTPGGXXFEKEKAIFGYGNLFPTPGGAGGWKPRGRGGWWGRGARGGGRPGGAGGGG

SEQ ID NO: 187321 - protein, 230 aa, Glycine max
  Clone ID: PAT_MRT3847_140162C.1.pep
MKMSLVQLRPLLTRRGFSTSSENLVASVLFERLPVVIPKIDPVVYAFQEFSFRWRQQYQRRYPDEFLDKSDARGKGDYQIDYVPAPRVTEADKNNDRRSLQRALDRRLYLLLYGNAYGAPSGKPVWHFPEKVYESEDTMRKCAESALKSVLGDLSNTYFVGNAPMAHMVVQPTEDQSRSTSFKRFFFKSQVIAKNKFNIGKCEDHVWVTKDELMEYFPEQAEFLNKMIIS

SEQ ID NO: 187322 - protein, 228 aa, Glycine max
  Clone ID: PAT_MRT3847_140163C.1.pep
MKMSLVRPLLTKRGFSTSSENLVASVLFERLPVVIPKIDPVVYAFQEFSFRWRQQYQRRYPDEFLDKSDARGKGDYQIDYVPAPRVTEADKNNDRRSLQRALDRRLYLLLYGIAYGAPSGKPVWHFPEKVYESEDNMRKCAESALKSVLGDLSNTYFVGNAPMAHTVGQPTEDQSRSTSFKRFFFKSQVIAKNKFNIGKCEDHVWVTKDELMEYFPEQAEFLNKMIIS

SEQ ID NO: 187323 - protein, 75 aa, Glycine max
  Clone ID: PAT_MRT3847_140164C.1.pep
LFSQATTSVAQSPAAAPTAPATPSTAAAPAPAPSAAPTDIIRILRRAGGWTRLIRLGEATQVANQINSQRGRTSG

SEQ ID NO: 187324 - protein, 73 aa, Glycine max
  Clone ID: PAT_MRT3847_140165C.1.pep
TAPPANKQNKHYSISNLPSPPRHSSENSNHRRRLWTLRQSLLILISQATTIACLRAPIFLSGRNQSLSKSDFT

SEQ ID NO: 187325 - protein, 124 aa, Glycine max
  Clone ID: PAT_MRT3847_140166C.1.pep
CSAPPASLSALELLRSSMASRGLNPYAPSSSLMPNSTNSNALYSSGFPMQEVKPSLNFSSADGMGNRSYDHHQIQERGGGRLLFPFGDVKQLSAAAGADQVEHKEKQQGNSTGYWTGMIGEGTW

SEQ ID NO: 187326 - protein, 164 aa, Glycine max
  Clone ID: PAT_MRT3847_140167C.1.pep
LELEPLFSTASSPPILLAISAVLVLFAVVYLRVSWTLAPVVAVVESTWGLQSLCRSAALTKGMRPLAASCFLFFASMQALLLWTASVDGWAWKDWAFVVQIVLTSTLLMLLMLYNAAADTVLYMYCKAVHGELALEIAEEFAWQYVCLPFDDGKVPHVVSVVRV

SEQ ID NO: 187327 - protein, 78 aa, Glycine max
  Clone ID: PAT_MRT3847_140168C.1.pep
YNVAGGGESHLYGTEGPLYYLRNGFNNFNFCFVLALLFLGILPIAKKKYAPDLLIVISPIYIWLGFMSLQPHKEERFG

SEQ ID NO: 187328 - protein, 93 aa, Glycine max
  unsure (1)..(93): unsure at all Xaa locations
  Clone ID: PAT_MRT3847_140169C.1.pep
DRKQNEGNHIPVSNIIPWENHVFQIPXMAQEETLSLNAXELGSAMVSKKRKPQATALHGAAIXLIIDSCASPHCTIGCAMLSLDTYYPIPENA

SEQ ID NO: 187329 - protein, 189 aa, Glycine max
  Clone ID: PAT_MRT3847_14016C.1.pep
MYCLNAKDVVKRYRCGDDWGLAITKGGGCTCSQDEFCLAPVQEPGSVWVEIAYSRTSHECLSHVQNRFPFSETSGVKETNCGGTFIFVGDVISMAHSIQLTSYQPRWGPQIVAYFPNLLERILIWTFHVSLALALLNGLPVYFLDGESILDATLSHFTSLSPGKRKKVLRLCLLGGSVISIIVCFRELL

SEQ ID NO: 187330 - protein, 112 aa, Glycine max
  Clone ID: PAT_MRT3847_140170C.1.pep
MSKQDFLKVQSCVLKVNIHCDGCEQKVKKLLQKIDGVYSVRIDADEGKVVVAGDVDPAKLVKKLKRGGKHAEIWQNQKGEMMYNHKYPINQNMMQLGGKDNNECQNQNQQKE

SEQ ID NO: 187331 - protein, 56 aa, Glycine max
  unsure (1)..(56): unsure at all Xaa locations
  Clone ID: PAT_MRT3847_140171C.1.pep
GPVVAFKQSTTPXYRSYKEHVLSNRSKFAQDLNERRYQLDSEETDNHXVLTNLNNN

SEQ ID NO: 187332 - protein, 50 aa, Glycine max
  unsure (1)..(50): unsure at all Xaa locations
  Clone ID: PAT_MRT3847_140172C.1.pep
NQKMGNVLHFWSIRPDPPLVPSSXHGGCPVXIKGNKWSSTKXMHLREYKV

SEQ ID NO: 187333 - protein, 51 aa, Glycine max
  Clone ID: PAT_MRT3847_140173C.1.pep
PINCTGLTWYRVSISSHFGLDKHKFSAFHVHLLCYLVMFPFAQVRQHFLHL

SEQ ID NO: 187334 - protein, 76 aa, Glycine max
  Clone ID: PAT_MRT3847_140174C.1.pep
MAPKPITSPVPDSWYPTLSVFTLAIGLVLTASFFIYEATSSRKSRSLVQELTTGAVASVFLGFGSLFLLLASGVYV

SEQ ID NO: 187335 - protein, 64 aa, Glycine max
  Clone ID: PAT_MRT3847_140175C.1.pep
SGGSFPATIPEYELRFTPAIIGPITWSLPNNFVSLTGSSPCSTIVRILYYADSYYYSSPLPFNH

SEQ ID NO: 187336 - protein, 353 aa, Glycine max
  unsure (1)..(353): unsure at all Xaa locations
  Clone ID: PAT_MRT3847_140176C.1.pep
YDIVLNSQLEKYEKARDVILSGLQVDPFSNSLRASLQNLESVSSSSRGMSTHGHPERNDDFDCTLCLKLLYEPVTTPCGHSFCCSCLFQSMDRGNKCPLCRTVLFISPRTCSISVTLKNIIQKNFPEEYAERKQEHDSLIKAGVDLLPLFVMDVVIPCQRFPLNIFEPRYRLMVRRIMEGNHRMGMAILDSTGSLAEFACEVEITECEPLPDGRFYIEIESRRRFRIIHSWDQDGYRVAEVEWIQDIMPPEGTSERDTLQQQTYNAVEDARSWIARAKEAARHDQRKLERLASVEVMMPSPKDPERFSFWXLATLSNRRPAERLDLLRIRDTAERIRRGLIFLRQEEQGCRIQ

SEQ ID NO: 187337 - protein, 80 aa, Glycine max
  Clone ID: PAT_MRT3847_140177C.1.pep
TTTIILREILPLIIILSHSNKMISGKKIHMTHEKNRIKKKGYVEEKIDPKHSRPTHQKTPYSLLPSLSHKRTYDVKCSWS

SEQ ID NO: 187338 - protein, 52 aa, Glycine max
  Clone ID: PAT_MRT3847_140178C.1.pep
RNPGGKVAYFLYGNYIKRFFTEVEILLDLAPTIFSETYFQISYFIKLHFTLY

SEQ ID NO: 187339 - protein, 66 aa, Glycine max
  Clone ID: PAT_MRT3847_140179C.1.pep
IIYRIKLISSTTKTSATYGFCCGPNQTYKLIYILEAEINNASNRSYTVLIPCFLHDHISSSKSGRV

SEQ ID NO: 187340 - protein, 66 aa, Glycine max
  Clone ID: PAT_MRT3847_14017C.1.pep
RGTSLEFFFFFFGLEFQSSKRRLNYVNSKVRINFDHMGKVSSHLFQLYHYPHLNSNLKTHKQNRHH

SEQ ID NO: 187341 - protein, 207 aa, Glycine max
  unsure (1)..(207): unsure at all Xaa locations
  Clone ID: PAT_MRT3847_140180C.1.pep
YTNSIFSNNILFYGYNRRVFVVLLLFRIGMPTGRFSNGRTVADVINQKLGLXPTTTGSVVLKGVNYASGXGGRINFDAQIDTYANTRQEIISLIGVPAARNLFKKALFTIALGSNSRKGVGISGNICGHIDIKTQTTTHSNFSKNLESFVLKKNVSIFFVDHEQFTXLRRLFSLGARKIVVANVGPIGCIPYVRDFNPLAGDECVTF

SEQ ID NO: 187342 - protein, 155 aa, Glycine max
  Clone ID: PAT_MRT3847_140181C.1.pep
EQADMIEGKSSLPAAVQHTHDVRKMKVGLEQERKKLVNIQLKLQEEEKLNKSFQEELKLLKLERDKTKNEVSKLHNELNEKISEIKCLQLELTRREDEEAGDSVDSFKRLIETIEKENTTLKLEKDELEAALKSRRMASQMSPDDSTDSEQGSKQ

SEQ ID NO: 187343 - protein, 203 aa, Glycine max
  Clone ID: PAT_MRT3847_140182C.1.pep
MAVTKVYIVYYSLYGHVDTMAREVHRGAATVEGVEATLWRVPEMLSELILDKLKAPPKPNDVPDIMPEQLVEADGLIFGFPSRFGMMPSQLKAFFDATSELWASQALAGKPAGIFWSTGFYGGGQELSALTAITQLAHHGMLFVPLGYTFGSGMFEIDEVKGGSAYGAGTFAGDGSRQPTELELQQAFYQGKYLAEVTKKLKS

SEQ ID NO: 187344 - protein, 73 aa, Glycine max
  Clone ID: PAT_MRT3847_140183C.1.pep
PRVYFVSHMRRYVYFFFLLSTMYVFHECLLSSLAHQWSFLSFTPSSLSPHLLWFIQALLVIINECNVPPPPHG

SEQ ID NO: 187345 - protein, 43 aa, Glycine max
  Clone ID: PAT_MRT3847_140184C.1.pep
SSKLNTQILNLNPGVYRILFRLGLMNICFLIQNKCQVNGSPSF

SEQ ID NO: 187346 - protein, 83 aa, Glycine max
  unsure (1)..(83): unsure at all Xaa locations
  Clone ID: PAT_MRT3847_140185C.1.pep
KPKARGRLPEPQTPNTRPTPGPARTPRAPETKTKRPSGNTRTEXRRNRXKGAEDAEEGRRRREDTXXETRKNRREEXPQKKRR

SEQ ID NO: 187347 - protein, 31 aa, Glycine max
  Clone ID: PAT_MRT3847_140186C.1.pep
IWVTKQVFLIQYPKTFCDSAAMTSSHDEVTL

SEQ ID NO: 187348 - protein, 330 aa, Glycine max
  Clone ID: PAT_MRT3847_140187C.1.pep
MSSSTIRRDLESGGANKNINNISYSAAPTSYVYDPEVHWTSWLVPLFVAVNVVVFFVVMYVNDCPRKNLGFEGDCVARFLGRFSFQPLRENPLFGPSSSTLTKMGALRWDDVVNHHQAWRLVTCIWLHAGVVHLAANMLSLVFIGIRLEQQFGFVRIGIIYLLSGFGGSVLSSLFIRNNISVGASGALFGLLGAMLSELITNWSIYTNKAAALFTLLFIIVINLAIGMLPHVDNFAHIGGFLSGFLLGFILLLRPQFGWLEQQRLHAGVHLKSKYKAYQYVLWIVSAILLIVGLSIALVMLFRGESGYDHCHWCHYLTCVPTSKWKCNDN

SEQ ID NO: 187349 - protein, 329 aa, Glycine max
  Clone ID: PAT_MRT3847_140188C.1.pep
MSSTTRRDLESGGANKNYNNISYSAAPTSYVYDPEVHWTSWLVPLFVAVNVVVFVVAMYLNDCPRKNLGFEGECVARFLGRFSFQPLRENPLFGPSSSTLTKMGALRWDDVVNHHQAWRLVTCIWLHAGVVHLAANMLSLVFIGIRLEQQFGFVRIGIIYLLSGFGGSVLSSLFIRNNISVGASGALFGLLGAMLSELITNWSIYTNKAAALFTLLFIIVINLAIGMLPHVDNFAHIGGFLTGFLLGFILLLRPQFGWLEQRRPPAGVRLKSKYKAYQYVLWIVSAILLIVGLSIALVMLFRGENGYDHCHWCHYLTCVPTSKWKCNDN

SEQ ID NO: 187350 - protein, 77 aa, Glycine max
  Clone ID: PAT_MRT3847_140189C.1.pep
GNAEISKTHGVIYQISRSTHDSPTIHYPPYRSNINQYKILFNTPYYTLKSLLYHTKPLQIFYILLDCLIFTSIYITL

SEQ ID NO: 187351 - protein, 87 aa, Glycine max
  unsure (1)..(87): unsure at all Xaa locations
  Clone ID: PAT_MRT3847_14018C.1.pep
LERNFCYFLQPFCSAIIGXVKIGINGFGRIGXLVAXXALQRDDVELXAVNXPFITTDYMTYMFKYDSVHGTWXHHDVTVKTSRPSLR

SEQ ID NO: 187352 - protein, 74 aa, Glycine max
  Clone ID: PAT_MRT3847_140190C.1.pep
VVDNAKTVGLISLPGAMTGLIMGGASPLEAIQLQIVVMNMLIGASTISSIMSTYLCWPAFFTKAYQLETQVFSK

SEQ ID NO: 187353 - protein, 82 aa, Glycine max
  Clone ID: PAT_MRT3847_140191C.1.pep
KATFFSWGVATNIIPGQAFDLNSFFFPGATENLINPSSLLKKKGGRFFAKKRAPLRQIKKQFQKGSKLSPWKTPLPDLYGHK

SEQ ID NO: 187354 - protein, 84 aa, Glycine max
  Clone ID: PAT_MRT3847_140193C.1.pep
ILRNQISSQSTERPEFFRGNHYTENRSVFFFPFVNLGGGIIKVLYTSKDQRAYSGSKSSSYSSSSHSSSTIPNACPRNIVTICW

SEQ ID NO: 187355 - protein, 170 aa, Glycine max
  Clone ID: PAT_MRT3847_140194C.1.pep
MYHLEKPQRDDKQFLTPSFSSTLLDQIYRSIDEGERKNGEIKFYRHTTMSTSKRQSRSNSKSMDAGDRKIVRAKNGRKKLHCDEDIMFFSSTSISSTDSSSLGFSSSDTESISRASCFAPRVGRKGGGSASFRSEKQGMRVLDGFCRNSFHRFKHAHFPLPVLSRHHVSV

SEQ ID NO: 187356 - protein, 364 aa, Glycine max
  Clone ID: PAT_MRT3847_140195C.1.pep
MMEYCKDVLSYLDSDTSIKILMSLDDLADLVRATCVSRSWRDIVIANGLCKQLCLRMFPQLSRVAFVVELNQNGAKEHAEVGSSYSMEWLSLLREHRVFAYLGRALMSSVAMNCIAKTVGASSTDNFPQESIDNTLEPRDHINGRYYYWSSNGQSNPNVPETLTYELVSPICVITEINIQPFQADFQIGSPIYSAKSVRFKMGHPKASLDATDDEMFVWTYTSPEFPMSKENRLQKFKLPEPVLCIGGFLQIELLGRIQRQEMDGLLYICVSHVQVLGGSLSPPFNVDILQPSGMFVLKRDQLADHQPVVTSGNESQEISAEQREVRDFQHIVTILSGQALGIVEDEWDEEEFDVDDFDPEYAL

SEQ ID NO: 187357 - protein, 62 aa, Glycine max
  Clone ID: PAT_MRT3847_140196C.1.pep
REGNRTISYKKNLKIFTLFNPSIFVCSYCLCCANLLPQVVSIKDNSFKCCYYILQLYSNFPF

SEQ ID NO: 187358 - protein, 60 aa, Glycine max
  Clone ID: PAT_MRT3847_140197C.1.pep
ANLPAKLTQPPFSLCMRPKEDDQIEAGLKMNGGNKQPFTDGLAGGCLLLHIDGGALNEHV

SEQ ID NO: 187359 - protein, 149 aa, Glycine max
  Clone ID: PAT_MRT3847_140198C.1.pep
KCFSYVIEISPTLLEDQRYDKIAIVGAILRGMDKVWIWEGAPQGLVDGMAEYVAEMAGFPRGMVSGGGEMPQCRKGGAGWWWEDKDPSHVARLLHYCEKFKKGFIQRLNEAMRDTWHDRVVDEVLGMPVMELCGLYNDNNASWVGSISM

SEQ ID NO: 187360 - protein, 69 aa, Glycine max
  Clone ID: PAT_MRT3847_140199C.1.pep
EGSADLLFNSPPMTPPKQEGIAHIHRALQSQNQDTGQVSGLGPECSSSCHRTAGPRSPEMGSPAIPRSP

SEQ ID NO: 187361 - protein, 225 aa, Glycine max
  unsure (1)..(225): unsure at all Xaa locations
  Clone ID: PAT_MRT3847_14019C.1.pep
MAASSPLPLPELHFLSPQITPKRRISLSKLPSISRHVTSNVSLRTARIRASREESALADRVNDVEWTGNGAAAAASNANGASVSGYVNGATNGSLVKYGYEDGNDVAAAEVVEVEASNKLSEDGRKKRLEEIGKEDAWFKQTGNEQVEGRRFXLSLSRFYYLELGMKYERVVFRRWQLHLGGRWNRFKTYSTIQRTFEIWGFGGTVIFKGWLNHQKVXNKGGMTE

SEQ ID NO: 187362 - protein, 142 aa, Glycine max
  Clone ID: PAT_MRT3847_1401C.1.pep
YLANPVQVKVGKVSSPTTNVSQTLVKISENEKIDRLLDLLVEEASQAEKCGHPCPLTIVFVERKTRCDEVAEALVAQGLSAVSLHGGRSQSEREAALHDFRSGSTNILVATDVASRGLDVTGVSHVINLDLPKVFMLQAETT

SEQ ID NO: 187363 - protein, 170 aa, Glycine max
  Clone ID: PAT_MRT3847_140200C.1.pep
ATTSLDFLDISNCGFQGSIPPSFSNLIHLTSLDLSDNNLNGSIPPSFFNLTHLTSLDLSDNNLNLNGSIPPSFSNLIHLTSLDLSGNNLGSTPPPFPHLTHPTTPDPSHNNLNGSIPPSFSNLIHLTSLDLSGNHLNGSIPPSFSNLIHLTSLDLSYNNLNGSIPSSLLT

SEQ ID NO: 187364 - protein, 64 aa, Glycine max
  Clone ID: PAT_MRT3847_140201C.1.pep
AILYSEDGFDSKWQGNFIYDLLGLSSSRFRYPCFVPSLLYCVSNERMGVSRWVPDGEPLQWQAP

SEQ ID NO: 187365 - protein, 46 aa, Glycine max
  Clone ID: PAT_MRT3847_140202C.1.pep
NIQISWILKGYYYVLFSIVISLPNTNRLQRYHYNQYSKSNHNYKTK

SEQ ID NO: 187366 - protein, 37 aa, Glycine max
  Clone ID: PAT_MRT3847_140203C.1.pep
LIRENDGTWKFIVTTHALCVRYLILFYHPGKKIIPTQ

SEQ ID NO: 187367 - protein, 46 aa, Glycine max
  Clone ID: PAT_MRT3847_140204C.1.pep
PLVFLFVEAEALFWTFYSFLLWRGIEFLEFYMLFNVIGINSRPIFL

SEQ ID NO: 187368 - protein, 84 aa, Glycine max
  unsure (1)..(84): unsure at all Xaa locations
  Clone ID: PAT_MRT3847_140205C.1.pep
TXIEXPPKIPSPSSLALXXPEERGLVXXXRRSXXGHHXTIPRXWXAXVSTVXTXCSLLIXAETFPCSTNCSDGFXXEXXXKLRX

SEQ ID NO: 187369 - protein, 213 aa, Glycine max
  Clone ID: PAT_MRT3847_140206C.1.pep
MDSSSGHQEFDYLFKLLMIGDSGVGKSSLLLSFTSDAFEDLSPTIGVDFKVKYVMMGGKKLKLAIWDTAGQERFRTLTSSYYRGAQGIIMVYDVTRRDTFTNLSEIWAKEIDLYSTNQDCIKMLVGNKLDKEGDRVETKKEGIDFAREYGCLFIECSAKTRVNVQQCFEELVLKILDTPSLIAEGSKGVKKNIFKERPPQSDASTSSCCYLRF

SEQ ID NO: 187370 - protein, 40 aa, Glycine max
  unsure (1)..(40): unsure at all Xaa locations
  Clone ID: PAT_MRT3847_140207C.1.pep
TFKKKGQGCYDKHHSIFIILPSTLNSAELSKWVGLLXSKG

SEQ ID NO: 187371 - protein, 114 aa, Glycine max
  Clone ID: PAT_MRT3847_140208C.1.pep
MDSSSEHQEFDYLFKLLMIGDSGVGKSSLLLSFTSDAFEDLSPTIGVDFKVKYVTMGGKKLKLAIWDTAGQERFRTLTNSYYRGAQGIIMVYDVTRRDTFTNLSEIWAKEIDLY

SEQ ID NO: 187372 - protein, 294 aa, Glycine max
  Clone ID: PAT_MRT3847_140209C.1.pep
MDPEVQQSQVAFFLGADPSPFQTLISHLMSSSNEQRSHAETLFNLCKQTDPDNLSLKLAHLLHSSPHQEARAMSAILLRKQLTRDDSYLWPRLSPHTQSSLKSLLLSSIQKENIKSISKKLCDTISELASGILPDNAWPELLPFMFQCVSSDSPKLQESAFLIFAQLSQYIGDSLTPHIKHLHDIFLQCLTNASVNPDVRIAALNAGINFIQCLAGSADRDRFQDLLPAMMPTLTEALNSRQEATAQEALELLIELAGTEPRFLRRQLVDVVGAMLQIAEAESLEEGTRHLAIE

SEQ ID NO: 187373 - protein, 75 aa, Glycine max
  unsure (1)..(75): unsure at all Xaa locations
  Clone ID: PAT_MRT3847_14020C.1.pep
SGNCGCXSACKCGNCCXGCMMYPYLSYTESTTPKPWSLAVTPVKAQFKSAXMGVPAENNGCKCGANCTCNPCTCK

SEQ ID NO: 187374 - protein, 65 aa, Glycine max
  Clone ID: PAT_MRT3847_140210C.1.pep
MFLFHRIGVDEWLRVSSVQDVFSIGDCSGFVESTGRQTLPALAQVSDIRFINFLSSFLDSYLVFG

SEQ ID NO: 187375 - protein, 177 aa, Glycine max
  Clone ID: PAT_MRT3847_140211C.1.pep
PARVLTCHPSLFFFFFFIVAAMDSEVQQSQVAAILGADPSPFETLISHLMSSSNEQRSHAEALFNLCKQTDPDSLSLKLAHLLHSSPHEEARAMSAILLRKQLTRDDSYLWPRLSPHTQSSLKSLLLSSIQKENIKSISKKLCDTISELACGILPDNAWPELLPFMFQCVSSDSPKL

SEQ ID NO: 187376 - protein, 248 aa, Glycine max
  unsure (1)..(248): unsure at all Xaa locations
  Clone ID: PAT_MRT3847_140212C.1.pep
MELNESDKKRMRRPNRSKAFKVELSYASKIPLQAIANALRGQESENYQEAIRVLDIILRQHAAXGCLLVRQSFFHNDPKNFADVGXTWMQFHSSFRTTQSGLSLNIDVXTMIITPVWWTSNIHQNVRDLFTDALXKSKRASFYGSEPMLRDCGISISPNFTEVEGRVLQAPRLKFGNGEDFNPINGRWNFNNKKIVKPTKIERWAVVNFSARCDIRRLVRDLIKCGGMKGIVIDQPFDVFEENGQFTR

SEQ ID NO: 187377 - protein, 69 aa, Glycine max
  Clone ID: PAT_MRT3847_140213C.1.pep
KGSLGGLPLPSLGWGLGPSPLFWGGPFFTFYINNLFPPAGFGAFTWGPPTTLVALPMNLVGPNFPFVGV

SEQ ID NO: 187378 - protein, 106 aa, Glycine max
  Clone ID: PAT_MRT3847_140214C.1.pep
LLGFQEKFSDRKEALQSNRNLQRMNKRKLAHQFLFPMYNIQKNPIRHINKKLIFQFVQEVTIHQYRISKKKKKRKTQLTSTEDIKTDPSPFQFQFYTFSIHKAEAR

SEQ ID NO: 187379 - protein, 179 aa, Glycine max
  Clone ID: PAT_MRT3847_140215C.1.pep
GSSLFAGRMWCHSRLVYLPMSYLYGRRFVGPINTIILSLRKELYTIPYHLLNWNEAKNLCAKEDLYHPCPMIQNILWGFLHNIGEPLLMHWPCSKLREKALHYIMQHIHYEDENTNYICIGPVNKGYNGSQFWDVTFSIQAILAINLEDEYGSILKKANNFIKYSQITANSSGNLSHWY

SEQ ID NO: 187380 - protein, 50 aa, Glycine max
  Clone ID: PAT_MRT3847_140216C.1.pep
EQEPKLESSALVPYSIYWARDRPYTIILLEPYNIYILNETVAPNLCYLWV

SEQ ID NO: 187381 - protein, 117 aa, Glycine max
  unsure (1)..(117): unsure at all Xaa locations
  Clone ID: PAT_MRT3847_140217C.1.pep
DAWCRILYQNAWGRETTHILKTVPGARMLGWCLVAXELITLDAXSWRKLTVVGADEPSRCSFNAXAIVYKVVLFGGEGDNMQPMNDTFRLDLDVNSPDWXNVHVRCSPSARWCHTLS

SEQ ID NO: 187382 - protein, 152 aa, Glycine max
  Clone ID: PAT_MRT3847_140218C.1.pep
PACTKAIHKRKEKLMHCHRAWNTTEASWSSVIPQAFFLIEIRLVQSIVIEQLLNEINVGHKHAPTTIPNQSQCIQCISFTVICLEKVQIGIPFVSNYLSTGKTTNGDDHLLPLLSSVLTTKPRPSLYCFLRCKKRINREEERSEENDEIERR

SEQ ID NO: 187383 - protein, 459 aa, Glycine max
  Clone ID: PAT_MRT3847_140219C.1.pep
MGEVERGGWRPPMDLFRSEPMQLVQLIIPIESAHRTVSYLGDLGLLQFKDLNADKSPFQRTYAAQIKRCGEMARGLRFFKDQMLKAGVSPKYSTTPVDLNIDDLEVKLTEIESELTEMNANGEKLQRSYNELVEYKLVLQKAGEFFHSAQSRALEQQREQESCHLSGESIETPLLQDQELSVDSSKQVKLGFLAGLVPREKSMVFERILFRATRGNVFLRQATVEDPVTDPVSGEKTEKNVFVVFYAGEKAKAKILKICEAFGANRYPFAEELGKQAQMITEVSGRLLELKTTLDAGLLHRNNLLNTIGAQFEQWDVLVRKEKSIHHTLNMLSLDVTKKCLVAEGWSPVFATKQIQDALQRAALDSNSQVNAIFQVLQTRELPPTYFRTNKFTSSFQGIIDSYGVAKYQEANPTVYTVVTFPFLFAVMFGDWGHGICLLLAALYFISRGSEDCKWDRKG

SEQ ID NO: 187384 - protein, 76 aa, Glycine max
  unsure (1)..(76): unsure at all Xaa locations
  Clone ID: PAT_MRT3847_14021C.1.pep
GLELRVRTFVHLHLCPLIIHNIEETLHGGWHAKEDHHRPHHGXLINDHKRXHHGVHKCEHIGELHLFEHKEGLVDY

SEQ ID NO: 187385 - protein, 149 aa, Glycine max
  Clone ID: PAT_MRT3847_140220C.1.pep
MGEVARGGCCPPMDLFRSEPMQLVQLIIPIESAHRTVSYLGDLGLLQFKDLNADKSPFQRTYAAQIRRSGEMARRLRFFKEQMLKAGVSPKYSTTPVDVNIDDLEVKLTEIESELTEMNANGEKLQRSYNELVEYKLVLQKAGEVFPLS

SEQ ID NO: 187386 - protein, 101 aa, Glycine max
  Clone ID: PAT_MRT3847_140221C.1.pep
MSFSKGSPGSQTPRDLEAGSPASFSADFDDGDVSADPFDVTRTKNAPVQRLRRWRQAALVLNASRRFRYTLDLKKEEEKKRVLRIVIVHTRAIQAAYRFKE

SEQ ID NO: 187387 - protein, 341 aa, Glycine max
  unsure (1)..(341): unsure at all Xaa locations
  Clone ID: PAT_MRT3847_140222C.1.pep
MDRGDQMALSGSXLYAAKRIPGSGGQPELHISPNMRSLSNPNLPFQSSIGGGTIGSTLPLESSAIHAHGVNVGAPTGAPLGEPVKRKRGRPRKYGTDGSVSLALTPTPTSSSHPGALSQSQKRGRGRPPGTGKKQQLASLGELMSGSAGMGFTPHIINIASGEDIATKIMAFSQQGPRVVCILSANGAVSTVTLRQPSTSGGTVTYEGRFEIVCLSGSYLVTDNGGSRNRTGGLSVSLASPDGRVIGGGVGGVLIASSPVQVVVGSFLWGGSKTKNKKKESSEGAEVAVESDHQGVHNPVSLNSISQNQNLPPTPPSLSPWSTSRPLDMRNSHVDIDLMRG

SEQ ID NO: 187388 - protein, 52 aa, Glycine max
  Clone ID: PAT_MRT3847_140223C.1.pep
CTTTNSFIITSPHQELLLLFYPTHSFLLILRILHRDPPLRIFTFHHFTGKQS

SEQ ID NO: 187389 - protein, 59 aa, Glycine max
  Clone ID: PAT_MRT3847_140224C.1.pep
SRLRSFNTHDILLLCKQSVRVHPVYRPANKSSRLIPTSPKSLFHRKRSPVNIPYIIYER

SEQ ID NO: 187390 - protein, 47 aa, Glycine max
  Clone ID: PAT_MRT3847_140225C.1.pep
FQAKCFSRGSWACRICRGLKRETICKFKNKIKANWDGEENNYYVRGR

SEQ ID NO: 187391 - protein, 58 aa, Glycine max
  Clone ID: PAT_MRT3847_140226C.1.pep
HTCHHSTKHLALCILPIEPYILGGGLLLLAMELHIIPHHLAMKGGVLIRILEEKHMLT

SEQ ID NO: 187392 - protein, 51 aa, Glycine max
  Clone ID: PAT_MRT3847_140227C.1.pep
DLVVILIIQGGLSQPRINARHVHRSRDRIQGHSELVLSFFTQRGFYSSNWA

SEQ ID NO: 187393 - protein, 74 aa, Glycine max
  Clone ID: PAT_MRT3847_140228C.1.pep
PKLCAEKISSESLYNAQYRVIDAALTLVRENTRLNKELVHSSGGAVATTTLIGGAMGHNTSHIEGPTLARHFIR

SEQ ID NO: 187394 - protein, 124 aa, Glycine max
  Clone ID: PAT_MRT3847_140229C.1.pep
KGDGWRLDFSPTHFDRFSPPDFYTKVSIVRDQADCDKNKTRVKTDTWYPVWDEEFEFKLRVPELALLRIEVKDKDKGKDDFAGQTCLPLSELRHGFRSVPLYDRKGKKYKSVTLLMRFKLETLN

SEQ ID NO: 187395 - protein, 211 aa, Glycine max
  Clone ID: PAT_MRT3847_14022C.1.pep
MGDLRVKKKKGSNKKKHGSVSVTAIKFLPKDLQVEIFAKVATRSVFDHCMIKLCCKEFLRAAEDNYVYRHASMENFALVPLPWFKGNNKEFPFLKRCRESGNSEILYREGMVQYFTSSMMELGLKNLKEAALEGHHDAKYVYCMLLMCGEDELGERKQGFDLFCSLKASSTSLIRCRKRVKSFVQNIWVNNNPAIKDHKSSSFCCSGTCDS

SEQ ID NO: 187396 - protein, 68 aa, Glycine max
  Clone ID: PAT_MRT3847_140230C.1.pep
VYSGRRIIHRVHLLDAPPSVLRSILRAHGAGISHVSSIVRVRSLRHTIDESTEGFVQFKRQQGTRQSQ

SEQ ID NO: 187397 - protein, 79 aa, Glycine max
  Clone ID: PAT_MRT3847_140231C.1.pep
KATPNGLARIETTGKKKQDNGVWYDDSSAPVRAQTIDELHSLQRKRSAPSTPKRSAPTTPIKGGAHSPFVDAISEEERH

SEQ ID NO: 187398 - protein, 83 aa, Glycine max
  unsure (1)..(83): unsure at all Xaa locations
  Clone ID: PAT_MRT3847_140232C.1.pep
KTELCLFKRANIYGGKGIKFIPGDSQVFLIANLKCKPYFHNHLNPSKLTLTAMYTNQHNKDIAQXPVNNTKLTSKKPYSMSHF

SEQ ID NO: 187399 - protein, 64 aa, Glycine max
  Clone ID: PAT_MRT3847_140233C.1.pep
FGGFSVFSSLFFCCAGVVNCCCFFLLWDCLRPRLVFCISGFPCAWLFRVFLGSALPFLFVVGGV

SEQ ID NO: 187400 - protein, 50 aa, Glycine max
  Clone ID: PAT_MRT3847_140234C.1.pep
EYIKVNQLEDPANPMAIVCDGKLQEIFGCESISALGIPEVLGRHHIFRSS

SEQ ID NO: 187401 - protein, 128 aa, Glycine max
  Clone ID: PAT_MRT3847_140235C.1.pep
MSEQSGETFAFQAEIAQLMSLIINTFYSNKEIFLRELISNSSDALDKIRYQALTDPSQMESGKELFIKIVPNKADKTLTIIDTGIGMTKADLVNNLGTIAKSGTKAFMEALQAGADISMIGQFGVGFI

SEQ ID NO: 187402 - protein, 333 aa, Glycine max
  unsure (1)..(333): unsure at all Xaa locations
  Clone ID: PAT_MRT3847_140236C.1.pep
MVTEEEISEAVQSLLRESNPSRFTTLNQVVEELQAKLGHDLTHKIDFITAQINLLFGSRQPQQPPQNPHRQLQQPKDHFAPPPNPNFHSAPVSVGFQLQNFSSSNAVVAAATAADASRIEAPSAPVVVEGNQVPKESTQTKVKRRGGPGGLTKICGVSPELQVIVGQPALSRTEIVKQLWAYIRKNNLQDPSNKRKIICNDELRVVFETDCTDMFKMNKLLSKHIIPLEPTKKPVPKKQKVDVESGTRSAEPTPSVIISDALANFFGITGREMRQSEXXRRIWEYIKVSXXEDPANPMAIVCDGKLQEIFGCESISALGIPEVLGRHHIFRSS

SEQ ID NO: 187403 - protein, 159 aa, Glycine max
  Clone ID: PAT_MRT3847_140237C.1.pep
MDRIKGGWGWRLSLGLGGLPALLLTLGAFLVVDTPNSLIERGHLEEGKSVLRKIRGIDNIEPEFLELLDASRVAKEVKHPFRNILKRRNRSQLVISIALQVFQQFTGINVISLIMFYAPILFNTLGFKNDASLYSAVITGAINVLSTVVSIYSVDRVEQ

SEQ ID NO: 187404 - protein, 201 aa, Glycine max
  Clone ID: PAT_MRT3847_140238C.1.pep
MYADRVDGGTRRSVKERLDGNFSTDSTRQHRITGKRQREDDKWKHDLYEDDEPQLSNRKVTAQDLRLKLQKKGLHPGGQTGKSSVHGERDLRERLSGTMTQQPKNYDPPKPKVAARASSKSIDVEPAVHIKRSATKKLSRKADASLDDFLQSLGLEKYLIGFQAEEVDMTALNHMTDEDLKAMGIPMGPRKKILLALESKG

SEQ ID NO: 187405 - protein, 50 aa, Glycine max
  Clone ID: PAT_MRT3847_140239C.1.pep
IGSIQSMTNLLSLSYLIFIFCIFIIAFCTSYCKLHSESTFQNVTQDVRYT

SEQ ID NO: 187406 - protein, 49 aa, Glycine max
  Clone ID: PAT_MRT3847_14023C.1.pep
FSHTSVHAVSRISTIRRSYREGRKYRASYHRRRERSTQHQTKTRGRTRG

SEQ ID NO: 187407 - protein, 142 aa, Glycine max
  Clone ID: PAT_MRT3847_140240C.1.pep
ISLPHKQPLTPQSHTQNIYLFQPFNSLNIFLFLRTPIPSPQPTNYDLPKTKVIKPSSKSVGVEAPAVQIKRPADPAPKKSWKAGPSVDEFLRSLGLEKYLITFQAEEVDMTALNHMTDEDLKAMGIPMGPRKKILLALESKV

SEQ ID NO: 187408 - protein, 205 aa, Glycine max
  unsure (1)..(205): unsure at all Xaa locations
  Clone ID: PAT_MRT3847_140241C.1.pep
MYADRVESGTRRSVKERLDGNFSTDSTRQHRITGKHYFFRQREDDKWKHDLYEDDEPQLSNRKVTAQDLRLKLQRKGLHPGGQTGKSSXMRDLHERLSGTMTQQLKNADQPKTKVVKSSSKSVGVEAPAVQIKRPADLTPKKSQKAGSSVDEFLRSLCLEKYLITFQAEEVDMTALNHMTDEDLKAMGIPMGPRKKILLALESKV

SEQ ID NO: 187409 - protein, 203 aa, Glycine max
  Clone ID: PAT_MRT3847_140242C.1.pep
MYADRVDGGTRRSVKERLDGNFSTGSTRQHRITGKRQREDDKWKHDLYEDDEPQLSNRKVTAQDLRLKLQRKGLHPAGQTGKSSVHDVRDLRERLSGTMTQQPKNYDPPKPKVVKPSSKSVGVEAPAVQIKRPADPAPKKSWKAGPSVDEFLRSLGLEKYLITFQAEEVDMTALNHMTDEDLKAMGIPMGPRKKILLALESKV

SEQ ID NO: 187410 - protein, 245 aa, Glycine max
  Clone ID: PAT_MRT3847_140243C.1.pep
MALTFEVLGRFNRARAARLRLPHFVCQTPLFMPVGTQGTIKALTNSQLEDIGCQIILGNTYHLALRPTSELLDEVGGLHNFMNWKRALLTDSGGFQMVSLLHLADITEKGVTFQSPVDGKPMLLTPEESIQIQNRIGADIIMALDDVVKTTITGPRIEEAMYRTLRWIDRCIAAHKRPHDQNLFGIVQGGLDPILRDICVKGLVERNLPGYAIGGLSGGEDKNSFWRVVAQCTPALPEDKPRYVM

SEQ ID NO: 187411 - protein, 60 aa, Glycine max
  Clone ID: PAT_MRT3847_140244C.1.pep
VFPFFNPQVSASLGVKKGGGRGFPQTKKLPDILPGFFPPFGPDFFGNLKKLSPPFLKQVP

SEQ ID NO: 187412 - protein, 55 aa, Glycine max
  Clone ID: PAT_MRT3847_140245C.1.pep
VGSSALSNWMLYNSHETDVERYMKLEPDKSETVSPFHFQRTISGNIYPLHLTRLE

SEQ ID NO: 187413 - protein, 46 aa, Glycine max
  Clone ID: PAT_MRT3847_140246C.1.pep
FSASDVGFFFILTLRPGWLPWRFWMNFIRPFSFSNSILMGRKKKIP

SEQ ID NO: 187414 - protein, 81 aa, Glycine max
  Clone ID: PAT_MRT3847_140247C.1.pep
VKTLNLNLLHCQTHTTQILIFFRKLYLQIIFNQNRSFSLHRHDFSLNLLLLQCQTTQPAPSLFGFFRGCHSISTKSKHPTP

SEQ ID NO: 187415 - protein, 57 aa, Glycine max
  Clone ID: PAT_MRT3847_140248C.1.pep
GCGYGERRNKFEHPAPKPVPKIAHGSGRPAAEWGHKELEEVGNIRKNLGPAKYQEQG

SEQ ID NO: 187416 - protein, 58 aa, Glycine max
  Clone ID: PAT_MRT3847_140249C.1.pep
LVLNDFTTNLACLVAMIVKVSLIWCFIACLNTTILVILCWFKWSMDSWILIYSDRICF

SEQ ID NO: 187417 - protein, 110 aa, Glycine max
  unsure (1)..(110): unsure at all Xaa locations
  Clone ID: PAT_MRT3847_14024C.1.pep
NRKSKVFPLNQWGYGRPSAIGYAADHDNLSVSKXELHDLLSKPSLSGIPMLILGNKIDKPGALSKQDLTEQMGLKCINGRDVCCFMISCKNSINIDTVIDWLVKHSKWMN

SEQ ID NO: 187418 - protein, 243 aa, Glycine max
  unsure (1)..(243): unsure at all Xaa locations
  Clone ID: PAT_MRT3847_140250C.1.pep
AKPPTXGAVSALHMVHCFHLAGFPKGLINCVTGKGSEIXFTGGDTGISISKKAGMIPLQMELGGKDACIVLEDADLDLVAANIIKGGFSYSGQRCTAVKVVLVMESVADALVEKVKAKVAKLTVGPPEDDCDITPVVSESSANFIEGLVLDAKEKGATFCQEYKREGNLIWPLLLDNVRPDMRIAWEEPFGPVLPVIRINSVEEGIHHCNASNFGLRGCVFTKDVNKAIMISDAMETGTVQIN

SEQ ID NO: 187419 - protein, 434 aa, Glycine max
  unsure (1)..(434): unsure at all Xaa locations
  Clone ID: PAT_MRT3847_140251C.1.pep
MAAGTGLFAEILDGDAYKYYADGVWKKSASGKSVSIINPTTRKTQYKVQACSQEEVNKVMDLAKSAQKLWAKTPLWKRAELLHKAAAILKEHKTPIAECLVKEIAKPAKDAVMEVVRSGDLVSYTAEEGVRILGEGKFLVSDSFPGNERTKYCLTSKIPLGVIXAIPPFNYPVNLAVXKIAPALIAGNSIVLKPPTQGAVSALHMVHCFHLAGFPKGLINCVTGKGSEIGDFLTMHPGVNCISFTGGDTGISISKKAGMIPLQMELGGKDACIVLEDADLDLVAANIIKGGFSYSGQRCTAVKVVLVMESVADALVEKVKAKVAKLTVGPPEDDCDITPVVSESSANFIEGLVLDAKEKGATFCQEYKREGNLIWPLLLDNVRPDMRIAWEEPFGPVLPVIKINSVEEGIHHCNASNFGLQGCVFTKDVNKAIM

SEQ ID NO: 187420 - protein, 71 aa, Glycine max
  Clone ID: PAT_MRT3847_140252C.1.pep
ALPLDLCGVIQSKRSCLGTTVLDFNAVSYKTHHPTKYFIRLCLVLVTKHMQFLPPSLHQRNISLAIHSSRA

SEQ ID NO: 187421 - protein, 155 aa, Glycine max
  Clone ID: PAT_MRT3847_140253C.1.pep
APTRPPTRPPTRPVSLEKDYPYRGDEGTCDLNKKNAIVAIDDYGWLPTENETILKRSIASRPVVVIIATDDDEFQYYESGIFKGKCGTKVNHAVLLVGYGTENGEDYWIAKNSYSDKWGDNGYIRIKRKLSTCKFGIEGYYPIIRVTDQQAPKYS

SEQ ID NO: 187422 - protein, 96 aa, Glycine max
  Clone ID: PAT_MRT3847_140254C.1.pep
MSNYRICCSEGRSPNPTEADIAPDPGDNRRVLHKRTAVFPTELRSTPPAGSLLQRLREMDISKSKIRVDGLAPAETGSPEAPEHVRKVTRAVHIET

SEQ ID NO: 187423 - protein, 503 aa, Glycine max
  unsure (1)..(503): unsure at all Xaa locations
  Clone ID: PAT_MRT3847_140255C.1.pep
MAAGTGLFAEILDGDVYKYYADGEWKKSASGKSVAIINPTTRKTQYKVQACSQEEVNKVMDLAKSAQKLWAKTPLWKRAELLHKAAAILKEHKAPIAECLVKEIAKPAKDAVTEVVRSGDLVSYTAEEGVRILGEGKFLVSDSFPGNERTKYCLTSKIPLGVILAIPPFNYPVNLAVSKIAPALIAGNSIVLKPPTQGAVSALHMVHCFHLAGFPKGLINCVTGKGSEIGDFLTMHPGVNCISFTGGDTGIAISKKAGMIPLQMELGGKDACIVLEISDLCMXMTSLYNXGQPNPGQRCTAVKVVLVMESAADALVEKVKAKVAKLTVGPPEDDCDITPVVSESSANFIEGLVLDAKEKVATFDMGFACEEXKREGNPIWPLLLDXVRPDIXIAWEEPFGPVLPVIRINSVEEXGIHHCNASNFGLKDMSPXRDVNKAIMISDAMETGTVQINSAPARGPDHFPFQGIKDSGIGSQGITNSINMMTKVKTTVINLPSPSYTMG

SEQ ID NO: 187424 - protein, 43 aa, Glycine max
  Clone ID: PAT_MRT3847_140256C.1.pep
ARANDVISVSEDLYKAMFGVSHERQCGQEMYYGGDDVNRLVTG

SEQ ID NO: 187425 - protein, 281 aa, Glycine max
  unsure (1)..(281): unsure at all Xaa locations
  Clone ID: PAT_MRT3847_140257C.1.pep
MIVKMLMQRFEDGKSQVALNKENEIISTITSIFWSIKQSEDVVDSSKSKNSXAICDLGLAITKRLVQKDVDLQGLSPLVSLPPMLYKACEKESDPMVSGVKSWLADGSVLAHFISLELEMVPSQLAKDDSLKDSEKDKNEMPLGKIIKDIKSQGTKGKKVKKKKAVPAETKKAENDIDILNMVREINLDNLGSSTNFEASNGHENSLSKKLQKDPECATIKKRKAEVTLVPVPKRKRSSFAHGKSRSNSTPPKGPPRVSGEDSSEVKFPLGAKFNPDTHSK

SEQ ID NO: 187426 - protein, 30 aa, Glycine max
  Clone ID: PAT_MRT3847_140258C.1.pep
GGFGYEDIYFLLGFIKSNRRVIPTLRSNLI

SEQ ID NO: 187427 - protein, 110 aa, Glycine max
  Clone ID: PAT_MRT3847_140259C.1.pep
MVPLPNSRPEFPVNPPRPLFVSFLGFFFYQSIFTRPAPLENLGVFFVPPGPPPLGKGNFSPSVFPLKKKKFFFKNPRLNPLYPFLINRGLFYPFGFWPGFLSFLSHNKKK

SEQ ID NO: 187428 - protein, 63 aa, Glycine max
  Clone ID: PAT_MRT3847_14025C.1.pep
KLIHAGKVLENNKTLADYRITFGEIPGGVVTMHVVVQPPVTKKKTEKNKEDKQKMNSCSCTIL

SEQ ID NO: 187429 - protein, 41 aa, Glycine max
  Clone ID: PAT_MRT3847_140260C.1.pep
RLHQYTKGPMWLYVILISFIFILDSPTKNVPNLNHRQKADK

SEQ ID NO: 187430 - protein, 91 aa, Glycine max
  Clone ID: PAT_MRT3847_140261C.1.pep
TRPRPPPPPAPPVRRPPPPSTPPPPAPLPHPPQPPSRPRRQPPQPGHRHLRAPPDKTRVPRKPFMFVWQAQLICTIIPCAACELPCFTSIM

SEQ ID NO: 187431 - protein, 47 aa, Glycine max
  Clone ID: PAT_MRT3847_140262C.1.pep
LLGFLILEYHVFLSFHQCFLRLILLEDKSMVHALFRVASSLSSFHVL

SEQ ID NO: 187432 - protein, 197 aa, Glycine max
  unsure (1)..(197): unsure at all Xaa locations
  Clone ID: PAT_MRT3847_140263C.1.pep
MDQNMLPLFVLLAFPILLLFFRKRKTSKKPTFPPGPRGLPFIGNLYQLDGSTLXLKLYELSKKYGPIFSLQLGSRPALVVSSPKLAKEVMKTHDLEFCGRPSLISTMKFSYNGLDMAFSPYRDYWRHTRKISIIHFLSLKRVLMFSSIRKYEVTQLVKKITEHASCSKVTNLHELLTCLTSAVVCRTALGRRDEKEG

SEQ ID NO: 187433 - protein, 116 aa, Glycine max
  Clone ID: PAT_MRT3847_140264C.1.pep
QYLWSKECERVTELESREKENDELARVPWVPSPSYHYQFSPVDDSDNTNAELMEADETGSMMMDIEQEHDTDIDAKISTSSIHYPTTHGGITEGFQQHCLLPQLPHNTSTPITWTR

SEQ ID NO: 187434 - protein, 83 aa, Glycine max
  Clone ID: PAT_MRT3847_140265C.1.pep
GLIRLGIGIAGKHAGHCQEINLRSLQSLGADRPFQIDSPCHVSSTHAHRIQFTFLTLRHKYEQISQHILVQLMIHQQRHSLST

SEQ ID NO: 187435 - protein, 62 aa, Glycine max
  Clone ID: PAT_MRT3847_140266C.1.pep
KKNRDSSMLMVPVKRDLKIVFNHPQHGAIMNTTTLWRVFGLFWLRQSPHLQSSCYVACACLV

SEQ ID NO: 187436 - protein, 84 aa, Glycine max
  unsure (1)..(84): unsure at all Xaa locations
  Clone ID: PAT_MRT3847_140267C.1.pep
KLGPRCKKNTSQVEILVEKNTQXIILIGREGKALKLLATAARLDVEDFLQKKVYLEIEVKVRANWRQDEGLFNHYGYGGQIRVI

SEQ ID NO: 187437 - protein, 85 aa, Glycine max
  unsure (1)..(85): unsure at all Xaa locations
  Clone ID: PAT_MRT3847_140268C.1.pep
CLSTPVYPSDKGIPEVSSISWNSKDVGSXXAQTPSRICSGCCAESLFVGLDFVSFGCISTSYLAYFKLYILFVGVXXXXKKKKKN

SEQ ID NO: 187438 - protein, 44 aa, Glycine max
  Clone ID: PAT_MRT3847_140269C.1.pep
NSHRLNINTTTIIIIIYSNLYNLQSLKTLPLNQMNLPISNNNSS

SEQ ID NO: 187439 - protein, 53 aa, Glycine max
  Clone ID: PAT_MRT3847_14026C.1.pep
CNGLGGAHPCFLIRNSNVPVFVYSTFKKPGQGILLHGQLGYVLGTIWTLPNIS

SEQ ID NO: 187440 - protein, 113 aa, Glycine max
  Clone ID: PAT_MRT3847_140270C.1.pep
TSLFSSVTSAPFSSSFNSLSLFSPLNSTSSSLFYSVTSVPFFYSITPTSFFPWVTSTSLFSSVTSTSFFSYTITSASLFSSVTSTSFFSSVNSHSLPSSLNYAPLLLSSSRSR

SEQ ID NO: 187441 - protein, 39 aa, Glycine max
  Clone ID: PAT_MRT3847_140271C.1.pep
PLLMVAHRYFSMFVIADSIKSMSELPVTGILDRYGSTQG

SEQ ID NO: 187442 - protein, 54 aa, Glycine max
  unsure (1)..(54): unsure at all Xaa locations
  Clone ID: PAT_MRT3847_140272C.1.pep
GPSRVSFSNFSCSAFLPPAFXAAFPSSLRIVPHRLLPSLLDPHLAAHRAALAVT

SEQ ID NO: 187443 - protein, 66 aa, Glycine max
  Clone ID: PAT_MRT3847_140273C.1.pep
QRIDIFLHPLFYMAKGEALCLRYRPHLFITTLEAKKLLVSTYHGRTRSFTSHDPVVSSYGKTQFIY

SEQ ID NO: 187444 - protein, 35 aa, Glycine max
  Clone ID: PAT_MRT3847_140274C.1.pep
VISKTSSKGTGVVLRSIRLEPNIYPARFLPMLHTH

SEQ ID NO: 187445 - protein, 59 aa, Glycine max
  Clone ID: PAT_MRT3847_140275C.1.pep
LKASTSISCPLSQFQPITKMASKNGPANPQEHTLLTDSVQGKQGYSGCKIHKAQTTGHE

SEQ ID NO: 187446 - protein, 247 aa, Glycine max
  Clone ID: PAT_MRT3847_140276C.1.pep
MSAAMDMSLDDIIKNNKKSGSGSSRGRTRPSGSGPTRRLPNRAANRAAPYAPAKAPEATWQHDLYADQHVAAAGYPAQGGRAASIETGTKLYISNLDYGVSSDDIKELFAEVGDLKRHAVHYDRSGRSKGTAEVVFSRRADAVAAVKRYNNVQLDGKPMKIEIVGTNISTPGVAPARNGAIGNFNGVPRSGQGRGGALRRPGGRGQGIRRDRGRGRGRGGGGRGEKVSADDLDADLEKYHAEAMQLN

SEQ ID NO: 187447 - protein, 73 aa, Glycine max
  Clone ID: PAT_MRT3847_140277C.1.pep
GRVGVPKILKGLLMLFSGWGIIYKERGLFNRGGTLFLKTFCGGSHIISPFGVGPYSRKLGELFFFFGQNVWGE

SEQ ID NO: 187448 - protein, 147 aa, Glycine max
  Clone ID: PAT_MRT3847_140278C.1.pep
EPIDGDTKSGALPIPEPIADRLGVNYPFPPHLEYAYPPPDGNILTNIVNALIAVPRFYTQVLHLMNKMNIPAPFRMALPTPPLPPEVPAPPPPLPAPTVTVNPWSADLSSGESEMESSDEVTSSLLSELVTSFMIEYADCLNISELV

SEQ ID NO: 187449 - protein, 76 aa, Glycine max
  unsure (1)..(76): unsure at all Xaa locations
  Clone ID: PAT_MRT3847_140279C.1.pep
HGLKSETNRFQIXHXKIDGQNSFNRWSFRXMLRLNGYVSXLITLECPHQSMXTYVPHTAGRYSVKRFRKAHAPLLR

SEQ ID NO: 187450 - protein, 55 aa, Glycine max
  Clone ID: PAT_MRT3847_14027C.1.pep
VGVALTGKLFKAAKAANSDLSSPKSWKKVFFIPGFQCVFSSLEFHLFSTGEKIFD

SEQ ID NO: 187451 - protein, 49 aa, Glycine max
  Clone ID: PAT_MRT3847_140280C.1.pep
KTKKKKKKKKIKKKKKKKKKPPNSKTREAKKKKKKKKNKKKKHTPAPPP

SEQ ID NO: 187452 - protein, 108 aa, Glycine max
  unsure (1)..(108): unsure at all Xaa locations
  Clone ID: PAT_MRT3847_140281C.1.pep
MARKFFVGGNWECNGTTEEVNKKGTTLNESEVPAEDGVXVYVSPTFGILTLAQSLLPPDFHDSDQNXCRLRKGGAYTGEASAEMLGHWAISRDLIGHSERRHASYESN

SEQ ID NO: 187453 - protein, 46 aa, Glycine max
  Clone ID: PAT_MRT3847_140282C.1.pep
SAACLFYVWFRDQEDKTIRINRRQSMRMLKILSMIRTSPLTCVTGH

SEQ ID NO: 187454 - protein, 142 aa, Glycine max
  Clone ID: PAT_MRT3847_140283C.1.pep
PLVRPRVRPEDWGGFVTRGVREISQYFDCLKSLHFRRMIVRDSDLQVLARSRGHILQALKLDKCSGFSTDGLYYIGRYCRNLRVLFLEESSLVENDGDWLHELALNNTVLETLNFYLTDIANVRIQDLELIARNCPNLNSVK

SEQ ID NO: 187455 - protein, 127 aa, Glycine max
  Clone ID: PAT_MRT3847_140284C.1.pep
NSARPRAESAREKALYILEVLSTLPEGRMALKECPNIIPNVVKLLMRVSERCTQFALSILWAIYKLAPEECASKAVEAGLAAKLLLVIQSGCNPVLKQMSSEFLKMCSLNYSTSILVSKCMLTTTIQ

SEQ ID NO: 187456 - protein, 45 aa, Glycine max
  Clone ID: PAT_MRT3847_140285C.1.pep
GSSGDTCCIWASLDATKQCSMRQNLKSRNASPSNSNGNRALIIVS

SEQ ID NO: 187457 - protein, 79 aa, Glycine max
  Clone ID: PAT_MRT3847_140286C.1.pep
VVRCPLKKKTGTHASSTVNEANGDKPSSTGSDRIDGADGDKPSSTGSGKMRRRTCYECGEKGHTFAACPKKQTVAATTT

SEQ ID NO: 187458 - protein, 63 aa, Glycine max
  Clone ID: PAT_MRT3847_140287C.1.pep
HSIIKFIIHKKKKKNKLDPFDCSLHSCFQMGHYSDKFWWVMINPYIHQPNYRVASPRAEFGTR

SEQ ID NO: 187459 - protein, 145 aa, Glycine max
  Clone ID: PAT_MRT3847_140288C.1.pep
SLKTQWYSVKVTRKAKPPPCLIVMGYSNNMVAGFVDRSSRRRINSQMRFMGAVKLRAQLNYQAKIFFTNKPERSHSHTPLYVFSIYFQISLHTKTQQSFLHSNSSFRVCFSRPNTISLSLCGTLSPLETEQHAPGFAFIGSSCLY

SEQ ID NO: 187460 - protein, 132 aa, Glycine max
  unsure (1)..(132): unsure at all Xaa locations
  Clone ID: PAT_MRT3847_140289C.1.pep
SYASGLFLGLLKICASAWWFGSKVHSTHESIIQELSDSITSRNLMDQSSHGYAYREGANEVERTLKMVTTGVIDSQAGMXEESGVWSRPNYDNVTQCIDLPRNHKKLDEKTNGYILVNANGGLDHMRFGICD

SEQ ID NO: 187461 - protein, 524 aa, Glycine max
  Clone ID: PAT_MRT3847_14028C.1.pep
ESSELQSEENKVSNEKNKKRKLKTPAQLKALENFYNEHKYPTEEMKLVLAEELGLTEKQISGWFCHRRLKDKRLMKDEAVANGRQDRSSGVIQDRGSGLGQDSCGSSKHADHRYLDPKEVESHGLYNHELSVADMTHRRRNHYPENVSGVDDTSSESSSFLQERFSQGQDPYDMEPSRHLTPNGALPPLNPKGAVKMGHKPSGYLKVKGEIEHAAITAVRKQLGRHYLEDGPLLGIEFDPLPPGAFECQTADPANEPYSVTNPLLSNSPEISAAKRQPSISSRYDSYYTKFRSQDSHMEGADFGSLHESDFQDKQDKKACQNIKQRQSLYGYTNHFPGRNTFPDLYEDSTGEASAYNSNKSHRMSTKHGVEGMRSDSASNHSDHYEEKLTVKQKTLMLHGYDNINPKNIQRSEHVKSKPSSSIHNSRVPMDTEERGLSARMAKEEMFKGDRKAKNTYCNVDGAGMLSNEIMVAKRAKVDMLQQYNVKKSPVAEMEQRKIQRSAADLPSSFSEDETADTNSSLDY

SEQ ID NO: 187462 - protein, 91 aa, Glycine max
  unsure (1)..(91): unsure at all Xaa locations
  Clone ID: PAT_MRT3847_140290C.1.pep
EVRTQHTXSLSXSLSRITIMXVXQXQHXQFLXRVXXLISXXNSVXGHXXLIPAXXXXPXXPLQSXRXXIWXRWPXHXXSXPWFXRXXAGRV

SEQ ID NO: 187463 - protein, 61 aa, Glycine max
  Clone ID: PAT_MRT3847_140291C.1.pep
PNYSSFSQLLVARQKADWGVFWKPKATNTINPGSGPASASEDLVAADPTGHLQVEPSALNS

SEQ ID NO: 187464 - protein, 56 aa, Glycine max
  Clone ID: PAT_MRT3847_140292C.1.pep
LVLVQHLKVGINISFQSVQMIPTVVHISKSNGPYLREADVLPIQEKYLTSEEEINP

SEQ ID NO: 187465 - protein, 74 aa, Glycine max
  Clone ID: PAT_MRT3847_140293C.1.pep
HLGPSGCFAFYGLKPMMGIQVINVELHGVQNYGTLCLNMASVAYDYGGSHDRRKHPLANFLSFIASWLKSHLCP

SEQ ID NO: 187466 - protein, 531 aa, Glycine max
  Clone ID: PAT_MRT3847_140294C.1.pep
MDNALDQGTSQGDDRADNPNQSMEQDMRVEERGVMAQNPSMELGMDFMREEMGEGGVLHNPDQIEMTFHVENRAHDDMGDEDDDMGDEGDEDEDDDEGEDEDEDIAEDGGGMMSLADTDVEDHDDVGFGDEYNDEMIDEDDDDFHENRVIEVRWREALDGLDHLQILGQPGFIDVAAEPFEGVNVDDLFRLQSFERRRQTGRSSFERSATEVNGFQHPLLVRPPPSGDFVSMWSSSAPPPLTDYSVGMGSLHLPGRRVLGNGRWTDDGQPQGSAQAAAIAQAVEEQFLAQLCSVAPESSPVERQLQNSGEQENKSDALASHDDPILTAGTDSTSQQIDSQEQENGNGIRAQQINDGALCEEEINVDSGAQDTAEDLQANEPMLVQPVSLTIMPNGLDCTVIEENATHDENVEIAQAFVNSSINSDAAIQCESGADVPTSIHNVPVESMECNGSSNADGQPPNVELGDSGFETLNPGDSHASSIYASADVDMGGTDAEGNQSEQPTVSEDRRNEMLSTQNADVAPDAPQADQ

SEQ ID NO: 187467 - protein, 74 aa, Glycine max
  Clone ID: PAT_MRT3847_140295C.1.pep
TSYSLSVIYCSIDALTYCHFPNYFEARVGIFAGVITNLRLILATESSHPRLVYDTHTVARERNPQKTYVGDMHN

SEQ ID NO: 187468 - protein, 76 aa, Glycine max
  Clone ID: PAT_MRT3847_140296C.1.pep
RPQAWIKRNPTWLYTWGKRATHLTYKTWGGPGKIWRCMYMTLVLVLSQQTKLHNHWRTSHMSGASCNSKAEDNNVP

SEQ ID NO: 187469 - protein, 118 aa, Glycine max
  Clone ID: PAT_MRT3847_140297C.1.pep
KMGFFGLQRILLFIIGGGMVFSESKENLALFILEPGVFFPFLKSPFPHPPNFFSNGLGYLCPFTLWKFFLPRPNFPGAFFWAFFSFFKDCNFCSLNPLVAARVGPPLGFFFVFFPFLF

SEQ ID NO: 187470 - protein, 92 aa, Glycine max
  Clone ID: PAT_MRT3847_140298C.1.pep
GFGPQKNGVFWLPKNFFFDKWGENGFFRIQKKLGPFYFGTGGFFPLFKVPVPQAPQFFFQWPRLTVPLYPLEVFFSKAQISRGLFLGFFFFL

SEQ ID NO: 187471 - protein, 52 aa, Glycine max
  Clone ID: PAT_MRT3847_140299C.1.pep
YVSSYYNSSVGSGLPPHPYMWSPPQPMMPPYGPPYAAIYTHVGVYTHPALSI

SEQ ID NO: 187472 - protein, 216 aa, Glycine max
  unsure (1)..(216): unsure at all Xaa locations
  Clone ID: PAT_MRT3847_14029C.1.pep
MEESSELQSEENKVSNEKNKKRKLKTPAQLKALEDFYNEHKYPTEEMKLVLAEELGLTEKQISGWFCHRRLKDKRLMKDEAVANGRQDRSSGVIQDRGSGLGQDSCGSSKHADHRYLDPKEVESHGLYNHELSVADMTHRRRNHYPENVSGVDDTSSESSSFLQERFSQGQDPYDMEPSRHLTPNGALPPLNPKGAVKMGHKPSXYLKVKGEIEHA

SEQ ID NO: 187473 - protein, 209 aa, Glycine max
  unsure (1)..(209): unsure at all Xaa locations
  Clone ID: PAT_MRT3847_1402C.1.pep
PRVRSERVSRMTPEQIEEIRSRLNLDVAVASDSPPAPAPAPIESFTDMCLHPSIMKDIAYHEYTRPTSIQAQAMPIALSGRDLLGCAETGSGKTAAFTIPMIQHCLAQPPIRRNDGPLXALVXAPTRELAQQIEKEVKAFSRSLESLKTAIVVGGTNIEKQRFELRAGVEIAVATPGRFIDHLQQGNTXSLSRISFVVLDEAXRMLDMG

SEQ ID NO: 187474 - protein, 60 aa, Glycine max
  unsure (1)..(60): unsure at all Xaa locations
  Clone ID: PAT_MRT3847_140300C.1.pep
GELQEGQVLNVPXNFAVAAISQIDMFEXLSFTTKERPSIGTLASPESFLTAFPDEVIQPP

SEQ ID NO: 187475 - protein, 74 aa, Glycine max
  Clone ID: PAT_MRT3847_140301C.1.pep
INYAYYTRGHMVLNYHLRFVSHFPKWACFGPFQESCVITLNTCNLTVLDRDLLLPLITMSRSLAPLACHLLAHL

SEQ ID NO: 187476 - protein, 131 aa, Glycine max
  unsure (1)..(131): unsure at all Xaa locations
  Clone ID: PAT_MRT3847_140302C.1.pep
FFFVCDRXRILRNRLESLDIRVVKSLLEISRQHSWAEIVHNKLICMLANMFYQASNGPAKANLDVPAFYVEQVVLVGGISFICLKINEVCLATGVRPVKKNNTGQTEAGSKTMDTSREDSKIPDGEQRWKK

SEQ ID NO: 187477 - protein, 65 aa, Glycine max
  Clone ID: PAT_MRT3847_140303C.1.pep
KGMGPTVTTLGTRPSTCPTPTSVRTPPKSPQDSSNFKKKSDLKQSYEVQRRIYPKNSFINSRDRI

SEQ ID NO: 187478 - protein, 49 aa, Glycine max
  Clone ID: PAT_MRT3847_140304C.1.pep
KKKYKHYEPKHINGRPSLKNTRLRSRACNRRSLLYYHQNSKHYPSFKND

SEQ ID NO: 187479 - protein, 59 aa, Glycine max
  Clone ID: PAT_MRT3847_140305C.1.pep
KLNSDFASTEHKMAFFLACFANYNKVATALGGFSSKIFTRLWCLVFGSKRRTLKAGFKK

SEQ ID NO: 187480 - protein, 62 aa, Glycine max
  Clone ID: PAT_MRT3847_140306C.1.pep
GPRHHEKKKVPPQKNFSYPGGPNLKSNHVAWFKKKKKKWGCPPALLLKLIKKTPPPPPPNFC

SEQ ID NO: 187481 - protein, 41 aa, Glycine max
  Clone ID: PAT_MRT3847_140307C.1.pep
FFFFFMSSDLSPLVSFSCYDISCNGQVTSTSVTFYSTIFVL

SEQ ID NO: 187482 - protein, 71 aa, Glycine max
  Clone ID: PAT_MRT3847_140308C.1.pep
HIFVSPALSQSIFWKSRIHIYSYVLSVPLVLVYKYNIFLLSKKIKIMCTLCAQELKLENLVDSSYNINMES

SEQ ID NO: 187483 - protein, 49 aa, Glycine max
  Clone ID: PAT_MRT3847_140309C.1.pep
ELFVIVQAGCKSMCSMSVQLGTVWVRYVRLVMSDGQWLYECREDLTVIQ

SEQ ID NO: 187484 - protein, 104 aa, Glycine max
  Clone ID: PAT_MRT3847_14030C.1.pep
MEESSELQSEENKVSNEKNKKRKLKTPAQLKALENFYNEHKYPTEEMKLVLAEELGLTEKQISGWFCHRRLKDKRLMKDEACANGRQIVQGCHPDRAVDLGRFM

SEQ ID NO: 187485 - protein, 121 aa, Glycine max
  unsure (1)..(121): unsure at all Xaa locations
  Clone ID: PAT_MRT3847_140310C.1.pep
HPKPPTPPPTTPHPATHPPHHPPTTPPPPTARAPPNXPERTXRPENEXDXTXXTRQGXAXPRTXXRXAPPPPPXXRXXRAGSPGSXAXASSGXPXRPSPASLSXPXXMVAXLLLPARSCRP

SEQ ID NO: 187486 - protein, 65 aa, Glycine max
  Clone ID: PAT_MRT3847_140311C.1.pep
IWSHSYWVQGLKLPTLFYFLVNNTVFDQFGFLFVVDSDGFVPGTVSSFLTPIFSVPEKAFKCYSC

SEQ ID NO: 187487 - protein, 86 aa, Glycine max
  Clone ID: PAT_MRT3847_140312C.1.pep
SSRIGSRPEVSDTLFTWPDLTAKLNSELLNNLGNFINRVLSFIAKPAGQGYDSIIPSVPDNVSGDSHGPTKKLADKVAAYIDQYIE

SEQ ID NO: 187488 - protein, 231 aa, Glycine max
  Clone ID: PAT_MRT3847_140313C.1.pep
MSHVVVTRSIHTSLTRPTSGSAHHRAQTLLKPPTFASKVFPQQRNNPSKVCSRSCLVNARKSAPTEVVPVSPEDDSKIEEELQHSRGMRQLGDTSVGMWSKPTFRRKTKVVCTIGPSTNTREMIWKLAEAGMNVARLNMSHGDHASHQKIIDLVKEYNAQSKDNVIAIMLDTKGPEVRSGDLPQPINLTTGQEFTFTIRRGVGTADCVSVNFDIKFGGDNKVDFYASFGKM

SEQ ID NO: 187489 - protein, 80 aa, Glycine max
  Clone ID: PAT_MRT3847_140314C.1.pep
DGSILQTFALFTQVVNIPFKHCYSCKLSRGLILPACSVFATVKQWSQLSSSICVGLALLLKDIYLPFRTTSSIRSCPEGC

SEQ ID NO: 187490 - protein, 47 aa, Glycine max
  Clone ID: PAT_MRT3847_140315C.1.pep
LCHSDHDLYTATCDTVRSCVPRWRNISRRGPTLRGFCTWLLRIKTGT

SEQ ID NO: 187491 - protein, 60 aa, Glycine max
  unsure (1)..(60): unsure at all Xaa locations
  Clone ID: PAT_MRT3847_140316C.1.pep
LDNFKGGLTCHSDYKSLIYNIHPTLIAIGLLGHGGETIISDKAFSTKNXVHKVIHLVFHA

SEQ ID NO: 187492 - protein, 84 aa, Glycine max
  unsure (1)..(84): unsure at all Xaa locations
  Clone ID: PAT_MRT3847_140317C.1.pep
XXXXXLLSXPXXXTVXPAXRXPXXAXXXXRRGXXPXXXXXXXXXXXPPPSXCXXXPSXXXXMXXGRVRERSXSXXPXXRTRXSX

SEQ ID NO: 187493 - protein, 358 aa, Glycine max
  Clone ID: PAT_MRT3847_140318C.1.pep
IRRFPKCLPPPPPSSPLIGSKSKSKSSSKKMQYKNLGRSGLKVSQLSYGAWVSFGNQLDVKEAKALLQCCRDHGVNFFDNAEVYANGRAEEIMGQAIRELGWKRSDIVVSTKIFWGGQGPNDKGLSRKHVVEGTKASLKRLEMEYVDVLYCHRPDTSTPIEETVRAMNHVIDRGWAFYWGTSEWSAQQITEAWAVAQRLDLVGPIVEQPEYNLLSRHKVESEFLPLYTNYGTGLTTWSPLASGVLTGKYKKGVIPPDSRFALENYKNLASRSLVDDVLRKVDGLKPIADELGVPLSQLAIAWCAANPNVSSVICGATKESQIQENMKAIDVIPLLTPVVMEKIEAVVQSKPKRPESYR

SEQ ID NO: 187494 - protein, 254 aa, Glycine max
  Clone ID: PAT_MRT3847_140319C.1.pep
LFLSFLYQLSPTDSHTHSLSLSSTSSSSSFFFFFPGIGSRSKSSLTKKMQYKNLGRSGLKVSQLSYGAWVSFGNQLDVKEAKALLQCCRDHGVNFFDNAEVYANGRAEEIMGQAIRELGWKRSDIVVSTKIFWGGQGPNDKGLSRKHVVEGTKASLKRLDMEYVDVLYCHRPDSSTPIEETVRAMNHVIDRGWAFYWGTSEWSAQQITEAWAVAQRLDLVGPIVEQPEYNLLSRHKVESEFLSLYTNYGTGLTT

SEQ ID NO: 187495 - protein, 67 aa, Glycine max
  Clone ID: PAT_MRT3847_14031C.1.pep
QLSPENWGQGACLCGSGSPRPNYSMKLGINENLPPQICMMLASEKILVGSLTRLCDVVSATLTHDIC

SEQ ID NO: 187496 - protein, 226 aa, Glycine max
  Clone ID: PAT_MRT3847_140320C.1.pep
HRKVMASSHGNAHSDAAKMEQIITEFFAKSLHIILESRALYVSSRNSYGDQAVSSPCSSSSSSSNVRPGSRWFNLALRECPAALENIDLWRQNNLECIVIDVILVHRPLVSVSFSPKRVIPRSSSLKERCPFGWNTDQEELGVVGRSEKIVERWLVQYESRKTRDSNSGSRRSSNVSLHNLYKKSTLLLRSWYATVRLLPAYKLFRELNSSGQIKEFTLGHPGASF

SEQ ID NO: 187497 - protein, 109 aa, Glycine max
  Clone ID: PAT_MRT3847_140321C.1.pep
CLCLFIRASVSIIQFIISSLRIYERQRFPEFFSIVLIRKEKKKKQLLGLPSDLRILNYNYGAYRRYCYRDYRIISYRFLYLFFVCFLVLSSSFLSLSLSLILFHKQDSD

SEQ ID NO: 187498 - protein, 34 aa, Glycine max
  Clone ID: PAT_MRT3847_140322C.1.pep
NGGKHPSKHSMKDAADKYQGPNLYVKTLDYCIFD

SEQ ID NO: 187499 - protein, 145 aa, Glycine max
  Clone ID: PAT_MRT3847_140323C.1.pep
KGSGGEKLDDKGFSTFPGNINCLVFSVPEFAKTLEQTQGSISEFINPKYADATKTKFKSPTRLECMMQDYPKLLKDCGRVGVTQIGKEFCFSACKNDLQSAVGKVKSGLPAESSSSCEFDFYQLNTEVLRIAGVNIQKGEPVNHG

SEQ ID NO: 187500 - protein, 47 aa, Glycine max
  Clone ID: PAT_MRT3847_140324C.1.pep
NLNGPFFGTVNTGKALGLPTLIGLNPFPFPPFGVLAKRPFPIALPNS

SEQ ID NO: 187501 - protein, 81 aa, Glycine max
  Clone ID: PAT_MRT3847_140325C.1.pep
ARALVDSNYLSKTDTYYIGHVLYVFSACCKDVRPLWQERAGRKRQELQGCGKEEELMGMVYACLPHFCGKEDSKSSKHQAH

SEQ ID NO: 187502 - protein, 148 aa, Glycine max
  unsure (1)..(148): unsure at all Xaa locations
  Clone ID: PAT_MRT3847_140326C.1.pep
MTGRSCGYSPSTSPSMRYPRRXASLSPRGRSRGWDLDLPTSLLDRNLAYIAGQHDLHGPSDPLGAVKDVYLAKYYYTAEPKGFVFGQSGDPADAADAKYHMXGRILLGREITVEVAAXNREKPADVRATHHMKDRSHDYRPSSRTYSS

SEQ ID NO: 187503 - protein, 179 aa, Glycine max
  Clone ID: PAT_MRT3847_140327C.1.pep
MSRRVQIDDLINDDVVNGDSSPVEPDKLRKRDHINVPSHPFLMKLLNKQGEVLGLCADTVFKFTGSGKMKCRILLITDFAIYIVDPETDSLKRRIALAAVEKIYLSELSDNFLAVIIPTEYDLLIASARKNEIVTAFVEAYELEVVSSNRFEYNAASDLVKEIEFEEAEGGVKTRILRK

SEQ ID NO: 187504 - protein, 61 aa, Glycine max
  Clone ID: PAT_MRT3847_140328C.1.pep
NTKSRLIPFKSPHPPPLFKFESNQLFVPATFCYIVVKKVVYNLLWDCFFPHSKKVPLDNIW

SEQ ID NO: 187505 - protein, 76 aa, Glycine max
  unsure (1)..(76): unsure at all Xaa locations
  Clone ID: PAT_MRT3847_140329C.1.pep
EDQRVGASKVSXRHTFGTVTKGDYDYTXPSTIQKLETGTIKSWNSNTPVLAQYEANFMQFYITNKTGMAVNRPISK

SEQ ID NO: 187506 - protein, 429 aa, Glycine max
  Clone ID: PAT_MRT3847_14032C.1.pep
MGRHSCCYKQKLRKGLWSPEEDEKLLNHITKHGHGCWSSVPKLAGLQRCGKSCRLRWINYLRPDLKRGAFSQQEENMIVELHAVLGNRWSQIAAQLPGRTDNEIKNLWNSCLKKKLRQRGIDPTTHKPLSEVENDKDMNMMPPSTDKSTQKASVGSNEVVSNLVDHHQPPKTMPNSSSERYPLEVSTTSSTQELFLDRFGTTPTTCHENNNNTSDLVGSYFSFQHLNYGTTTSMALSSNPNTSLCFILPSTSSDINNNNSIITSSSMLPSIFPTQHVKLQSNNNNPSSISSDGVQNWETSNNTNKNNGNMQLQSSTNYLDSTWGVAESMKIVNINKEAHVVPLQAEQEDLKWSEYLYTNTPFILGNNTAQNHQIHTSQSIYSEVKPETGFITDESCATWHHYQNQTPALLSDIYSKDLQRFSVTFGQTL

SEQ ID NO: 187507 - protein, 800 aa, Glycine max
  Clone ID: PAT_MRT3847_140330C.1.pep
MASRIENRPPRILSNKKGATEEVFSDKRRRIGSERMERQGGRGRAPLGALKADANNDGASAEGSECSTVDFTKEEVEALLNEKMNTKENRYDNKKKMDQMGDLIKRLKLCLRWFKRVEEGYIQEKEKLQTDLESAEKKCLDIENEMKIKIAELDETISNLRVTISSLEERIAKEASDKLEAIACYGKEQEARSAAEQMQASISTELERVREEKSSGVLQAISNEDLYKRSQEYNMSLQQYNSRLQSDLEITNGAHKRLEMEKATIVENLSNVRGHNKALQDQLASLKASQDEAAKQKEMLTNELKFLREELKQIRDDRDRQQLQVQTLTGEVEKYKEYTGKSCAQLDTLTIKTNALEGTCSSQRDQINMLQQQLIAEKEKSKLADLSASETRTVFEDQKRIIRELQERLAEKEFQVIEGEKLRKKLHNTILELKGNIRVFCRVRPLLPDDGPGTDMVVSYPTSTEALGRGIELLQSGQKYPFTFDKVFNHEASQQDVFTEISQLVQSALDGYKVCIFAYGQTGSGSSRIGSSTAARRRQKGLIPRSLEQIFEISQSLKDQGWTFKMQASVLEIYNETLRDLLSSNRSSGIDSTRIENGVPVSGKQPYTIMHDVNGNTHVSDLTIKNVSSASEISSLLQQAAQSRSVGRTHMNEQSSRSHFVFTLRISGTNSNTDQQVQGVLNLIDLAGSERLSRSGATGDRLKETQAINKSLSSLSDVIFALAKKQEHVPFRNSKLTYLLQPCLGGDSKTLMFVNISPDPSSTGESLCSLRFAAGVNACEIGIPRRQTSTRSLDSRLSSG

SEQ ID NO: 187508 - protein, 477 aa, Glycine max
  unsure (1)..(477): unsure at all Xaa locations
  Clone ID: PAT_MRT3847_140331C.1.pep
DACRTGPDSRSTTRPLLKTPPPLHDCASTHHHSSSDTDQSSACQTDILGFLEELLQTGIQLDWDETRDPYFTNCSSCRSTNNGICGFNFSSPNYPFQCFHFHPESTLSPPWFRKFKPSKIAIFTTIITLTSLILIISATTAMLRRSKASSATQQDPNTLLLHNHRSASLLPPXFTYEDLALSTNNFDSKRIIGDGGFGSVYLANLRDGRLAAVKYLHRHHAVSAAFSTKSFCNEILILSSINHPNLVKLHGYCSDPRGLLLVYDYIPNGTLAEHLHNRKGSLTWQVRLDIALQTALAMEYLHFSVVPPIVHRDITSSNIFVERDMRIKVGDFGLSRLLVVQDNNTTSSSNGFVWTGPQGTPGYLDPDYHRSFRLTEKSDVYSFGVVLLELISGLRAVDQNRDKREMALADLVVSRIQMGQLHQVLDPVLDCADGGVAAVAELAFRCVAADKDDRPDAREVVEELKRVRNRAVTAAKE

SEQ ID NO: 187509 - protein, 32 aa, Glycine max
  Clone ID: PAT_MRT3847_140332C.1.pep
AAIFQTKTRFMLGELAIHNHIIVNLASLYTES

SEQ ID NO: 187510 - protein, 64 aa, Glycine max
  Clone ID: PAT_MRT3847_140333C.1.pep
ISSRPCPPGSSLSGLFYSERKTFSVFTSALSFFHRGGEAGVRGARPMILGHQGERLYCEDGGQG

SEQ ID NO: 187511 - protein, 116 aa, Glycine max
  Clone ID: PAT_MRT3847_140334C.1.pep
HQNALICYCLLKTLVALGPISPFDCCIAGRPNLAIGQPFVQAAALGECVIATLCMSVCHCQFGPVKFGPAQWSIVTWRDLVLVRMTIRWWSVRLHFVPHSQQCDELQSGGQQPQGL

SEQ ID NO: 187512 - protein, 203 aa, Glycine max
  unsure (1)..(203): unsure at all Xaa locations
  Clone ID: PAT_MRT3847_140335C.1.pep
MDSSPSPDIYIPEQWSEAAESIAHSSMPPIALICGAKNCGKTTFSRYLLNVLLHKYTKVAYLDTDVGQPEFTPPAFLSLTIVHKVTPDLTVPCLKTPERCLFFGDVSSKRDPSTYLSYVFAIYDYYQKKYCIYEKGENPCKGXRLPLXVNTSWLGERVVGYDVLVXDMLNYISPTHVVKISIASXKKNLPAGDFWLDGETREN

SEQ ID NO: 187513 - protein, 762 aa, Glycine max
  Clone ID: PAT_MRT3847_140336C.1.pep
MDMDVEEASAPKERKPVLVILVGAPGSGKSTFCEEVMGSSTRPWVRVCQDTIGNGKAGNKAQCLSSATRALKDGKSVFIDRCNLDREQRSEFIKLGDGPQIDVHAVVLDLPAKLCISRSVKRTGHEGNLQGGKAAAVVNRMLQHKELPKLSEGFSRITFCQNESDVKNALNTYSTLGPLDSLQYGCFGQKNPDSKIQVGIMKFLKRAEVPVAAASRESGIEDPTSQTPGKNNSCCKDKQTFSSIPDNDNSETKEVENQAVGSVGSHANQVSLDDIPTLAFPSISTSDFQFNHEKAADIIVEKVAEFSNKFRNARLVLVDLSHKSKILSLVKAKIAGKNIDAQKFFTHVGDITHLYSRGGLRCNVIANAANWRLNPGGGGVNAAIFNAAGPELESATKEKVQSLSPGNAAVVPLPSSSPLFTREGVTHVIHVVGPNMNPQRPNCLNNDYNKGCKILQDAYTSLFEGFASIVRNQTWHPVGKSENLERKSLELQVQSDCSRNYFTKTDQKSKRDVDHGLGKSKKYKGTRDDSGLTFTDSRNENVDSEHRTERSMTKTWGSWAQALHQIAMHPEKLKDDLLEISDDVVVLNDMYPKARKHVLVLARTGGLDCLADVQKEHLQLLNKMHDVGLKWAEKFLNENASLVFRLGYHSAPSMRQLHLHVISQDFESIHLKNKKHWNSFNTAFFRDSVDVIDEISSDGKAKLKDDDKLLSMELRCHRCRSAHPNIPRLKSHISNCQSPFPAHLLQHGRLVRAPGEPHSNVQ

SEQ ID NO: 187514 - protein, 393 aa, Glycine max
  unsure (1)..(393): unsure at all Xaa locations
  Clone ID: PAT_MRT3847_140337C.1.pep
MDWNLRCEKTTEGEVDQANLPNMETMEGSSRYGMYRTKGEFSVDLKLGQVGNSGRESSVLTKSKDGGAVGVSKMISSSSSGSAKRARSLSNGTQTVSCLVDGCHSDLSNCRDYHRRHKVCEVHSKTAQVTIGGQKQRFCQQCSRFHSLEEFDEGKRRNSKKIIIFSFHDLQXYQHTRKSMTKFSSNFXGTQLLPFSSSHEYPSTTVVNPTWGGVLTTSGDVRLHGHNQHHHQVHLADKQDLFLGSSPAGYKEGKQLAFMQGDHTLNNRSPHLPGASVGQAQMFLRTSLYSESDGLRCKMFCDSLTSSIQDNNTSRALSLLSSPPQPLSPGNGLNLMVNSHSPLMQPLGLSLHDNSLGSVDPVLGPNDSSSMYNIGSNGSQGNEAPPLFPFQWE

SEQ ID NO: 187515 - protein, 81 aa, Glycine max
  Clone ID: PAT_MRT3847_140338C.1.pep
ILFFKKKSSGFSKNLNGKFPFLGQGKFVETLFKKGREIFFFFLGKKKNFFPPFFLGGGVVKKKKTKKKKKKKKKKKKKKKK

SEQ ID NO: 187516 - protein, 80 aa, Glycine max
  unsure (1)..(80): unsure at all Xaa locations
  Clone ID: PAT_MRT3847_140339C.1.pep
LAPXGLTFLAVXICVSALXLXPYCCGGWANHGLVMSFFXXSCPQAERTYIHRXSTSLLYKRHKNTDFLLAXELFHDXAVQ

SEQ ID NO: 187517 - protein, 68 aa, Glycine max
  Clone ID: PAT_MRT3847_14033C.1.pep
IEGGSCLKICFYFKSINVHLCSCKLRSLPTKKVDYFVGLLRQISMPLLRNHCMNYHSHFNCTAASLAD

SEQ ID NO: 187518 - protein, 74 aa, Glycine max
  Clone ID: PAT_MRT3847_140340C.1.pep
SNAIEVQFPMLFTTIVMPFGIHYEQKQEFDDFPSGYHLGFPHFCFPCTQHKPWPKFQIPCLKLLCKLFYSLNSV

SEQ ID NO: 187519 - protein, 57 aa, Glycine max
  Clone ID: PAT_MRT3847_140341C.1.pep
TEVGRFFFLPRRLIMYISRRLYPTSIWFKLHHVLPMMYQIFLKPTVRAPVKTRGKIH

SEQ ID NO: 187520 - protein, 63 aa, Glycine max
  unsure (1)..(63): unsure at all Xaa locations
  Clone ID: PAT_MRT3847_140342C.1.pep
FLVGKPFPSSKDSQKRVDXAPRAQLKGTKMSFLPPPGSYKFTRPRTFHKYALEIWHIYPVQLP

SEQ ID NO: 187521 - protein, 90 aa, Glycine max
  unsure (1)..(90): unsure at all Xaa locations
  Clone ID: PAT_MRT3847_140343C.1.pep
IDAISGGLIENKLAFIGTADPVNVVSKXRMYRQTDILSVGPAKEPEKKEEPKKEEKKEEPKKEGEAKKEEEKKEEPKKEEEKKEEPNKEY

SEQ ID NO: 187522 - protein, 53 aa, Glycine max
  Clone ID: PAT_MRT3847_140344C.1.pep
RFAVKDKHSFHSHYVSFIYKLLIAPSSSYPPPLKWLFYLVFVSCYAHSVVFSQ

SEQ ID NO: 187523 - protein, 141 aa, Glycine max
  unsure (1)..(141): unsure at all Xaa locations
  Clone ID: PAT_MRT3847_140345C.1.pep
RSQPSSVRNCEERFXHSSETIYRHLHSVLEAVCMFAKDIIKPVDPSFRDTLDEILKDARYRPYFRDCIGAIDGTHIRVCVPSHLQGVYSGRKGYTTTNVMIVCDFSMCFTFVWAGWEGSAHDTKIFXEALRKPALHFPHPP

SEQ ID NO: 187524 - protein, 92 aa, Glycine max
  unsure (1)..(92): unsure at all Xaa locations
  Clone ID: PAT_MRT3847_140346C.1.pep
GLPIPVDFAMGVKWPPLTIMWPYGLILVIXGSRLLATIPKSIXQKTVWNQMPPVRTPWNFDFSRQSFCQFFIDLLGEGILLDKTGNGITLIQ

SEQ ID NO: 187525 - protein, 109 aa, Glycine max
  Clone ID: PAT_MRT3847_140347C.1.pep
SEYINIFSRRYEDRTGANAGGVGLNQNPKVCHFVATAFLILQIIVLITSGPILARNAHFINFRAPNLYPESLTWDPLAHHFLLASLRQLIISAVSYSVVVETFMSDTDL

SEQ ID NO: 187526 - protein, 60 aa, Glycine max
  Clone ID: PAT_MRT3847_140348C.1.pep
RRQKGCQLVKNNIISRLQKSPQQTQDNHSKYNRTKIILNILLYFLGRSYYIISTWYRIIS

SEQ ID NO: 187527 - protein, 78 aa, Glycine max
  unsure (1)..(78): unsure at all Xaa locations
  Clone ID: PAT_MRT3847_140349C.1.pep
KKGVRPVPSQKGIFSLGPKHLCGLQKKKNFNCLKNVGPQFXKSRQFLKKNLQCCMEKNFMAKQNLGEIGFKEKKVKTS

SEQ ID NO: 187528 - protein, 342 aa, Glycine max
  unsure (1)..(342): unsure at all Xaa locations
  Clone ID: PAT_MRT3847_14034C.1.pep
LVELEALVQRNNNLSGELPLTLKNCSSLVILDVGENLLSGPVPSWIGESLQQLKILSLRVNNFFGSIPLHLXYLSQIHLLDLSRNHLSGGIPTCLSNFTAMTDRSVIPRELIRIRKISPLVTLYNIYDTNVSKTYVFESEYLLKSIDLSSNDLTGEVPKEIGYLLGLVSLNLSRNYFRGEIPSDIGNLSSLEFLDLSRNHFSGKIPSTLSKIDRLAMLDLSNNXTDWKNPXGRQLQTFDASSFEGNLGLCGEQLNKSCPGDETTVKPQEPAIHGEDDNSVFYEALYMSLGLGFFAGFWSLLGPMLLWQAWRNAYLRFLNRLTDNILVMIELKIAKCHMCLKG

SEQ ID NO: 187529 - protein, 465 aa, Glycine max
  Clone ID: PAT_MRT3847_140350C.1.pep
DAWAGQRASRRCVRASSSQIGVLLMGLCFLTLGSAGVRPCSIPFGVDQFDPTTDEGRKGINSYFNWYNTTFTMVLLVTHCELVYIQDSVSWRIGFGIPTVCMLCSIIMFFVGTRVYVHVKPEGSIFSGIAQVLVTAYKKRKLNLPMSEEKPDGVFYDPPLIGITVVSKLPLTKEFRALNKAALIMEGELNPDGTRVNQWRLVSIQQVEEVKCLARIIPIWAAGILSLISMTQQGTFTVSQAMKMNRHLGAKFQIPAGSVSVISLITIALWLPFYDRILVPKLRKMTKHEGGITLLLRIGIGMVFSILSMVVAGYVEKVRRDSANSNPTPLGIAPMSVLWLAPHLILMGLCEAFNIIGQIEFFNRQFPEHMRSIGNSFFSCSFGVSSYVSSIIVNIVHHSTRTHSHPDWLTDDINAGRLDYFYYLIAGLTSLNLVFFIYVARRYQYKGNVDLLDETHQVELGSHKA

SEQ ID NO: 187530 - protein, 214 aa, Glycine max
  Clone ID: PAT_MRT3847_140351C.1.pep
MASSSLTSVPLSSSSLNIPLSSSKPSSSFLSSPIPAFSRTPKTLFAESKSHFYPKRNDNGFSIRAQTLDFSDSFFEGGFGSEDDPSSPGGPGFTGVEEKEEPQCPPGLRQYETMMVLRPDMSEDERLALTQKYEEVLVAGGGMYVEVFNRGVIPLAYSIKKKNKAGETNTYLDGIYLLFTYFTKPESITPLEETMLTDDNVIRSMSSKIRKRKY

SEQ ID NO: 187531 - protein, 70 aa, Glycine max
  Clone ID: PAT_MRT3847_140352C.1.pep
KTISHHIWINRQQKTLFVFFFFFFLVILIFSFLSSCSTYNMLQSAIAHTRTKRVLLNKLTVAIVKKYTKP

SEQ ID NO: 187532 - protein, 61 aa, Glycine max
  Clone ID: PAT_MRT3847_140353C.1.pep
VASHHEAGTQKGWVVTTSALSVIPIDACMLSMENAPTVQKLQSYLLHHMSNSQSYYILGQS

SEQ ID NO: 187533 - protein, 43 aa, Glycine max
  Clone ID: PAT_MRT3847_140354C.1.pep
MGVCFAFSYFDIADDGVNNNVILMTNLYYVMFFQCLKIVLMKY

SEQ ID NO: 187534 - protein, 55 aa, Glycine max
  Clone ID: PAT_MRT3847_140355C.1.pep
MLCYFVGVKIGRGRSYDSCVRHVCLSSPGFTRDVEERYWLTKECGFYEIRSYRVR

SEQ ID NO: 187535 - protein, 31 aa, Glycine max
  Clone ID: PAT_MRT3847_140356C.1.pep
SCPVIMRSFSSLRRGEHRQVPAQNLSGRSLD

SEQ ID NO: 187536 - protein, 50 aa, Glycine max
  unsure (1)..(50): unsure at all Xaa locations
  Clone ID: PAT_MRT3847_140357C.1.pep
MGKSLYLLTRDKLLSHYIRYNEIDIAMLWEVEGKCVVXVAVDVDIGSNPS

SEQ ID NO: 187537 - protein, 79 aa, Glycine max
  Clone ID: PAT_MRT3847_140358C.1.pep
SGIPGSTHAYAHASGQIDTFLNFQELAFPFVLLYVDIDLSFLYLFLDFVFKRPLKTWQESQESTPTGFILVCVWLSQGS

SEQ ID NO: 187538 - protein, 83 aa, Glycine max
  unsure (1)..(83): unsure at all Xaa locations
  Clone ID: PAT_MRT3847_140359C.1.pep
XXGXKSIVFLXDGSLGGXGRVSTVGPISLLPLLLLLTGRGRLVGGPFGLLSESDARSXPCARVGPSHALAQVSCVLTPDSAAA

SEQ ID NO: 187539 - protein, 106 aa, Glycine max
  Clone ID: PAT_MRT3847_14035C.1.pep
MNEKRNPKRQKPLPFSMPVTDSNDPQNFDDNILFPVEEIVQYPLPGYVSPTSISFSPDDSLISYLFSPDNSLNRKVYAFDLKTNTQELVFSPPDGGLDESNISPEE

SEQ ID NO: 187540 - protein, 57 aa, Glycine max
  Clone ID: PAT_MRT3847_140360C.1.pep
FLNEKPQPMPGKRVTNTLPVFERNLLYSLKFWFFGCKGYLKGIPNLNYILIGTKYDE

SEQ ID NO: 187541 - protein, 131 aa, Glycine max
  Clone ID: PAT_MRT3847_140361C.1.pep
ANMCGEGLVIRTFKVPRTRVVLVSLVKVSHPHLRIPVPCARNHRGTHHHCSVRCPSRHTHNHNQIGPGRANSAWSGYTIQTNKCLLSLPFYSCSKSLQTGISGRQCHCLYVRVSVGEFPRIQVQCLRSLML

SEQ ID NO: 187542 - protein, 57 aa, Glycine max
  unsure (1)..(57): unsure at all Xaa locations
  Clone ID: PAT_MRT3847_140362C.1.pep
MPAGLKPLRDPTFLFXSSHAKLRAEGRTRECATIWLNSHEARGKRGYXRRTXPSVVS

SEQ ID NO: 187543 - protein, 86 aa, Glycine max
  unsure (1)..(86): unsure at all Xaa locations
  Clone ID: PAT_MRT3847_140363C.1.pep
PDGISVLSFHIIVITLTGNTTPFQVQSIDTTDTVTDKIQVTECIPPDQQRLIFAGKQLEDGTTLTDXIIQTESTLHLVLTHHGGII

SEQ ID NO: 187544 - protein, 75 aa, Glycine max
  unsure (1)..(75): unsure at all Xaa locations
  Clone ID: PAT_MRT3847_140364C.1.pep
TWAFVFGLLGNVISFMVFLALLPSFYQIYKXKSSEGFQSLPXVVALFSSMLWIXYAFCKLDAILLLITINSFGCV

SEQ ID NO: 187545 - protein, 63 aa, Glycine max
  Clone ID: PAT_MRT3847_140365C.1.pep
CDMYVGYRHIWLPYPKKWQCTWFNNKRIKILGNNNECYHFCERCRVDLLWLDLLPKRSLIFSI

SEQ ID NO: 187546 - protein, 61 aa, Glycine max
  Clone ID: PAT_MRT3847_140366C.1.pep
LRCSLRLEIMLYWRTVRLCNLNFIKYIRFTQPCRRHQKHNIRGHDHLSLMSSLEPHIQSLG

SEQ ID NO: 187547 - protein, 134 aa, Glycine max
  unsure (1)..(134): unsure at all Xaa locations
  Clone ID: PAT_MRT3847_140367C.1.pep
PKSYAGNAGXTVYATTECKELEELPFMKLVEMVREGATRMTNEYARSIIDWGETNKGCPNREVLVSSWWRLGFEEVEYPWGKPKYCCPVVYHRKDIILLFPPIDGGGGVSIIVALPPKEMEKFYGLFNKFLTLD

SEQ ID NO: 187548 - protein, 83 aa, Glycine max
  Clone ID: PAT_MRT3847_140368C.1.pep
VSIDCNGLDLTFVMHKKSLIITETSTKADKPLFEVWERSNRLSFNFMKPTLVENVGHSCPQQIMLSNSWECLRSTHNLTLLLS

SEQ ID NO: 187549 - protein, 142 aa, Glycine max
  Clone ID: PAT_MRT3847_140369C.1.pep
GVVFSFGISFFFSFFFFIKVFFPPRGPTRGKKNFVHPPNFLNLSYRSGVYKKNPQKFLLITAAGEKKHAFFGTLLNRPKPLKGPPLKKQGYSKTRPFAKCDSPKCATFGPRLYFYKKSVTTPTPLSAQRGPKSMGPPLEAPP

SEQ ID NO: 187550 - protein, 70 aa, Glycine max
  Clone ID: PAT_MRT3847_14036C.1.pep
GGFGITGYDAVAHMIEEIPNASVEGPKIMIYCVMIGTVTGFLFLMILFSSQVAHGGGPPQNKRGFSPFPL

SEQ ID NO: 187551 - protein, 35 aa, Glycine max
  Clone ID: PAT_MRT3847_140370C.1.pep
TIIILPPLDIIPPGGKIYTFYLNNPLLVITIKTNP

SEQ ID NO: 187552 - protein, 58 aa, Glycine max
  Clone ID: PAT_MRT3847_140371C.1.pep
SIATLFSISNHHKISHHWINDPNLPYQSHSLRASSILFFPVQYGNFRVVKGSLKIKNT

SEQ ID NO: 187553 - protein, 58 aa, Glycine max
  Clone ID: PAT_MRT3847_140372C.1.pep
ALRYQCCAHQSNRSSDAMSTERIFACSQQALSRSISQSFNAQDGSPHCVMFKFERSIF

SEQ ID NO: 187554 - protein, 63 aa, Glycine max
  Clone ID: PAT_MRT3847_140373C.1.pep
WSIRGKHDSLACFGSTQNQSHILIPAKKWKDWFCKASDVDCEEQNRPLLSSYSQPSDAWADAW

SEQ ID NO: 187555 - protein, 305 aa, Glycine max
  unsure (1)..(305): unsure at all Xaa locations
  Clone ID: PAT_MRT3847_140376C.1.pep
DEKQCSGKSEAQPSVDVSEKKTNAVDSEAELSVKGGLSVESEGSNQGDEDSRPASDALDGQNVGTEVVKKPFYYLIRVPRYDDDENIKEKIKNALHQVEEKTKIRDAIRIESQTIKASCKDFDQEFRAAIAAHRAARDLLKSKRQEIDSVQSTMNRLNNAISVGDIDDKIRSMEHMIQHETLPLNKEKQLIREIKQLKQNREELSSNMKKQDQSQQSVDNKDDNIEEHFKXLQLLKKEMEVLRNNVLKSDTETKAAXKLNNDECAKLNELRAPEHSADDSRCELMLLLMCRKRKLTQFMVKLNFQ

SEQ ID NO: 187556 - protein, 146 aa, Glycine max
  Clone ID: PAT_MRT3847_140377C.1.pep
MAAIVCQSRLHRLMLASPKPPPQQPFKSCCFWEESNYAKPHYDDEDNYKADDTPTDWSSIQALSSTVTVSNSIYEVKQSSSLLRLSPKSLELCTEKLGNETGSDDITAETGIDDLLSSSEITREQKSKKVREAARTFPPPLRTIRG

SEQ ID NO: 187557 - protein, 62 aa, Glycine max
  Clone ID: PAT_MRT3847_140378C.1.pep
PRVFSVYFTGQLTPVTTRVPMLWNSIILMRRMPEQQQKENEAVDQVRHPLRHIIQELFKYKV

SEQ ID NO: 187558 - protein, 54 aa, Glycine max
  Clone ID: PAT_MRT3847_140379C.1.pep
LLYFFCSFLVPISLYCFHFCFYRIFCLFLVFINLCFSNFGFCKHKHTMTINEKN

SEQ ID NO: 187559 - protein, 770 aa, Glycine max
  Clone ID: PAT_MRT3847_14037C.1.pep
MNEKRNPKRQKSLPFNMPVTDSNNPQNFDDNILFPVEEIVQYPLPGYVSPTSISFSPDDSLISYLFSPDNSLNRKVYAFDLKTYTQELLFSPPDGGLDESNISPEEKLRRERLRERGLGVTRYEWVKTSSKRKAVMVPLPAGVYIQDIPHSKAELKLSSVSGSPIIDPHLSPDGSMLAYVRDCELHVLNLLSNESKQLTHGAKENGLTHGLAEYIAQEEMDRKTGYWWSLDSKYIAFTEVDSSEIPLFRIMHQGKSSVGLEAQEDHPYPFAGASNVKVRLGVVSVAGSSITWMDLLCGGTEQQNNEEEYLARVNWMHGNILTAQILNRHHTKIKIVKFDIRTGQRKNILVEENSSWINIHDCFTPLDKGVTKFSGGFIWASEKTGFRHLYLHDANGTCLGPITEGEWMVEQIAGVNEATGLIYFTGTLDGPLESNLYCSKLFVDGSQPLQVPVRLTHSKGKHIVVLDHHMRNFVDIHDSLGCPPRVLLCSLEDGSLIKPLYEQSFTIPRFKKLQLEPPEIVEIQANDGTTLYGALYKPDASKFGPPPYKTMINVYGGPSVQLVCNSWLSTVDLRAQYLRNQGILVWKLDNRGTARRGLKFESYLKHKLGQIDADDQLTGAEWLVKQGLAKGGHIGLYGWSYGGYLSAMTLSRYPDFFKCAIAGAPVTSWDGYDTFYTEKYMGLPSENKLGYESGSVMNQVQQLKGRLLLVHGMIDENVHFRHTARLINALVAAGKPYELIVFPDERHMPRRHSDRVYMEGRMWDFIQRNL

SEQ ID NO: 187560 - protein, 139 aa, Glycine max
  unsure (1)..(139): unsure at all Xaa locations
  Clone ID: PAT_MRT3847_140380C.1.pep
GARRACLFRSSRALPPPPPPRPPPPLQPLLGFFFSAFFXXPISXYPPKPLLPPGASAGXPXPSPPSPAPPPLPPPSPPPPSLPPPSPPPPPIPSPPPPFVLTPPPPPPSPPSLFFPLSPPPLSPSPPPPSSPVPSPPPP

SEQ ID NO: 187561 - protein, 71 aa, Glycine max
  Clone ID: PAT_MRT3847_140381C.1.pep
GTQLKKFSPPNKRWSKKLTCWPQTNTSMCLLLLYYKTRTGFTCVGKSSGAIVHTRRCWRIQGKHPLICAPF

SEQ ID NO: 187562 - protein, 63 aa, Glycine max
  Clone ID: PAT_MRT3847_140382C.1.pep
YAKARVSQSGILILLIHCTSISCTVNWGVKNEKTVIEGHKRKVKLRNIKGFNSEYLVNFSFGT

SEQ ID NO: 187563 - protein, 42 aa, Glycine max
  Clone ID: PAT_MRT3847_140383C.1.pep
VVCPDPSKPVSKRVDVQSLITSIFKLLTGRSNASGIQVFRIT

SEQ ID NO: 187564 - protein, 273 aa, Glycine max
  Clone ID: PAT_MRT3847_140384C.1.pep
NFPRQQGEKKNSDELAQKMAKLCDVYVNDAFGTAHRAEATTHGIAKFAPVACAGPLLAAELDALGKALGQPARPLAAIVAGSKVSTKLTILTSLAEKVDNLIVGGGIANTFMLASGLKIGKSLVEADLVGEAKAIIDMMAKRGASVPIPVDVVCAKEFSATAAATVKDVKDVTDDDMILDIGPKTASQLAEQIAKAGTVVWNGPVGVFEFDQFGEGTKTLAMAIANSKAFSIAGGGDTLAAIAKYNIADKVGYISTGRGAFPEFLERKTLPAV

SEQ ID NO: 187565 - protein, 107 aa, Glycine max
  Clone ID: PAT_MRT3847_140385C.1.pep
RRASWITPLSAEEHVAHEEVYEDLEDYYADGDDDDWGEACCGGSSTLLCIGNRLRGDNVYVRAARGEGQDCTSDARAGLRTQNFFSPAVDESGWACHDLRIGEEVSL

SEQ ID NO: 187566 - protein, 149 aa, Glycine max
  unsure (1)..(149): unsure at all Xaa locations
  Clone ID: PAT_MRT3847_140386C.1.pep
LAHCSGCRIDWLQRDGILLXELDRLLRPGGYFAYSSPEAYAQDEEDLRIWREMSDLVGRMCWRIAAKRNQTVIWQKPLTNDCYLQREPGTRPPLCRSDDDPDAVWGVQMEACISPYSDRDHKAKGSGLAPWPARLTSPPPRLQDFGYSN

SEQ ID NO: 187567 - protein, 62 aa, Glycine max
  Clone ID: PAT_MRT3847_140387C.1.pep
RKLINSFLLMISAAFTRLLMPGLNLLDNLSPLKSRFTSLIKYYYYQVVFLFFFTRHRGQYSL

SEQ ID NO: 187568 - protein, 97 aa, Glycine max
  Clone ID: PAT_MRT3847_140388C.1.pep
LKIVIIKESKNQKINPRILTAGSHLNHARASMFQHNIVPNTNCTKTSSKFNSSGLDAGNKKKTKQGFEIKEIKANSPGLSGKIKGITIRSHLQFCHS

SEQ ID NO: 187569 - protein, 66 aa, Glycine max
  unsure (1)..(66): unsure at all Xaa locations
  Clone ID: PAT_MRT3847_140389C.1.pep
EINKVIKHILSLKPILELLKTVIKWTFSWGCNHNRSIKCXVVHLLFNFTKFTFYKKYFHFINSINF

SEQ ID NO: 187570 - protein, 90 aa, Glycine max
  unsure (1)..(90): unsure at all Xaa locations
  Clone ID: PAT_MRT3847_14038C.1.pep
GCEKTTEGGALNVSVRGQTIEGAWRNLNWMPQGIDKVKGTCAGXLRALFHKLVESLALRRDLACSXAWFXNSALADDILKGGGPWNIPRA

SEQ ID NO: 187571 - protein, 53 aa, Glycine max
  Clone ID: PAT_MRT3847_140390C.1.pep
SLAFFHITPGFFHRGGQICGPHTCFINSGRGLPSRIPKSLHAGPLSYDVGINK

SEQ ID NO: 187572 - protein, 57 aa, Glycine max
  Clone ID: PAT_MRT3847_140391C.1.pep
MQNILILISYISKHQMSSKYRVLMFACWMKKQLYVLNGDSFVVFTNYLIEVKFDGEV

SEQ ID NO: 187573 - protein, 141 aa, Glycine max
  unsure (1)..(141): unsure at all Xaa locations
  Clone ID: PAT_MRT3847_140392C.1.pep
SCLLPHLHSEXTIDQAMLGEEEHLIIIHVNHDWNKTCVQMNEVLTSVTKTINNFTIIYLVDITXVRNFNTIYELYNPSTIIFFFKNKHIVIDVATCNNNKINXALKNXRKFIDVXETVYGRARRKRSLSVAPENYCAKYRY

SEQ ID NO: 187574 - protein, 102 aa, Glycine max
  Clone ID: PAT_MRT3847_140393C.1.pep
QVRIPQLLRVNAKLVTFGQIPNVKPFLCWLDGPGVSFGSSSPSRSFGRDPSRGFFLFGGTPYAVCGPFFAPHFWGHWARFYGEASVFVGSKVSTCIIFFGKE

SEQ ID NO: 187575 - protein, 319 aa, Glycine max
  Clone ID: PAT_MRT3847_140394C.1.pep
MLIVFICIFLFFIFLYKFLIAYGDFTLMSKKQPKRQEIEDKVVWITGASRGIGEILAKQFASLGAKLIISARNEAELNRVRTQLKGKHAPDDVKILPLDLSSGEDSLRIAVEKAESFFPDSGVDYMVHNAAFERPKTSILDVTEEGLKATFDVNVLGTITLTKLLAPFMLKRGHGHFVVMSSAAGKTPAPGQAVYSASKYALNGYFHTLRSELCQKGIQVTVVCPGPIETSNNAGSRVPSEKRVPSERCAELTIIAATHGLKEAWISYQPVLAVMYLVQYMPTIGYWVMDKIGKSRVEAAEQKGNTYSLSLLLGKKKAT

SEQ ID NO: 187576 - protein, 67 aa, Glycine max
  Clone ID: PAT_MRT3847_140395C.1.pep
IQASQKLSMSLTKFTHTLLKHCQASRRSNMECAEREKEELSDHLFENFTFFRKDFNFVVNFAKSSKS

SEQ ID NO: 187577 - protein, 76 aa, Glycine max
  unsure (1)..(76): unsure at all Xaa locations
  Clone ID: PAT_MRT3847_140396C.1.pep
MILPFIRAVFTFQDEINSPESPATLYKALVTDADSSIPSALDHDKSVDNVKRNGDPGTIMKITFLVDXETKFGLHK

SEQ ID NO: 187578 - protein, 51 aa, Glycine max
  Clone ID: PAT_MRT3847_140397C.1.pep
TWANKNMELIYNKTFLKFGLYVYQWVMYSKGPQWTLCCACANYPVKPFKTC

SEQ ID NO: 187579 - protein, 257 aa, Glycine max
  Clone ID: PAT_MRT3847_140398C.1.pep
MKSKILKALPKAVAAVTVTFQNHPFSPGRDHKSKPIVSMIPHEARRKTHDRGNNGIDEIYSQEPTSPKISCMGQIKHKKKQIKKSKSKSKSMTKEARNVASKKTSSASRDIEVKKHVSTFHKMLLFHGAKPKSEGRKSNASAPGDINKDLALADAARAPRVSQMRRFSSGRDALAEFDWKVSPDEEEIDYYSDEYRVDSDGEEEEEIIIPFSAPLLVGGGVGHTRGGVLNLKPRKEINLWKRRTMAPPRPLQLDRAN

SEQ ID NO: 187580 - protein, 76 aa, Glycine max
  Clone ID: PAT_MRT3847_140399C.1.pep
KCGGSGVQNQNPLCIVCLDHQMNPQKRLFALFKKEKGEAHQVFRSKKRMFGLKGTIFQTWSIPKKATFFIRLFFGT

SEQ ID NO: 187581 - protein, 74 aa, Glycine max
  Clone ID: PAT_MRT3847_14039C.1.pep
MASAAPNVDLFDAYFRRADLDRDGRISGAEAVSFFQGSGLPKHVLAQIWAFANQSQSGFLGRAEFYNALNLVTV

SEQ ID NO: 187582 - protein, 41 aa, Glycine max
  unsure (1)..(41): unsure at all Xaa locations
  Clone ID: PAT_MRT3847_1403C.1.pep
MFWVSFHFKLPVMASYTPXRILITGVAGFIASHVASRLVRC

SEQ ID NO: 187583 - protein, 89 aa, Glycine max
  Clone ID: PAT_MRT3847_140400C.1.pep
STNQGIGVPQFEDMVKMKTSHVILIEPRQYLILHFFPSSSQSQILPGMFMLIISPILINFFFLSLLIIQLSLINFPSYIMYFFSNIYIS

SEQ ID NO: 187584 - protein, 274 aa, Glycine max
  unsure (1)..(274): unsure at all Xaa locations
  Clone ID: PAT_MRT3847_140401C.1.pep
MSSKRRQIITLLNNSFRAESLRAERKAKIDELNEKTNYYITQQLIQRYDTDPAAKAAAATVLASKLGADSGLKVYVGDESSGVSTGKTKDVEVVQSSGLRNRKQVTSRSTSPGTTTPNYSDQQLVGAGKIDQTQTHEHNQLVVVVHHNPLVSTMHXCARLLYMQQGLATNHYCIQFKLCFCXTCFLSGLARKEDFPFITYYCPHCHALNKPKQSDERISGLNSHNTQSPKTDDGEEVKNASDSAVRSVIRSDNPVNTSPEIEEVSEPAISEEKS

SEQ ID NO: 187585 - protein, 48 aa, Glycine max
  unsure (1)..(48): unsure at all Xaa locations
  Clone ID: PAT_MRT3847_140402C.1.pep
KSQTVFLNNNYGMTITGLKEASPGGGKIXIHFEELLDSNSTIFGGELV

SEQ ID NO: 187586 - protein, 406 aa, Glycine max
  unsure (1)..(406): unsure at all Xaa locations
  Clone ID: PAT_MRT3847_140403C.1.pep
MGDEKGEKKEKTSPSASGGNDSKKNEKKKKGFISRIWNAIFRSNRDDFEKRLEXITKEENMAVTRLSNRSRSWRRTSRQLILFSVLFEVIAXGYAIMTTRSMDMNWKMRAIRVLPMFLLPALSSATYTAFVSFTRMSSRXGDRRDQKILESLRAERKAKIDELKEKTNYYITQQLIQSXYDTDPAAKTAAATALEVKLGADSGLKVYVGDESPGASTGKTKDVEVVQSSGLRNRKQVTSRSTSSGTTTPNYSDQQFVGSGKIDQTQTPEHNQLVVVEHHNPQSSTMNDGGWIARIAALLVGEDPTQSYALVCGNCRMHNGLARKEDFPFITYYCPHCHALNKPKQSDERISGLNSHNTQSPKTDDGEEVKNASDSAVRSVIRSDNPVNTSPEIEEVSEPAISEEKS

SEQ ID NO: 187587 - protein, 71 aa, Glycine max
  unsure (1)..(71): unsure at all Xaa locations
  Clone ID: PAT_MRT3847_140404C.1.pep
LSCPLSPCCVVFPGAPFPSACFPSRPPRRVPGPPRCSAWACSLIVVWLLPRGPLFSXXXGPSLLEAKSSRD

SEQ ID NO: 187588 - protein, 44 aa, Glycine max
  Clone ID: PAT_MRT3847_140405C.1.pep
LFGGGNIPAFVLASVCALAGAVIATLKLPDLSSSSFQSTGFHIG

SEQ ID NO: 187589 - protein, 76 aa, Glycine max
  unsure (1)..(76): unsure at all Xaa locations
  Clone ID: PAT_MRT3847_140406C.1.pep
TRRQQRSFSMXFSXPRGLXGPXKCFXSXKHLXVSDXXKSSFDYXXRHFLAKSAGIQTVVLVPTDFXXVERGLVRVL

SEQ ID NO: 187590 - protein, 84 aa, Glycine max
  Clone ID: PAT_MRT3847_140407C.1.pep
LLGEQMESAQFWFCLQEQFIKIFIQLDNQMCELQEPTQALTRGSQRLRLTVNVRIGLPRPILQGFIKLKDQICELNPTRPRTRG

SEQ ID NO: 187591 - protein, 95 aa, Glycine max
  unsure (1)..(95): unsure at all Xaa locations
  Clone ID: PAT_MRT3847_140408C.1.pep
SLXXLXSXQXHLXXXISXXXDXXXPXPMXXXTLSSXPPPLXRXXLXXXXQXPSXXVXFPSTYLXXXXFXXXXPQXXLXXHSCSXRLPXXXXLPXT

SEQ ID NO: 187592 - protein, 44 aa, Glycine max
  Clone ID: PAT_MRT3847_140409C.1.pep
MCGRGRGTGGTVNAPKKTLLKPLHWVKVARAAKGSLWADSQKQD

SEQ ID NO: 187593 - protein, 90 aa, Glycine max
  Clone ID: PAT_MRT3847_14040C.1.pep
RSISLTIYACTFLKHNNILFRNTYLIYILLNLLIRYPVFVSPFTLSGPILYKIFSSTLNHRHTFMLVDPLLILCLEFHQYQSSYKKKTKR

SEQ ID NO: 187594 - protein, 45 aa, Glycine max
  Clone ID: PAT_MRT3847_140410C.1.pep
LRHSDRGLFGMPTRMLLQMMLTIRPGLSRDVMADLFFYREPEEAK

SEQ ID NO: 187595 - protein, 216 aa, Glycine max
  Clone ID: PAT_MRT3847_140411C.1.pep
MAHRVDHEYDYLFKIVLIGDSGVGKSNILSRFTRNEFCLESKSTIGVEFATRTLQVEGKTVKAQIWDTAGQERYRAITSAYYRGAVGALLVYDITKRQTFDNVQRWLRELRDHADSNIVIMMAGNKSDLSHLRAVSEDDGQALAEREGLSFLETSALEATNIEKAFQTILTEIYHIVSKKALAAQEAAVGTILPGQGTTINVGDASGNTKRGCCSA

SEQ ID NO: 187596 - protein, 86 aa, Glycine max
  Clone ID: PAT_MRT3847_140412C.1.pep
TAAKRRQKGTAAKRPQKGTAAKRPQKGTAAKRPQKGTAAKRRQKGTAARRPQKGTAAKRPQKGTAAKRPQKGTAAKRPQKGKLIPL

SEQ ID NO: 187597 - protein, 48 aa, Glycine max
  Clone ID: PAT_MRT3847_140413C.1.pep
RVGSPSFSNLHLDDQQGLVIKYVTSFFFFSPQAFFAKFKEAKPILSSV

SEQ ID NO: 187598 - protein, 70 aa, Glycine max
  Clone ID: PAT_MRT3847_140414C.1.pep
RPHFNQIPQKKNFFLIRENCNFFLFYGTLFPKKCILPPKILIARSQKIFSKVFENPFPLGNKFCLPQSFF

SEQ ID NO: 187599 - protein, 153 aa, Glycine max
  unsure (1)..(153): unsure at all Xaa locations
  Clone ID: PAT_MRT3847_140415C.1.pep
MAADNFDAQRILNILAERDNFQSNELADQLSIDHQRLIGAIKSLQVKEGLVCTSEVKIKRIELTAEGEEIIQKGSHEFNVYKIVGEKGISVAKGLNFTTTVQKQELDLTSEMIASGSWRGKQFKQYNFSAMGVPXPSGHLHPLLKVRAEFRDI

SEQ ID NO: 187600 - protein, 55 aa, Glycine max
  Clone ID: PAT_MRT3847_140416C.1.pep
APYISLPYRSESWWDDGASHKDWGAQPRMVKCHAVVSVLVTTLLVMAWFRKTNSV

SEQ ID NO: 187601 - protein, 82 aa, Glycine max
  unsure (1)..(82): unsure at all Xaa locations
  Clone ID: PAT_MRT3847_140417C.1.pep
RVEXLQSXAGGXSGXXXTXQXHLNXREXLRSHQLGEAAXSXXNVNSTAXMXXXLNPFXNXXLXRXKXEEREXECXERXSRXR

SEQ ID NO: 187602 - protein, 165 aa, Glycine max
  Clone ID: PAT_MRT3847_140418C.1.pep
MAPQFLILSLLISCQALTSTTKASEDTGFVGSLDRATLGLEKKNQVSHFRFYFHETFTANNATSVPVVPALPKYNTTTSFGTVGVMDNALTTGPERSSKLVGRVEGLYAATSQTEFNPVVVLNFVLTGGKCNGSTITIWGRNPICSEVRENPVSGGQGVSRLATG

SEQ ID NO: 187603 - protein, 64 aa, Glycine max
  unsure (1)..(64): unsure at all Xaa locations
  Clone ID: PAT_MRT3847_140419C.1.pep
GDCGASKTYPQQAGTIRKSGYIVMIGPPCKVVEVSTSKTGKHGHRXGHFGGIDIFTWQKPGDSG

SEQ ID NO: 187604 - protein, 237 aa, Glycine max
  unsure (1)..(237): unsure at all Xaa locations
  Clone ID: PAT_MRT3847_14041C.1.pep
MASAAPNVDLFDAYFRRADLDRDGRISGAEAVSFFQGSGLPKHVLAQIWAFANQSQSGFLGRAEFYNALKLVTVAQSKRELTPEMVKAALYGPAASKIPAPQINFSATVSAPAPAPAPAPATVSAPLSRPASPLLGPRGGSSKXSGNQQTLPSQGNQLARPPATVATQGMARPETPGISSYGKMGGTPEFTKSPVAVRGTSPPSVQEGFGFGSNVRTATCPISCLPHKVIRSIGLGF

SEQ ID NO: 187605 - protein, 70 aa, Glycine max
  Clone ID: PAT_MRT3847_140420C.1.pep
PLLYVPVTLALWRLGMPNLSVRALTGVGTCRSMAGSRSRYRMSHVRSASSWAHWGRYACVASRERGSDMG

SEQ ID NO: 187606 - protein, 43 aa, Glycine max
  unsure (1)..(43): unsure at all Xaa locations
  Clone ID: PAT_MRT3847_140421C.1.pep
GKFAANRKAVGIWGCXECCKVKVGGAYYIITALAVTVLCTILR

SEQ ID NO: 187607 - protein, 44 aa, Glycine max
  Clone ID: PAT_MRT3847_140422C.1.pep
SMFRVPTQSKSSVRATALKAAPNLELGETTNFFCGLRTNPSTAP

SEQ ID NO: 187608 - protein, 107 aa, Glycine max
  unsure (1)..(107): unsure at all Xaa locations
  Clone ID: PAT_MRT3847_140423C.1.pep
HTNRKCTRGKAPLKQLEPKAGRLCVPTTGGVTKPTLYRTGTSAVQWSKTYHKSAELLIRPLPFQRLDREIGXDCXTDLRIQSRTELALQEAPYAYLDGLCVDTNLCA

SEQ ID NO: 187609 - protein, 75 aa, Glycine max
  Clone ID: PAT_MRT3847_140424C.1.pep
SSADVHIVLKLMYFVPSNISCLVELALCTRYADSERERERPLTVIPKPIRYRLSTRDGSMIYSRPCKHINQPKGS

SEQ ID NO: 187610 - protein, 126 aa, Glycine max
  unsure (1)..(126): unsure at all Xaa locations
  Clone ID: PAT_MRT3847_140425C.1.pep
QVFVKTSTGKTITLDGVSSDSIDDAKDSIQDNEGVPPHHRMLIYAGIHLVDGTSLAYYNIQKESTLHLCVRLRRGMHIFGXTLTGKTITLEVESQDPLTNVXNQIPDQDGIPPDQQRLIYAGKQAG

SEQ ID NO: 187611 - protein, 83 aa, Glycine max
  unsure (1)..(83): unsure at all Xaa locations
  Clone ID: PAT_MRT3847_140426C.1.pep
FDKTISAAGDTKVRESCAFVNGLLRXVFACQVVVQTDGESXSHPTAPSLSXRYHTCAVIWKNERFAMGTYKGLLHRYFCTRIC

SEQ ID NO: 187612 - protein, 53 aa, Glycine max
  Clone ID: PAT_MRT3847_140427C.1.pep
DAWGEVNLPSHGSPTRMPLSLDGKLWDTCSCPGPLLQCIMSGKSAAKHILCES

SEQ ID NO: 187613 - protein, 55 aa, Glycine max
  Clone ID: PAT_MRT3847_140428C.1.pep
DERDVSNSLLVRRSMRLFQESPPPATAEGKSHRGVFCHQPKLQNAMKKKELYNIM

SEQ ID NO: 187614 - protein, 58 aa, Glycine max
  Clone ID: PAT_MRT3847_140429C.1.pep
GIAKSYRQFNHQCSTQFPSSFSIKRSMARFKQNAPKSNRRNGPKKQLVTKAARKSTPG

SEQ ID NO: 187615 - protein, 45 aa, Glycine max
  Clone ID: PAT_MRT3847_14042C.1.pep
SVPKLDYIKVSIYDRVSKSVTLYLSIYVLTCSVNNGSVAYEGTPA

SEQ ID NO: 187616 - protein, 125 aa, Glycine max
  unsure (1)..(125): unsure at all Xaa locations
  Clone ID: PAT_MRT3847_140430C.1.pep
RLRVTPTLFVHASCLISVHEYVXPYFSGSKLKSFLAGHNIXTITDGIDKTSATLQLIKLADCDFFKRNFKQKSNVLRVVPEDKASLWSHLHYVSRXNLEMQEAXLVKHVNEIRELYLNSPEDACH

SEQ ID NO: 187617 - protein, 233 aa, Glycine max
  unsure (1)..(233): unsure at all Xaa locations
  Clone ID: PAT_MRT3847_140431C.1.pep
SCDIYFPHFIGLGAVWNTAKVESGSIVAISGLGTGGLAGSICNCNCRCLCFWASIMAQHLHSTMCXGAKTVGASRIIGIDIDSKRFEXAMNLVMTEFINPNEHEKPVQQVIVELTDGGVDYSFECIGNVLVMRSALECCHKGWGTSVIVGVAASGQEICTRPFQLVTGRVWKGTAFGGFKSRSQVPWLVDKYLKKEIKVDEYITPSLSLAEINKAFDLMHEGGCLRCVLAMNV

SEQ ID NO: 187618 - protein, 152 aa, Glycine max
  Clone ID: PAT_MRT3847_140432C.1.pep
PGRPTRPVTSAYYRGAVGAMLVYDMTKRQSFDNMAKWLEELRGHADKNIVVMLIGNKCDLGTLRAVPTEDAEEFAQRENLFFMETSALESTNVETAFLTILTEIYRLISKKTLTANDDADPSGISGLLKGTKIIVPSQEINAGEKKGKGGCC

SEQ ID NO: 187619 - protein, 216 aa, Glycine max
  Clone ID: PAT_MRT3847_140433C.1.pep
MMSNLYGEYNHKIDYVFKVVLVGDSAVGKTQLLARFAKNQFNVDSKATIGVEFQTKTLINDKKDMEAQIWDTAGQERYRAVTSAYYRGAVGAMLVYDVTRRPSFDNMAKWLEELRGHADKNIVVMLIGNKCDLGTLRAVPTEDAEEFAQRENLFFMETSALESTNVETAFLTILTEIYRLVSKKTLTANDDADPSGISGLLKGTKIIVPSQDINGW

SEQ ID NO: 187620 - protein, 128 aa, Glycine max
  unsure (1)..(128): unsure at all Xaa locations
  Clone ID: PAT_MRT3847_140434C.1.pep
DSSMISSPADTSVNRAGAGMVAPFTGLKSMAGFLTSKTSDDILYDVIYGVYLLCLCVCSHVCXDLSYIVVLYLSYLYDAQFAMRVKYVIRKXWVPLSECVIXHTFLYLEYIRIXFIYYYVHYWNMWKL

SEQ ID NO: 187621 - protein, 46 aa, Glycine max
  Clone ID: PAT_MRT3847_140435C.1.pep
HPINIFNGPPPNFSLTPTHYFPLVSVTGLIVHVLFIHSPNTYKLKG

SEQ ID NO: 187622 - protein, 83 aa, Glycine max
  Clone ID: PAT_MRT3847_140436C.1.pep
QPPGRGRRHSRGKGTNCSASPYKRTPPSWHKNSSQEEEHNKSKEAKKGGTPAQNGVNRRESHGKAQGNKRHWQEKPTDPQRRR

SEQ ID NO: 187623 - protein, 91 aa, Glycine max
  unsure (1)..(91): unsure at all Xaa locations
  Clone ID: PAT_MRT3847_140437C.1.pep
MDERKRKPMESNRKSARRSRMKKQKLLEDLTDXRRKHMLRWKLRMILRAQTMELVGWLRFLNSILEIADEVGSGGESFEILQILNSLLMPW

SEQ ID NO: 187624 - protein, 128 aa, Glycine max
  unsure (1)..(128): unsure at all Xaa locations
  Clone ID: PAT_MRT3847_140438C.1.pep
LMNMPNAVLSMCRYCVGYLGFQVSRMTSPYFXCSVSFFIALENLADDTLNLDALSHHLVQSVEIHEKVVLQFSQEELLTARSTQVRPATTLIADGCPYXYAMVHDFXGSSIPHDSVIGDMTTTTNISG

SEQ ID NO: 187625 - protein, 60 aa, Glycine max
  Clone ID: PAT_MRT3847_140439C.1.pep
ITLIDIACEARQILMVHRTDNSSVDSPISSASGIISVGADRSHHRANAYLNQPRTKIIRP

SEQ ID NO: 187626 - protein, 100 aa, Glycine max
  unsure (1)..(100): unsure at all Xaa locations
  Clone ID: PAT_MRT3847_14043C.1.pep
DSGSGQYHPERATINCPVHHPLIHMTERNYARTPDVLIEYDACTIANDXLSLDVANDGNHKQIVGFHVAGRNGRLXICXLIPYVEPVEPAQNARHYSDFL

SEQ ID NO: 187627 - protein, 91 aa, Glycine max
  Clone ID: PAT_MRT3847_140440C.1.pep
IIFLGTKYFSNFFFTKPLEISQKPILFSNPVNAKKNPPKKKKKSWPFFYEGAQKHLFSNGGFLGENERGGDLFEGEKKRPGGGGPGPCFIY

SEQ ID NO: 187628 - protein, 271 aa, Glycine max
  unsure (1)..(271): unsure at all Xaa locations
  Clone ID: PAT_MRT3847_140441C.1.pep
DDSYFQGRGNKSTGDNFHAAPNIDHSXDFVRKDLKEWLCWMREEIGYDGWRLDFVRGFWGGYVKDYLEASEPYFAVGEYWDSLGYTYGEMDHNQDAHGQRIVDWINATADAFDVTTXGILHSLKICWADWRVSAPIGNPTGALGWGPGHFEPPSGSQRWSSALGRWRFPSGEASQGYAYTLTHPGTPSVFYDHIFSHYKTEIATLISIRKRNKIHCRSTLKICKAERDVYAAIVDDKVAMKIGPGHFEPPSGSQRWSSALEGRDYKIWEAS

SEQ ID NO: 187629 - protein, 151 aa, Glycine max
  unsure (1)..(151): unsure at all Xaa locations
  Clone ID: PAT_MRT3847_140442C.1.pep
RVYKGKYGQIHLIASLAAGLRGYHDECGGAIVDEVLEEIRVGLELNDYGMQQRRIAYMRFLGELYNYEHVDSSVIFETLYLILIYGHGTQEQDVLDPPEDCFRIRVIITLLETCGHYFDRXFDLQDLFVDLRPNMVRHNSIGEVNAALVEL

SEQ ID NO: 187630 - protein, 365 aa, Glycine max
  Clone ID: PAT_MRT3847_140443C.1.pep
AKVRPPLHQYIRKLLFSDLDKSTIEHVLRQLRKLPWNECEPYLLKCFMTVYKGKYGQIHLIASLAAGLSRYHDEFAVAIVDEVLEEIRVGLELNDYGMQQRRIAYMRFLGELYNYEHVDSSVIFETLYLILIHGHGTPEQDVLDPPEDCFRIRLIITLLETCGHYFDRGSSKRKLDRFLIHFQRYILSKGTLPLDIEFDLQDLFVDLRPNMVRYTSIEEVNAALVELEEHDRIVSADKVSSEKHSGTEKPLIRTTSTTAVVGNGQSIDNGTEENEVQDDNDSETDSGSDTIDVEGHDEELDEENHDDGCETEDDDDDDDDGPGPASDEEDEVHVRQKVTEVDPLEEANFDQELKAVVQESMEQRR

SEQ ID NO: 187631 - protein, 85 aa, Glycine max
  unsure (1)..(85): unsure at all Xaa locations
  Clone ID: PAT_MRT3847_140444C.1.pep
LXPHXXXRSXXXXPXXXHSXLXXXQXXXRXPXXXXXXQXXRXXXYXSRXXTXAXXXLLXLEXXXXXTXXRMNSXXLXXKXTXRAG

SEQ ID NO: 187632 - protein, 488 aa, Glycine max
  Clone ID: PAT_MRT3847_140445C.1.pep
MNHNNSNNNRARYPPGMGLGRGGFNPNLSQNPNQNQNHHAFQARPPYHQQQQAQYVQRHLLQQQQQQQQQQQQQQQWLRRDANAVDEVEKTVQSEAVDSSSQDWKARLKIPPADTRYKTYDVTATKGNEFEDYFLKRELLMGIYEKGFERPSPIQEESIPIALTGSDILARAKNGTGKTAAFCIPALEKIDQDNNVIQVVILVPTRELALQTSQVCKELGKHLKIQVMVTTGGTSLKDDILRLYQPVHLLVGTPGRILDLTKKGVCILKDCAMLVMDEADKLLSPEFQPSIEQLIHFLPTTRQILMFSATFPVTVKDFKDRYLQKPYVINLMDELTLKGITQFYAFVEERQKVHCLNTLFSKLQINQSIIFCNSVNRVELLAKKITELGYSCFYIHAKMLQDHRNRVFHDFRNGACRNLVCTDLFTRGIDIQAANVVINFDFPKNAETYLHRVGRSYRFRFHLYRIEQELGTEIKQIPPQIDQAIYCR

SEQ ID NO: 187633 - protein, 186 aa, Glycine max
  Clone ID: PAT_MRT3847_140446C.1.pep
MNHNNSNNNRARYPPGMGLGRGGFNPNLSQNPNQNQNHHAFQARPPYHQQQQAQYVQRHLLQQQQQQQQQQQQQQQQWLRRDANAVDEVEKTVQSEAVDSSSQDWKARLKIPPADTRYKTEDVTATKGNEFEDYFLKRELLMGIYEKGFERPSPIQEESIPIALTGSDILARAKNGTGKTAAFCIP

SEQ ID NO: 187634 - protein, 318 aa, Glycine max
  Clone ID: PAT_MRT3847_140447C.1.pep
MARAIAMVPQPLLTLFLFFSLLSIANSSPSQHLQIANAERRIDLTSHIIKVYLTLKVENLGTSPASEVHIAFSPTEVEHLAIVKAAATSGKRKKKTYVPLDVKSAELPDGPNGTKFFSITLLTPLSKGETTTLEVLYILTHSLEPFPVEISQSESQLVYFRDSAILLSPYHVKQQTTFIKTPSTRVESFTVVDPTKRAGTELKYGPYENHPPYSYSPVLIHFENNNAFAVVEELEREIEISHWGSIQEIEYSYLDVVGRTVVVLEKRNAVPEHNAPFQVYYSFNPIFMLAEPLMLVSAFFLFFVASVAYLHIDLSIRK

SEQ ID NO: 187635 - protein, 35 aa, Glycine max
  Clone ID: PAT_MRT3847_140448C.1.pep
RIIPRLIKSTKCYKISSQILRTKLKNNTLINHKRC

SEQ ID NO: 187636 - protein, 298 aa, Glycine max
  Clone ID: PAT_MRT3847_140449C.1.pep
MDTSVSPSLLLSLLFFARVLGLAVAVLVLIWALAFKSSFLTTSLSQQDLIYAVLHPLLMVIGFILLSGEAILVHRWLPGSRGLKKLVHLWLQGVALASGIFGIWTKFQGKDGIVANFYSLHSWMGLACVSLFGAQWLIGFLNFWHRGEVRSVRIRILPWHVFLGLYTYALAIATAETGLLEKLTFLQTKRNVPKHSTESMVVNSLGLGLALVGGFVILAAVSPKYQTHQSKLWIRLEMVLAVGTDDGCLVVPLVSVDSKVMRQNCFSLVIWFCILNFIYSFILMVNELSHLSFFALVL

SEQ ID NO: 187637 - protein, 297 aa, Glycine max
  Clone ID: PAT_MRT3847_14044C.1.pep
QGSWCRLLPTADPRVRGDAQVIILSESEEDNDVLMSHTRITGYKNMATSDAVDVYSVLQPGIIDPYREDHNPGVFNNPSEDDFGMPSLWPLQSGTPAVPGFQLFSSEVEDDVSDALIDLHHGNINCSSSLNGYTLAPDTLGSGTLIPDSSAGRPDDDLNGGLVDNPLAFPREDPSLQIFLPTKPAESSMQHELRDHADGSNGVFTEDWISLSLGGGASGSNGDTSSANELNLRPQITPREDARDSLTDAAPLLLGVNDVRPDKASRQRSDSPFSFPRQKRSKLKKVEQHFWSSGNGR

SEQ ID NO: 187638 - protein, 436 aa, Glycine max
  Clone ID: PAT_MRT3847_140450C.1.pep
MNHNNSNNNRARYPPGMGLVRGGFNPNLSQNPNQNQNPSLNQNHHAFQARPPYHQQQQAQYVQRHLLQQQQQQQQWLRRDANAVDEVEKTVQSEAVDSSSQDWKARLKIPPADTRYKTEDVTASKGNEFEDYFLKRELLMGIYDKGFERPSPIQEESIPIALTGSDILARAKNGTGKTAAFCIPALEKIDQDNNVIQVVILVPTRELALQTSQVCKELGKHLKIQVMVTTGGTSLKDDIMRLYQPVHLLVGTPGRILDLAKKGVCILKDCAMLVMDEADKLLSPEFQPSIEQLIHFLPTTRQILMFSATFPVTVKDFKDRYLQKPYVINLMDELTLKGITQFYAFVEERQKVHCLNTLFSKLQINQSIIFCNSVNRVELLAKKITELGYSCFYIHAKMLQDHRNRVFHDFRNGACRNLVCTDLFTRVSDILAEGKL

SEQ ID NO: 187639 - protein, 508 aa, Glycine max
  unsure (1)..(508): unsure at all Xaa locations
  Clone ID: PAT_MRT3847_140451C.1.pep
MNHNNNNRARYPPGMGIGRGGFNPNLGQNPSLNQNPNLNQNHHAFQARPPYHHQQQQPQYVQRHLLQPPPPQQQQQWLRRDANAVDEVEKTVQSEPMDSSSQDXKARLKIPPADTRYRTEDVTATKGNEFEDYFLKRELLMGIYEKGFERPSPIQEESIPIALTGSDILARAKNGTGKTAAFCIPALEKIDQDNNVIQVVILVPTRELALQTSQVCKELGKHLKIQVMVTTGGTSLKDDIMRLYQPVHLLVGTPGRILDLAKKGVCILKDCAMLVMDEADKLLSPEFQPSIEQLIHFLPTTRQILMFSATFPVTVKDFKDRYLRKPYVINLMDELTLKGITQFYAFVEERQKVHCLNTLFSKLQINQSIIFCNSVNRVELLAKKITELGYSCFYIHAKMLQEHRNRGTILIFVLHDFRNGACRNLVCTDLFTRGIDIQAVNVVINFDFPKNAETYLHRVGRSGRFGHLGLAVNLITYEDRFNLYRIEQELGTEIKQIPPQIDQAIYCR

SEQ ID NO: 187640 - protein, 62 aa, Glycine max
  unsure (1)..(62): unsure at all Xaa locations
  Clone ID: PAT_MRT3847_140452C.1.pep
ISISLEATCTHXKLTXYTPHLIFSPSHPPPLVLSFLLPQQVSQPPXPSNSPLYLQFLSSPLF

SEQ ID NO: 187641 - protein, 144 aa, Glycine max
  Clone ID: PAT_MRT3847_140453C.1.pep
MNHNNSNNNRARYPPGMGLGRGGFNPNLSQNPNQNQNHHAFQARPPYHQQQQAQYVQRHLLQQQQQQQQQQQQQQQQWLRRDANAVDEVEKTVQSEAVDSSSQDWKARLKIPPADTRYRTEDVTATKGNEFEDYFLERELLMGI

SEQ ID NO: 187642 - protein, 139 aa, Glycine max
  unsure (1)..(139): unsure at all Xaa locations
  Clone ID: PAT_MRT3847_140454C.1.pep
MLRLIFPXLDGSDVLQWIFKADQFFNYHKTPGEQRLIIASIHLDKEVVPCYQMMTRENSFKTWIAFTRALETEFGPSPYECPRSQLFKLAQIGSVQSYYVQFTALANRVQGITQEALLDCFVGGLKPDIRRDVIAQSPT

SEQ ID NO: 187643 - protein, 80 aa, Glycine max
  Clone ID: PAT_MRT3847_140455C.1.pep
IFLLRGIGIQAVNVVINFDFPKNRETYLHRVGRSGRFGHLGLAVNLITYEDRFNLYRIEQELGTEIKQIPPQIDQAIYCR

SEQ ID NO: 187644 - protein, 152 aa, Glycine max
  Clone ID: PAT_MRT3847_140456C.1.pep
ERETAPDNRLSIRGGKRIKTTKTSVWGKTPGETQGGKKHQTTRGGGQHLPGGKNTLIRNPKKKGGKPAPHKKKRREYNLFEKKKKTPTTACKHFMHTNGKTHWTVEDKLLRRGTQLQKTETACQKKRGEGGGGPQKTKLSGGGRPHCEPTRK

SEQ ID NO: 187645 - protein, 62 aa, Glycine max
  Clone ID: PAT_MRT3847_140457C.1.pep
KGFPLEPSTTAKDNMQPGNLMNMVNRRGNTIFLLLIRTRDPWLTWMDTFFALPLNFHMDYRV

SEQ ID NO: 187646 - protein, 49 aa, Glycine max
  Clone ID: PAT_MRT3847_140458C.1.pep
SLIINKKNVKHLNFCFHVYNQSYTQDTVLFCAAYSIVFNRIGLVSKSSH

SEQ ID NO: 187647 - protein, 53 aa, Glycine max
  Clone ID: PAT_MRT3847_140459C.1.pep
GCSDRCHIIMLSSSSYQLICGNPMSNVCICSYALVNLIPRMQPHVMLDTSTPW

SEQ ID NO: 187648 - protein, 88 aa, Glycine max
  Clone ID: PAT_MRT3847_14045C.1.pep
VALKNDLKLHPYFEHGEEKEKPVGDLSPRLGDPSQYLDGTRIYIQGSLWDGFADGKGDFTDGPYEIQNPEDFFTDKFYNYGFNPEGGS

SEQ ID NO: 187649 - protein, 77 aa, Glycine max
  Clone ID: PAT_MRT3847_140460C.1.pep
SWAASHLAIVEGPDLCYVWNGPCCANVAQIDLGNDGRSYGAPSSHAAFMECKLSPVSQSPRLTIFCPCPIIPFIQVW

SEQ ID NO: 187650 - protein, 149 aa, Glycine max
  Clone ID: PAT_MRT3847_140461C.1.pep
MGWNLLFWLVICFPANIALLASTFYQVLILSDLESDYINPFDAASRINYFVLPEYVGQGALCALCLFTGHWFMFLLTVPVTCYHLRLYVKREHLIDVTEVFRVLNAEKKYRIAKLALYLTVLIVTIFRLTLTAVYYLGIEDDEDIGNLW

SEQ ID NO: 187651 - protein, 75 aa, Glycine max
  unsure (1)..(75): unsure at all Xaa locations
  Clone ID: PAT_MRT3847_140462C.1.pep
ITIHDXLDSXKLFKAKQDLPLKSIFIDQLEFPTITNTCLKKSNFHTLXKLSNNIQKHLLKIEHFRVEYVKYILYF

SEQ ID NO: 187652 - protein, 123 aa, Glycine max
  Clone ID: PAT_MRT3847_140463C.1.pep
YGCEKTTEGDLKPENVLIREDGHIMLSDFDLCLKCDVVPKLLRSKTSSESSVKTRRSSAPSCVAAPMHSCFSASSKRKKVVTTAIIGENMDVYEDQSQHKGHDYCTSGLGEHDTEIVAEPINA

SEQ ID NO: 187653 - protein, 119 aa, Glycine max
  Clone ID: PAT_MRT3847_140464C.1.pep
QKTFFSFFFGKKKRFGAWKPSLSIHLRGPLGGWKIPGFQVPYKRIGQVWRPHIIQGKKDYHSGRRGLFFLKAGFRVFFTATPTKGIGKRATALLGKGFLFDPQFFRLLDFFKLQRRHVF

SEQ ID NO: 187654 - protein, 55 aa, Glycine max
  Clone ID: PAT_MRT3847_140465C.1.pep
RRHTTITRGPVACPLKHPLMNLLPQDLQEIQNLLPEGTIQRTGPIHILDPHWILL

SEQ ID NO: 187655 - protein, 84 aa, Glycine max
  Clone ID: PAT_MRT3847_140466C.1.pep
LLIYCDQRRFFIQKSMSQTNVFENLNSSPKHADRIGDGKHYALYISARTKQYIGFVNHCGVDLLQLQDDCNRVFFPFLLPRLFL

SEQ ID NO: 187656 - protein, 98 aa, Glycine max
  Clone ID: PAT_MRT3847_140467C.1.pep
ARVVPGGKPFPLRTETRWWRLMVKLNRPDQAEPKTVLGHKTIDPRPKPWHNAHHGKHDTVKESESKEKVVHRKLSESEESGMRVLTIAGENRGAYTQG

SEQ ID NO: 187657 - protein, 59 aa, Glycine max
  unsure (1)..(59): unsure at all Xaa locations
  Clone ID: PAT_MRT3847_140468C.1.pep
STSSGLPIQHSCSGTVIRPFFLRSGLLLMDSVXKSSVGWSRGXSKYTPPPPXSXPTNYY

SEQ ID NO: 187658 - protein, 61 aa, Glycine max
  Clone ID: PAT_MRT3847_140469C.1.pep
HEHNNVGKGKFHQTNYFKSEFIYNIPSCTWGGQKEHIFKRKLWWGLGRDTKKNLSYHINID

SEQ ID NO: 187659 - protein, 150 aa, Glycine max
  Clone ID: PAT_MRT3847_14046C.1.pep
SAAGWGRIDDAGVVKVYEMLTGVRVEGKLQAQRKDVMLQSLPPEWPQDHVLDIQTLKESNSKILVVLDDDPTGTQTVHDIEVLTEWTIESLIEQFRKSPKCFFILTNSRSLSSGKASALIKEICRNLDAAAKSVDNIDYTVVLRGDSTLR

SEQ ID NO: 187660 - protein, 67 aa, Glycine max
  Clone ID: PAT_MRT3847_140470C.1.pep
PPKWPGTAQFPGLKSPLPSPPPPWGFPPSMDPREGFGSVWGPPFLVPPPELFTPFWPPPRVLFPPPF

SEQ ID NO: 187661 - protein, 44 aa, Glycine max
  Clone ID: PAT_MRT3847_140471C.1.pep
FSFKQTGECVSNFMTFNYIFKTRSYNYNKWISLADMILIYQYSL

SEQ ID NO: 187662 - protein, 395 aa, Glycine max
  Clone ID: PAT_MRT3847_140472C.1.pep
MALSRVAQSSPSQSNLLKPLSSYLSLRRRSVSTSSEPLTVETSVPFTSHNCDAPPRAVETSSAELFSFFRDMALMRRMEIAADSLYKAKLIRGFCHPYDGQEAVAVGMEAAITRKDCIITAYRDHCTFLARGGTLIEVFAELMGRRDGCSKGKGGSMHFYRKEGGFYGGHGIVGAQVPLGCGLAFAQKYCKDENVTFSMYGDGAANQGQLFEALNISALWDLPSILVCENNHYGMGTAEWRAAKSPSYYKRGDYVPGLKVDGMDALAVKQACKFAKEFALKNGPIILEMDTYRYHGHSMSDPGSTYRTRDEISGVRQERDPIERVRKLLLTHEIATEKELKDIEKEIRKEVDEAIAKAKESQMPEPSDLFTNVYVKGFGVEACGADRKELRATLP

SEQ ID NO: 187663 - protein, 394 aa, Glycine max
  unsure (1)..(394): unsure at all Xaa locations
  Clone ID: PAT_MRT3847_140473C.1.pep
MALSRVVAQSSQSNLLKPLASYLSLRRRSVSTSSDPLTIETSVPFTSHNCDAPSRAVETSSAELFAFFHDMALMRRMEIAADSLYKAKLIRGFCHLYDGQEAVAVGMEAAITRKDCVITAYRDHCTFLARGGTLIEIFSELMGRRDGCSKGKGGSMHFYRKEXGFYGGHGIVGAQVPLGCGLAFAQKYCKDENVTFSMYGDGAANQGQLFEALNISALWDLPSILVCENNHYGMGTAEWRAAKSPAYYKRGDYVPGLKVDGMDALAVKQACKFAKEFALKNGPIILEMDTYRYHGHSMSDPGSTYRTRDEISGVRQERDPIERVRKLLLTHEIATEKELKDIEKEIRKEVDEAIAKAKESQMPEPSDLFTNVYVKGFGVEACGADRKEVRAILP

SEQ ID NO: 187664 - protein, 138 aa, Glycine max
  Clone ID: PAT_MRT3847_140474C.1.pep
MFTSLHTPILHPRYCHHPTPSCTQFSPLALPPFHRTLSFLAPPPLLPAAPALSAASAAKPDKSGEQKWVHEGLIMESLPNGMFRVRLDNEDLILGYISGKIRKNYVRILPGDRVKVEVTRYDSSKGRIVYRLRSSTPS

SEQ ID NO: 187665 - protein, 69 aa, Glycine max
  Clone ID: PAT_MRT3847_140475C.1.pep
TRVWNSSNGESGEWYPNCSSVNSVIDYQWSDWDMGGSVQSNNQWNLCDDQVMNCLWSTGIGEINYGVHP

SEQ ID NO: 187666 - protein, 143 aa, Glycine max
  Clone ID: PAT_MRT3847_140476C.1.pep
MFPSSSPTSLHTPILHHRYCHHPTPSRTQFSPLTLPPFRHTLSFLVPPPLLPAARAIPAASAAKGDKSGEQKWVLEGLVMESLPNGMFRVRLDNEDLILGYISGKIRKNYVRILPGDRVKVEVTRYDSSKGRIVYRLRSSTPS

SEQ ID NO: 187667 - protein, 100 aa, Glycine max
  unsure (1)..(100): unsure at all Xaa locations
  Clone ID: PAT_MRT3847_140477C.1.pep
MAQDIATPPVPFDFELLVGDHLRTVTASSNSSRTDPWIEPERLKLRHRIGRGPFGDVWLATHHQSTEDYDEXHEVAAKMLPPIRDEHVKTALEKSVNYSG

SEQ ID NO: 187668 - protein, 64 aa, Glycine max
  Clone ID: PAT_MRT3847_140478C.1.pep
PENLHIQGGQCRNHIRAKFWEVVVPEHRINYHGKVPGGQQVQLERIHRLFTKTSGKVHAHGILM

SEQ ID NO: 187669 - protein, 59 aa, Glycine max
  Clone ID: PAT_MRT3847_140479C.1.pep
IKNEWEKVNNKWVNAINFEMKPPSFKIQFKEVLFLPFQFQICKINKSKKVKAGALIWGE

SEQ ID NO: 187670 - protein, 133 aa, Glycine max
  Clone ID: PAT_MRT3847_14047C.1.pep
MEKRLISVDRWAEGSEAYFLTHLHSDHTHGLTPSWHHAPLFCSAVTAKLLPFKFPGFDLSLLRILHPGTTHTVTLPSLTLHVTVMDACHCPGSIMLLFRGDFGCILYTGDFRWEATCERATKSRHVLRDALRH

SEQ ID NO: 187671 - protein, 72 aa, Glycine max
  unsure (1)..(72): unsure at all Xaa locations
  Clone ID: PAT_MRT3847_140480C.1.pep
HQVRYRQERARQVAFAEEARLKDXDAKKFYMEWRXLEDELMRVQHHVEHFTRFNEPWYSNMHLNPSILTEYL

SEQ ID NO: 187672 - protein, 159 aa, Glycine max
  Clone ID: PAT_MRT3847_140481C.1.pep
MDPPTSYISSDELRKHNTRHDAWISIHGKVYDVSSWLHRHPGGPLPLLSLAGTDATDAFLALHPPNSASLLLPAFATPHLLSDHSVSPASSDYRKLFSDLSSLNLFNRKGHTTSILLSLILVLFPLSLCGVLLSDSTCVHVLSGALVGFLWIQSGWIGH

SEQ ID NO: 187673 - protein, 65 aa, Glycine max
  Clone ID: PAT_MRT3847_140482C.1.pep
PIKANTGGKECSLRLARVKICTSFLVPTYWNNDASLPTPPGTEEPIQAMPHFVNLYLPADIDLGS

SEQ ID NO: 187674 - protein, 50 aa, Glycine max
  Clone ID: PAT_MRT3847_140483C.1.pep
MATLSHSESRRSYSWWWDSHLPKNSKWLQENLAGLSLPVFMCFYNYARGI

SEQ ID NO: 187675 - protein, 75 aa, Glycine max
  Clone ID: PAT_MRT3847_140484C.1.pep
QFLLPKSCLRFDRNPCCSSKEPGSLELAHLRPWGLNSPPPGGFGGLQPPGFGVRKGYLVVAWWGNQPKFWSGGGM

SEQ ID NO: 187676 - protein, 52 aa, Glycine max
  Clone ID: PAT_MRT3847_140485C.1.pep
FYITIFRDVMTLSRQSVCSRLSPLFYEVFPFRVCLLKQQKNLYSILFSAHYN

SEQ ID NO: 187677 - protein, 112 aa, Glycine max
  Clone ID: PAT_MRT3847_140486C.1.pep
KEKKTKKIKLENGMVFSKVPAGGSRFNDAVSFLWVSLLWLCWTVSECWYLAFPPDTYLGRLVTFPFLSGWIIGPLSPTGRFSQQSCRLMVPFHAPFLLAFGPPYLPLPGLVP

SEQ ID NO: 187678 - protein, 128 aa, Glycine max
  Clone ID: PAT_MRT3847_140487C.1.pep
QLLQYQDRKQAHFFPSFSGVKSFAILSPTLITGKTTRSYLGLLSTFRVPSLFHPRVEGAFISLVSGGLNFIWGTIRELSIRFPHSKFNGAIYGGQGPNFRGLLFLLLKELTPIHIFRWEPNKTIKVLT

SEQ ID NO: 187679 - protein, 118 aa, Glycine max
  Clone ID: PAT_MRT3847_140488C.1.pep
ALMGPIAGIVLADYYIIQKTYLNISDLYSRSPYGAYRYSRGFNVAAILALVVGVLPVVPGFLQKVGIATSVPNTFVVIYNNAWFVSFFSAGFLYLVLSNLRGKPGNFAARDPLLPTAK

SEQ ID NO: 187680 - protein, 163 aa, Glycine max
  Clone ID: PAT_MRT3847_140489C.1.pep
ITFQAPTLSHGTMRAMDQTVIAQTDSPRRTCPRRTLLTGIWMRGIRRRPETRRQESHSHRRAALRVAAMRVNPEAVSNEAKTICGEKLRAKRHQDGSLQMGAVAQTAGTPTACTAQTRTDRRATTRRAPTVRSPMDTSNLQQVPIGEAGTTASLTNALQAERA

SEQ ID NO: 187681 - protein, 144 aa, Glycine max
  unsure (1)..(144): unsure at all Xaa locations
  Clone ID: PAT_MRT3847_14048C.1.pep
MHGLISIRSVIFSFGXLVLEIVTGHKNGDIHKSGYVEHLISFVWTNWREGTALNIVDQTLHNNSRDEIMRCIHIGLLCVEDNVANRPTMATVVIMFNSNSLVLPIPSQPAYSTNVKGPSRSNESRNNFKQASSNEVSISDLDPR

SEQ ID NO: 187682 - protein, 320 aa, Glycine max
  Clone ID: PAT_MRT3847_140490C.1.pep
TRPQRKHLFDPKKKRKILCDEQLRSLIGRKSVNKNSIQNLLAPHFAENSEEMDDISSSSEDRDCNEPVNFSRKRKSISCTESQHPNLVSEERQSCFAAIVSSNLKLVYLKRSLVDELSKQPETFDGKVLGSYVRVKSDPYDYLQKNSHLLVQVVGINRSLNNGEINKEIMLQLSNVPKAVPICKISDVDFSEEECQDLYQRMRNGLLKQPTVLELEQKARTLHEDIMKHWIPRKLVLLQNLIDQANEKGWRRQLSEYMDQKLKLETPLEQSRLLNDIPKVIPEIVDNTLSLKASPTKDKLEQNGLSELASGKTCNSAGRH

SEQ ID NO: 187683 - protein, 132 aa, Glycine max
  Clone ID: PAT_MRT3847_140491C.1.pep
HASVRLREDDRRGIILQCVSVVESGNRNRQAGKKTLHFCATLCLIAPFPFQHCQRATQISRSSERHRRGNKTWFQQQQKQSKIRKRQGAHVSTEPRGFLSPNSLRPHGIPTLIHTQNASQKTPFRNPNGGGG

SEQ ID NO: 187684 - protein, 123 aa, Glycine max
  Clone ID: PAT_MRT3847_140492C.1.pep
LKGVHVVPLEESGISEESVENGTESVSAQEEDTEQYFSFLKVLTEVNNWRKQCEVVEQLRLLLRDDEEARIFMGANGFVEALLQFLQSAVREGSLMALESGAMALFNLAVNNNRDKEIMLSAG

SEQ ID NO: 187685 - protein, 88 aa, Glycine max
  Clone ID: PAT_MRT3847_140493C.1.pep
MKCQAGVYIIGRRRPHTPTILTKDPFKVLANHKRELRSHIPHSLHSTQEAKHQCNERTLPKCTPPTRHNPHQKRLVAPSPPSIADEEL

SEQ ID NO: 187686 - protein, 317 aa, Glycine max
  unsure (1)..(317): unsure at all Xaa locations
  Clone ID: PAT_MRT3847_140494C.1.pep
AYSGTGLEIASRLPHARHQYMSXNSDHAWKWVKENVPSCLPDSCICXIEVGYGFFGRGXSGVRLGAFAQFYIATMQLRLVHLIHSSTANSFTGFPVSYPPSSGKFDNNVNQYMKYVLEFXVLIGSPFSLNAYPLLAYAGYPEHIDINYALFEPTKGIYDPMYHLHYDNMLDAQIDAAYAALEDAGFDKMEVIVTETGWASNGDQSEAGANATNARTYNYNLRKRLAKRKGTPHRPKNVVKAYIFALFNENEKPGHSSEKNYGLFKADGSISYDIGFHGLNAGHSSLLSLKNINTQGLSQSYVMVFFLSSLIPLIFWS

SEQ ID NO: 187687 - protein, 176 aa, Glycine max
  unsure (1)..(176): unsure at all Xaa locations
  Clone ID: PAT_MRT3847_140495C.1.pep
DRPRKANHGTPKGTRKKKREKKEKRGKQGEKGIPEKIHKAKKTEKKKENPGGTKKGRSPKGGGEPKGPXKKKKPGPPPETKKATPPGERPNGQGGAGGEIVPPGGTANNQWPPPRGAEKNGRPRKTGVEQNQQKSPPGXKTGEKNRNGGGKRGNPTGGEARKPETPTPKGRPKPQR

SEQ ID NO: 187688 - protein, 197 aa, Glycine max
  unsure (1)..(197): unsure at all Xaa locations
  Clone ID: PAT_MRT3847_140496C.1.pep
MASNPGNHAPSNGSVYVCNLPYGTDDIMLAEYFGTIGLIKKDKRTGRPKIWLYRDKETNEPKGDATVTYEDPHAAVAAVEWFNNKDFHGNTIGVFIAESKNKDEQAYNAAVEPVVADDVGGLEETTKDVNGGSGRGXXQNDSSGKAWQQDGDWLCLNTSCSNVNFAFRGACNRXGTARSAGASGISGAGGRGKGRAA

SEQ ID NO: 187689 - protein, 122 aa, Glycine max
  unsure (1)..(122): unsure at all Xaa locations
  Clone ID: PAT_MRT3847_140497C.1.pep
NPSATIYVTRTTAALAPVRALLWNEIYKKHEKNEFDGKXWIYLRDPACSSLLSKEDMDKMHKTYADNFKLDSARCRELTNEHGEKMYIPTREAQYAXQLCDILKKEYTTAHMCGLLGMHVGI

SEQ ID NO: 187690 - protein, 76 aa, Glycine max
  Clone ID: PAT_MRT3847_140498C.1.pep
QLTQWYPALIEQLCSSKSSMFSSNYTLRAVKLKSSPLPINKLSQLINLTKAKLPTIQISELQKIKIIKLSSTPPTI

SEQ ID NO: 187691 - protein, 54 aa, Glycine max
  Clone ID: PAT_MRT3847_140499C.1.pep
ETAERENEKMEPTILSSYMLRHWVSEKSVESLGSRKLNTCQTSMAGHVQRGTGP

SEQ ID NO: 187692 - protein, 327 aa, Glycine max
  Clone ID: PAT_MRT3847_14049C.1.pep
TRPKGGSASKFLLDCVCVIICFSLIRACETFLNTERGTPSKVKLEVMGKKAKNATYISGNEAGKISKEIQKVEKRRIVKSTLCNDRSSRSHCMVILDVPTVGGRLMLVDMAGSENIEQAGQTGFEAKMQTAKINQGNIALKRVVESIANGDSHVPFRDSKLTMLLQDSFEDDKSKILMILCASPDPKETHKTISTLEYGAKAKCIVRGPHTPVKDDESSSAVILGSRIAAMDEFILKLQMETKQREKERNEAHRKLLKKEEEIVALRAKLNMAEGKGTPPSEEEINLKVNERTRLLRQEVEMKLEECQRMTNEFVELERKRMEERIL

SEQ ID NO: 187693 - protein, 59 aa, Glycine max
  Clone ID: PAT_MRT3847_1404C.1.pep
DRHCTMFTVTSLHANACTIIGTPTTAMNMITTRNVTFMLSIIYRNGNNVSHDKYIRRHV

SEQ ID NO: 187694 - protein, 62 aa, Glycine max
  Clone ID: PAT_MRT3847_140500C.1.pep
LSRPVKHPYPFNDPIVVYVRYLGPGVSVGQAWQEGTKLEQVPRKLCGEILMVKDYTSLQEDQ

SEQ ID NO: 187695 - protein, 54 aa, Glycine max
  Clone ID: PAT_MRT3847_140501C.1.pep
VFFWNIISNLLDHHTLKSIYNTLMFESQVCSSRMCQLPSQAMHNCKDDNTITPI

SEQ ID NO: 187696 - protein, 461 aa, Glycine max
  unsure (1)..(461): unsure at all Xaa locations
  Clone ID: PAT_MRT3847_140502C.1.pep
MSMSLSLLRIFSSPHLSTSLFFPTPTLSSLCPSFLSKLPNAPSPLIVLCHRDASASKQGHLGVPEGAERDSGSEEDDDAVEQPMRASYDDDEDEEEGALSSLVFPERWDVLGLGQAMVRFSGMVDDNFLKKLGLYRXTKKAANHEERGRVLQAMDGCGYKAAAGGSLSNTLVALARLGSRSEKVPAINVAMTGSVGSDLLGGFYREKLRRANVQFLSAPIKDGTTGTVIVLTTPDAQRTMLAYQGTSSTVNYDASLANAVSKTNILVVEGYLFELPDTIKTITKACEKARSNGALVAITASDVSCIERHFDDFWEIIGNCVDLVFANGNEARALCNFEAKESAASAARYLSHFVPLVSVTDGPTGSYIGVKGEAVYIPPSPCVPVDTCGAGDAYASGILYGLLRGISDLRSIGSLAAKVAATVVGQQGTRLRISDAVKLAESFEFQLDSSSVGTDHNISSV

SEQ ID NO: 187697 - protein, 107 aa, Glycine max
  Clone ID: PAT_MRT3847_140503C.1.pep
EGSWHMRELQTWLSNIKKLYIGLREMVIKKITDNIPKEYLTLPCYIFVGASINLSWLILKKKKRTRCYIDLEILGFFLHLTSETSSGRTCRGCYIVLVMFNCSTTIL

SEQ ID NO: 187698 - protein, 54 aa, Glycine max
  Clone ID: PAT_MRT3847_140504C.1.pep
SSMWRFNADSRRRMNFIHHRASDSDVRLTPKTRYAEYQLEENTSSADGSATTCS

SEQ ID NO: 187699 - protein, 136 aa, Glycine max
  Clone ID: PAT_MRT3847_140505C.1.pep
SASISRFRLFCAFFPPEIHKFVEVRGSICPSMDSARDASGVAGTVLIPMRFVWPYGGRSVYLSGSFTRWSELLQMSPVEGCPTVFQVIHSLVPGHHQYKFFVDGEWRHDDLQPCESGEYGIVNTVSLATDPNILPV

SEQ ID NO: 187700 - protein, 493 aa, Glycine max
  Clone ID: PAT_MRT3847_140506C.1.pep
MFSPSMDSARDAAGGVAGTVLIPMRFVWPYGGRSVYLSGSFTRWSELLQMSPVEGCPTVFQVIHSLLPGYHQYKFFVDGEWRHDEHQPYVAWRIWDSLTLSYWATDPNYIPVLPPDVASGNSMDVDNDAFRRMARLTDGTLSEVLPRISDTDVQISRQRISAFLSSHTAYELLPESGKVVALDVDLPVKQAFHILHEQGVFMAPLWDFCKGQFVGVLSASDFILILRELGNHGSNLTEEELETHTISAWKEGKSYLNRQNNGHGTAFSRCFIHAGPYDNLKDIAMKILQKEVSTVPIIHSSSEDASFPQLLHLASLSGILKCICRYFRHCSSSLPVLQLPICAIPVGTWVPKIGESNRRPLAMLRPTASLASALNLLVQAQVSSIPIVDDNDSLLDIYCRSDITALAKNRAYTHINLDEMTVHQALQLGQDAYSPYELRSQRCQMCLRSDPLHKVMERLANPGVRRLVIVEAGSKRVEGIVSLSDIFKFFIGG

SEQ ID NO: 187701 - protein, 148 aa, Glycine max
  Clone ID: PAT_MRT3847_140507C.1.pep
LSSAKCFGGVLKRFSHQSAVNKCEMKFHVYLPPKAEKEKVPVVWFLSGLTCTDENFVIKSGAFRDASALCLAIISPDTSPRGCNVEGESKDWDFGVGAGFYVNATESKWANWQMYSYITQELWTIVNSNFPVNGKHSISGHSMGGHGA

SEQ ID NO: 187702 - protein, 39 aa, Glycine max
  Clone ID: PAT_MRT3847_140508C.1.pep
ICSFCSIKGGGPFCFPPKCFGSIAFANQKKSFNIAPVTI

SEQ ID NO: 187703 - protein, 37 aa, Glycine max
  Clone ID: PAT_MRT3847_140509C.1.pep
VMGCIKVNLSLEVCEFIMFDVVTMFRILFYIACIICI

SEQ ID NO: 187704 - protein, 50 aa, Glycine max
  Clone ID: PAT_MRT3847_14050C.1.pep
SMVSISARSWFCISNVSVRTHTFNVFTAAFMRRTFSASHACECMFTPKQV

SEQ ID NO: 187705 - protein, 101 aa, Glycine max
  unsure (1)..(101): unsure at all Xaa locations
  Clone ID: PAT_MRT3847_140510C.1.pep
IFFLFSFYFGLRSALNWRGIHWNLRRGSWRSCDEVWCLEGILKVALNSRFNVWSEHGFCKECXWCGRDSANSHAXCVAIWRKECVSQWFFHKVGWSFYRCR

SEQ ID NO: 187706 - protein, 65 aa, Glycine max
  Clone ID: PAT_MRT3847_140511C.1.pep
MFSPSMDSARDASGVAGTVLIPMRFVWPYGGRSVYLSGSFTRWSELLQMSPVEGCPTVFQVIHSL

SEQ ID NO: 187707 - protein, 83 aa, Glycine max
  Clone ID: PAT_MRT3847_140512C.1.pep
HSEFEVKCSVQAWILQRTIVIVDGNDLIPMIYCRSDITALAKNRAYAHINLDEMTVHQVSLSLFHFFILRIYKLLLTISVFEN

SEQ ID NO: 187708 - protein, 175 aa, Glycine max
  unsure (1)..(175): unsure at all Xaa locations
  Clone ID: PAT_MRT3847_140513C.1.pep
LEPELLYEDKGNTQISGNCDADWAGCPMDRRSTSGYCVSIGGNVISWKSKKQVVVARSSAEAEYRSMTMVTCELMWVKQILEELKFCKVVQMKLYCDNQAALHIASNLVFHERTFGSXIEIDCHFIREKLLSKEIAIEFIGSNDXPADILTKSLRGPRIQTICNKLGAYDLYAPA

SEQ ID NO: 187709 - protein, 193 aa, Glycine max
  unsure (1)..(193): unsure at all Xaa locations
  Clone ID: PAT_MRT3847_140514C.1.pep
MFSPSMDSARDASGVAGTVLIPMRFVWPYGGRSVYLSGSFTRWSELLQMSPVEGCPTVFQVIHSLIPGHHQYKFFVDGEWRHDDHQPCVSGEYGIVNTVLLATDPNIVPVLTPEIVSGSNMDLGXMRPFRCMVRLTDGTLNNVLLPRISDVDIQTSRQRISAFLSMSTAYELLPESGKVWNFYHRPIIFGLTI

SEQ ID NO: 187710 - protein, 158 aa, Glycine max
  Clone ID: PAT_MRT3847_140515C.1.pep
MGVFTFEDETTSTVAPARLYKALVKDADNLVPKAVEAIKSVEIVEGNGGPGTIKKLTFVEDGQTKYVLHKVEAIDEANWGYNYSVVGGVGLPDTVEKISFEAKLVADPNGGSIAKITVKYQTKGDANPSEEELKSGKAKGDALFKALEGYVLANPDYN

SEQ ID NO: 187711 - protein, 88 aa, Glycine max
  Clone ID: PAT_MRT3847_140516C.1.pep
SPVGKLLLFICALICVFVGTPEYIYVKRTEFQDFAALCCFGLLNVNSPFIVSRKIGLDKLIHEKGRSKVDLLSRGAPPTRESLDPRNS

SEQ ID NO: 187712 - protein, 62 aa, Glycine max
  Clone ID: PAT_MRT3847_140517C.1.pep
RLSYVLGCDTSNVMKASVYSCFNLRNLEQGMKQGFLMGFTFQYPTTQYLARMKKLQKVVTLS

SEQ ID NO: 187713 - protein, 98 aa, Glycine max
  Clone ID: PAT_MRT3847_140518C.1.pep
KSEEFHPNSARAARGPGQTISSIKFASFGTPLGTCGNYEQGACHSPASYAILEKRCIGKPRCTVTVSNSNFGQDPCPKVLKRLSVEAVCAPTAANWRG

SEQ ID NO: 187714 - protein, 65 aa, Glycine max
  unsure (1)..(65): unsure at all Xaa locations
  Clone ID: PAT_MRT3847_140519C.1.pep
PTASLNFAVPCNVLFHKSPNYNFLKTFGCACFPFLRPXNTHKLDFRSKECLFLGYYSCTKVVNRK

SEQ ID NO: 187715 - protein, 188 aa, Glycine max
  unsure (1)..(188): unsure at all Xaa locations
  Clone ID: PAT_MRT3847_14051C.1.pep
AALRPKLIPKLMPAATTTIVCSTTNNNNNNNVYSDLKAFSATLALSSILLSDPLPAGADIFGLTPCKELKQFAKREKQSINNLESTLKLYDAGSAPALAINASVDNTNRMLYNYAKHGLLCGCYGSPHLIDSGHHMHXGEFITPGILFLYISGXISCVGTSYLIAITDEMKPTMXEIIIQVPLASSFL

SEQ ID NO: 187716 - protein, 54 aa, Glycine max
  Clone ID: PAT_MRT3847_140520C.1.pep
YVLFRTNNSKFMMKSICNIYFACGITPINNHRCKLTSSKINVFFCLWCTCDSSR

SEQ ID NO: 187717 - protein, 47 aa, Glycine max
  Clone ID: PAT_MRT3847_140521C.1.pep
QTLAAYSVSLQSTNMDHQITFLNITSPYYELAIGNSFCIHHPLNNPL

SEQ ID NO: 187718 - protein, 56 aa, Glycine max
  Clone ID: PAT_MRT3847_140522C.1.pep
TGQQNLVWYSLPPTDKKRRNHRLLFQNWGKTKYRIWFSAHTSPYKSNVRAGIAIRI

SEQ ID NO: 187719 - protein, 41 aa, Glycine max
  Clone ID: PAT_MRT3847_140523C.1.pep
PFKVHFSLVCIPLGFMGIIIWLLKDSQNLEFLIIKICTPTC

SEQ ID NO: 187720 - protein, 44 aa, Glycine max
  unsure (1)..(44): unsure at all Xaa locations
  Clone ID: PAT_MRT3847_140524C.1.pep
RLHGCFRFLAVLRLSKGSTYMKLDVFIIIXDSAMLVSSVLGPLQ

SEQ ID NO: 187721 - protein, 34 aa, Glycine max
  Clone ID: PAT_MRT3847_140525C.1.pep
MEILFYNIIIKTLRTMTAFHPRSILKHYSFNSIA

SEQ ID NO: 187722 - protein, 54 aa, Glycine max
  Clone ID: PAT_MRT3847_140526C.1.pep
RMFHVVRKIFAFIPSQISMVLRTAFTIRFKTEILLHSILVIILVKKSQRKKNLN

SEQ ID NO: 187723 - protein, 140 aa, Glycine max
  Clone ID: PAT_MRT3847_140527C.1.pep
GVTKNGLYSLVGQTIIVDSTNVVTDDNTKLWHHRLTHICQKGLEELTKQGAFRQGRIEPLKFCENCVLGRANRQKFLASTHSSNAALDCVHADLWGPSRTESHEEARYFLSLIDDFSRKVWVYFLKYKNEVVKVFEEWKF

SEQ ID NO: 187724 - protein, 53 aa, Glycine max
  Clone ID: PAT_MRT3847_140528C.1.pep
QTIHRKVNNIEQIPFRVYDLTKRKRITTLKDYQKKISQLSLCVSEIETDTRQY

SEQ ID NO: 187725 - protein, 135 aa, Glycine max
  Clone ID: PAT_MRT3847_140529C.1.pep
MKEDIKRFLVEFHHNGGLSKRMQLYFYHFDTKVDDPQDLEITVLSHWWVNGSPLEEFVPQRGLRQGNLLATFLFTIIAKGLSGMMRETISKKLFEGFHIGKDKVEPNLLQYADDSFHWEGNKEECGGYQKHAKIL

SEQ ID NO: 187726 - protein, 62 aa, Glycine max
  Clone ID: PAT_MRT3847_14052C.1.pep
IVFFMWIKGPPPQKFVGPLPFFKAREAPWLTCVGEYVVFPCSFRVFLNPIQNDFSPLLNKLI

SEQ ID NO: 187727 - protein, 128 aa, Glycine max
  Clone ID: PAT_MRT3847_140530C.1.pep
LPLSGTDLALQATFRLVVLNESSSKFSTLADANVPGLDGRNETISLESESYNGCYVYSGMSSIAGVKLSCKSGSDASFNQATSFVAQKGLSQYNPISFVAKGANRNFLLEPLFSFRDEHYTVYFNIQG

SEQ ID NO: 187728 - protein, 69 aa, Glycine max
  Clone ID: PAT_MRT3847_140531C.1.pep
AVSVMELQCNSVSCHILSTVMFDCVLLPLWYHVYWLVAVITIDPGSCFLRMNHLQVLHGVQNTTTSIRR

SEQ ID NO: 187729 - protein, 634 aa, Glycine max
  Clone ID: PAT_MRT3847_140532C.1.pep
LEVWAPFYTIHKILAGLLDQHTFAGNPQALKMVTWMVDYFYNRVQTVITKYTLNRHYESLNEETGGMNDVLYKLYIITGDSKHLLLAHLFDKPCFLGLLAVQANDIADFHANTHIPVVVGSQMRYEITGDPLYQQIGTFFMDLVNSSHSYATGGTSVSEFWSDPKRMADTLKTTENEESCTTYNMLKVSRHLFKWTKEVSYADYYERALTNGVLSIQRGTDPGVMIYMLPLGLGVSKAKTYHSWGTPFDSFWCCYGTGIESFSKLGDSIYFEEEGKDPTLYIIQYISSSFNWKSGKVLLNQTVDPVASWDPYLRVAFTFSPFENTLTTNSTLNFRLPTWTHLDGAKGILNAETLSLPSPGNYLSITRQWSGSDKLTLQLPLTVRTEAIKDDRPEYASVQAILYGPYLLAGHTTGVDWDLKAGANNSDWITPIPASYNSQLVSFSQDFENSTFILANSNQSLAMQKLPLSGTDLALQATFRLVVLNESSSKFSTLADANGKSVMLEPFDFPGMNVVNQGADKPLLIIDSSHGGTSSVFLVVPGLDGRNETISLESQSYNGCYVYSGMSSIAGVKLSCKSGSDASFNQATSFVAQKGLSQYNPISFVAKGANRNFLLEPLFSFRDEHYTVYFNIQG

SEQ ID NO: 187730 - protein, 49 aa, Glycine max
  Clone ID: PAT_MRT3847_140533C.1.pep
KYVESAGGLEIDIVHDQNRKMSLEYLDFERVSELFSLDIDRFTCQRLLS

SEQ ID NO: 187731 - protein, 116 aa, Glycine max
  Clone ID: PAT_MRT3847_140534C.1.pep
HALTNGVLGIQRGTDPGVMIYMLPLGLGVSKAKTYHSWGTPFNSFWCCYGTGIESFSKLGDSVYFEDKGKDPTLYIIQYISSSFNWKSGKVLHNQTVDPVVSWDPYLRVTFMFSPV

SEQ ID NO: 187732 - protein, 620 aa, Glycine max
  Clone ID: PAT_MRT3847_140535C.1.pep
HKILAGLLDQHTFAGNPQALKMVTWMVDYFYNRVQNVITKYTVNRHYQSMNEETGGMNDVLYRLYSITGDSKHLVLAHLFDKPCFLGLLAVQANDIADLHANTHIPIVVGSQMRYEITGDPLYKQIGTFFMDLVNSSHSYATGGTSVREFWSDPKRIADNLRTTENEESCTTYNMLKVSRHLFRWTKEVSYADYYERALTNGVLSIQRGTDPGVMIYMLPLGFAVSKARTGHSWGTQFDSFWCCYGTGIESFSKLGDSIYFEEEGKDPTLYIIQYISSSFNWKSGKILLNQTVVPASSSDPYLRVTFTFSPVENTLSTLNFRLPSWTLLDGAKGILNGQTLSLPNPGNYLSITRQWSASDKLTLQLPLTVRTEAIKDDRPEYASVQAILYGPYLLAGHTTGGDWNLKAGANNADWITPIPASYNSQLVSFFRDFEGSTFVLANSNQSVSMQKLPEFGTDLALQATFRIVLEESSSKFSKLADANDRSVMLEPFDLPGMNVIHQGAGKPLLTVDSSQGGPSAVFLLVPGLDGRNETVSLESQSNKGCYVYSGMSPSAGVKLSCKSDSDATFNQAASFVALQGLSQYNPISFVAKGANRNFLLQPLLSFRDEHYTVYFNIQD

SEQ ID NO: 187733 - protein, 83 aa, Glycine max
  Clone ID: PAT_MRT3847_140536C.1.pep
MDANGEARLINGYVLKQVSQYLNAIMKKPKVVSGDDDSPKRDDIGERRTKHELHLLTGTGITTDDHDGDDQMTDLRPSEVTHD

SEQ ID NO: 187734 - protein, 76 aa, Glycine max
  Clone ID: PAT_MRT3847_140537C.1.pep
VLEALEVLKKKSDAQAKEILPIEKLIGEAYSIIDKAVRVGTLHRNTGANRKSRLARRKKAVEIHHGWYTPAPEAIV

SEQ ID NO: 187735 - protein, 387 aa, Glycine max
  Clone ID: PAT_MRT3847_140538C.1.pep
MAPKKVLLLCGDFMEDYEAMVPFQALQAFGLAVDAVCPGKKSGDVCRTAVHVLAGAQTYSETVGHNFSLNATFDEVDAASYDGLWVPGGRAPEYLAHVPGVVELVTKFVSLGKQIASICHGQLILAAAGVVKGRTCTAFPPVKPVLVAAGAHWVEPDTEAATVVDGDLITAATYEGHPELIRHFVKALGGKISGFDKKILFICGDYMEDYEVKVPFQSLQALGCHVDAVCPSKKAGDTCPTAVHDFEGDQTYSEKPGHTFALTATFDDVDPSGYDALVIPGGRAPEYLALNESVIALVKYFFENKKPVASICHGQQILSAAGVLKGRKCTAYPAVKLNVVLSGATWLEPDPISRCFTDGNLVTGAAWPGHPEFIAQLIALLGIQVSF

SEQ ID NO: 187736 - protein, 56 aa, Glycine max
  Clone ID: PAT_MRT3847_140539C.1.pep
ILTKLTQDCSRITASPSQYSNKSQYVFTNVKSKLLLTVSYNALMTSITFSSNSIKV

SEQ ID NO: 187737 - protein, 71 aa, Glycine max
  Clone ID: PAT_MRT3847_14053C.1.pep
AFGKVTGALISAQLARDLPSFHQQQRFGYVAGIRQHSQSVHLGTAGSAFLIPVASSQIVVPVTTASSSAPM

SEQ ID NO: 187738 - protein, 178 aa, Glycine max
  Clone ID: PAT_MRT3847_140540C.1.pep
LNISHNNLSGSIPDSLSEMVSLSAINLSYNNLEGPVPEGGVFNSSHPLDLSNNKDLCGNIQGLRPCNVSLTKPNGGSSNKKKVLIPIAASLGGALFISMLCVGIVFFCYKRKSRTRRQKSSIKRPNPFSIWYFNGRVVYGDIIEATKNFDNQYCIGEGALGKVYKAEMKGGQIFAVKS

SEQ ID NO: 187739 - protein, 114 aa, Glycine max
  unsure (1)..(114): unsure at all Xaa locations
  Clone ID: PAT_MRT3847_140541C.1.pep
MKSIVPVVMAGVLGIYGLIIAVIISTGINPKAKSYYLFDGYXAHLSSGLSXGLAGLSAGMAIGIVGDAGVSANAQQPKLFVGMILILIFAEALALYGLIVGIILSSRAGQSRAD

SEQ ID NO: 187740 - protein, 164 aa, Glycine max
  Clone ID: PAT_MRT3847_140542C.1.pep
MPGFSGDETAPFFGFLGAAAALVFSCMGAAYGTAKSGVGVASMGVMRPELVMKSIVPVVMAGVLGIYGLIIAVIISTGINPKAKSYYLFDGYAHLSSGLACGLAGLSAGMAIGIVGDAGVRANAQQPKLFVGMILILIFAEALALYGLIVGIILSSRAGQSRAD

SEQ ID NO: 187741 - protein, 55 aa, Glycine max
  unsure (1)..(55): unsure at all Xaa locations
  Clone ID: PAT_MRT3847_140543C.1.pep
XILRIXRISFLQMETMXXLXXXHXQELVXXXXMEYXVMVYGXLHSVXTQSXXFIY

SEQ ID NO: 187742 - protein, 52 aa, Glycine max
  Clone ID: PAT_MRT3847_140544C.1.pep
RLKQYILEKLLSTVYDYAPFLQFREKTCQGSMLKYQPPPKGREKHLIIIKKS

SEQ ID NO: 187743 - protein, 91 aa, Glycine max
  Clone ID: PAT_MRT3847_140545C.1.pep
GFQGGTNRWDPTAKDRKARRVRQKRRKECPKKKDLWRTHLPFSNKRRGILCGVNTFYTVFPVNFFIRNLDFVGHCFRKLAFQENCCGIARE

SEQ ID NO: 187744 - protein, 89 aa, Glycine max
  unsure (1)..(89): unsure at all Xaa locations
  Clone ID: PAT_MRT3847_140546C.1.pep
XXEXYXXXSXXAAXXXXLRXXXXXXXXNXXIXYMXXXXXGXKXXXXXXXXXEXXXNXXLXELVNXCLXXIIXXXSIRXEXIDXRXXQSS

SEQ ID NO: 187745 - protein, 82 aa, Glycine max
  unsure (1)..(82): unsure at all Xaa locations
  Clone ID: PAT_MRT3847_140547C.1.pep
ISPDEEYIGQYMEPSWVENQTIXTSFERFNKRLKEIEGIIDSRNGNYNLKNRCGAGLVPYELMKPFSGPGITGKGVPYSASI

SEQ ID NO: 187746 - protein, 60 aa, Glycine max
  Clone ID: PAT_MRT3847_140548C.1.pep
FFLNGWRQPSCYSLDGSNVKKAELTLVNGNCECINHCLQNLSCKEARTYGISHDFDTNVL

SEQ ID NO: 187747 - protein, 339 aa, Glycine max
  unsure (1)..(339): unsure at all Xaa locations
  Clone ID: PAT_MRT3847_140549C.1.pep
MVVPQPIEGLHETGPPPFLTKTYDIVDDPSTNHIVSWSTGNNSFVVWDPQAFSVTLLPKFFKHNNFSXFVRQLNTYGFKKVDPDKWEFANEMFLRGQRILLKNIRRRKANHHQSHQHAMQQGVEEPFVEVGQFELDGEIDRLRRDRQVLMVELVKLRQQQQSTKSHLQEMEGRIKMTEQKQKQMMNFLARAMQNPNFVQQLAQQKECSRELEEVFSNKKRRPIDQGPNVVEVADDDDELLGCAEECSDFVKLEPQEYYSDDKVLEFEVPDLDLALNLDEENIESQKRIMEEEHVQLENSRERYIDEVFWQDLLNEGIEDQGVLGVEDVDVLAKQLGYLA

SEQ ID NO: 187748 - protein, 51 aa, Glycine max
  Clone ID: PAT_MRT3847_14054C.1.pep
CYRKGMGHVHALSNIGHEFSCSMTYHLKTTPLSYMVIKNYAIIELLMNRRG

SEQ ID NO: 187749 - protein, 122 aa, Glycine max
  Clone ID: PAT_MRT3847_140550C.1.pep
PPPKNRLAPKALGARPPPYFETWLRKFFKGAPEIFPQKPPLGKLKAIFCFPAPNPFPHLCKLGEGGFPPVLGGSGTPAPRSVVFLFREFFFLTPNGSPPFRVAPGKFLGAVAPPNGNLVNWG

SEQ ID NO: 187750 - protein, 82 aa, Glycine max
  Clone ID: PAT_MRT3847_140551C.1.pep
TNNQFQFVLSQMNVVMMLTLNLSRTYYSYGSLTLGLCNSTRASRYGPLPCPNPGCNLSVSSPYLRERRLHIRHTKLAKMAFE

SEQ ID NO: 187751 - protein, 264 aa, Glycine max
  unsure (1)..(264): unsure at all Xaa locations
  Clone ID: PAT_MRT3847_140552C.1.pep
MASKHRIAGTNIQSSPKRARTMATSSTAIEPALKEAFSRYTQCLNDLNDKRERVVKASRDVTMNSKKVIFQVHRMSKYNKVEILEKAEKDLAAVTDQYMSRLVKELQGTDFWKLRRAYSPGIQEYVEAATFYGFCKSGTLLKLDEINKTLLPLSDPSLDPLQINILDYILRVADLTXDISDGEHKFAEKICRFVREIXYRELTLVVPHLDVSSDMKTKMDMMLQSVMKIENACFGVHVRGSEYIPLLGSNDPSSFLVGVPDIEL

SEQ ID NO: 187752 - protein, 131 aa, Glycine max
  Clone ID: PAT_MRT3847_140553C.1.pep
ARARAESDRAVDGGNTMTNGGAKTTPSGNNNRDTGSGNDDPSRNTDSNATSSDSQEPKKSKGKQMAAMAAAIAVVTAVDAFGIPMYAYCFKRRNGVLQDPTELLIHARDPSNADSASNIASANNTTWKRFH

SEQ ID NO: 187753 - protein, 39 aa, Glycine max
  Clone ID: PAT_MRT3847_140554C.1.pep
GTGGGEANYARSCSNSRPSYPKTTIAQTQRRLQQLTATP

SEQ ID NO: 187754 - protein, 67 aa, Glycine max
  Clone ID: PAT_MRT3847_140555C.1.pep
NFGDSEKTKNKLGAILWGAPKTKGPFFSIKRGGRKIKKKRGRGHPGELKVQILGPFGFGAHPPIFHI

SEQ ID NO: 187755 - protein, 63 aa, Glycine max
  Clone ID: PAT_MRT3847_140556C.1.pep
MRTVSVFALPLVALFIMAISRLGQAQDLPLSPAPPPTSHGNAIDQGIAYILMLVALAITYMMH

SEQ ID NO: 187756 - protein, 54 aa, Glycine max
  Clone ID: PAT_MRT3847_140557C.1.pep
IYLQNYCTKNNEIFPLFFCCSVSKFFGCFVLFIFLPSRKIVLFFQREKKKKKKK

SEQ ID NO: 187757 - protein, 46 aa, Glycine max
  Clone ID: PAT_MRT3847_140558C.1.pep
LTDPVATYSSLIYMELQSKGRTEASKFNRNCIANMYEIQVSMLKLA

SEQ ID NO: 187758 - protein, 63 aa, Glycine max
  Clone ID: PAT_MRT3847_140559C.1.pep
SLETHDMLYKPSLGAIYPTSSIYYQNVCFVLHHRLNDIHISQQRILTFDSIINHIQIRISFNN

SEQ ID NO: 187759 - protein, 35 aa, Glycine max
  Clone ID: PAT_MRT3847_14055C.1.pep
ILHKTSSSSSSSPITQQHPSHKHHHPKTITSYSPL

SEQ ID NO: 187760 - protein, 68 aa, Glycine max
  Clone ID: PAT_MRT3847_140560C.1.pep
HKYYGLSLFEKHKYWRLSLTYRNAFGSTISRWLKVRNTYFYFTLFAITGPTHPDGISCLDWNPKNRNF

SEQ ID NO: 187761 - protein, 43 aa, Glycine max
  Clone ID: PAT_MRT3847_140561C.1.pep
PFWGRYVGAPLIIYRQFYGGKILIRKCGPRFQFLRGECCKENN

SEQ ID NO: 187762 - protein, 63 aa, Glycine max
  Clone ID: PAT_MRT3847_140562C.1.pep
LYEDKPWIWESMARFWRSVGIGDITEPRFWIMRMTKESNHLLCRECVVCAMSATQKPRADSAR

SEQ ID NO: 187763 - protein, 84 aa, Glycine max
  Clone ID: PAT_MRT3847_140563C.1.pep
KGFFCFFLAPSFVSWGWKKVSRPFFLEGFGEGTLVFFLFKGSGGAGSLEGGGVPLFFGGVLPLKSPPPHVSVSAVCVPPIQRVF

SEQ ID NO: 187764 - protein, 52 aa, Glycine max
  unsure (1)..(52): unsure at all Xaa locations
  Clone ID: PAT_MRT3847_140564C.1.pep
CVXXXCNXXXPXPEXREVXTIXSAQPXXGKGKVAXVVGRGGGEFEGNNEGIA

SEQ ID NO: 187765 - protein, 77 aa, Glycine max
  Clone ID: PAT_MRT3847_140565C.1.pep
CELRQELISRVLPRMQLTRHTHDALELDNHCCDHSPNHKQFRELYLQTAILCTTSHQWRTSDLTQLHHEPLLDNHSL

SEQ ID NO: 187766 - protein, 414 aa, Glycine max
  unsure (1)..(414): unsure at all Xaa locations
  Clone ID: PAT_MRT3847_140566C.1.pep
MDPSSSRPAVVIDNGSGYTKMGFAGNVEPCFIVPTVVAINESFLNQSRNSSKGNWVAQHNAGVMADLDFFIGDEALSKSRSSSTYNLSYPIRHGQVENWDAMERFWQQCIFNYLRCDPEDHYFLLTESPLTAPESREYTGEIMFETFNVPGLYIAVNSVLALAAGYTTSKCEMTGVVVDVGDGATHVVPVADGYVIGSSIKSIPIAGKDITLFVQQLMRERGENVPLEDSFEVARKVKEMYCYTCSDIVKEFNKHDKEPGKYIKHWRGIKPKTGAPYSCDIGYERFLGPEILSNPEIYSSDCTTPLPVVIDNSIQSAPIDARRSLYQNIVLSGGXRDLKKIRVRTSERRQKGERKSQQGEVNVLSNPIQRFAVWFGGSVLASTPEFFTACHTKAEYEEYGASICRTNPVFKGMY

SEQ ID NO: 187767 - protein, 64 aa, Glycine max
  Clone ID: PAT_MRT3847_140567C.1.pep
EKEPILSLWQKGYPSKIPWPLGIRQIPMDLVRHTLMGRSHHLFPCFISKSPQNPIHGSHYNLFS

SEQ ID NO: 187768 - protein, 52 aa, Glycine max
  Clone ID: PAT_MRT3847_140568C.1.pep
FFVVPVCLTHYPTRSNPFLSPFPSGSDEAYILRCGLTKKKIFKTLGSGRPFC

SEQ ID NO: 187769 - protein, 67 aa, Glycine max
  unsure (1)..(67): unsure at all Xaa locations
  Clone ID: PAT_MRT3847_140569C.1.pep
XXXXXXLPAYNYWXXQXVXXPHSWXXIGXFSANXESTXRVPIPGSIXRTKYVSIXSIMXLXLGGTAG

SEQ ID NO: 187770 - protein, 60 aa, Glycine max
  Clone ID: PAT_MRT3847_14056C.1.pep
RWMETSIGERGLINECEVWRVVCFHSDGICFWGGGRRERAQVFCYATTTLLASQFLELGK

SEQ ID NO: 187771 - protein, 139 aa, Glycine max
  Clone ID: PAT_MRT3847_140570C.1.pep
ASVSIINVTETPKTNGSVPTTSLAVSKPVDPVPSSGSIQRFLDKAADEGLVIIQSPKVGFFRRSRTIKGRRAPPSCKEKQNVEEGQVICYIEQLGGELPIESDVSGEVIKILRQDGDPVGYGDALVAILPSFPGIKKLQ

SEQ ID NO: 187772 - protein, 43 aa, Glycine max
  Clone ID: PAT_MRT3847_140571C.1.pep
PRLPGVGYFFPKGIFRCVGELLFFNPFIKGHILHSVGYIKALI

SEQ ID NO: 187773 - protein, 62 aa, Glycine max
  Clone ID: PAT_MRT3847_140572C.1.pep
PTKTLTRNTLAVRFEEVIYSDMPNVVVVESTLIPTPTPARLRLNTAHNKSIDYGLAIFVGST

SEQ ID NO: 187774 - protein, 48 aa, Glycine max
  Clone ID: PAT_MRT3847_140573C.1.pep
MGDGNYDRTLREFCIPDYILVPGSEVRSVSHVPACPVNVFINTKSGGQ

SEQ ID NO: 187775 - protein, 38 aa, Glycine max
  Clone ID: PAT_MRT3847_140574C.1.pep
LKRDCTFVLFSSSRTQGVYLSIIQIFNYVATVPICGVL

SEQ ID NO: 187776 - protein, 67 aa, Glycine max
  Clone ID: PAT_MRT3847_140575C.1.pep
QGTQLPPPNNRDSPDYCVPVSPPRIKLRDGRFLAYREKGVPKDQAKHSIIIVHGFGSSKDMNFLAYG

SEQ ID NO: 187777 - protein, 136 aa, Glycine max
  unsure (1)..(136): unsure at all Xaa locations
  Clone ID: PAT_MRT3847_140576C.1.pep
SASSSTNGENKGSVKLFNRLYIRVLKCGKRMVWFDPSEDNEISMANFLCNITKMVNIGYIDTNLTDIHSLSHARGIIDAYRNVPLSNYGKRKGTREAQLTTMILWMRRMRALIRLHRKNREXKIYDMHMYHDKCMN

SEQ ID NO: 187778 - protein, 196 aa, Glycine max
  Clone ID: PAT_MRT3847_140577C.1.pep
MSKPKTQRKPTMTKKVSQNQEQQKTEKQPSWVVRGLLACRNVQIQQNQQQQKEAKPPSEAKENRKKQEQRKLQEERVPEENSKKCKKMKCSGSLCNNTKITAKPDTATPDVHNKRLLLSGCNNNDASSRSMKAPLNELNGTVSATSSLSASSTSSGGGSLRGMPFRRLSGCYECRMVVDPVLVFTRDPSLRSSICS

SEQ ID NO: 187779 - protein, 143 aa, Glycine max
  Clone ID: PAT_MRT3847_140578C.1.pep
KAGSPIFSEGGVDYLGHPSLIPAPGILPIWAPPVILMGPLEGSRIAGGPPGGVPAPISPGGGFAPLGLVDAPGAFFGLKGKELQTGRLALFFMFGFFVPALVPGKGPLETLPDPLAAPVPTNAWAYAPPFVPGKWGSKNQKPF

SEQ ID NO: 187780 - protein, 105 aa, Glycine max
  Clone ID: PAT_MRT3847_140579C.1.pep
MEGVSPEPLRSELDSKSKQDTAKEEDDDTFKESTDAEVTKIRLMRAFVESRDPSSKEVDDLMIRRFLRARSLDVEKASAMFLKYLKWKRSFVPNGYISPSEIAED

SEQ ID NO: 187781 - protein, 205 aa, Glycine max
  Clone ID: PAT_MRT3847_14057C.1.pep
RNYRVDPRVREFWLFEKMDEERRQKENYRSRLMEEHELPDWVYSPMNKDDKAKDFNSGVTGKRKRKEVVYADTLSDLQWMKAVENGEDISKFSGKGKRRDHRSSDSVAQASDNTGAEESLELRTESVPMENERTSEDSFHVTPPAKRFKPEGTNFLKHTYEDVGSGLNRHLLSWNTHKKKRSSFLGQGSLSDTRGHSSNGRANWN

SEQ ID NO: 187782 - protein, 271 aa, Glycine max
  unsure (1)..(271): unsure at all Xaa locations
  Clone ID: PAT_MRT3847_140580C.1.pep
MEGVSPEPLRSELDSKSKHDTAKEDDDALKDSTEAEVTKIRLMRAFVESRDPSSKEENDLMMRRFLRARSLDVEKASAMFLKYLKWKRSFVPNGCISPSEIAEDIAQDKVFTQGLDKKGRPIVVTFAAKHFQSKNGADGFKRYVVFVLEKLCSRMPPGQEKFLAIADIKGWAYVNSDLRGYLNSLSILQTSCFXLQDCYPERLGKMLIVHAPYMFMKIWKMIYPFIDENTKKKIVFVENKKLKSTLLEEIEESQIPDIYGGQMPLVPIQNS

SEQ ID NO: 187783 - protein, 54 aa, Glycine max
  Clone ID: PAT_MRT3847_140581C.1.pep
KKFKTLRILKLTCSGFYLIWNFRLTFVLLHTFLAHNFEFRKKCKLEERLILGQQ

SEQ ID NO: 187784 - protein, 193 aa, Glycine max
  Clone ID: PAT_MRT3847_140582C.1.pep
ARDAAYQSGIKKPLSDRHDLPVNGIAQLDEHDRSETNLMNNQVKTISLPSRSSNDAATDLLHDDKVTKESNHSHSSKVVTEDLKDNGLNSIERSLDRFNGFSSKDSSGVSRSELPGKNISVEKATDDLSGRESRKKSEKNDRPDRSTSEKDFVKEVHSSKTRIDEKGNENHIRKDERHQKREKTDYGSEAKEK

SEQ ID NO: 187785 - protein, 144 aa, Glycine max
  unsure (1)..(144): unsure at all Xaa locations
  Clone ID: PAT_MRT3847_140583C.1.pep
YTYINAYXHQAARIXDQARKPMSRIAGWLRKVEFTVREIKRDHVRHAKLATGGFLELFMSGVFPEIVLQVLVVLHFHDERDLHAFVLAFVTPLPPALQRSNVGCSIGPLAAGLQCPQSVGQRLQLGAVLDRERDYVDDRHLAVC

SEQ ID NO: 187786 - protein, 73 aa, Glycine max
  Clone ID: PAT_MRT3847_140584C.1.pep
GVFFFFWFFYFFFFFFFFFFPPHPQFFFFFGKKKGDPGGKSNTKGFLTNRLGFFFQGGWGLAHPFFKHKTQGA

SEQ ID NO: 187787 - protein, 30 aa, Glycine max
  Clone ID: PAT_MRT3847_140585C.1.pep
AALTKVCLMIIRIHNLYKILIYFYAHIKFK

SEQ ID NO: 187788 - protein, 64 aa, Glycine max
  Clone ID: PAT_MRT3847_140586C.1.pep
SIESHVVLETDRPHTTNALYQPLLTKVIPIEYKPDFASGYSFRGTPDSTLNSIATCMVNATCPV

SEQ ID NO: 187789 - protein, 88 aa, Glycine max
  Clone ID: PAT_MRT3847_140587C.1.pep
AAAFVSFLLYVASDIPYPFCMGRTKNFGDLHLLEVAMILHWDHIAITVSGSLIHPFFTLPLPVDTRLDPLSSFESTFHSVGPPLKNGL

SEQ ID NO: 187790 - protein, 159 aa, Glycine max
  Clone ID: PAT_MRT3847_140588C.1.pep
PHCQGKHLARMTIAPFAIMPGCHHHPLSVHPFGPYHAHNPFLLCLFHNHHLCHLHSHHLCHLHNHLHLCHLHNHLHLCHLHTLNLHPCHHHNQYHDTPNLYLAHHLVPGLNTHHYLDNLHNPPGNTRILDNLHNHLDSHSHPFPNSFLYLFPDPDPDPD

SEQ ID NO: 187791 - protein, 97 aa, Glycine max
  unsure (1)..(97): unsure at all Xaa locations
  Clone ID: PAT_MRT3847_140589C.1.pep
SGKGAKGLITAKDKYKKKPISRSSTSSLHFPVEHIHHLLKSKVTAHKRVKATTTFYSTTILNYLTTXVLKLTNNASKDLKVNHITPIHLQLTIHKYK

SEQ ID NO: 187792 - protein, 153 aa, Glycine max
  unsure (1)..(153): unsure at all Xaa locations
  Clone ID: PAT_MRT3847_14058C.1.pep
IEYYKFQLVVIVSLVIVLPNTQRWGENGHAIICRIAQSRLSDSTANAVKNLLPEYAQNDLRNVCSWADRVKFYLHWSAPLHFVDTPDNLCNYQSDTDCKDHDGVKARCVVGAIKNYTDQLLDYGIYTEYDLTHALMFLSHXMGDVHQAIHVDF

SEQ ID NO: 187793 - protein, 56 aa, Glycine max
  Clone ID: PAT_MRT3847_140590C.1.pep
PTLSLDIILSTFADDHTFLDLTLITGHTLSINITIEHTIVDITTDSYLTTNNTRLN

SEQ ID NO: 187794 - protein, 48 aa, Glycine max
  Clone ID: PAT_MRT3847_140591C.1.pep
HTITPKPITTTLFYSLNIIIMERLYLIVCLPLNLNLKHSINYTFLTTS

SEQ ID NO: 187795 - protein, 90 aa, Glycine max
  Clone ID: PAT_MRT3847_140592C.1.pep
CLLGGICVQNHTSIKAATANSKLNFQSTIPVFYLAGATKIEENLAVFNLHKKSKYSKSIWNLLVTPLQIRGRFQQYKQTSKQTTQIALFT

SEQ ID NO: 187796 - protein, 64 aa, Glycine max
  Clone ID: PAT_MRT3847_140593C.1.pep
KHTLSFNLKLSFISNFHKFLSIFFSTHTNYTHSPHTSIPSHIHSSTYLQTYPFFSKTSLTFPTL

SEQ ID NO: 187797 - protein, 47 aa, Glycine max
  Clone ID: PAT_MRT3847_140594C.1.pep
FKYFGNLHHIYFISLQIHLTNGDNMYVILTITDHRGCQLNKFSVCSM

SEQ ID NO: 187798 - protein, 41 aa, Glycine max
  unsure (1)..(41): unsure at all Xaa locations
  Clone ID: PAT_MRT3847_140595C.1.pep
FWILAFTLSIVSEHSSFRVLLFPVRVLTKICRLKXKIIARA

SEQ ID NO: 187799 - protein, 91 aa, Glycine max
  Clone ID: PAT_MRT3847_140596C.1.pep
CKTYLYLFQIRRKMREIMVNQATACDLKELVRKFIPEMIGKEIEKATSSIYPLQNVFIRKVKILKAPKFDLGKLMEVCPFYCKFSYTYYYV

SEQ ID NO: 187800 - protein, 40 aa, Glycine max
  Clone ID: PAT_MRT3847_140597C.1.pep
GVLGPEKPSFLNNEMDYDSWVPPEGQSGDGRTSLNDRYGY

SEQ ID NO: 187801 - protein, 60 aa, Glycine max
  Clone ID: PAT_MRT3847_140598C.1.pep
VLGLNCFANNHNGVACLIPNFSQTEVTRYSDHVAVHAATFGQGYQTSQVHLSVTTFYYSA

SEQ ID NO: 187802 - protein, 85 aa, Glycine max
  Clone ID: PAT_MRT3847_140599C.1.pep
PCQATAVGARVGGSRCSSIIDWYQSDVCLSYATLVVGLCCGAAAAGSSRWDVARGARAEQNHQDLAFVSCKYAHHVTAHKWESLY

SEQ ID NO: 187803 - protein, 199 aa, Glycine max
  Clone ID: PAT_MRT3847_14059C.1.pep
KDCYKKQNDAIQNASLKVLSWLNMCFKSMILPFEQLYETVDNFNIQIYSKNIIRDLLAGQSTHNGQLNGIHCNKFVESIYMNSSYDMLGNIVDSLKIEGPYSGVCPSSGSLPCIRYSVSLAVEGENLKEVIEVCDEFEFEVGIGAVVSYVEDVVMQMSVGQCAYFSSNLLTTELIFASAGDSVKMLASLSSKDWCMEYE

SEQ ID NO: 187804 - protein, 200 aa, Glycine max
  Clone ID: PAT_MRT3847_1405C.1.pep
KIDEFMTLTESVNWTPRVREETNENGNDYIHEVIIYLDSILSPVQQILPLDAVYRVGSGAFEHISNSIVTAFSSDSVKRFNANAVINIDYDLQFIENFAEERFYSAGLGEIDNEVSFKICMVEARQLVNLLLSSQPENFLNPDIWEKNYYALEIKKVAAILDKFKDSPDGIFGSLANKNAKQSARKKSMDVLKKRLKDFS

SEQ ID NO: 187805 - protein, 50 aa, Glycine max
  Clone ID: PAT_MRT3847_140600C.1.pep
SLPGAIILLYRTISIYLTTPAQVQVLLKNHELNRMTLYDTYSTFLTASAN

SEQ ID NO: 187806 - protein, 116 aa, Glycine max
  Clone ID: PAT_MRT3847_140601C.1.pep
KIGQIFGGKNPILLDFYKKKKLFFFSNPPLFLLLPPGCINWGEAQARGGKTVALINEGLIRPLLWEKRGLKLLGRLGRRQTPEVQIFGFNPLNIFEGNTEGEKKFKDLVWENPVFF

SEQ ID NO: 187807 - protein, 96 aa, Glycine max
  unsure (1)..(96): unsure at all Xaa locations
  Clone ID: PAT_MRT3847_140602C.1.pep
MARGPKKHLKRVXAPKHWMXDKLTGVFAPRPSTGPHKLRXCLPLIIFLRNRLKYALTGDEVKKICMQRFIKIDGKVRTDITYPAGFMDVISIDKTG

SEQ ID NO: 187808 - protein, 81 aa, Glycine max
  Clone ID: PAT_MRT3847_140603C.1.pep
MCPYIFTIILLSFLLFSTPFKCQTPSCSFNLNTSAHTCRPFSSNNTPYPFSSTPGCGHPSFHLTCCTPHSQIFINNFSFSI

SEQ ID NO: 187809 - protein, 67 aa, Glycine max
  Clone ID: PAT_MRT3847_140604C.1.pep
TLQRAIKVVGTPAYEEMVRNCMIQDLSWKSRAKNWENVLLSLGVAGGEPGVEGEEIAPLAKENVSAP

SEQ ID NO: 187810 - protein, 77 aa, Glycine max
  Clone ID: PAT_MRT3847_140605C.1.pep
TIQIPKILTRRPVITAISPQRKPASILIPATSTPPTTTPPSTTTITPPLTPKHKTNTTPPTPPPPPKEGGRHTVMTE

SEQ ID NO: 187811 - protein, 84 aa, Glycine max
  unsure (1)..(84): unsure at all Xaa locations
  Clone ID: PAT_MRT3847_140606C.1.pep
PAAAFCPFSAXCXALXWVVXXXSPPPLLFSFXPCRXAGGSASFCLPRGLLVACGPALGSXLGVFXXWFRLSPPPLGWACRPGGS

SEQ ID NO: 187812 - protein, 109 aa, Glycine max
  Clone ID: PAT_MRT3847_140607C.1.pep
PGGDLSPARFYPEGYGGNFTGFSAEIWSLGLPLFELYVGPFPFFQAGQRPPWAPLLWAIFFGDPPSLPETGSPEFSDFVECCPKKESRERWTPAQLFTPPFVCHYPDTC

SEQ ID NO: 187813 - protein, 81 aa, Glycine max
  unsure (1)..(81): unsure at all Xaa locations
  Clone ID: PAT_MRT3847_140608C.1.pep
DXEATXXXDWXDEEXGEWXAPXXEXPKCEXAPGXGEWXXPMKRNPAYKGKWXAPLVDXPXYXGVWKPQDXPXPGXFDIXLL

SEQ ID NO: 187814 - protein, 61 aa, Glycine max
  Clone ID: PAT_MRT3847_140609C.1.pep
EPYLVVCQGGPCIKALKQQVEDMFCLVYPCRRWIAHLSIKHPLSLQVFFFKHAGDIVSSFT

SEQ ID NO: 187815 - protein, 101 aa, Glycine max
  Clone ID: PAT_MRT3847_14060C.1.pep
GNPLCKKPHKVYLTKKKHWGQNPPTLSGKLSLDNLKNRLVLKPPILKQQIFAPTTKFFITWEARGQKAKKDLRPAKDQISLKDKPWPKQNFPERKNWFHNR

SEQ ID NO: 187816 - protein, 117 aa, Glycine max
  unsure (1)..(117): unsure at all Xaa locations
  Clone ID: PAT_MRT3847_140610C.1.pep
MSYFKGKCHDELIANAAHIGSYGNDDLVADEQYRTIGDRAVNLSAHNMRRNTLAVHGGCSFTSYSRVLXYVMGVIMFXVSVFHSTHSNKPFANDANELRVVNGLQVDMVSDPLVGAN

SEQ ID NO: 187817 - protein, 60 aa, Glycine max
  Clone ID: PAT_MRT3847_140611C.1.pep
VGGPQFYSHRRTLSFPVHGFAVWRICTSYLSERMQRLITAWIRNPCDPNPPPVSSSSPDA

SEQ ID NO: 187818 - protein, 243 aa, Glycine max
  Clone ID: PAT_MRT3847_140612C.1.pep
KFATVVRVIAHTQAKKVGFTKKADVVEIQVNGGDIAAKVAFARGLFEKPVAVDEVFSESEQIDVIGVTKGSGFEGVTARWGTRRLPRKTHKGLRKVACIGAWHPARVSWAVPRAGQKGFHNRTELNKKIYKIGKGSDKKNASTEFDLTTKRITPLGGFSHYGYVSNDFLMLKGSIMGTRKRVITLRKSLVPQTSRVALEQIKLKFIDTSSKFGHGRFQTRDEKAKFFGPRAKATPTSPTTTNA

SEQ ID NO: 187819 - protein, 53 aa, Glycine max
  unsure (1)..(53): unsure at all Xaa locations
  Clone ID: PAT_MRT3847_140613C.1.pep
YCGELRIGDAAHNAQGLDSALNDLALFTRHRPIKTPTXPTLATLKIRNAQPLG

SEQ ID NO: 187820 - protein, 101 aa, Glycine max
  unsure (1)..(101): unsure at all Xaa locations
  Clone ID: PAT_MRT3847_140614C.1.pep
KXXYXXXXXXXXXPSNLKSNXXKPXXXXYXXXNXXPXXXKPFXMXLXTNXSXPXXQXSXSXPIXXSTRXRXNERXXXQXTTKRRQIXXXXXXXXXPTXXXX

SEQ ID NO: 187821 - protein, 55 aa, Glycine max
  Clone ID: PAT_MRT3847_140615C.1.pep
PKKGEPSQRFLKMLKMASIFKVPPHGVTTFYPEKQPDNFKRHRVIFSKGLYISGF

SEQ ID NO: 187822 - protein, 112 aa, Glycine max
  unsure (1)..(112): unsure at all Xaa locations
  Clone ID: PAT_MRT3847_140616C.1.pep
ENQLLDKMTVVLLTLLLFIGAAVAQKAANATAANNPAQHASDEEPINLVQEAAGIGDAITPAEGTATNLQAHESGRFKKFVTHCXDHMYAQTCSANDPLHHQEGAHEINISP

SEQ ID NO: 187823 - protein, 54 aa, Glycine max
  unsure (1)..(54): unsure at all Xaa locations
  Clone ID: PAT_MRT3847_140617C.1.pep
GYVPCHAILKKQKEDKWVGQFVTNVFIRIYGQWLIXIHHASPVDLLIHRTFQYR

SEQ ID NO: 187824 - protein, 47 aa, Glycine max
  Clone ID: PAT_MRT3847_140618C.1.pep
CIVSFSLDIWKFSRSMKEVCNICNEICPIRCRFYSVINFRCNFWVCV

SEQ ID NO: 187825 - protein, 45 aa, Glycine max
  Clone ID: PAT_MRT3847_140619C.1.pep
PPLESFWGGSSSAAVSDNGKKNILGNANDFPLGNPGLPPVQSWPF

SEQ ID NO: 187826 - protein, 72 aa, Glycine max
  Clone ID: PAT_MRT3847_14061C.1.pep
PRVRGAPYLTSSLSEVRNGCGGGVWREHSGDQTAIDLRFAANKHKLAVFTGDETGPFFGLLGATGTLVYCCD

SEQ ID NO: 187827 - protein, 42 aa, Glycine max
  Clone ID: PAT_MRT3847_140620C.1.pep
KKNCVFVMKGMTINFQMGSGDIIFQILCHESTRKLKLLGRDI

SEQ ID NO: 187828 - protein, 65 aa, Glycine max
  Clone ID: PAT_MRT3847_140621C.1.pep
TKLIALNLEFWILFPHSKYCYSKSEYMSVLGIIFYACCHKYSANYFCLKNPCMEDLGWDYILEIE

SEQ ID NO: 187829 - protein, 45 aa, Glycine max
  Clone ID: PAT_MRT3847_140622C.1.pep
KRLFVCLLVSDLRTQTSHTNRIAPRAPIIWLALLSLRTQQALWYP

SEQ ID NO: 187830 - protein, 90 aa, Glycine max
  Clone ID: PAT_MRT3847_140623C.1.pep
SFSILKGPSTQVEQPVSWLLACQSLINETDYALQLSKSIMDGFFSGMLSRSMLSTNSRPPHLDLKMFTVCVRAYENIHKYMMFLERKNNK

SEQ ID NO: 187831 - protein, 44 aa, Glycine max
  Clone ID: PAT_MRT3847_140624C.1.pep
EVTICCFDLNACSDFIGYGPKSRHHAVNPLASCFHASGKFEIDI

SEQ ID NO: 187832 - protein, 106 aa, Glycine max
  Clone ID: PAT_MRT3847_140625C.1.pep
KKLFFAGFRALPSFRVSLRVTPPPPPLYVPPQGGSLFPFCGGQFLGRAIGGGLFVFTPPGERGFFSQPFYLGAPRVFPVPRFLNPAPCFFFWWPLKRVFASRPRVR

SEQ ID NO: 187833 - protein, 37 aa, Glycine max
  unsure (1)..(37): unsure at all Xaa locations
  Clone ID: PAT_MRT3847_140626C.1.pep
GFGTSNSIPIFTAQLLLFXXXLTAPRPFNPPWGFQIP

SEQ ID NO: 187834 - protein, 43 aa, Glycine max
  unsure (1)..(43): unsure at all Xaa locations
  Clone ID: PAT_MRT3847_140627C.1.pep
VQAELLFRKDNATFTFXKGWAFPRRIYFNGDMCLMPPPDAYPF

SEQ ID NO: 187835 - protein, 75 aa, Glycine max
  Clone ID: PAT_MRT3847_140628C.1.pep
SFILTLGVITFWSRLPPVDAVSTTVCTKAWPTFISYLLSVLFMIVNLHVLHVVLRLLSRQIHKNRFSVLCCLIAA

SEQ ID NO: 187836 - protein, 44 aa, Glycine max
  Clone ID: PAT_MRT3847_140629C.1.pep
ISHISSYFLPNPTQPGSDSFYKHMAILFNLSIKEFKSLQIPSFN

SEQ ID NO: 187837 - protein, 45 aa, Glycine max
  Clone ID: PAT_MRT3847_14062C.1.pep
IVELSRVDQVAFERVARGHEAAVAHELRDRPHEGLAFGVIGLVAS

SEQ ID NO: 187838 - protein, 89 aa, Glycine max
  Clone ID: PAT_MRT3847_140630C.1.pep
MGRYVSTPKDSGGKRRRPGRTGEGTTHVPGLRIPKPGDNAQTLGENSAKNKGERPAAHKTRIDGKAGQKGPQLQDKKEKGPPTGRDNTG

SEQ ID NO: 187839 - protein, 88 aa, Glycine max
  Clone ID: PAT_MRT3847_140631C.1.pep
KAKSRFSMHVERQSNMKIPLKCWIDAQRDEKVDQTHHKLIIVKKKKDTVSINCIWILPTTSSCMKMRFYIQNFKKRGREWGFFCYRSK

SEQ ID NO: 187840 - protein, 63 aa, Glycine max
  unsure (1)..(63): unsure at all Xaa locations
  Clone ID: PAT_MRT3847_140632C.1.pep
RXAXPSSPRSLAEGXXLAXLXVXPXIVPCXPLXXYWNAQTRESRNXXLNVNAIRFRRRNREXC

SEQ ID NO: 187841 - protein, 344 aa, Glycine max
  Clone ID: PAT_MRT3847_140633C.1.pep
MAAESGGSATNLNFDLPEEVVQVLPSDPFQQLDVARKITSIALSTRVNTLESDLSSLRAQIADKDNLIADLQSQLDSLDASLSQIAATLFQTEQDKESLLQENASLSDTVKKLNRDVSKLEVFRKTLMQSLQEEDDNSGAAPDIVAKIQSQASLTSTSQIGDNDVSLPPSVSSSTGNSFAKDHESDAIRPRVSQNLLLASQGSTPRITPPGSPPSLSASVSPTRTSKPVSPQRHSISFATTRGMYDDRSSMFSSMSLTHGSISSSDAGTGSQTGRTRVDGKEFFRQVRNRLSYEQFGAFLANVKELNSHKQTKEETLRKADEIFGPENKDLYTIFEGLINRNLH

SEQ ID NO: 187842 - protein, 434 aa, Glycine max
  Clone ID: PAT_MRT3847_140634C.1.pep
GSSKNNGNLYDSSLLANNNMELFSEPGHAKVFGHVRKLSNESVESDGSSIRGSDMSNFGIPNSSGDGSHDLPGSALVSRETDIMGHTKLKSTGDTQLVLPLDQRNKLNRILSTMQRRLGTAKTDMEDLIVRLNQEIAAKDFLATKLKDLEVELETTKQKNKENLQQAILIERERFTQMQWDMEELRRKSLEMEMKLKSESGRNSYQDLTKESIVQQNDVLYENLDATKEQLEILSKQYGELEAKSKADVKVLVKEVKSLRNSQTKLKKELSESIKEHSETEKLLLHEREKREQAEVARRILLEKCRVLFNQLQECNVSLPYEYEGRTIVNSSSSTDAFNQLTTSDDQMDILLAEVENLEKDYGSAACNVDKTNDIKDGVICDDEVRKIIADLFIDNVRLRKQTNRVTRHALKLDMTASDDSPSVETVTSIEKYM

SEQ ID NO: 187843 - protein, 104 aa, Glycine max
  Clone ID: PAT_MRT3847_140635C.1.pep
GLDALSWRIPLVSDIPTIIFGADVTHPESGEDSCPSIAAVVASQDWPEVTKYAGLVCAQPHREELIQDLFRCWKDPQRGVVYGGMIRYLTSVSSNFVSMSNMFA

SEQ ID NO: 187844 - protein, 90 aa, Glycine max
  Clone ID: PAT_MRT3847_140636C.1.pep
LSILNGTVTVVLFHIYQHPFKTYLIICSFNTFLTLYKILTFSFFFNSFMAIYLYMSLKFQCPILHLFIIHPYNDAFFQKKKKKKHQKRRL

SEQ ID NO: 187845 - protein, 103 aa, Glycine max
  Clone ID: PAT_MRT3847_140637C.1.pep
KRGGPFIKMSPWGPITTLSRGEVSPRPYWMLGAFSLCHPPLGPKRVFFSRPQLMFFYPQGKGWLFAFFRFGGLKKKDPRLGFLFGGPFCLQNPLGFHPAFFFF

SEQ ID NO: 187846 - protein, 319 aa, Glycine max
  unsure (1)..(319): unsure at all Xaa locations
  Clone ID: PAT_MRT3847_140638C.1.pep
LSYSKFGTKLASVYLHQYHFHKFNWYSRNNVVACAKHFVGDGGTEKGVNEGNTILSYEDLERIHMAPYVDCIAKGVSTIMVSYSSWNGNKLHGHHFLLNEILKEKLGFKGFVISDWEGIDELCQPYGSDYRHCISTAINAGIDMVMVPFRYEIFVEELMSLVQSGEIPIARIDDAVERILRVKFAAELFEFPLTDRSLLDVVGGKLHRDLAHEAVRKSLVLLKNGKDPSKPFLPLNRNAKRILVAGTHADDIGYQCGGWTGTKYGSSGRITIGTTILDAVKEAVXNETEVIYEQCPSIDIIECSEVSFAVXGVGEGPTL

SEQ ID NO: 187847 - protein, 96 aa, Glycine max
  Clone ID: PAT_MRT3847_140639C.1.pep
AIKAVKKVLVKTSLKNVITAIDLSRKTMSRIRLNNIWALGYNILGMPIAAGVLNPFAGIRLPPWLAGACMAASSLRVVSSFLLLQFYKKPLQIESS

SEQ ID NO: 187848 - protein, 132 aa, Glycine max
  Clone ID: PAT_MRT3847_14063C.1.pep
MESQDLSSPPHVDASRPSLGFPLGTALLLIIIFTLSGVLSCCYHWDRVCSLRQSFSDSEPQMPSSPTKSKHSKELKQNRGQSLPVLMPGDDVPKFIAMPCPCQPSRPDSIVVTVEMEKPPPKPPQLPVPFYL

SEQ ID NO: 187849 - protein, 162 aa, Glycine max
  unsure (1)..(162): unsure at all Xaa locations
  Clone ID: PAT_MRT3847_140640C.1.pep
DLNFIVSELVLQNSQLQKVRLVGRLNGFPNWVAKLQNLVMLSLSHSKLTDDPLGLLKDLPNLLCLSILYCAYEGSCLHFPNGXVSISIENGALPSLKKLKLVSISQLTEVPSGVCSLPKLEVFHAINMSNEFEENFHSNRGQRAQWIIEQVPFVSIVDRFWR

SEQ ID NO: 187850 - protein, 104 aa, Glycine max
  unsure (1)..(104): unsure at all Xaa locations
  Clone ID: PAT_MRT3847_140641C.1.pep
SAHTCTVYGIAMVARAGILLEDLKLEQFNPTGLYGPGGLITKGSRGEGGILRNSXEGDRLMERFALTAKDLASKNVVSKAMTLEIRKGRGVEPLKNHIYLHWNN

SEQ ID NO: 187851 - protein, 63 aa, Glycine max
  Clone ID: PAT_MRT3847_140642C.1.pep
LSSLSSKSILCHSNRTNHSASNPFIHVTKQTLLPKEPNISMISTMIINHHCQGYHHHTESYTN

SEQ ID NO: 187852 - protein, 76 aa, Glycine max
  unsure (1)..(76): unsure at all Xaa locations
  Clone ID: PAT_MRT3847_140643C.1.pep
KSRAQIALRGIYEQGAIAIVXRFNKERMNQSLAIFVWELSQEESHKFTQIPQGGMNRGITFASKNGPSKTLEKFWD

SEQ ID NO: 187853 - protein, 360 aa, Glycine max
  Clone ID: PAT_MRT3847_140644C.1.pep
MDMEVTSSLQTVEIDDSQSPSLKAAKQLISETVQKKSTPRLDEEETVAELATDAPEHPSPISVLDGSVYRDDVPSPVKQISEDSKGEDAQESKENEIKDQWNPEDSLSFNSTGPLEINRKKLQNINHLVQKLRRLNSSHDEARIDYIASLCENTNPDHRYISEILLASGLLLRDLSSELLTFQLHSSVHPINPELFLVLEQTKASSLLSKEESIPGKDANSKLNKEKFHRKLIFDSVNEILGAKFSSSPEPWIQPNSNRLTKKTLSAQKLLKELCFEIEKIQAKKPECSLEEEDDGLKNILCEDVLHGSESWTDFHGYLPGVVLDVERLIFKDLVDEVVIGESTGLRVKSLVRRRKLFGK

SEQ ID NO: 187854 - protein, 51 aa, Glycine max
  Clone ID: PAT_MRT3847_140645C.1.pep
PFLCPSHRATLSTFCTIPMTRALKMIVPRITIRILFSTMAPRLNLDFLSCR

SEQ ID NO: 187855 - protein, 287 aa, Glycine max
  Clone ID: PAT_MRT3847_140646C.1.pep
HIAGYVQLSGNQMSGEIPSEIGNMVNFSMLHFGDNKFTGKFPPEMVGLPLVVLNMTRNNFSGELPSDIGNMKCLQDLDLSCNNFSGAFPVTLARLDELSMFNISYNPLISGAVPPAGHLLTFDKDSYLGDPLLNLFFNITDDRNRTLPKVLKNPTKWSLFLALALAIMVFGLLFLVICFLVKSPKVEPGYLMKNTRKQEHDSGSTGSSAWYSDTVKIFHLNKTVFTHADILKATSNFTEERVIGRGGYGTVYKGMFPDGAEVAVKKLQTEGTEGEKEFRAEMKVLSG

SEQ ID NO: 187856 - protein, 85 aa, Glycine max
  Clone ID: PAT_MRT3847_140647C.1.pep
MAFHKIKVVASVSQDRYDRSRFVSQDAWDRYVDNVLGRKILPKRNMKLYITEFDEFRREIERRNWHKELTNFSEGSIEVALVKEF

SEQ ID NO: 187857 - protein, 248 aa, Glycine max
  Clone ID: PAT_MRT3847_140648C.1.pep
MDESKTVHIAVVPSAGFSHLIPILEFSKRLVNLHPHLHVTCIIPTHGPPPSASKSILETLPSQNITSTFLPPVDLPQDLDTVSQIQLTVTLSLPLIHQTLKSLSSTTPSLVALVVDTFAAEVLDFAKEFNLLAYVYFPLAATTVSLHFHMLKLDEETSCEYRDLDGPIEMKGCVPFHGKDLYSPAQDRSSRAYKMMLQRIKRFFFVDGVFVNSFLEMESGVIRALEKGGRWKYKYPPVYAVGPIVQSG

SEQ ID NO: 187858 - protein, 62 aa, Glycine max
  Clone ID: PAT_MRT3847_140649C.1.pep
TLSMTYLVLIPPPPPPTNHPLHTKKWCHHREKIINRIGSAEKTSGGLSLKNVYRGIRHRPWG

SEQ ID NO: 187859 - protein, 213 aa, Glycine max
  Clone ID: PAT_MRT3847_14064C.1.pep
MSAVRVQVSACAVSATVNHLRLRQNAVVSFRKKKPLTLRVVSMSSVPPSQPFEIAVKASVTTPNRLGDCPFCQRVLLTLEEKHLPYDPKLVDLTNKPEWGSKIFSTFIGFLKSKDPNDGTEQALLSELSSFNDYIKENGPFINGSEISAADLSLGPKLYHLEIALGHYKKWTVPDSLTSLKSYMKAIFSRESFVKTSAQPQDVIEGWRPKVEG

SEQ ID NO: 187860 - protein, 108 aa, Glycine max
  Clone ID: PAT_MRT3847_140650C.1.pep
PPLFPPITLPFLPASFFFFHPPLCTPRFKFFFFPPFVPRFLFPPSFGLYVCFMYPLITSSLRKPGLAKISPSFIPALFFSRLSPPPTRPIFSGPPLVLAPMFFHSFIS

SEQ ID NO: 187861 - protein, 60 aa, Glycine max
  Clone ID: PAT_MRT3847_140651C.1.pep
RDLSLVMCQSPVTLCCGFRWARGLASLVVGAPCVRGYSDAVNVRAGTLGEKHSGGGARVY

SEQ ID NO: 187862 - protein, 57 aa, Glycine max
  unsure (1)..(57): unsure at all Xaa locations
  Clone ID: PAT_MRT3847_140652C.1.pep
ACAVDTHNICGFDNTREECVDTTGVYIYGELYIXHSNRVTQHSYLYDRDLDLYHRDI

SEQ ID NO: 187863 - protein, 57 aa, Glycine max
  Clone ID: PAT_MRT3847_140653C.1.pep
DYWNESQGNLRLGPPAPDGWISEFSQQRERYESSDTWANSSELEYCASGWVSGFVHS

SEQ ID NO: 187864 - protein, 111 aa, Glycine max
  unsure (1)..(111): unsure at all Xaa locations
  Clone ID: PAT_MRT3847_140654C.1.pep
GGGGGIPPWPLGVGDNFGIWGGEEGEFESGCEKXKFNLPQHRLENTAVIFPXGGPALRFRADTQGVGAFHCHIEPHLHMGMGVIFAEGVQKVGEIPRDGLTCGVSRKDARK

SEQ ID NO: 187865 - protein, 59 aa, Glycine max
  Clone ID: PAT_MRT3847_140655C.1.pep
DIKYNMSCSASAETTMKKKTREAPVTKQRDTADLSHSFLGARSQINSIKKKLAPFHLEP

SEQ ID NO: 187866 - protein, 90 aa, Glycine max
  Clone ID: PAT_MRT3847_140656C.1.pep
MVNPHSPLKMSSRTSDMDDFHKGLCGWSWKENKLFELALAVVDENHLKRWEVVAAMIGGQKSAGDVQEHYVFLLEDLNSLSLENWTINLL

SEQ ID NO: 187867 - protein, 215 aa, Glycine max
  Clone ID: PAT_MRT3847_140657C.1.pep
MNIFRLAGDMTHLASVLVLLLKIHTIKSCAGVSLKTQELYALVFACRYLDIFTNYVSLYNTTMKLIFLGSSFSIVWYMRYHKVVRRSYDKDQDTFRHYFLVLPCLLLALLINEKFTLKEVMWTFSLYLEAVAILPQLVLLQRTRNIDNLTGQYVFLLGAYRGLYILNWIYRYFTEPHFVHWITWISGLVQTLLYADFFYYYFQSWKNNKKLHLPA

SEQ ID NO: 187868 - protein, 71 aa, Glycine max
  unsure (1)..(71): unsure at all Xaa locations
  Clone ID: PAT_MRT3847_140658C.1.pep
LFTPLWSFLIAVPSLLNATPWPWRRPWRRVRLDRTTRWXGGGRGRRRXRXRXXXCSXXYIKXEEEAMVWIG

SEQ ID NO: 187869 - protein, 98 aa, Glycine max
  unsure (1)..(98): unsure at all Xaa locations
  Clone ID: PAT_MRT3847_140659C.1.pep
APTQPAFSKRDKKKTVPTPPAXFSNNRALEQNPCNQSPPPQVPNPPXVPLFRGPPVFSLPPFHPTPPLPPLPTXSLGNRYRPLAPIPKXPXPPFPPPP

SEQ ID NO: 187870 - protein, 65 aa, Glycine max
  Clone ID: PAT_MRT3847_14065C.1.pep
RGKISGLYPRLIRRLLGRPKGRGRTKEGKVRDAMNFVIGPLSESIILRSPSMIFSRPCKHINQPK

SEQ ID NO: 187871 - protein, 55 aa, Glycine max
  Clone ID: PAT_MRT3847_140660C.1.pep
EGRFRSRWLMFVSLVLQMLLLVIAKATSFFGSSIGFLINLLVLSSGFMMIGINFL

SEQ ID NO: 187872 - protein, 33 aa, Glycine max
  Clone ID: PAT_MRT3847_140661C.1.pep
ISSHSQRLGILHTSLIHIRIMELEHIITEKLAY

SEQ ID NO: 187873 - protein, 94 aa, Glycine max
  Clone ID: PAT_MRT3847_140662C.1.pep
QDFVIGDMLRVDVVSMVNLEKREHSSILRKCDVVFPISDLLSLCSLLQMEVRSSSCYIIHSDCLDDRVLSRSSSLRMNATTGARWPLLREKLSS

SEQ ID NO: 187874 - protein, 67 aa, Glycine max
  unsure (1)..(67): unsure at all Xaa locations
  Clone ID: PAT_MRT3847_140663C.1.pep
FMNKSKLMVLLNSCEYAPSYEDKNGDXMFVGNAPWEMSVESPTRLRKMKGSKAMGLAPRHMEKCKSR

SEQ ID NO: 187875 - protein, 138 aa, Glycine max
  Clone ID: PAT_MRT3847_140664C.1.pep
KNNSSAIAHPTLFHFPHSFTPSLSPYQNAQCNARRSRASSQHAIPYSRPWLGLLLGAAHSLGGHGRANHNLTGPFDLGVKFDGDIAGPTLQSHGHLEFFMIRRHSSASHCRCWRFPCLFGILSSYGLKTSQFCKGAFI

SEQ ID NO: 187876 - protein, 88 aa, Glycine max
  Clone ID: PAT_MRT3847_140665C.1.pep
RQKRSSPQPNQWRRCRCTKSRSLHVRNDNQQTALYNFSYSFITRAIGGNQFSESLKSVQREEHSTNGNLASFLLHSCFIPPSVVFSQP

SEQ ID NO: 187877 - protein, 104 aa, Glycine max
  Clone ID: PAT_MRT3847_140666C.1.pep
EIHYIMKLLFQIYSSPLCTSPGPALRCCECRMQSSFSWFVWFYPLLVQVLLCSLLACPVSGWKSNQPYSKAILWILLHCEGPVVKPLVYELDSSIGKEMGHDLE

SEQ ID NO: 187878 - protein, 76 aa, Glycine max
  Clone ID: PAT_MRT3847_140667C.1.pep
RTKFYLKIKIHSYRDNSITQLSSTLKYEYSKPCLLSPFMKAFKLLIVNQLLAPQPTLLRTNKRKKKLYGAFLNGKA

SEQ ID NO: 187879 - protein, 108 aa, Glycine max
  unsure (1)..(108): unsure at all Xaa locations
  Clone ID: PAT_MRT3847_140668C.1.pep
TGSYTQXTXFXPKXSPQNXTXPFMXYXPXXRXDRDLRLFLAYACNWHLVGIGLWTHXVELSPKNYXNPXPHTXHMXGPRFLXMXXYAVVLYXAVXXRVVXXXVXXXTX

SEQ ID NO: 187880 - protein, 90 aa, Glycine max
  unsure (1)..(90): unsure at all Xaa locations
  Clone ID: PAT_MRT3847_140669C.1.pep
RXYXSGYPXXXFXLGFSXFLSXEXQGAXAQXVDXSQXLXSXXSXVXXLKRSMENPEGRVGGCYKSSFLQXYRXXXFKAXSWSPNXRXKKE

SEQ ID NO: 187881 - protein, 259 aa, Glycine max
  Clone ID: PAT_MRT3847_14066C.1.pep
MSTVRVQVSACVFSATVNNLCLRQNAVVSFRKKKLLRLVSMSSVPPSQPFEIAVKASVTTPNRLGDCPFCQRVLLTLEEKHLPYDPKLVDLTNKPEWFLKVNPDGKVPVIKFDEKWVPDSDIITQTLEEKYPSPPLLTPPEKATAGSKIFSTFIGFLKSKDPNDGTEQALLSELSSFSDYIKENGPFINGSEISAADLSLGPKLYHLEIALGHYKKWTVPDSLTSLKSYMKVIFSRESFVKTSAQPQDVIEGWRPKVEG

SEQ ID NO: 187882 - protein, 134 aa, Glycine max
  Clone ID: PAT_MRT3847_140670C.1.pep
DELNAKRIKEYRQKVELELSNICNDVMTVIDEHLIPSAAAGESTVFYYKMKGDYYRYLAEFKAGNEKKEAADQSMKAYESATTAAEADLPPTHPIRLGLALNFSVFYYEILNSPERACHLAKQAFDEAISEQAE

SEQ ID NO: 187883 - protein, 60 aa, Glycine max
  unsure (1)..(60): unsure at all Xaa locations
  Clone ID: PAT_MRT3847_140673C.1.pep
MQRFVKTLTGKTMTLEVESADTVDNXKGXIEDNDGIPPDQERLIGAGKQLDEGRTLGDDN

SEQ ID NO: 187884 - protein, 68 aa, Glycine max
  Clone ID: PAT_MRT3847_140674C.1.pep
FRNRFTRHRMPLGPIHSYPRACHPRYWSWDPAVRPSIARCHSLSSEFWHELQNILSCQLSMTLVLSVS

SEQ ID NO: 187885 - protein, 126 aa, Glycine max
  Clone ID: PAT_MRT3847_140675C.1.pep
MASLQTRVFLMALLCLLALGATIIPMAQGEVSCGQVVSNLTPCISYVLYGGATVPAQCCNGIRNLYGMAQTKPDRQAVCNCIKNAVRNSGFTYSHFNLNLAANLPKNCGVNIPYQISPDTDCTRVQ

SEQ ID NO: 187886 - protein, 95 aa, Glycine max
  unsure (1)..(95): unsure at all Xaa locations
  Clone ID: PAT_MRT3847_140676C.1.pep
EVVGRTEKERGRESGGQVVAVIGXETETARGRVGAVNEGAXTTAAITCTLENGGGTLKPIRELYCESESERSSLEQIFNFSDQTTQGVKEKYEKT

SEQ ID NO: 187887 - protein, 56 aa, Glycine max
  unsure (1)..(56): unsure at all Xaa locations
  Clone ID: PAT_MRT3847_140677C.1.pep
XXDXXILFGQXGXXKXLLGXXXXTXXAMLXGPXNSIXPGXYXXKIXDFXSPKXXAX

SEQ ID NO: 187888 - protein, 91 aa, Glycine max
  Clone ID: PAT_MRT3847_140678C.1.pep
NVLSSVLAPKVCTMLLIIFLLHDQPDKVISDNDLTASFHKDSNAMPSVCIDRYLRPLPLGQFIKRFVVFMYWIRTSQHRIAFSYIDISFQS

SEQ ID NO: 187889 - protein, 106 aa, Glycine max
  unsure (1)..(106): unsure at all Xaa locations
  Clone ID: PAT_MRT3847_140679C.1.pep
MWVYQDLLTGDELLSDSFGYKEIENGMLEESDGKRVVKXATDVDIGANPSAEGGSXDEGLDDAAFKVTDIYDTLILHDQPLFNMKQIRTSLKRSIKNLTPKLDAEQ

SEQ ID NO: 187890 - protein, 389 aa, Glycine max
  Clone ID: PAT_MRT3847_14067C.1.pep
MDLKSNHTPVLTDAAPVTKSRLGVHSSLLPYSHTGTTFTHGMLLTIPRKKTGILEDVRCSGWLDAMKSSSPPARKITKDVGLGFASSDSDTAGAYFSWLLKYPSALASFDQIMNYAKGKRIALFMDYDGTLSPIVDNPDCAFMSDNMRAAVKKVAEYFPTAIISGRSRDKVYQFVGLTELYYAGSHGMDIIGPVRQSVSDNHPNCIRSTDKQGKEVNLFQPAAEFLPMINEVLNSLEECTKDIKGAKVENNKFCVSVHYRNVDEKYWNLVGQHVHDVLKGYPRLRLTHGRKVLEIRPVINWDKGKAVTFLLESLGLNNCDDVLPIYIGDDRTDEDAFKVLREGNKGYGILVSSAPKESNAIYSLRDPSEVMEFLKSLVLWKSSTLKSLI

SEQ ID NO: 187891 - protein, 191 aa, Glycine max
  Clone ID: PAT_MRT3847_140680C.1.pep
ARAESSIVSSMTEQNIIGSGGYGIVYRIDVGSGYVAVKKIWNNRKLEKKLENSFRAEVRILSNIRHTNIVRLMCCISNEDSMLLVYEYLENHSLDKWLHKKVKSGSVSKVVLDWPKRLKIAIGIAQGLSYMHHDCSPPVVHRDIKTSNILLDTQFNAKVADFGLAKMLIKPGELNTMSAVIGSFGYIAPGE

SEQ ID NO: 187892 - protein, 153 aa, Glycine max
  Clone ID: PAT_MRT3847_140681C.1.pep
MATEKLRSCANFLENSKPYFAMIAIQFGYAGMNIITKISLNRGMSHYVLVVYRHAFATAVVAPFAFIFERKAQPRITFPIFMQIFILALLGPVIDQNFYYAGLKLTSPTFSCAMSNVLPAMTFVMAVLCRMEKINMKKVRCQAKVVGTLVTVA

SEQ ID NO: 187893 - protein, 131 aa, Glycine max
  unsure (1)..(131): unsure at all Xaa locations
  Clone ID: PAT_MRT3847_140682C.1.pep
MSKLKREALLKAIXGIMAVSKEKNRKLGEPINLQMGWKNSNPQKARRLRGSVRWPNILGPRMKIGLLGDANLVEKAKKIGLAWLVVKPWKKLTKIKRWGKNLVKKYHPFXAFEAVIKQIPGFWGPGLTKAG

SEQ ID NO: 187894 - protein, 56 aa, Glycine max
  Clone ID: PAT_MRT3847_140683C.1.pep
KIGVHVMQKLEKHPRYQIRHCYPLPPSICILEQEHTLFESNLAQYDNKPRGIGFIF

SEQ ID NO: 187895 - protein, 48 aa, Glycine max
  Clone ID: PAT_MRT3847_140684C.1.pep
FIHYLKARLPALWISLGIVYTLFKSLITGFLDFGTILDALRIFLLTTL

SEQ ID NO: 187896 - protein, 87 aa, Glycine max
  Clone ID: PAT_MRT3847_140685C.1.pep
MLNSGDKLALANTQEFFDGNFPVDSWLPIFVNCLYPVSQLPSEAVVVNVTCGSGRGGLPTTAWIRFAVNIRLSNINKRICTISLHMV

SEQ ID NO: 187897 - protein, 31 aa, Glycine max
  Clone ID: PAT_MRT3847_140686C.1.pep
PLRMQWPRNLQGIPRNSSSPFCGKKINAIAL

SEQ ID NO: 187898 - protein, 134 aa, Glycine max
  Clone ID: PAT_MRT3847_140687C.1.pep
TINFCKHKPVPASKNPQSLCLSTRYNFPYIPISFRASLTGTKPPFASSMQQFGKNNPKNKIQKPQSQSSNLVSKIERATTTKTTTEKKIKIEEEKKIRNKVLTFLSHKLFFFPLLIRFSFLFFCYSAENNFFLM

SEQ ID NO: 187899 - protein, 118 aa, Glycine max
  Clone ID: PAT_MRT3847_140688C.1.pep
ADPMNNNVGKGKKGLAEQNHMFFDKKSLKMDKWRGSSGSSTEDDTFLMSISAGLFPFAAEVILGGVSRLSMPLQSTSARVVRTNQGGVSSSWGSLTQEQFRDLLPLGGLAWGGVWALG

SEQ ID NO: 187900 - protein, 445 aa, Glycine max
  Clone ID: PAT_MRT3847_140689C.1.pep
MNNNVGKGKKGLAEQNHMFFNKKSLNNGVVNGGVGSGSSTEDDTRFNKVVEDGNNGLRGLIQIHGSLQISQQPPQEPAVCWERFLPLRSIKVLLVEDDDSTRHVVRALLQNCSYKVTAVSNGLQAWKVLEDPENGIDLVLTEVAMPILSGIGLLCKIMSHKTLKNIPVIMMSSHDSMGIVFKCLSKGAVDFLVKPIRRNELKNLWQHVWRRCHSSSGSGSESATLTRKFAKSRSNDAYENNSDSSDENDYGSRGLSIRDGSDNGSGTQSSWTKCLAQVGSPHPVSPHKQLVDAPDSTCAQVMQTKTEKVSSRWVHATEKECHELIDLDDVARVKDLAMGISLNMQLEHPLEELSSNPIVGKGANKMSDVDDMQIIKRKSNVCEKGQLEYNGDKTGTQENQAMNVIDVTDSNSPQAESRDLNTPNGFLVFHNQKQTVAPKSIHPLN

SEQ ID NO: 187901 - protein, 57 aa, Glycine max
  Clone ID: PAT_MRT3847_14068C.1.pep
HPSYIRSAPDTIQTKVVLAWITRVSLSALSTLSVHARRSIGTVNRRLMNFLASQVPT

SEQ ID NO: 187902 - protein, 59 aa, Glycine max
  Clone ID: PAT_MRT3847_140690C.1.pep
ETIHGSESFGQVVLSGGVSLSTDHGTLLIDRLSNNLSYFVNDIFSFPDIVDIDRGLIIF

SEQ ID NO: 187903 - protein, 124 aa, Glycine max
  Clone ID: PAT_MRT3847_140691C.1.pep
KAQNQKFHSKFKEMERQPVPASKNPQSLCLSTRYNFPYIPISFRASLTGTKPPFASSMQQFGKNNPKNKIQKPQSQSSNLVSKIERATTTKTTTEKKIKIEEEKKIRNKVLTFLSHKLFFFFLS

SEQ ID NO: 187904 - protein, 49 aa, Glycine max
  Clone ID: PAT_MRT3847_140692C.1.pep
NLARGVPLAVRTFGSFLFSKIEANEGGYVRDSEIWNLPTIKITFYPHLK

SEQ ID NO: 187905 - protein, 111 aa, Glycine max
  unsure (1)..(111): unsure at all Xaa locations
  Clone ID: PAT_MRT3847_140693C.1.pep
PRVXRMALMEENASSTEALTRKLDEILTETENDVGQFSFEEEAVEKFMQELYKEIIASPPTPSEPPSSSNVLQVQNDSIVAQDEGDFDDDEWLARVLSSGQAQVLDTCDCF

SEQ ID NO: 187906 - protein, 45 aa, Glycine max
  Clone ID: PAT_MRT3847_140694C.1.pep
MEGKEQDASLGANKCPERQPTGTAAHSQDHGKDYHEPVPEPLAVL

SEQ ID NO: 187907 - protein, 81 aa, Glycine max
  unsure (1)..(81): unsure at all Xaa locations
  Clone ID: PAT_MRT3847_140695C.1.pep
TRXTKFVISNYIFPSKTHTFGYMVHTMGHMHPSNTLTXRITVNINVYTHVFPLLKFLTIRKLVNNXSNLHHLLLDKATSNA

SEQ ID NO: 187908 - protein, 48 aa, Glycine max
  Clone ID: PAT_MRT3847_140696C.1.pep
LTGGESANNDLALKAARMSAHTIAGAKNPHRNRPATLGLGEIRKYLHN

SEQ ID NO: 187909 - protein, 29 aa, Glycine max
  Clone ID: PAT_MRT3847_140697C.1.pep
KGILNYTEDDMVSTNFIVDSISSIFDSNA

SEQ ID NO: 187910 - protein, 161 aa, Glycine max
  Clone ID: PAT_MRT3847_140698C.1.pep
ARGRSELRNVVPRGYYESPQTIMELRAIAFVEAQWGEPLREDGPILGVEFDPLPPDAFGAPLAVTEQQKLPSLAYDSKIYERHHARANKAIARTFHEYPFLPNQSGITSDVYGQLNLPHLHDPMDGPTRTPFSLGNEQQPRVHAPQVIFLMFAFCLNTMTS

SEQ ID NO: 187911 - protein, 137 aa, Glycine max
  Clone ID: PAT_MRT3847_140699C.1.pep
MVHCSLEVAFKNMKHIMASSHKVECCHFSSDGKLLATGGHDNKASLWCTELFNLKSTLEEHSEWISDVRFCPSMLRVATSSADKTVRVWDVDNPSYSLRTFTGHATTVMSLDFHPSQDDLICSCDNSEIRYWSIKNG

SEQ ID NO: 187912 - protein, 255 aa, Glycine max
  unsure (1)..(255): unsure at all Xaa locations
  Clone ID: PAT_MRT3847_14069C.1.pep
MTTLPETPTVSPMENENTILRNGTAKKPKLTHAISEAEIREEFSHHQRGVARINNGSFGSCPRSVLNAQSIWQLRFLQHPDDFYFNSLRPGILASRAAIKDIINAEHVDDVSLVDNATTAAAVVLQQIGRHFVRGHFHRNDAVVMFHCAYQAVKKSIEAYVTPIGGTVVEVQLPFPVRSEEEIVTEFKKGLENGKLNGGKVRLAVIDHITSMPSVVLPVRELIRVCREHGVEQVFVDGAHAIGSXHVDVKEIGAD

SEQ ID NO: 187913 - protein, 97 aa, Glycine max
  unsure (1)..(97): unsure at all Xaa locations
  Clone ID: PAT_MRT3847_1406C.1.pep
MNIWRHECPIQKLDGQALLQPKGCVRWQTGLMGSRKSXMACALSRSWRSKGKXTYILDGDNIQHGLNRDVSFRAEDRXTTYEAIGEVSKLLAHAGVI

SEQ ID NO: 187914 - protein, 42 aa, Glycine max
  Clone ID: PAT_MRT3847_140700C.1.pep
VPEVPTKLLFVQQPSFHNYFFPYLMMRAFTIIASMGLKTKAR

SEQ ID NO: 187915 - protein, 86 aa, Glycine max
  Clone ID: PAT_MRT3847_140701C.1.pep
TEGLLEGQKRGARDLKRMKMLRRMTTLNNKVKTAPNSNTTTESMSNSTAPTAEKTEHYATSKEENADMVAVAKQMDRAADAAGQAI

SEQ ID NO: 187916 - protein, 64 aa, Glycine max
  Clone ID: PAT_MRT3847_140702C.1.pep
MGKKKKLNHFWALGRDNGLFRSPSGIYLTKKERVNGPRALWGIWKLQMGETKRIPQNIMEGNRA

SEQ ID NO: 187917 - protein, 98 aa, Glycine max
  Clone ID: PAT_MRT3847_140703C.1.pep
MPSSWISKNLFRKVGDGKETSLWKDIWMVPEPLSIKYPRWCRELFEWVKQLVQDLERFLGKLSRKENVRDRWEGDPKGMYSGKFVYHALISDDAMPHQ

SEQ ID NO: 187918 - protein, 81 aa, Glycine max
  Clone ID: PAT_MRT3847_140704C.1.pep
VKNLTGKPIPLEVESSDTIDTVNAKIHDNEGIPPDQQRLIFAGKPLEDGRTLVDYNIQKESTLHLVLRLRGVGNMRKKKTY

SEQ ID NO: 187919 - protein, 97 aa, Glycine max
  unsure (1)..(97): unsure at all Xaa locations
  Clone ID: PAT_MRT3847_140705C.1.pep
ILNSVSVFXSLKIQTCKKRILCREYLYINCRRRLLGWESQIGFFFLFTLFLFFFSARLFPDPVATIPPTNHQSPPLPLTINIMKPSSLHRVLKPNTL

SEQ ID NO: 187920 - protein, 49 aa, Glycine max
  Clone ID: PAT_MRT3847_140706C.1.pep
EALCGVVVRLHQSTLWSLLLWWLLPLLRGSCHSCLALSSTPFSVQSFPH

SEQ ID NO: 187921 - protein, 68 aa, Glycine max
  Clone ID: PAT_MRT3847_140707C.1.pep
TNKIVFFIKYLFYCTLILHYLHLTSVNVWWFLVRMTSLLIPSFGGGLHRVSREEGRVEHPVARVMVAH

SEQ ID NO: 187922 - protein, 76 aa, Glycine max
  Clone ID: PAT_MRT3847_140708C.1.pep
VLSSIIYNLWPSFWFKGGIVIYESPCFCWNQTITPLISFIPLLNSESFHQIIYAIRKTQNAPGGNPSLFKGTLMQK

SEQ ID NO: 187923 - protein, 71 aa, Glycine max
  unsure (1)..(71): unsure at all Xaa locations
  Clone ID: PAT_MRT3847_140709C.1.pep
GPQRPPSEWASDHCFQFQEQYQRTATQKVKMEERNVLSACKACKIXADEQAPALQWHCQRKGVKRKKINKV

SEQ ID NO: 187924 - protein, 59 aa, Glycine max
  Clone ID: PAT_MRT3847_14070C.1.pep
FFTLTSCLARVFALSVPLGFLVSIFHAKPELRTERECALSLDLPAKRECAPSLNCALSE

SEQ ID NO: 187925 - protein, 66 aa, Glycine max
  Clone ID: PAT_MRT3847_140710C.1.pep
KRAERMSMIPKRVTLDTTVRGGKSMKSKLASKKLNLPGNNSKYTCYYSTSLALNDELHPTLDSYVY

SEQ ID NO: 187926 - protein, 47 aa, Glycine max
  Clone ID: PAT_MRT3847_140711C.1.pep
RQFKYWCFIERTLSLPFQQRGVWQYDTLYNMVHYLIISSCGHVHGTR

SEQ ID NO: 187927 - protein, 110 aa, Glycine max
  Clone ID: PAT_MRT3847_140712C.1.pep
HTRVPYLSTGLNFSHLMHSYTVKTNAKILIAHTDECRIRRQHEIYRTTSIRDQDSVKNVVTIAGQSIDFLGAMTADVYDDQVSKCTSGEGVAGIVNKLVNSKDDRPSYEQ

SEQ ID NO: 187928 - protein, 57 aa, Glycine max
  Clone ID: PAT_MRT3847_140713C.1.pep
SVFIINAHVTVNVCMLSCFMASALSPLMAAIAFWFMSFGSWHCYLISSTNASRCVPM

SEQ ID NO: 187929 - protein, 204 aa, Glycine max
  unsure (1)..(204): unsure at all Xaa locations
  Clone ID: PAT_MRT3847_140714C.1.pep
SQSFMLHLLNFGEAVAMGMHTPEKMFRLLDMYEVLEKLDVDVDVLFFEEVGSFVRGELHKLLRSFGDTIKSTLLAFRNAIASNHSKTPFPQGGVHHVTKYVMNYIMALVEYGDTLNLLLVDDTSIDPAGNKDDTPCLSLCPVACQFRSITATLESYLSXKSKFYRDEALQHMFIMNNIHYMVQKVKCSDLGHFSGDCWLPSTSP

SEQ ID NO: 187930 - protein, 103 aa, Glycine max
  Clone ID: PAT_MRT3847_140715C.1.pep
KYVDSSALWIALWSAENLINDKNQILVNKHNLIEINGNALLTNLDERSACNFVLLPNLDDGSPPSMYLILKLYVKFNTICWKLNKRQRKNGRRMILHESHICH

SEQ ID NO: 187931 - protein, 60 aa, Glycine max
  Clone ID: PAT_MRT3847_140716C.1.pep
MSGCEKTFLLVKKKKKKKKKKKKKKKKKKNKKKKKNKKKKKKKIWASVLKDQRLLTHLSN

SEQ ID NO: 187932 - protein, 664 aa, Glycine max
  unsure (1)..(664): unsure at all Xaa locations
  Clone ID: PAT_MRT3847_140717C.1.pep
SLCSLEKRQSEQEEASCLELLESVSKSKRHLDRDLDNPKPCKSRKSISSSSLLSCKYSKISFCGIEDHLSDGFYDAGRDRLFMPLECYEQNHCLASREVILLDRKIDEELDAVMLAAQALVYNLKKLNGLSRYGNQDGVDNLQMASLLALFVSDHFGGSDRSGIVERTRKSVSGSNYNKPFVCTCSAGSSTSISSPTEPVANTIEDITLSKMSEKSLDSIKKRRNSIIIPIGSVQYGVCRHRALLFKYLCDHMEPPVPCELVRGYLDFSPHAWNIILIKRGATWVRMLIDAXPLDIREEKDPEYFCRYIPLNRTTIPLSTIGCPGPDYSFPSLTTCDELETKASTTLVKCKFGSVEAAAKVRTLEEQGSSADKIKNFEYNCLGEIRILGALKHPCIVEMYGHQISCQWSVSADGNPEHRVLRSAIFMEYVEGGSLKNYLEKLSEAGEKHVPVELXALQIAKDVSCALSKWDSKQIIHRAIKSENILFYLDRKRDDGTPTVKLCDFDSAVPLRSTLHVCCIAHAGTPPPCICVGTPRWMAPEVMRTMYKKNSYGLEADIWSFGCLLLEMLTLQIPYSGLSDSHFLDSLQMGKRPQLTDELRVLSSMNGPTMIPSGEELEKSDAGVDMLKFLVDLFHKCVEENPSKRPTAEEIHKMVLAHTDRLQI

SEQ ID NO: 187933 - protein, 178 aa, Glycine max
  Clone ID: PAT_MRT3847_140718C.1.pep
GDGSVIEELKQLEKLRKLGIIKLREEYGEELCKVIEKMDHLCSLSIGAMGNDDGNHGMLQLKSIRNPPSSLQRLYLYGRLERLPSWISKVPNLIRLCLRWSILKEDPLPYLKDLSELSYLEFYDAYGGDELHFKNGWLKRLKVLCLESLPKLKTIKIDEGAIPLLAELKIGKCHENGE

SEQ ID NO: 187934 - protein, 70 aa, Glycine max
  unsure (1)..(70): unsure at all Xaa locations
  Clone ID: PAT_MRT3847_140719C.1.pep
PGFLVLKETPANHSQPKSVASLLKAMDLVAPAEQVCSFHHFHTTYDSSXXDSXXRPFVLDPDSSVSHHFS

SEQ ID NO: 187935 - protein, 63 aa, Glycine max
  Clone ID: PAT_MRT3847_14071C.1.pep
MAELSLGILIDIVDEEWMRDTLPDDDLPLPPTLVVRTDDTEDSNQETQQVNVDAWHDLAFGQE

SEQ ID NO: 187936 - protein, 75 aa, Glycine max
  Clone ID: PAT_MRT3847_140720C.1.pep
DLSKACFLVSQRAGDTAQGSLSRVESSSRSLSKVVYRRAACLHIMCLSSCDIVSCSRKKREVLINRCLEPVDSPC

SEQ ID NO: 187937 - protein, 164 aa, Glycine max
  unsure (1)..(164): unsure at all Xaa locations
  Clone ID: PAT_MRT3847_140721C.1.pep
MADITHLPMEQLQDLECCLDSNPPWAEAILLAFQNYILMLGTSVMIPSWIVHAMGGSDGDKARVIQTLLFVAGINTLLQTLFGTRLPTVVGGGSSAYIYPIAYIITDSSLQQISDSHERFIQTMRAIQGALIVASSIQIIFGXTSQVWGLFSRFFXSPLGMAPC

SEQ ID NO: 187938 - protein, 50 aa, Glycine max
  Clone ID: PAT_MRT3847_140722C.1.pep
MSNTCGNCDCADKTNCTYIETVDMDVPAAEHDGKCKCGTNCTCTDCTCGH

SEQ ID NO: 187939 - protein, 88 aa, Glycine max
  Clone ID: PAT_MRT3847_140723C.1.pep
FYYSLSYWAIKVWIWGLQIQALTWGTLYSYICRKGQYMLLHTNTFQQTRTSDLLQCHVLHGNERGAVFVSSRLAVSTFAKTQPFFFTE

SEQ ID NO: 187940 - protein, 64 aa, Glycine max
  Clone ID: PAT_MRT3847_140724C.1.pep
MSNTCGNCDCADKTNCTKGNSYGVIVETEKSYIETVDMDVPAAEHDGKCKCGTNCTCTDCTCGH

SEQ ID NO: 187941 - protein, 93 aa, Glycine max
  Clone ID: PAT_MRT3847_140725C.1.pep
LLIIKFVDHSRDLWIEPVKPVSPKAEEDPGGDASDFVMAKEVVDLTAGTHEVATTKEDADVKAQEDSVAVHSPEQPDDSDDDFQKWSQYESAL

SEQ ID NO: 187942 - protein, 64 aa, Glycine max
  Clone ID: PAT_MRT3847_140726C.1.pep
MSNTCGNCDCADKTSCTKGNSYGVIVETEKSYIETVVMDVPAAEHDGKCKCGTNCTCTDCTCGH

SEQ ID NO: 187943 - protein, 98 aa, Glycine max
  Clone ID: PAT_MRT3847_140727C.1.pep
ANSSWGAVRNDHQCMQMAANYLNCSQLALPFVYLGVPIGANPRRAHVWEPIIQKYERRLARVPQLVINNIIKIQRSFLWCGLHDTKKIAWILWDTVCL

SEQ ID NO: 187944 - protein, 128 aa, Glycine max
  Clone ID: PAT_MRT3847_140728C.1.pep
PGRAPPNGNWGPQKNKPPPRGGGGKLSIFWGGGRPPPGFGKKKKKKPFWGPKKKTPLKKGGPKPGGPPNPGKFPPGAATGGSPPGGTLGGNWTPGAKPGPPKKMGPGPKGGEKKNGVFPPPPKRGFQK

SEQ ID NO: 187945 - protein, 136 aa, Glycine max
  unsure (1)..(136): unsure at all Xaa locations
  Clone ID: PAT_MRT3847_140729C.1.pep
LLHPLXLFLLISLALFAKSDAGSLVVYWGQNAGEGQLTKTCKTGLFHIVNIAFLSTFGNGSQPQINLAGHCSPASKGCKRLGKDIKNCQRRGIKVMLSIGGGTNTYSLSSPDDARQVADYIWANFLGGKSNSRPFG

SEQ ID NO: 187946 - protein, 80 aa, Glycine max
  Clone ID: PAT_MRT3847_14072C.1.pep
LRCMSKKKKKKKKKKKKKKKKKKKKKKKKKKKKKKKKKKKKKKKKKKKKKKKKKKKQKKKGGALLKGHFTPGVGEIFFFF

SEQ ID NO: 187947 - protein, 95 aa, Glycine max
  Clone ID: PAT_MRT3847_140730C.1.pep
TVCLLMNPSLRYLEYMFQVLFSCSKYGSSMISVNRCWSHGVIYSFIPLFQVSLAASSILLMLKWKNVLSYLFLSFFFFLEFNIVCHHKQLGVDCD

SEQ ID NO: 187948 - protein, 64 aa, Glycine max
  Clone ID: PAT_MRT3847_140731C.1.pep
FIMNVIHVNLVVIHLIRLVFKQRISFSSSLGKDGCYADLGFGLPSKTTYIVTALDMVGFKVTLP

SEQ ID NO: 187949 - protein, 58 aa, Glycine max
  Clone ID: PAT_MRT3847_140732C.1.pep
QALVQLDNINILRIIFDMFADRVCYTISIAAATFSTLSLVTTPLLFMMQVLLLMISRA

SEQ ID NO: 187950 - protein, 51 aa, Glycine max
  Clone ID: PAT_MRT3847_140733C.1.pep
SYAAPLGTLVRVLSIVVVGFTAQVAISVLLQHVLVCLSLLRALGWHGCPFA

SEQ ID NO: 187951 - protein, 58 aa, Glycine max
  Clone ID: PAT_MRT3847_140734C.1.pep
TGNHLANVLLFSNLKNLSLGLRIFRFYSVPPFCKKSPPLITGAELWISVFGGVMFDSP

SEQ ID NO: 187952 - protein, 34 aa, Glycine max
  Clone ID: PAT_MRT3847_140735C.1.pep
FLTIFCKRFKNLLEFYHLEFINFVVLHKDQNPIK

SEQ ID NO: 187953 - protein, 61 aa, Glycine max
  Clone ID: PAT_MRT3847_140736C.1.pep
YNHYLSLLKENFFKMALLPLSYKKFLTTFFYIQRILFHPCLFIIRYTNDSLSSWPLLSNYT

SEQ ID NO: 187954 - protein, 353 aa, Glycine max
  Clone ID: PAT_MRT3847_140737C.1.pep
VHICYLYALFLDDDVRLHPGSIGALTREMEKTPEIFIQTGYPLDLPSGSLGSYCIYEYHMPCSMGFATGGKTFFLWGGCMMMHADDFRQDRYGVVSGLKDGGYSDDMTLAAISGAHKRLITSPPVAVFPHPLASDLNFGRYWNYLRKQTFVLESYLTNVNWVMNRALFTTHCYLSWGFVAPYFMAMIHVAAAVRFYYKGFSPEEMAYTSGGLSLVAFLAICTLVELLSMWNLTRIEVQLCNMLSPEAPQLFLASYNWCLVFIAMLVDNFLYPVSAFRSHFSQSINWSGIRYYLKDGKISKIERTPRSKDMGPVFTDLGGKHLYGKKGLPTRGSFLSSLSRSLAQWHQPKKFDN

SEQ ID NO: 187955 - protein, 94 aa, Glycine max
  Clone ID: PAT_MRT3847_140738C.1.pep
EDNELDVISIRTMAQETLGDWGGTIATIAYVFLGYSSMVAYSSKSGEILFQLINLPAPVSGSLFTALFTMLVSIWGTRATDRVNQYLTASMIGA

SEQ ID NO: 187956 - protein, 51 aa, Glycine max
  Clone ID: PAT_MRT3847_140739C.1.pep
FLACTYEKTYICLKDVNLLNKSRYLKRLIFDFQLRDILIQKKKMINKRLSC

SEQ ID NO: 187957 - protein, 92 aa, Glycine max
  Clone ID: PAT_MRT3847_14073C.1.pep
QHTSRDQPMTNCKSLDMTCLIIWATEDPLAVTPFWNEMTEMVLAPLYTFYFPKKKRGCCCDFENVNFIYICSSVRETILSCGLIYMVSYYRF

SEQ ID NO: 187958 - protein, 156 aa, Glycine max
  unsure (1)..(156): unsure at all Xaa locations
  Clone ID: PAT_MRT3847_140740C.1.pep
PRVRGRVGLEPSFMMAKCDPRHGKYMACCLMYRGDVVPKDVNAAVATIKTKRTIQFVDWRPTGFKCVINYQPPSVVPGGDLSKVQSAVCMISNSTIVVEVFSRIDXHRFDLMYAKRAFVHWYTGEGMDEGECSEAREDLAALENDYDEVGADIHDC

SEQ ID NO: 187959 - protein, 162 aa, Glycine max
  Clone ID: PAT_MRT3847_140741C.1.pep
LLRGRLTWVEQRVAVRALGHLATYASTFPAIASHGEILELSIQLAMSSLEIVYSHFYQYVDRRLSYHCDLLTRGMGGVEMESRKAEEWASQLQCWSLQLINCFAFKHEFLPTICKPEFLIKLPGMWGGLVNENSPAGIGLLRTICHQKLGRGPVASCPGIID

SEQ ID NO: 187960 - protein, 92 aa, Glycine max
  Clone ID: PAT_MRT3847_140742C.1.pep
LKAEAYSLNLWHLIYQTPEAQIQYKNPITYSHQQVVYVNIIKSLHQKNRYNWATLTILYMTLSFHSTADDSPCRNQNIIYFSVFLSFIVNFN

SEQ ID NO: 187961 - protein, 436 aa, Glycine max
  Clone ID: PAT_MRT3847_140743C.1.pep
GGPDNDFGIKYNVNNGGPAPESVTDKIFQRTKEISAYKVLDAGELDLSKIGSSTYGPMEVEIVDSVKDYVTLLKDIFDFPLIKSFLQSNPSYRVLFDGLNGVTGPYAKAIFLDTLGLAPSSVQQCVPLPDFGGSHPDPNLTYAHSLVEVVERENIAFGAASDGDGDRNMIYGKGAFVTPSDSVAIIADWADVIPYFKKTGIRGLARSMPTSNAIDYVAKAKGFEIFEVPTGWKFFGNLMDAGRLSICGEESFGTGSDHIREKDGIWAVIAWLNIIAAANQKTPGTGINELLQDHYTKYGRSFFSRYDYEEVSSEGSKQFTDNLDALFASSSFVGSKHGEFIVKKTTNFSYTDPIDGSVSKNQGHIVLFEDGSRVVFRLSGTGSQGATVRVYIERYSKDPSQFKKDTAEGLQPLIDAALEFTKLKEYLGRDKPTVIT

SEQ ID NO: 187962 - protein, 80 aa, Glycine max
  Clone ID: PAT_MRT3847_140744C.1.pep
FLCLGCDSKVHAANKLASRHARVWVCEVCEQAPAHVTCKADAAALCLTCDHDIHSANPLARRHERVPVTPFYDTFNSDNS

SEQ ID NO: 187963 - protein, 59 aa, Glycine max
  Clone ID: PAT_MRT3847_140745C.1.pep
CSNSGFAFILCGAYHQMGISMVFLVQVTRLWATCRLVKKNRLYFLPKLIFSARNMLHVL

SEQ ID NO: 187964 - protein, 103 aa, Glycine max
  Clone ID: PAT_MRT3847_140746C.1.pep
DITLLGYFFSFINLLLIEEKRQITLTLNVETIGSPFPPPYFYANVALFLVEPTSIRGGLPPNTLILEPPMGSWVDPFYTFRELCSISFFSKWPGPRLTGMYGT

SEQ ID NO: 187965 - protein, 297 aa, Glycine max
  unsure (1)..(297): unsure at all Xaa locations
  Clone ID: PAT_MRT3847_140747C.1.pep
MLVAVMWKSIQEILQLTLSRAVFSFFFTFFFSCKFHFVGIIWSIHYFRWPLFASLGPVLYVSAGTFSLQCSSAAFTTLCSSAGAFFLLLFAFAFRLETPSVKLSGIILITSETILYTVAXEPDFDFWGFVLIVXAYGLKNPLVLMSYVSPVMAAATALLSLALDPWDEFRENKYFDNSLHITRSCLLMLLGGTLAFFMVLTEYVLVSVTSAVTVTIAGVVKEAVTILVAVLYFHDQFTWLKGFGLLTIMVGVSLFNWYKYLKLQKGHADGSDVAEHSRDSAAKYVILEEMEEQEDGI

SEQ ID NO: 187966 - protein, 41 aa, Glycine max
  unsure (1)..(41): unsure at all Xaa locations
  Clone ID: PAT_MRT3847_140748C.1.pep
FRTRLAGPXFPIVSRIRAWRXHGHRCFLCXIVIRSQFQHKQ

SEQ ID NO: 187967 - protein, 50 aa, Glycine max
  Clone ID: PAT_MRT3847_140749C.1.pep
GQNSNGESTMPGRLTSSLNYLRNQNSCQRSLKRTIFKLKQTMGNRQHRSN

SEQ ID NO: 187968 - protein, 87 aa, Glycine max
  Clone ID: PAT_MRT3847_14074C.1.pep
MFRLSPRRSQRSKGFKVKHALQLCVLLGVCIWLVYQLKHSKEKKSSYVESTKTTSEVVKFGRKDLHPRVEETSVVDARHKEEDEKEE

SEQ ID NO: 187969 - protein, 80 aa, Glycine max
  Clone ID: PAT_MRT3847_140750C.1.pep
VCFSSCGSFLGMIQLITRAAFTEIPGMAVAIYHSKNSRIDDENLGLERTNDVTTDPFYGLRTATMSPTKFDGTALAPRDK

SEQ ID NO: 187970 - protein, 139 aa, Glycine max
  unsure (1)..(139): unsure at all Xaa locations
  Clone ID: PAT_MRT3847_140751C.1.pep
TSVATICGLLKESFRVTFIHSNNIKTYLTSHHSTNTITSLFLIQNLTIYMLISPKNYKCIDXTIPTIFPINTSKPLQLXFHDSQQPILHIFXLHIPYLFFLIYTKLHDSXNFYLALLHFMAKLNSIPQKNFYWTTILNF

SEQ ID NO: 187971 - protein, 94 aa, Glycine max
  Clone ID: PAT_MRT3847_140752C.1.pep
PTRFFSIRPQTQHTSDVTGTCVGELHNTNVDNPELRAERVRGCRSGEASIAIHRYGILQIQATEDWGGHSEGWDVDQSSSHPLKEVVISKGGRT

SEQ ID NO: 187972 - protein, 53 aa, Glycine max
  Clone ID: PAT_MRT3847_140753C.1.pep
EVTQAVDYSPALTVTPSTLKRSFQPQRNHDAFENGNGLTSYNTGKMRTQPHPQ

SEQ ID NO: 187973 - protein, 36 aa, Glycine max
  Clone ID: PAT_MRT3847_140754C.1.pep
LEPNRLERLESTLLLCLVWGWFRAGNLTSHTLFNSI

SEQ ID NO: 187974 - protein, 41 aa, Glycine max
  Clone ID: PAT_MRT3847_140755C.1.pep
KLVLCADKWKDVILLMMSLRTLEGSFKPTHYLLFQYIYIIF

SEQ ID NO: 187975 - protein, 65 aa, Glycine max
  Clone ID: PAT_MRT3847_140756C.1.pep
LATIKCHLKTYICPTCYIGPSTIQRPLAWGMPSIVLAADSLASDFCPTRHFRPWHCLFNLNEPLF

SEQ ID NO: 187976 - protein, 37 aa, Glycine max
  Clone ID: PAT_MRT3847_140757C.1.pep
MNGSLTIHKILSILYFFKRTYFIFYIRLNYVFSLTNI

SEQ ID NO: 187977 - protein, 129 aa, Glycine max
  Clone ID: PAT_MRT3847_140758C.1.pep
FMSPLGIQFDVNTLASARLSQIQKMELWTPFASSGVESVRSAQVNLPLQAELNANSDQGISLKANLPKQKTQWASVHSLPITFTGKVDQNTKLVREPRQIVTIHDPKLERQQYELYSGPGQKNYGMPLH

SEQ ID NO: 187978 - protein, 92 aa, Glycine max
  unsure (1)..(92): unsure at all Xaa locations
  Clone ID: PAT_MRT3847_140759C.1.pep
FLCHLKKNMDGFSELNWVPTSGTCCDNRHFRRLGPGTLLLKGHNLXSVXDDEEDTSVAGQEQFNGSDFGENYSDAKLYAIKIYKEDDIDKSI

SEQ ID NO: 187979 - protein, 46 aa, Glycine max
  Clone ID: PAT_MRT3847_14075C.1.pep
ILLHLVHSNWGAVTHKHSFSNPFTCFPSLNFFLLGSSKLTICFFIP

SEQ ID NO: 187980 - protein, 293 aa, Glycine max
  Clone ID: PAT_MRT3847_140760C.1.pep
MNTCTIIMNSMPVPSPLLIKSFKTFPSFKCCSKSSDEKGSEDVKDTLSGVVDEQVEEFLSRKENKVLLDGLEKASQRVEMAKRELALIRKQEFAVKQLKDYVSQLESKVFEIGECQRDISEAKALVEEAERSLLVNVGGPENGSTSMGMKSEDIDRDEERWESVKAASISALVGTFSGLPICFTQVTNTTQLLLPLAINFICCALFGVTFRYTIRRNLDDVQLKTGVAAAFGVVKGLATLGGGPLPEPNIESFLSHAQEGTIYLSENLLIFVSAAVALDYCLKTRLLSPFPID

SEQ ID NO: 187981 - protein, 96 aa, Glycine max
  Clone ID: PAT_MRT3847_140761C.1.pep
VSFSASFHTNHRMQQLSPFSLPIDAQTSSRSPKRGPAQIPCVAMFVSSRFESSFDMALLGSYRDESSLVSPARLLDFSGVTFNGSRHGKTGLVLSP

SEQ ID NO: 187982 - protein, 76 aa, Glycine max
  Clone ID: PAT_MRT3847_140762C.1.pep
HASDRCAPIVTAIGCYTDRACLTSGTAKHSPNSQQYIYVLREAINRALYSKNLSQYLPKSTLTVVKTYNTSLATRC

SEQ ID NO: 187983 - protein, 61 aa, Glycine max
  unsure (1)..(61): unsure at all Xaa locations
  Clone ID: PAT_MRT3847_140763C.1.pep
VAAYTHPRPLNSAWVLDXLRLXRLRGITIDIALWKFETTKYYCTVIDAPGHTDFIYNMNTG

SEQ ID NO: 187984 - protein, 172 aa, Glycine max
  Clone ID: PAT_MRT3847_140764C.1.pep
ARQGKSFILNQLLGKSSGFQVASTHRPCTKGLWLWSAPLKKTALDGTEYSLLLLDSEGIDAYDQTGTYSTQIFSLAVLLSSMFIYNQMGGIDEASLDRLSLVTQMTKHIRVRASGGKTSASELGQFSPIFVWLLRDFYLDLTEDNRKITPRDYLEIALRPVQGSGKDIKAKN

SEQ ID NO: 187985 - protein, 50 aa, Glycine max
  Clone ID: PAT_MRT3847_140765C.1.pep
DSLHFNRCVHIVTGHRGSYHADSCTGCAARFNRPGTKGCTYMNTECFHVH

SEQ ID NO: 187986 - protein, 85 aa, Glycine max
  Clone ID: PAT_MRT3847_140766C.1.pep
KPKPHGKEKAISKKKTPAPSPNPKLRTPAGGGKSFLSGDPKPKYRPGGYHRETGKTQDLPKLKRLGHVPHFPCGRKGKRAQPRPL

SEQ ID NO: 187987 - protein, 68 aa, Glycine max
  Clone ID: PAT_MRT3847_140767C.1.pep
SRETLMDLTSCKEKTSHRSFFRALHLVGLRESKLGGDKGESQVGYLKTFVEQKNERGVYPTSRPPEED

SEQ ID NO: 187988 - protein, 193 aa, Glycine max
  Clone ID: PAT_MRT3847_140768C.1.pep
MPKSSTKMASVVYLLFGFHLIVIMSSSLPATSEVFAKQYPSTEPVEEKLTQLHFYFHNNITGEHPTAMKTVLPPKGSIHGFGATYMMDDPLTEGPSPTSKLVGRSQGIYALASQHEPGLLMVTNFLFTLGIYNGSTLSILGRNPTFIKVREMPIVGGTGIFKYARGSAVLTTYVYDITGGVAIVEYNVTVMHV

SEQ ID NO: 187989 - protein, 351 aa, Glycine max
  unsure (1)..(351): unsure at all Xaa locations
  Clone ID: PAT_MRT3847_140769C.1.pep
MNAESPPGLLMSVSCLSDYDLLCGEDSSGILSGESPECSFSDIDSSPPPPSPTTEDCYSIASFIEHERNFVPGFEYLSRFQSRSLDANAREESVGWILKVHAYYGFQPLTAYLAVNYMDRFLDSRRLPETNGWPLQLVSVACLSLAAKMEEPLVPSLLDLQIEGAKYIFEPRTIRRMELLVLGVLDWRLRSVTPLCFLAFFACKVDSTGTFIRFLISRATEIIVSNIQEASFLAYWPSCIAAAAILTAANEIPNWSVVKPEQAESWCQGIRKEKVIGCYQLMQELVINNNQRKLPTKVLPQLRVTTRTRMRSSTVSSFSSIIXSSSTSFSLSCKRRKLNNRLWVDDKGNSE

SEQ ID NO: 187990 - protein, 64 aa, Glycine max
  Clone ID: PAT_MRT3847_14076C.1.pep
GSTLIKLVMPCTKILGLTVMSSRSLGLIEVDDNDGRAYPCKGNEHEKDISPESFFLTLIDSFTE

SEQ ID NO: 187991 - protein, 147 aa, Glycine max
  Clone ID: PAT_MRT3847_140770C.1.pep
MNAEPPLPPALLMSVSCLSDYDLLCGEDTSGVLSGESPECSSSDIGSSPLPPSPPPSPTMTEDCYSIASFIEHERNFVPGFEYLSRFQSRSLDANAREESVAWILKVHAYYGFQPLTAYLAVNYMDRFLDSSQLPETNGWPLQLLSA

SEQ ID NO: 187992 - protein, 46 aa, Glycine max
  Clone ID: PAT_MRT3847_140771C.1.pep
KISEGSIYLRSRKLSHTFILQYYSITSPNKISLPPIITCYIPILNL

SEQ ID NO: 187993 - protein, 128 aa, Glycine max
  Clone ID: PAT_MRT3847_140772C.1.pep
DPKQQKRIRKRSFVAGFATLSVGFRLQGKSIAAATTSASFASWNRPNFPPKVYHPHGNMATGPADSYTETKCGVCHAGTDEHLLLLCDLCDTASHTYCVGLGYTVSDGDRFCHDCAISRETNINEESD

SEQ ID NO: 187994 - protein, 168 aa, Glycine max
  unsure (1)..(168): unsure at all Xaa locations
  Clone ID: PAT_MRT3847_140773C.1.pep
MSSLGSPKKRLRSQTAEENKEEVVCCGICYAERGVSITGEIDCCSHHFCFVCIMEXGPIFRQRFSYVRWLPMHGVFSSSRDVKVYHPHGNMATGPADSYTETKCGVCHAGTDEHLLLLCDLCDTASHTYCVGLGYTVSDGDWFCHDCAISRETNINEESDQQKFCATC

SEQ ID NO: 187995 - protein, 49 aa, Glycine max
  Clone ID: PAT_MRT3847_140774C.1.pep
NINKSSILLTHYEPQILRFISRWQSVSSFAPCDHSDFSRVRRGNHCVWG

SEQ ID NO: 187996 - protein, 94 aa, Glycine max
  Clone ID: PAT_MRT3847_140775C.1.pep
RVRYSSNNNHPFMQIKNTHCFAPCNSSTRPYAYPIINSQMELTNNLSLIDIVRSFSSFGALHTHNPIYARPSMRGPIHVLCNHEDPLLSISMVK

SEQ ID NO: 187997 - protein, 213 aa, Glycine max
  Clone ID: PAT_MRT3847_140776C.1.pep
SKFYICSFLLASSSVAIKFLSRNTKDGSYFKNLPKSSAIKLIDFGSTSFEHQDHSYVVSTRHYRAPEVILGLGWNYPRDLWTVGCILVELCSGEALFQTHENLEHLAMMERVLGPLPPHMVVRADRRAEKYFKRGTRLSWPDSSTSRESMRAVWKLPRLPNLIMQHVDHSAGDLIDLLQGLLRYDPSERLKAKEALRHPFFFTRDTKRYGYPL

SEQ ID NO: 187998 - protein, 103 aa, Glycine max
  Clone ID: PAT_MRT3847_140777C.1.pep
FKLYFIVLILTKALISNPQNVSQKHELSLDTQFSFSFLVQVVFSILIETKALISNVHTICSTATTHRSDPTSLHDPFGSRVGGTRHSGPRRHHRSRRHRRHDR

SEQ ID NO: 187999 - protein, 169 aa, Glycine max
  Clone ID: PAT_MRT3847_140778C.1.pep
WANASNDFGDNTCIESHLIRLETLYYADKEKIDVYIIELLAWLHHLISSVKSRQNTLRPMPTTRSPPKGLELQSKMRQFLILSVDSSNKPLGTQISHEDRRLLEEVIARRKSPGLSKSEDLGLAKKRHVKHLQVTKSAGSSPAKEFFGTRQVFNHQNYNVLDIMDGLGY

SEQ ID NO: 188000 - protein, 153 aa, Glycine max
  unsure (1)..(153): unsure at all Xaa locations
  Clone ID: PAT_MRT3847_140779C.1.pep
VHASLMLNGAKNPKLISGIAPLVLTLSNKCFFKKGTCADLXVISSGSEKNLTLTFSMSFSRSASQPRFFQHKKEAFWFYRFLSIVYDYVTNXGHXTKDMRDEALEPADLCDRNMRVVDVGGGTSFATLGIVKHVDAKNVXILDPLPHQLAKAK

SEQ ID NO: 188001 - protein, 53 aa, Glycine max
  unsure (1)..(53): unsure at all Xaa locations
  Clone ID: PAT_MRT3847_14077C.1.pep
WDSFFWALSPVXSRSARTLMVFIAGLVVYILRVAQWHVGRRQTLTPFETVKIY

SEQ ID NO: 188002 - protein, 250 aa, Glycine max
  unsure (1)..(250): unsure at all Xaa locations
  Clone ID: PAT_MRT3847_140780C.1.pep
LGALELGRWIHAYMRKCGVEVXRFVAGALINMYSRCGDIDEAQALFDGVRVKDVSTYNSMIGGLALHGKSIEAVELFSEMLKERVRPNGITFVGVLNACSHGGLVDLGGEIFESMEMIHGIEPEVEHYGCMVDILGRVGRLEEAFDFIGRMGVEADDKMLCSLLSACKIHKNIGMGEKVAKLLSEHYRIDSGSFIMLSNFYASLGRWSYAAEVREKMEKGGIIKEPGCSSIEVNNAIHEFFSGEPADAWS

SEQ ID NO: 188003 - protein, 84 aa, Glycine max
  Clone ID: PAT_MRT3847_140781C.1.pep
GGFISFHTPHPKKFSSPPKKQNRGTPPHDELWPRGWDFALNSLDIREHSKKKSAFPLKSFGMRFLRLPKVFLPHLEALPCIGFF

SEQ ID NO: 188004 - protein, 94 aa, Glycine max
  unsure (1)..(94): unsure at all Xaa locations
  Clone ID: PAT_MRT3847_140782C.1.pep
RPRVRRPPSAFFLFMGEFRGVFNKKHPENQTVSSLGKTSXTKWKTIFLFXKAPYVAKSEKRKVEYEKNXMRAYNKKQAEGPTCGDEKESEKSLS

SEQ ID NO: 188005 - protein, 47 aa, Glycine max
  Clone ID: PAT_MRT3847_140783C.1.pep
SRVLPIVVQGYVPVQDTKFLGIYYVIGPIIARVILSSSSAISSLNKS

SEQ ID NO: 188006 - protein, 114 aa, Glycine max
  Clone ID: PAT_MRT3847_140784C.1.pep
YDYTNNQSTYLADIVDVKDAPGNAPWDSSEDELFGDIDKALALKRNEWGYHGLVQPNPPKQDQLPVVGVDELQHGRASATRRKSSACRDSPVTETEAQPILRLNTILTVMVKVR

SEQ ID NO: 188007 - protein, 57 aa, Glycine max
  Clone ID: PAT_MRT3847_140785C.1.pep
KQSHLLDPLANRLTLMESYLNDSLFSEEDLDYDDYYYYITSEDEEVYYYETEPLFLR

SEQ ID NO: 188008 - protein, 124 aa, Glycine max
  unsure (1)..(124): unsure at all Xaa locations
  Clone ID: PAT_MRT3847_140786C.1.pep
PGILRAHMNFYATRDLSFPVADVXVTFIDDTAALPIPSNQIQDSSPCAHDAFPVCLIPRRLHIAPIEXVITSDSDNDTHMITTLINTVIDPTRREDVSLCMPILPLHNAASQSGYNTIILLSCI

SEQ ID NO: 188009 - protein, 76 aa, Glycine max
  Clone ID: PAT_MRT3847_140787C.1.pep
HKGVNVIKVSPVNVVLKQIKSGAKACFFHCQDPLCCHHNLCVRSTKSNASKISRPSLFRSLCSASAPHFLSLLIHS

SEQ ID NO: 188010 - protein, 83 aa, Glycine max
  Clone ID: PAT_MRT3847_140788C.1.pep
PGSTHASGSVVNVVALLTVFDEMVWGFGGWYLCRNNRGLCNTCWACCCVRDNFLLGYSLVVARGPLFRSWVVLHFSCHFQYAQ

SEQ ID NO: 188011 - protein, 106 aa, Glycine max
  Clone ID: PAT_MRT3847_140789C.1.pep
SATRSVEMALVLITTANFSKGIVLRTVCWSHAFFFFFQRQFQPLFFFFGGVRRLSRGHAGFPGSPLPPFENEFSRHLKGLGLLELWCTTTTTTPYSTRWAFKTFVH

SEQ ID NO: 188012 - protein, 304 aa, Glycine max
  Clone ID: PAT_MRT3847_14078C.1.pep
EAGDLKKLAEANETKREREKEKLAVERAIREARERAFADARERATLERAAAEARQKNISDGRERLGKTTSQANEKTPAEKAAMEAKLKAERAAVERATAEARARALERALSERAASDARNKSDKSVAGFGASRDNGIKHNFHSKSFSYGVRDSTDVSDGANGDSAQRCKARFERHQRIGERVAKALAEKNMRDCLVQKEQEERNRVAESLDADVKRWSSGKTGNLRALLSTLQYILGPDSGWQPIPLTDIVTTTAVKKAYRKATLFVHPDKLQQRGASIQQKYICEKVFDLLKEAWNRFNMEER

SEQ ID NO: 188013 - protein, 91 aa, Glycine max
  Clone ID: PAT_MRT3847_140790C.1.pep
IQKENYHYRVLNGQFTTLFGFISFLSLITSKLFFSFKNIPAIILGRHVRNNKVRSVNSFQIKFVNISFSNNKIKHNCFHHLKLSKIWEFAK

SEQ ID NO: 188014 - protein, 379 aa, Glycine max
  Clone ID: PAT_MRT3847_140791C.1.pep
GSRKKFGVTNNLNIRVCLITNAQCQIKESDEGTKEEQVTTIAKQMTAHGIKMESIIMRGKLSQDANKGIMDENDRLLNIFSKETSTRLLYVENPISLFGALRTRNIALVTVFRGHLEISPKLSIKVMVYKKTTEEKFPSMKKYSDKAPPNDKFAKHEVKIDYEHKSSKDPDKVVPPDQRIKGYPYGPQIVPISSAEWEAVKFKPEKGVKLMGFTDSSNVFRHHYMKDVYVFLPEPGNTRAMIAVSAVARAMKEMNKVAIVRCVWRQGQANVVIGVLTPNLSDKENIPDSFYLNVLPFAEDVREFQFPSFTNFPASWQPNGQQLEAAANLIKTLDLAPHGQHGVLLPDFTPNPVLERFDSYLELNHSIRFEQLTLTMAHS

SEQ ID NO: 188015 - protein, 132 aa, Glycine max
  Clone ID: PAT_MRT3847_140792C.1.pep
KNTNRFSFGVFSKSKTPSETTNIDHGFAGNFYRGGTLARGNPSKTLKGARLYRVNFFFKGAHLFCSEQNFGWEKKNFFSRVKKPRLGHKRKNLGHSKGKKNFFLSFPLKGEKNFPLMREKDLGGGKKNSNPL

SEQ ID NO: 188016 - protein, 66 aa, Glycine max
  unsure (1)..(66): unsure at all Xaa locations
  Clone ID: PAT_MRT3847_140793C.1.pep
EKVKNLKGSCAQHEVLPLKRAKKGIGKGSVHAMNKIKRLESMLXISISPAKPYNLTLKKNILSTFA

SEQ ID NO: 188017 - protein, 334 aa, Glycine max
  Clone ID: PAT_MRT3847_140794C.1.pep
FHLYFVTESNPSPVDFGFGIVEQCSEHDKILQCIMSESAEAGIGGVHISLLSDLMGLQLSGIDEPQKPLTPLIPKSKFFIPKLLLDIFQDSAFSSKITVHPDGQVTFMGTAIEMKDLLSVVADSYLLRKGEKQSMLVPHFSRMSINEVEVRSLSSTLDIHSTLTVPLKSPEKVKVKPSQKKNKKVARERDLFKKNYLHACESLLSLMVDKRRHRKTAILSLKKSGPELPELLTQFSASIAGTGLAVLLSVICKLACGRGVPFCAYKLLNTGFGFGLVWLSWAVNKLRDTIVCMNKNAGKLGLKDEEMIQKVDKSLREVYFRAAALLAVAVLRLA

SEQ ID NO: 188018 - protein, 115 aa, Glycine max
  Clone ID: PAT_MRT3847_140795C.1.pep
SRPLFFFSASPLGLMFSLLAVGVLPLGPCFRWLPAPFWGYCSFLPPFVRCGPLWGSLIPFRCAWLPRWCCLSFRLCPAPALFLAVAVVSLSCPSYSPAPAACFAHVRKPINFRGE

SEQ ID NO: 188019 - protein, 58 aa, Glycine max
  Clone ID: PAT_MRT3847_140796C.1.pep
TCESVYLSLKCNRMHRKLMCMRQLVSFNVPLVFGASCCFAQQFFRVSNSSSPKHAHIF

SEQ ID NO: 188020 - protein, 103 aa, Glycine max
  Clone ID: PAT_MRT3847_140797C.1.pep
GFPPGDSPPMVGFNLPQLGGPPVPLGRGVLLLRAVGPGLFGFASAPKTVAAARVVPFGCPLVFPFARFFISAPLHDFCWPFSHFRGSHARGRNLYISFSKEFN

SEQ ID NO: 188021 - protein, 55 aa, Glycine max
  Clone ID: PAT_MRT3847_140798C.1.pep
TLKSFENLCFSAVKAGHLQQWNGFGFPKSQLPKPFFEKKKKKKKKKKKKKKGRSS

SEQ ID NO: 188022 - protein, 86 aa, Glycine max
  unsure (1)..(86): unsure at all Xaa locations
  Clone ID: PAT_MRT3847_140799C.1.pep
XEDXXHDXLLYPXPLTHYFXXYNXRXLXPSFXNLDXLFXXNPSXDELSXXXXHXXTIXXXXSLLKXTIXXXXXXTYSCSXSHDRLS

SEQ ID NO: 188023 - protein, 43 aa, Glycine max
  Clone ID: PAT_MRT3847_14079C.1.pep
FLISHLPYQRKRHVHLIRDTGINHFNHWFQSTISPSLVHSNPL

SEQ ID NO: 188024 - protein, 88 aa, Glycine max
  Clone ID: PAT_MRT3847_1407C.1.pep
MAYNLCSSPSSLFHDLPSISSSSSSCRKFKLRNSSSFFQPSPSPTPHSKTLLHVSLHEPIPEHLPPHANSSSSSKSNYIWVNPRSPRA

SEQ ID NO: 188025 - protein, 54 aa, Glycine max
  Clone ID: PAT_MRT3847_140800C.1.pep
NSLKKTVSKFGSTMTMTGPNYLWTFFKGKSCYGFLIQALKQNLTLGGTGGFFDP
